United States Patent Application Publication US 2006/0134663 A1 - sequence listing, part 128

SEQ ID NO: 430882 - DNA, 1154 bp, Homo Sapiens
ccaactttgtacaaaaaagttggcccagcccgtcttcccgctccagtttagaacctaattcccaattcccggaccgggcccagccctgggctcttactgtccgcttttgctgggacctgttccacaaatgggcgtcttctgccttgggccgtgggggttgggccggaagctgcggacgcctgggaaggggccgctgcagctcttgagccgcctctgcggggaccacttgcaggccatcccagccaagaaggccccggctgggcaggaggagcctgggacgccgccctcctcgccgctgagtgccgagcagttggaccggatccagaggaacaaggccgcggccctgctcagactcgcggcccgcaacgtgcccgtgggctttggagagagctggaagaagcacctcagcggggagttcgggaaaccgtattttatcaagctaatgggatttgttgcagaagaaagaaagcattacactgtttatccacccccacaccaagtcttcacctggacccagatgtgtgacataaaagatgtgaaggttgtcatcctgggacaggatccatatcatggacctaatcaagctcacgggctctgctttagtgttcaaaggcctgttccgcctccgcccagtttggagaacatttataaagagttgtctacagacatagaggattttgttcatcctggccatggagatttatctgggtgggccaagcaaggtgttctccttctcaacgctgtcctcacggttcgtgcccatcaagccaactctcataaggagcgaggctgggagcagttcactgatgcagttgtgtcctggctaaatcagaactcgaatggccttgttttcttgctctggggctcttatgctcagaagaagggcagtgccattgataggaagcggcaccatgtactacagacggctcatccctcccctttgtcagtgtatagagggttctttggatgtagacacttttcaaagaccaatgagctgctgcagaagtctggcaagaagcccattgactggaaggagctgtgatcatcagctgaggggtggcctttgagaagctgctgttaacgtatttgccagttacgaagttccactgaaaattttcctattaattcttaagtactctgcataacggggaaaa

SEQ ID NO: 430883 - DNA, 1106 bp, Homo Sapiens
taataccagcaaaagctatttgcatctgccccaccagccaagaccaggctgctgcttgagagattcctgctcctctgctcagagagaatgatgtggtcactgatcactgtgagctcccagacgctcccaggaacgcaggcagtgaagctgcaataccatctgggggctcaaagggaatttcctcttcctggatattcctggttcaaggctctagggcttacctggcccactggcccctactggttcaggcctgtgaagggctgagggtggcttcaccaggcactgagtagacttaaggcacaaagtcagtttctccaacccaggcagggctggcctcggctgccctgggacttcttgggagccaagccctcccagggagaagaaacctcctgggccacacttaaagcttagaagtccgagtctggcgtaacaggcaaaccccagaaagtccactaccaagccatcccccagggaacagctttaagggggagagccgtctgccctccattgactcatgggggtccacccaagtctcttagggctggatccgagccccctgctgatctcaaaggtgggcaggtcctctctccaaaagggttggctccagtctcaaaaggggaggcaagggagaatgggctctgaacaaatcagggccacaggcttccccttccctccagggcacctgaaccagccctccaaccaccatatctggaaagaggtaaactggtcctgtcctggcccctagggggtggcaggcaggaaggcccaagaagtctctggctctcaggttccctctgtgccgtgaggggcgaccagctggaacagcaactccagtgtgaagacttccagtttcaccagtctcgggtagggccagtgaacagcagagctggcctgcagcgggctccagtgtaacaccattgcatccagtgttggggggtgcctgggcacccctggtccctggtgtggtgctgcctcaggagggcagctcagtcacacaggcggtagaagtggaagtggtagtctgtggctggctgggcgagagcctctgaactgcagttggcctgacccagcagtgccacccggaagtgataggtgaattcacccaa

SEQ ID NO: 430884 - DNA, 869 bp, Homo Sapiens
ttttggaacagctgatccgtctgttgggaggacagatatctcaaggccaggatggaagaatcaccactaagccgggcaccatcccgtggtggagtcaactttctcaatgtagcccggacctacatccccaacaccaaggtggaatgtcactacacccttcccccaggcaccatgcccagtgccagtgactggattggcatcttcaaggtggaggctgcctgtgttcgggattaccacacatttgtgtggtcttccgtgcctgaaagtacaactgatggttcccccattcacaccagtgtccagttccaagccagctacctgcccaaaccaggagctcagctctaccagttccgatatgtgaaccgccagggccaggtgtgtgggcagagcccccctttccagttccgagagccaaggcccatggatgaactggtgaccctggaggaggctgatgggggctctgacatcctgctggttgtccccaaggcaactgtgttacagaaccagctcgatgagagccagcaagaacggaatgacctgatgcagctgaagctacagctggagggacaggtgacagagctgaggagccgagtgcaggagctcgagagggctctggcaactgccaggcaggagcacacggagctgatggaacagtacaaggggatttcccggtcccatggggagatcacagaagagagggacatcctgagccggcaacagggagaccatgtggcacgcatcctggagctagaggatgacatccagaccatcagtgagaaagtgctgacgaaggaagtggagctggacaggcttagagacacagtgaagccctgactcgggaacaagagaagctccttgggcaactgaaa

SEQ ID NO: 430885 - DNA, 1120 bp, Homo Sapiens
  misc_feature (200)..(241): n is a, c, g, or t
  misc_feature (288)..(334): n is a, c, g, or t
  misc_feature (476)..(563): n is a, c, g, or t
ttggcggcggcagctctgctggtgcgggggcggcgagcccgggatcgagctaccgcggccgagcgcgccggccaccgcctgcaccgcccttccgcccgccctccggacggccgcagccctgcgggtctccgctccagacccacccccgccccaccccgcgcgcctctgccgcctcttccagagacccagcttgccgagcnnnnnnnnnnnnnnnnnnnnnnnnnnnnnnnnnnnnnnnnnnaggttccggccgcggccaccctccgccgtccagggcccctccgtctnnnnnnnnnnnnnnnnnnnnnnnnnnnnnnnnnnnnnnnnnnnnnnnaccatgtcggagaaaagcgtggaggcagcggccgagttgagcgccaaggacctgaaggagaagaaggagaaggtggaggagaaggcaagccggaaagagcgaaagaaagaagtggtggaggaggaggagaacggggctgagnnnnnnnnnnnnnnnnnnnnnnnnnnnnnnnnnnnnnnnnnnnnnnnnnnnnnnnnnnnnnnnnnnnnnnnnnnnnnnnnnnnnnnnnggcccgcgctgaagagagctgccgaagaggaggatgaagcggatcccaaacggcagaagacagaaaatggggcatcggcgtgagcccctgccaacaggctggggttgggaggcctctctgggcctggaggtgggggtgggggcagccaagtccagccactcttcacctggctccctgctctgggccctgcaccagagctgccaccctcttctttctccccagccttctcatttccgcctctccagacactgcgccctccaccctcactctgccattgttccacctcctgacctgctccatctgagctctccagctggcccccaattgctcctctctctctttgctctctttctccctcccctaccagcctcattcttcctccggtagcctctcccacctaacctctgcatcccccagcctcatgtcctgccccatccctatcctgcctgatccctggatctccctcagatcccctcttctcagacagcgccaggccggggtggggccggggttggggccgagccccacagctgccgccctccccctccctttttgta

SEQ ID NO: 430886 - DNA, 859 bp, Homo Sapiens
ttttggcggcgctgagggctttgtgcggcttccggggcgtcgcggcccaggtgctgcggcctggggctggagtccgattgccgattcagcccagcagaggtgttcggcagtggcagccagatgtggaatgggcacagcagtttgggggagctgttatgtacccaagcaaagaaacagcccactggaagcctccaccttggaatgatgtggaccctccaaaggacacaattgtgaagaacattaccctgaactttgggccccaacacccagcagcgcatggtgtcctgcgactagtgatggaattgagtggggagatggtgcggaagtgtgatcctcacatcgggctcctgcaccgaggcactgagaagctcattgaatacaagacctatcttcaggcccttccatactttgaccggctagactatgtgtccatgatgtgtaacgaacaggcctattctctagctgtggagaagttgctaaacatccggcctcctcctcgggcacagtggatccgagtgctgtttggagaaatcacacgtttgttgaaccacatcatggctgtgaccacacatgccctggaccttggggccatgacccctttcttctggctgtttgaagaaagggagaagatgtttgagttctacgagcgagtgtctggagcccgaatgcatgctgcttatatccggccaggaggagtgcaccaggacctaccccttgggcttatggatgacatttatcagttttctaagaacttctctcttcggcttgatgagttggaggagttgctgaccaacaataggatctggcgaaatcggacaattgacattggggttgtaacagcagaaaagcacttaactat

SEQ ID NO: 430887 - DNA, 896 bp, Homo Sapiens
gggaggagcatgaatcagctgttcttcgggaggagaaaaaggaaacaacaatcagaggctttggaatgctttctcttcatgtgcctggaacgctgggcgggcggtgacccggggctcggagccccaccctggccacacgtgctgtcgcccacggggtcctcacggtggggacccaggtcccacgacggctcccaacctgtggagctgtgtgcgcagccaccaccactgcggcctcagaagaggggccgggagccctggttctcaaactccgaccaggcgttattcagctccatgaagatcatcttggcgtgctgctcgtacggctgccccgcagccttgtcggggtgcacagccagcaccgcgcggcgatagtgcttcttcacttgctccggagccaccaggtcggccatgcccacgggcgtccagcggctctccccgtcccacagcactgtgtgcagcgtggacagcagggcccggatgttccgctccttgccctcaatccagtccaggagcttcagcttgagtgggtccgtgtctttagccaggtcctgcttcctcatctctgcaatggtctttggccctttcttgtcagacctggaggagaagccttgattggacaacagatcttcaaagtcgttctcagagacttttggcttttgagcaaagctgggtgcgcggaccccccgctcctcccgcgccccgatcacactgaagttcgaggcatagttaggccttggctgtgtgcaggctttggggggcggcttggcctgagggggccatgaggcgccctgggctggcggccgacttgtctgccaggagctgctgcctttgggcgtggtggccgttttgggaatgaagcccccaggagggaatccagcccaacttttttgtacaaa

SEQ ID NO: 430888 - DNA, 432 bp, Homo Sapiens
ataaaggtattttgggtttttttgttcatttattttgctgttcatcggatttcttgtcattcgggcgaggtcagcaggggaaggggacaccagccacatttcaccacaggcataggtggcactgagccacctggcactatctccacgtgctccacacggaggggtgccttctcactggcagcagctgcacttctctgcttctgcctcagctgcctctccgcctttgcacacacagtccttggcacacttctcacactccgcagggcagcaggagcagcagctcttcttgcaggaggtgcatttgcatccctcgcacttgcaggagtccgcgcaggtgcaggagccaccagaagggcaggggcaggtctcagggtccatgtcgaggagagcagcagctggaggcggtgaacgggcttctccaagccaacccaa

SEQ ID NO: 430889 - DNA, 720 bp, Homo Sapiens
tgcgagccttccatggtgcagcgcatgtgggccgaggcggccgggcctgctggcggcgccgagccgctgtttccgggctcccggcggagccgcagcgtgtgggacgccgtgcgcctggaggtgggcgtccccgacagctgcccggtggtgctgcacagcttcacgcagctagaccccgacctgccgcgcccggagagctccacgcaggagatcggtgaggggctgatcaacggagtcatctactccatctccctgcgcaaggtgcagctgcaccacggaggcaacaaggggcagcgctggctcgggtatgagaatgagtcggccctgaacctttatgagacttgcaaggtgcggaccgtgaaggctggcacgctggagaagctggtggagcacctggtgccagccttccagggcagcgacctctcctacgtcaccatcttcctgtgtacctatagagccttcaccaccacccaacaggtcctggacctgctgttcaaaaggtacggtagatgtgacgccctcacggcctcctctagatacggctgcatcctcccctattccgacgaggatggtggaccccaggaccaacttaaaaactggacagccaaaggggcttgggccggggcaagtggccttcagatggacaggggccggctcaagagcccagcctggctcaagggagcccaggcctctgactctgctgccacccacctgtcccca

SEQ ID NO: 430890 - DNA, 2015 bp, Homo Sapiens
ggaggtggctcaccgcccagtgccccgggggcccttccaggtcgggccgggctgtggagaagggtgtaagcggtcacgaccccgctccttgcagcctctggcctccttatgtctggagggctcccatttgattcagcccaaccctgcccgctaggcgtctggggataagggaagactcggcccgcctcgacagaaaatggggtctcagcactcgctgggtgacccgcgggagcaggcaaaggagggctcccaagtccgttctgcagcactggggcagggaacagacccaggatcctgggaatcctcttctgcctagctttgcctgcctgccagagcagggcctgcggtttgggtgctgtgaccgtccgggggcgggggaagggcaagggaggcggatctctgaagtcccgcccaacttcgctcctgatcccccaaggtcagagagggccagctgggcgggggctacggtccaggcccctcggaaacagacacaatgacctgggagggggtggtgctgagaataaattagggtcagctgggggctgtggccccgcgtctccgggtcgggaacagtccggtctggtgtccaggggtgcgagggcgtcccggagacggacggtgtgtccgcggcgagcgtcactggtcctgcatctgctgcttcatcctctgcagcatctcctgcatgcgcctcagttcctcatccttcatcctgataagcttctcagtctcggcgtccggggtgggcagcggcaggatcgggatggggctctccatgcggctgtcctgggtcagtttgctggtcatctgctggatgcagtgcgcgcggtagttctcgtagtgcacgtcgcacgtcacgtccttgaggtcgtgcatatgcgtgcggatgagcatgttgcgcagcttcacgaagtcgcaatgcgcctggttctccacctccacgatcccccaggggtacagtcggccccggacccgctgccccttggcctccaccaccgtgttgctgcctataacggcgaagggcgcgctctccttcagttcccggtcctgctgcttgaagtcctcatcctcgtccgagtcacactcagggaactggtatacatggatcccaaacttgtcaatctcctcccggatccgctccttcagcttccggatctcactggggacaagacagtcagctttggcgatgagaggcacgatgttgaccttctcatgcaatgccttcatgaaacccacatccactggccgcagcccatgcccgaagggggagatgaagtataggcagcagtgcactcggttgtcttggatgttctttcggttgaggccgctctcatcacggaagtactgctcaaactgctggtccacatagtcggtgatgggcttccagcactcggtgttgttgacagcgtccccgaatcccggcgtgtccacgatggtgagcttcagcttgactcccttctcctcaatgtccaccgtgtgttttagaatctctaccgtctggctgatgcgctcctcagcactgagcagcttccggtccttgtacaagtctgtcaggaagaggctgtggaccagtgtggacttccccaggcctgactcaccagccaccatgagtgtgaagtcaaagcctttcttcaccgacttgcggtgcacctggttgggcagtgtggcgaagcccacgtactgcttgtcaatgtccttgagccgcctctgggcctgggtccgcggcgacagcagctgctccaccaggcggtcctggggcgctgccagcgagtccatcgcggcgacccccccaggcccgggggcacgctcggaccccaggcccggtcaggccgccagagcccggcgacagcgagggaccttggcgcggctctgccttaggctgcgttgtccaccccgttttgcggacgcgggaagtgaggcctggacagggcacgtcgcctacccgggggatcgtcgacccccgaggccgaccgagccatccccctgactgggcgccaacttttttgtacaaagttggc

SEQ ID NO: 430891 - DNA, 898 bp, Homo Sapiens
agcaagatccttcttcagagttgagccagggctgggaggtaagagacccttttttcaggcagggtcacactaccaccctcagcatgacttccccaaaaagttatcctcctttagctcagcacttggcacttaaggaagaaaggaccaacaaaggtagcattaggaagacaagcccagatttatcaggatacccactcagccaactgctttagtgcttcttcatcttcatccactttgggagctggccctgccggcagatgagtagaaggtacactaggcaatttgactgagggttcttcttccttgtcgcccacatttaacaactcctgggccaattcctcctgctccagctcctctagctcctccagcagttcatcctcatccacatcatctccaaagcccataggccgagaaatggcatctgagatctgctgggccacctcctgttgttccgtgatgtcagtcatcagttcatctaccttgtcaatgtccatgtcctggtaggccttcttcatgctttgggcagcaagctccatggtacgaaggacttctgcattggtagtggcattctcaatggcctcacgctgaaactccagggtggataatgtcccgtcagtttgtgccagctgctgttcgaatcttttcttcctccgcaaagcctgtagggcagctctcttattcttggtcccatacttcttggctgtttgtagctcctgttgaatcttctgctccaaaaattcctgtttcttgatcagtatcttctctgtctccttcagtttctgtattgcttcttcaggggttggccctttctccttcttccccttcccgaagagcctgccgagaccactcatcgcgagctcgcctctcccgcctccgcccctcagcgtcctccagccaa

SEQ ID NO: 430892 - DNA, 882 bp, Homo Sapiens
cagaaagcacaaaaggaatatccataatccaatgaatgacagcttggtctcaggagcaagctttgtgttttgatccacaattttcttcatatttttcaacagatgattatttggaccacttctttctcattcacgtacactatcctatccaggtctggaaagttccggttcagatctattccctgggcattgcttcgacccacaaaccagtccttgagttcaccaggctgagacgctgccttctcaaagccatctgggttcagggaaggcatgatgtgaatgcgggtactgtggatcaggttgacaattgtctcgttccccttctggtattcgttgcataggtactgggccaagaaaatgagcagttctcgtccaacagcctcattcccatgcatattcccaatgtatttaaattcaggctcaccaggctcatggacgccagggttgtcggacagctcgatgaccaggagctcccggccctcgaagctgcgccccaccgtgtaaatcctgctgatggcggtgcactgcagccacacggacacgagcgcctcgcgcagctcggggtagcggtggtactcgaaggagatgccgtcctcttgctgcagccgccggcgccgcctcatgcccgccgcgggcgccccgggctcctgggcttcggcgcccaggagccacccgcaggcagccagtgccccgcacagagccagcagcgcgctgccccctcgcccggccatcgctgcgctccgccgccgccggccgtgccttcctacgcgggcggcctcttttgtctgcccggccctgggcttagcccgccggcgctgctgggggcggcaagttccgcaccagcctctactcgcctcaccttccccggctgaatgagtccaa

SEQ ID NO: 430893 - DNA, 831 bp, Homo Sapiens
tcttccttttcttcagcctcatcatcgcttacttctttatcacgttccttctccacaaaaagagtaatgggatatccaataaactgagaatgtttcttcacaatctcctttattcttcgttcctccaagtactcagtttggtcttctttcaggtgtaggataacttttgttccacgacccataggttcacctgtgtctgtcctcactgtgaatgatccccctgctgaggactcccaagcgtactgctcatcatcgttatgtttggtgatcacagttactttctcagcaaccaaataagcagaataaaaaccaacaccgaactggccaatcatagagatatctgcaccagcctgcaaagcttccatgaacgctttggtcccagacttggcgatagtaccaaggttattgatcaagtcagccttggtcattccaattccagtatccacaatagtgagagttcgatcttgtttgttcggtataaggttaatatgcagctctttcccagagtctaatttactgggatctgtcaagctttcataccggattttgtccaatgcatctgatgaatttgaaatgagctctctcagaaagatctctttgttcgagtagaaagtattgatgatcaatgacatcaactgggcaatttctgcctgaaaggcgaacgtctcaacctcctcctcctccatcggttggtcttgggtctgggtttcctcaggcatcttggctaagtgaccgcacaggaccaacggcacagccacacccaacttttttgtacaaaggggagccgttaaaggaaaagcattgctcatcaatgtgtcgcaacgaacaggt

SEQ ID NO: 430894 - DNA, 866 bp, Homo Sapiens
ttggccggttgcttgctgtcccagcggcgccccctcatcaccgtcgccatgcccggaggtctgcttctcggggacgtggctcccaactttgaggccaataccaccgtcggccgcatccgtttccacgactttctgggagactcatggggcattctcttctcccaccctcgggactttaccccagtgtgcaccacagagcttggcagagctgcaaagctggcaccagaatttgccaagaggaatgttaagttgattgccctttcaatagacagtgttgaggaccatcttgcctggagcaaggatatcaatgcttacaattgtgaagagcccacagaaaagttaccttttcccatcatcgatgataggaatcgggagcttgccatcctgttgggcatgctggatccagcagagaaggatgaaaagggcatgcctgtgacagctcgtgtggtgtttgtttttggtcctgataagaagctgaagctgtctatcctctacccagctaccactggcaggaactttgatgagattctcagggtagtcatctctctccagctgacagcagaaaaaagggttgccaccccagttgattggaaggatggggatagtgtgatggtccttccaaccatccctgaagaagaagccaaaaaacttttcccgaaaggagtcttcaccaaagagctcccatctggcaagaaatacctccgctacacaccccagccttaagtctcttggagaagctggtgctgtgagccagaggatgtcagctgccaattgtgttttcctgcagcaattccataaacacatcctggtgtcatcacagccaagtttttaggttgctataccaatggcttattaaatgaaaatgg

SEQ ID NO: 430895 - DNA, 745 bp, Homo Sapiens
ttgtacaagaaagtggggttttctgtttttttgtggttgttgtgtgttgagtaagagccacatttatttcttaattggacagagcctcaagtgcacgcacagtacaggagcctagggctaacactcgggtgtaagacatcgggacgggcgtcgtgacgtcgggacggcagctatgacatggggtctggggtgtgcccacagcaatcacatatgtacaagccagggacgcggcctctgagccacaggggaaccaggggacggactaactacaggaagcacaggcccagggagaaacgcaggtcgccacagctgctgtccgtctgggggaccgcacggcccggcaccgggggtaagggagtgtgccttccgtggtccccacatgggtgaggctggcataggaccagtgcagcagcacagtaaacacctgtgacatcagccccaccagggccccaggtgctggggactccagggaccagggttgacagggagggccacctcatcacagccgtcctgggtgggggagtttgtgcctgtgcagccggtggatgaaacattggcatcttctcagcgatgactcccagtgggaggccttggacttggcacccctaggcactggccgtgtcccatcagatcccaagtgctggtcggcctggagcccggcatccccatctatctggagccgcagcggaaggagctccccctttctggtggaggatggctgcccccaaaccaaaacaagccccaa

SEQ ID NO: 430896 - DNA, 838 bp, Homo Sapiens
gcagaggcgccagcagcatgacacctccacagccacccgcccggggttagtggaacatgcaaagctcggagggtggaggcaggggtggtcgctgctgagaccagggctgggtgcaacaggagggtcagcacagagcctggctggtgtccctgggcccaaagggggctggggctccatgggagagagacgggcaggcggcaccccagtgtggggctccacaagctggaggggcccctggacccaccaggaggacaggtctgcagttcccagccatgccggctggaacgtccgcctccccactgggtctgggtcctcggggcctggggttagaggccgacatggaaggcacttactaggggaacagaggctggaggctgacgccggaggccaggggtctcaggagtgagtgtggggggtgagctggaaagcacagatcagacagcactgtgggggctgggcccgagggcctcgtcttcccatggggaaggggcttctctgggtagactgggagagaggctgactggggccccccgtccccagcaaggcccaccgtgcaggccagtgctagaaacaccagggccctctacagacagggttgggcccagctgccctgtgcagctaggactggcaggcgggctaccctgggaagacaggagggtgggctggggcccagcttgggaccctccaaggcacctggctgtgtgagtggcaggtagaagggagtgaggagacccgagggggtgaggcggccagcagggctgggccagccctgtcccccaagatacaggctgtctggacagcagatatatattaatatattagtctggtctttttccaa

SEQ ID NO: 430897 - DNA, 534 bp, Homo Sapiens
ttgggcctagtgcctggccatgcacctggtgaaccccagctgcgacctgtgggggagctcagttgggccgacattgaccacctgcagacacacttccgctgccagtgctacttgggctggagtggtgagcaatgccaatgggaccataagcaggcagctggaggtgccagcgaggcctgggctgggtcccacctcaccagtctgctggctctggcagccctggcctttacctggaccttgtaggggtctcctgcctagctgcctagcaagctggcctctaccacaagggctctcttatgcatgtaagaccctgctgggggtggcaaactggagtctggagtgggcagagcccccaggaagcccaggagggcatccataccagctcgcacccccctgttctaagggggaggggaagtccctgggaggccccttctctccctgccagaggggaaggagggtacagctgggctggggaggacctgaccctactcccttgccctagatagtttattattattattattttggggtctc

SEQ ID NO: 430898 - DNA, 781 bp, Homo Sapiens
ctttaatgattctcttcctttttcacaactgtgcagtcactgtcctattgtgttctattctgaaaaacaaatttttttgaaggtcaagtttttcaatggcacaaaactatttggaatgaacccaaaagatagcggaaagttgggtccctcctcaagtagtttcctcctcttttaacagcatctaactactctctatcaataatctcatcacagccgagttcttcggtcagacgattgacaaccatcagtgaaaaaagctcttcgataaaagctaactgatcaaacggggtcttctcataatgcatctgaaacccgccatccagggctggttctcttgttctcagaaacatcttgtcggcttcttcaagagcggctgatactctgtagccggcaccactgagctgctcctcttcgggatagtcgtagtcgtcctcccagtcatcaaattcctcgccctcgtcctcgctctcgaagtctgcgcccgccacctggcctggctgctccccagcgttgggcccgttagcaaggctccgtttcccctctggcgccgccattggctgggcctcctcctcctccattgggccttcctcctcgagctgttgggccccgctgcgggagggacgcagggatagctcccggctcccgctgcctacctccatctgcggaaggtcaccctcgccaggcatcacatccatctgcaggtcactgctctcttcatacagctcggacaactcagccatttccgacattgtgcaaaccgctcaacctctaggaaaaccaa

SEQ ID NO: 430899 - DNA, 1366 bp, Homo Sapiens
cagtcatgaggggctccctatcctcccatcctatggtcccaggtgcagcaatgagagaggggaagggaagagagaaaggaagacaagttggtgccaggtgaaggcatctctgctctgcatagctatttggccctggccatgactacaagcaaaagtgggtgcagatggctgggccaagggctgtggtatggagtggatactcagtaggcatggttggcaatgtagagtgactgtgctgctgctccaccatcttctccactgccttcatacttgccctgggctgcaagcccattcacctcagcccgcttgatgaactcctcagtggcagccccagcattgtcccgttgccctcgccaggcattgagtgcagaggcttgcagggcacgcccataggagaaggtaagcgcccagggtcggggaagggggcagcggttgatggcattgaggttgaatgatgcctcttcttcgctctgacccccagacaggaaggtcactcctgggacagctgggggcacagtgcgacgcagggcagtgacagttgccatggcaatctcctctggggtatacttgatgggacaggcatggcccggggtcaccatgttgggcttgagcagggtcccctccaggtatacatgatggtcactcagggccttgtacacagcagccaagaccttctctgtaacatactgacaacgtttgaggtcgtggtctccatcaggcaatatttcaggttccacaataggcacaatgccattctgctggcagatactggcataacgggccagcacgttggcgttctccagaatggcaagtgcagagggtgtacgctcactgattttcagcacacagcgccacttggcaaagtcagcaccatccttcttgtattgggcacagcgttctgagagcccatccagcccttgagtggtggtttctccatcagtcccagctagaggcaccacacccttgtcaaccttgatgcccacgacgatgcccttatcctggatggttcggacgaagggaacaccattatcatctttctggtagagggtctcatggaagaaaatgacgcctccaatgcactttttcacacggtcatcagcactgaacaggacctggcggtacagccggcggttctcctctgtgttttccaccccaatttggctcagccgcttggccatgctgcctacagactcatccgcagccagaatgcctttgcccggggctacaatccgcagggcaatgtcagacaactccttcttctgctcagcagaaagggctgggtacgagtgaggcatggtgacagctccctgtgcgcagccagttagcagccgcagccacaagcacagctcgggttctgatcccccaa

SEQ ID NO: 430900 - DNA, 1717 bp, Homo Sapiens
gggccactgcgccacgctggccaaggggtctgcactcacggctggctgctttaggtgcggccaaggtcgcgttttctagagtgggtttcgtttcctcggggtcgcatgtgcgtggatgtgtgtagatcgattttaaagagggggcagacacctgtgccctccttgtctctgtgggagccctgcccgggtatgcagccgggtgggagggtgcccagaagagacgacgggagaggcaggtgtggtcattagtcacattggaaaaccctagagtctggaaaaaagcctgccaaaataaaagtccaaacaaacagtaataatagcatctaaataaatatggagttttcatgttgtggccatcatcctttatttacaatcaatcaatcaatcacatgtccccaaactttcattacaagtcgtgtcctgggagccaggctgcccgtgtccctgcagtcagtggcagaggcagctgtttgggaccattgtgggggccccacaggaccccagacgtcccagccaagggggcgggaggcaggggtgacggctgccctgccccgggagccgcgtccctcggaggtgccagttcgctccgcacagcttcagggaggaaagacacacactccacaccacgcacagctaccgagacacaccctggcttgtgcagggagaagacagtccagaacgtggcaaaatacttggaacgctttacaaacaaacatttgttctgtgactctcctttgataaagacatacccctttttggcaaaatgaaaaaaatcaagtgggtggtgagggcacacctttggggagccagcgtccgtggctgggctgtggcgtcggggtcaagtctgcggcccggctcccagctctctgggcccgggcggccctgcccggtgtcctggctgcgtggccaggctggggtggcctagatgtacagcggggtctcctgacccgtgaggagcctgaacatggcggcgggcatggtcttcatgtggatctctccgaccgagttggacagagcttggactatcttctcgtgggctgtggccaccacgctctgcccgttgatctcgatgatgcggtggcccacacggacgccccctcgctcagcagtgccccctctcatgaggctgcagataattccattctgcacgctgaagcccagctggtacttgaggtctggccgcttgataaggaccgtggtgaccgggggacagctgacaatgttgagcttcacctgtgtctggttcttcaggcccttgatgatgccttggcaggtggcgaggggcagccccaccaggctggtgccattgatggacatgatctggtccccgatgctcagcttccccgagcgggcagccgggccgccattcatcatgttggccaggatcaccgtgggcaggatggagccccagcccgactccaccaccaccacgcccaggatctcgcccttgtgcttctccagctgcagctccttgcagttctccgagtttgagaagtggatgaggtcgtcgttgtacatctcctgggtgttgatgatgtcgctgtattccttctggctcaagtcttcggggttgatgccattggctcgcaggaactcctggtaggccacgctgaaggcctggccgatagactgggcgaagagctgggcatcccaacttttttgtacaaagttggctattaaagagaaaagcattgctcatcaatttgttgcaacgaac

SEQ ID NO: 430901 - DNA, 897 bp, Homo Sapiens
tacaaaaaagttggggcctcaactattttgcgcgtgctcaatgtctctggcaaccagctgaccacactggaggaatcagtcttccactcggtgggcaacctggagacactcatcctggactccaacccgctggcctgcgactgtcggctcctgtgggtgttccggcgccgctggcggctcaacttcaaccggcagcagcccacgtgcgccacgcccgagtttgtccagggcaaggagttcaaggacttccctgatgtgctactgcccaactacttcacctgccgccgcgcccgcatccgggaccgcaaggcccagcaggtgtttgtggacgagggccacacggtgcagtttgtgtgccgggccgatggcgacccgccgcccgccatcctctggctctcaccccgaaagcacctggtctcagccaagagcaatgggcggctcacagtcttccctgatggcacgctggaggtgcgctacgcccaggtacaggacaacggcacgtacctgtgcatcgcggccaacgcgggcggcaacgactccatgcccgcccacctgcatgtgcgcagctactcgcccgactggccccatcagcccaacaagaccttcgctttcatctccaaccagccgggcgagggagaggccaacagcacccgcgccactgtgcctttccccttcgacatcaagaccctcatcatcgccaccaccatgggcttcatctctttcctgggcgtcgtcctcttctgcctggtgctgctgtttctctggagccggggcaagggcaacacaaagcacaacatcgagatcgagtatgtgccccgaaagtcggacgcaggcatcagctccgccgacgcgccccgcaagttcaacatgaagatgatatgaggccggggcgggggg

SEQ ID NO: 430902 - DNA, 607 bp, Homo Sapiens
gcccaggaccctctgcatctcagaaaggtttattatcaattgaaggaggtaacatgtagcctttgctggggacaaagatgcaacaagtctctgccccatcctaggtgctgccccgtgtagggctcttcccaggcccgccccccttgggcagcctggtagcgctgggctggcgtggcatcctctggctggatccttcgcggctgctgcgttccgccagggccaatgctcccccgagggcagcgctgcctttgtttctccctcgggtctcgggcacgctcgacgtgggcagagacacggccgcagggtcctggggctcgctcgctagcctctgcccggcacacatggacttgagcatctggaagacggcgaggggggccacgttcagcttcagcaggtccaccaggatcttgaacacgtcggggtcgatagcgccgcccgccgcctgcgccagctcgtacagctccatctcctcggtgctcagcaccttcttccgccgcagcgccagcttctgccgggccgcctccagccccgggggcgccgccgaccccggcccaggccctacgccctgcgccgccatccccgcggcccgcggaaaggtgcgctccaa

SEQ ID NO: 430903 - DNA, 901 bp, Homo Sapiens
ccaactttgtacaaaaaagttgggaagatggcggtggagtcgcgcgttacccaggaggaaattaagaaggagccagagaaaccgatcgaccgcgagaagacatgcccactgttgctacgggtcttcaccaccaataacggccgccaccaccgaatggacgagttctcccggggaaatgtaccgtccagcgagttgcagatctacacttggatggatgcaactttgaaagaactgacaagcttagtaaaagaagtctacccagaagctagaaagaagggcactcacttcaattttgcaatcgtttttacagatgttaaaagacctggctatcgagttaaggagattggcagcaccatgtctggcagaaaggggactgatgattccatgaccctgcagtcgcagaagttccagataggagattacttggacatagcaattacccctccaaatcgggcaccacctccttcagggcgcatgagaccatattaaattctatttactatttgttgaatttatttttccgtcagttatgtaaaataaacatactcttcttcctcccctgattattgccattaagcctttaaattctaaacaaattataatgcatcatctatttaggagttagatttggatgtgctattgtatgattacgaatagtctgtatgtttcaagcccttctgtaaaatatgaagaaaagtgctcttagcattctgtgtaaaactgtactgttaaatatatgtgtgtaatcagcctgagtgtgaaagttaatggaggcctgggaacagggtttatactaagtagtggaggagcgtatggttaaccccaaaggggcagaacaagaaagccacgggattgtatgaaatcaaacatgagtttgtggtgtagactgctgtatgcagtt

SEQ ID NO: 430904 - DNA, 987 bp, Homo Sapiens
acaaaaaagttgggtgggaggcacgtaagaccgctctgggcacgggggcgctcacctcactggctcgttcggttctaggagcagatccggggtagagggaaaagagctccgggccaggggctgccgtcgccgccgtcggggagtcagcccgccagcccgccagctcgtcagcccgccagccagcgcttcgcgggccctgtcggtcccgatcagaccaaacattgtctggcttgcactgtaaaactagttagctgaagacgacttctcaggtttcttcaggatgcctgcagcacttgtggagaatagccaggttatctgtgaagtgtgggccagtaatctagaagaagagatgaggaagatccgagaaatcgtgctcagttacagttatattgccatggacacagaatttccaggtgttgtggtgcgaccaattggtgaatttcgtagttccatagattaccaatatcagcttctgcggtgcaatgttgaccttttaaaaattatccagctgggccttacattcacaaatgagaagggagagtatccttctggaatcaatacttggcagttcaatttcaaatttaaccttacagaggacatgtactcccaggattccatagatctccttgctaactcaggactacagtttcagaagcatgaagaggaagggattgacacactgcactttgcagagctgcttatgacatcaggagtggttctctgtgacaatgtcaaatggctttcatttcatagtggctatgattttggctatatggtaaagttgcttacagattctcgtttgccagaagaggaacatgaattctttcatattctgaaccttttcttcccatccatttatgatgtgaaatacctgatgaagagctgcaaaaatcttaagggaggtcttcataagttgctgatcagttggatttgcagaggattggaaggcagcaccaggcagctcagactcactgctgacaggaatgg

SEQ ID NO: 430905 - DNA, 938 bp, Homo Sapiens
tttgtacaaaaaagttggccggggcacaccattaacaaaaaagcgcagcgggttgggtggcagcagcatcgagtagcggccgcttaggcagcaacatccgcaacaagtgtagacaaggtcccgcctgactccgctctggaaagtccttttgaagaaatggccctggtgaggggcggctggctgtggagacagagctccatcctccgccgctggaagcggaactggtttgccctgtggctggacgggaccctgggatactaccacgatgagacagcgcaggacgaggaggaccgtgtgctcatccacttcaatgtccgtgacataaagatcggcccagagtgccatgatgtgcagcccccagagggccggagccgagatggcctgctgactgtgaacctacgggaaggcggccgcctgcacctctgtgcggagaccaaggatgatgccctagcatggaagacagcactgctggaggcaaactccaccccggtgcgcgtctacagcccgtaccaagactactacgaggtggtgccccccaatgcacacgaggccacgtatgtccgcagctactacggaccgccctacgcaggccctggcgtgacgcacgtgatagtgcgggaggatccctgctacagcgccggcgcccctctggccatgggcatgcttgcgggagccgccactggggcggcgctgggctcgctcatgtggtcgccctgctggttctgagccctgggactcggagcactgacccctgcgcttggattgctagactcctcttcctcctggaccccatcctctaccatccaagccctgtcccactttggccctatcctctccattagctccttccgggtttggaccattccccccactccctacccttaatccccacatgggaagaagctatcatcacagtacaaacatcgcttgaagtcttc

SEQ ID NO: 430906 - DNA, 678 bp, Homo Sapiens
atatacatggtttattcctccccagccccagacaagccccaggcacgctttataggggcatggagatgcccacaccctgtctctcagaagctgggtctctggagaccgggatggggagaagggggaagccctagcaagacgcagctccccctcagcctcagcgccccccccgcagagaggggacatagaaggaaaaaggaaggtgacacaggactggggttcaaatactcagaaagccacacaatagaagacaaaaagtagcaagcccccaagaaagcggggacaaggaggaaccagtgcccgatcccgccctcttcccagctggggcactgcgtccccaggactccgtggggcaaggggtgggactgggaggagaggaaggatttgggggtggaggggctcaaggctggacccaccctgcccttggactcctgggctcagggcaagtgaggcccgaggggccccctgcagttggcagtgatggggccagtggaggcctacagcttggtcaggtccagcttcagcttgtagggtggtaggctgtcctcacaggcgtgggacggcggcgggtacaagggccaatcgggctccatcatgaagcccttgtgctgctccagggtcagaggctggaacttgaggtgctggccaggcgcggtcaccagggtggagcagctccaa

SEQ ID NO: 430907 - DNA, 934 bp, Homo Sapiens
tcagctggcaggctccccttgtgtcagaggagtacatagcaggtacaaggaggaggcagaaggagactagtaggaccaagatgcaggtgctgctgctgctggttttgtttgatatctcaatcaccatggcctggagtttcctcagttgatctagaagggacaaattctgttcctccagaagctgtactttgttctgaagctccatattctgggctgtgtatttcaagaccctgctctctaaacccccaacatacaccttctttttcctgcggctctcttgagcagatcttttatttcgaatcttcctccgcacacgtttcagaatttgttcctctgtcttagtgagaggaagtgtctcaggcagaataagcccctccttctccaatagactcttctcctcatctgtcagtactagcctagcaatctcctgctctgccagctcctccatatgctgtggagtcatctgggtcccctcttttctacagctctcactctctagatccatagagacagtttcccgtgggagggagtaggtgtggtcatggtggacaaggcaggggttggaggagctgagaatgttcaacgacgctgggggactcagcagggagcacagcaaatcatctacttcccagtcgctcggtacctcagaaagcggcagcgcccagtccagtggggccctcacggcctcatcgggtgccgtccccaaatctccactttcctctagcaggaaggccagcaggtcttggtcaccagcatccaattccagctccatttgggacaactacggaaagggtgggccaccgggccccaacgtccgaagcccagacacgagccccaggccagctgtaggcctcgggcacctatccactgtccctctacggccgggattccccgccggcggctttccatagccctctccggacccgcctcccaa

SEQ ID NO: 430908 - DNA, 1014 bp, Homo Sapiens
ttggcgccgtgaaggacgggatcctcctggccaccgggctgcacgtccaccggaacagcgcccacagcgcaggggtgggcgccatctttgacagggtgctgacggagcttgtgtccaagatgcgggacatgcagatggacaagacggagctgggctgcctgcgcgccatcgtcctctttaaccctgactccaaggggctctcgaacccggccgaggtggaggcgctgagggagaaggtctatgcgtccttggaggcctactgcaagcacaagtacccagagcagccgggaaggttcgctaagctcttgctccgcctgccggctctgcgctccatcgggctcaaatgcctggaacatctcttcttcttcaagctcatcggggacacacccattgacaccttccttatggagatgctggaggcgccgcaccaaatgacttaggcctgcgggcccatcctttgtgcccacccgttctggccaccctgcctggacgccagctgttcttctcagcctgagccctgtccctgcccttctctgcctggcctgtttggactttggggcacagcctgtcactgctctgcctaagagatgtgttgtcaccctccttatttctgttactacttgtctgtggcccagggcagtggctttcctgaggcagcagccttcgtggcaagaactagcgtgagcccagccaggcgcctccccaccgggctctcaggacaccctgccacaccccacggggcttgggcgactacagggtcttcgggccccagccctggagctgcagagttgggaacggggcttttgtttccgttgctgtttatcgatgctggttttcagaattcctgtgtggccctcctgtctggagtgacatcttcatctgctctgaatactggtgcccagccagcccgtgacagcttccccctaatcaggaggggacagctgggggcgcaagctggtgtgtcatcagcaaagacctcagccgcctcggggatgagaggggactcgtggggca

SEQ ID NO: 430909 - DNA, 870 bp, Homo Sapiens
caagttcctccagcacgaagctggcctgcccgggcccaggtgtgagggactgttctgctcccagcagcgcctgctgacgcttccctctgcggtctcggcgcaagcgtctgtccctggccgccctcggagccgtgcccagcctggcatgcatatgcggtggttaaggatacagttaaagggtcaatcacgcgtgtccacgacagagacgcacgcggcctcacaccgactcctcggtggacagcaataatgggttgatatactcaaagccttcgaactctgactggtcgatcctctttatggcatcctcatcgtctggggtcagctgcacgggctcgctggtgaactgtgtgtcaaagttgtccagaccgtagtcgtctgtgatctgtggctggaatggagggagcgcctgcttcttctccagcaagtcccagtctatgctgcggaagaacgcgtgggacttgatgtcagaaaatccagtctgtggccggcagccgagcctctctttggggtccttatttaaaaatccttttaaaacatgggaggctttgacggacaggaaccgggggatccggatgggcttctccaggatcacttggaaaaggtagtcctctgtgttcatgtccgggttgtcggtgatgatgtcgaacggggagcgcccggccatcatctcaaacatgaggactcccagcgcccaccagtccacgctgaacccgtactcctctccccgcaggatttcgggggcgatgtaattcggggttccgcagaaagtgctcgttgtgtcaccagggcccaggccttccttgcacatgccgtagtctgtgagcttgatgtgcccgtccgcatccaggaggacgttgtccagcttcccaa

SEQ ID NO: 430910 - DNA, 737 bp, Homo Sapiens
aggtggacaggaagtagaatttattggtgagtattaagaggggggcagcacattggaagccctcatgagtgcagggcccgccacttgtccagagggccacgactggggatgtacttgaccccacagccatctgggatgagccgcttttcagccaccatgtcttcaaattcatcagcattgaacttggtgaagccccacttctttgagatgtggatcttctggcggccaggaaacttgaacttggccctgcgcagggcctcaatcacatgctccttgttctgcagcttggtgcggatggacatgataacttggccaatgtgaaccctggccacagtgccctggggctttccaaaggcacctcgcatgcctgtttggagcctgtcagccccagcacaggacaacatcttgttgatgcggatgacgtggaaggggtggagccgcacccggatatggaagccatctttgccacaactttttaccatgtacttattggcacaaattcgggcagcctccagggcttcagaggacagctgctcatattcatctgacaccatgtggccacaaagcggaaactcatccacttttgcctttttccgccccaggtcaaaaatgcgaatcttggcatcagggacacctcggcagaagcgagactttgggtacggcttgttcttacaataccggtaacaacgggcggggcggcggcccatggcgacaccaggatcttcagtggcacccaa

SEQ ID NO: 430911 - DNA, 1102 bp, Homo Sapiens
ccaaaaaggatgacactggcgaaggcattcttcctcagcttgtccagtcgctggaacattccagtgatgagattgcagctcatgaaggtctgagtgagttcttcagggaagcgatactctgagtaccacagggaccagccgtccttatcaaagtgctcccagaaatatggcaggggggacggagagtgtgtcctcattggagtacttgcgcttaaattcaaaaaacacaaaggtactcttgggcaggtgagcgaaggggtccttggccttgggctcagcagccagcgcctgctcacattcatccatctcctcctcaggagcaggggcagccgcctttttctcctccttccgctcagcctggggcttctgcttctcttcccgtgaacccttctctttccgtggtgtgtcctttttaggttgggtctctgcaaactttttagcatcaaactgggccatcttctcacacagtttcacttcccccaagacagcccggaactggggctggttaatgcaggtgaggaaccagcggttggtattgggaaaggcctggcggaaagaaggctctagaacctgcttatagagccacaacagggtgcagacaactgtgatgtcagccaatgtcactcgttcgcccaccagaaaagtcctcgtcttcaagtaagcatccagcagccccagaattcgcctcacttcctcctttgcattctcagtggcctgtttgttgtggtgcatgatgcccaaggtggggaacacccaggtactggctgggggcactatatcggaatcagcaaagctcacccactgcaccacctgggctgctgcctctggagtacttccccgcagctcctcattgctcacatagtaggcaatggcgttgctctcaaacacacagaatccatcatcaccctcaaatgctgggaccttgccggcaggaaatttgcggagaaattcaggggtgcggttggtttggccaaaatggaagtggggtggtgcggagagcacgcggacctgagccccgctgtactgagcagcgatgagagccttgaaggccctccagttttcaggatacgtgtacagggtcccagccgccatggtgatccaa

SEQ ID NO: 430912 - DNA, 1448 bp, Homo Sapiens
caaactgatcacactgcttctggtaagggtctggcaggaagctgcagcttttctcaagagcagccaggatctctgcttggtgctgttttctccaggttgcgatccaaataacccaccagcttcttgcacacttcgcagaagccaccgtcctttggctgagtcacgtgaacggtcagtgcaggcagccgcgtgccagagcagaggtgcagcatgctgcacaccagctcagggctgacctcctccagcaggatggacaggatggagctgccgtacgtgtccaccacctcctggcactcttccgacagggacttcggcagcttcgagcacattttgtcaaaagcgtcgagtatttctttctcagtcttgttgttgtcaatcagcttggtcacctccttcaccaggaattcacacacctcacagtaaacatcagactttgctgggacctcgtgcttcttaatgggctccaccagttccagggcagggatgacattcttggaggccactttggcggggaccagagtctgcatgggcatctctttcacctcatcacagaacccaaccagcgcacagatctccttgggttgcatgtgcatcatcatctggatagcaatttcagaatactggctgatatagttcttgcatatgtcggccatgccagggcccaggcggtcacactcctccttgacatgttccaccaaggcctggacaaaggtggagttggtccgtacagcagtctggatgtcagtcaccatctgaatgcagtcctggcaaacgtccccattatcctttggctggggcttgctgcgggggccgtcctgagggtagaggaggagagggatgttggccatgaagggggccaccacctcagtcatgtccagctctgggatcttattggactccagctgcttctggtgattcagctctgctaggtgcttctggagagactcgcagaggttgagagcagagcacacctccccaggacggctcatttctcctttaatgatgtccaggatgacagggaggtaggagtccactatctccttgcatgaagcagacatgttcggtttcggaagccagtcacaggtcttctccaagtaaacaaggatctcctcctcagtggcattgtccttcagcatatcaccagctgcggtgacaacgtctttgcatatgtcgcagggaagggatttcactgttggcttgttccaaacggtctgcaggcagtgcttcactgccccgcagtcggacgccgtcttcacattctggcaccacactgccgagcccctggtgcattctttcagtccaaggaccgggccggctagagccgcgcccaggaggctggccaggaggaagagggcgtacatagcgccgtctgactccgcagtctgcaatgcggagcgtcagctgatcccccgcagatataaatctgccctgccccaaagccgtcccaa

SEQ ID NO: 430913 - DNA, 499 bp, Homo Sapiens
aggtatttagtggctttttatttcccatgtttctcctgcagatggaatgaaacctccaaaaaagaggttctcggcagccgcctagagaccacccaaatgctggctaaagccatcaccaaagcccctcaaccccccaaggcctgggtcttagtcacaggtgtaggtatgccccccaaatcaccagccccttatattcaccaggggaacggggtaactcagacctctgtagctatgcacacaccagagcactggtcttttccaggcaaaatgacttcctaggcccttgatccatgcatgtttctcctaacctttgtgtactttcactaagaaattgagaccctgaaaaaacagtggggagtggcatcactcaatgccagggaaaagtccacctatcccaaagtcccttacttctcacaccatagttctttaggaacagagttcctggtcacctttgggaccaagtaattgcaaacaattatacacaccagccactatttga

SEQ ID NO: 430914 - DNA, 931 bp, Homo Sapiens
gggccagttggtggcaaaggcaaagagttaagatgggagacgcagcattgtaggctgtgtggttagagcctcgctattagagaaagggggatttctacgggggatcagaacttggtgcctcggcccatgagtttaaggacggcaaagttgtaagtggcagcaatcatgaaggtgagcagggaaaccagtgtagctgcagcccccacaaatgcagcaataaacaggtggaaggtcatttggaactcagctgttttgcagatggacagaaggttggagccacaaaccttgccagggaaagcattccatgggagaacaccatacattctggcatcagcacagagactgcctatactggcagaggtcttgctggggaaggcaatagactggcaggtggtccaggtgttgaagtaaatgtacacaggcacagcagagcaggcaaaaccaggagccacacaacggtcagggcataggtgatgcccacaaacgttgcgctcaggcccttgccgcagatggtggtcttgtagtcgccaaagatctgcctgactgcgccggtggtgtagaagccctcagccagcaggagggccccataaaggaagaagaaagaggcagttccatagatgacatactggaaggcatggatcacattgatgagatactcatagtcttggtagtttttggagaaataggtctcaattagcttttctgtgccagtgagggcttcatgtccacagccacagaacagtgccaccccaaagaaacacaatccagtggccaccagggaagcaaagggggcccctaccagacatcttgcacagcactctaacaagcccatgtctttgggactctgactccaattgtagccggctggctagtctgctttgtggctgactttgttcagctggaaggatcctggtctctccagcctccccaa

SEQ ID NO: 430915 - DNA, 1275 bp, Homo Sapiens
agaaattactttctgatcctcaggagatgcttgaaaattcaattagagcctccattcctttgtgacttgcagttgggaagtcatcttcttaggcatttcccatttctagcaggaaccagctatgaagcaaaatgactaaaagaggtacataagaggggagagtccaaagagagacattaatcactgcaagactctcctttcttgttacactcatcaagtaagaagagggccagttggtggcaaaggcaaagagttaagatgggagacgcagcattgtaggctgtgtggttagagcctcgctattagagaaagggggatttctacgggggatcagaacttggtgcctcggcccatgagtttaaggacggcaaagttgtaagtggcagcaatcatgaaggtgagcagggaaaccagtgtagctgcagcccccacaaatgcagcaataaacaggtggaaggtcatttggaactcagctgttttgcagatggacagaaggttggagccacaaaccttgccagggaaagcattccatgggagaacaccatacattctggcatcagcacagagactgcctatactggcagaggtcttgctggggaaggcaatagactggcaggtggtccaggtgttgaagtaaatgtacacaggcacagcagagcaggcaaacaccaggagccacacaacggtcagggcataggtgatgcccacaaacttgtcgggatgtcctagccattttcccaaacaatgacacacccgctccaaagaatgagcttgatgttggcctctggaacccctccccttctggccccctgttaccgttgcgctcaggcccttgccgcagatggtggtcttgtagtcgccaaagatctgcctgactgcgccggtggtgtagaagccctcagccagcaggagggccccataaaggaagaagaaagaggcagttccatagatgacatactggaaggcatggatcacattgatgagatactcatagtcttggtagtttttggagaaataggtctcaattagcttttctgtgccagtgagggcttcatgtccacagccacagaacagtgccaccccaaagaaacacaatccagtggccaccagggaagcaaagggggcccctaccagacatcttgcacagcactctaacaagcccatgtctttgggactctgactccaattgtagccggctggctagtctgctttgtggctgactttgttcagctggaaggatcctggtaaactccagcctccccaacttttttgtac

SEQ ID NO: 430916 - DNA, 749 bp, Homo Sapiens
gacaattgttatttagtttttatttcataatcataaacttaactctgcaatccagctaggcatgggagggaacaaggaaaacatggaacccaaagggaactgcagcgagagcacaaagattctaggatactgcgagcaaatggggtggaggggtgctctcctgagctacagaaggaatgatctggtggttaagataaaacacaagtcaaacttattcgagttgtccacagtcagcaatggtgatcttcttgctggtcttgccattcctggacccaaagcgctccatggcctccacaatattcatgccttctttcactttgccaaacaccacatgcttgccatccaaccactcagtcttggcagtgcagatgaaaaactgggaaccatttgtgttgggtccagcatttgccatggacaagatgccaggacccgtatgctttaggatgaagttctcatcttcaaatttctccccatagatggacttgccaccagtgccattatggcgtgtgaagtcaccaccctgacacataaaccctggaataattctgtgaaagcaggaacccttataaccaaatcctttctctccagtgctcagagcacgaaaattttctgctgtctttgggaccttgtctgcaaacagctcaaaggagacgcggcccaagggctcgccgtcgacggcaatgtcgaagaacacggtggggttgaccatggctaatagcacacggttttcctcggcggtggcgtcccaa

SEQ ID NO: 430917 - DNA, 579 bp, Homo Sapiens
gcaaggttttgtttgtttgacagcaggaatgggctggggagggtcctccgcaagctggaccccttgttccgttcggcccgtgaggagaacggaactggcggccaaggggaaccggcggaacgagatcagctggagcgcactgatttcgaggctttgtgttcatttcgccctaggccccttctcgatgggctttccaatgtcctttccccggagcttgaggccaatggcccgctcgattttgccaagcacctggttattgggtatggcccgtccgctctcatagtccgcgatcacctgtggcttctcattgattttcgtggccaggtccttctgcgtaagccccttgctctgccgaccttgctggatcaccttgcccacctccagggtcaccctgtcatggtgcagctcctctgtctcccggtccagcttggccgtgttcttggtaatagaatgttgtttgttctggccagcagcccatttcttggaagtctccacatcttctcctcgtctctgtgccgctaagatagcctgcttggatttggcctgggcggccgtagggccccaacttttttgtacaaa

SEQ ID NO: 430918 - DNA, 1580 bp, Homo Sapiens
cccacccactcaggaagtgggttctgaatggccctcagacctctcctggtgagtcttaatgggttgggaggctgttagtttaaaaataaacacctcttcagtagggctggggccctttccttttcctccacttggggggaaaattgtgcttccaacttgcaggagaatgagccggatcaccactagagagcccggctgggccagggggtcagagccctttccagtgggccccagaggcctggggagggcaggagtttgaggcacactgttctttctccaggatggaaagtggacagctggacatgaggtgggctagctctgcatgctcctgacttagggagaaataacattttctttcccttttttgtgtttagaataatttccaaagcagtgtgctcaggcctccctcctgctcagtgtcccagcagcccctgccccctctttcccagcccctctgctactccagagtccctcctcctcagaccaggggcaggagggagttagggaatggccttggcctccctcctctttccaggctgcaggaggtcccaccttgcccaccacccaccgccttgcccactgcccaccatgggctcactccaccctgaggtctgtggctctgaagagctgcaggaaaaggcgctttccctccccagtccagtccaggcgaggggcctagcagccgaggtgggcggtggggaggcagtgtgtggacagtggggccgtggggttcttagtccaggtcaggcagtgacctgtgctggctctagagcctacccctttgccactgctggaggagaaggggtaaaggaagaggggccggagggggggactctgctcccgccacagcctgaggtacagggggtgcctattaggcccaggctccccccatgcagggctgggtgcctgttgggatccaagacagccttatgctctgtaaacgtgaaccagaggagagccacagaggtatgtctgatttgggggcagctctcgggaagagcaggggcccaggagaggagcagagcgctcgtgatgcccgtgggctgctctctggtcttcagaattccctggctgggtgtcctgtgtggtcgtgctgagcccagggacagggagccagggagggccatgctccacttgactgcggggtcttcttatctccctcccgccctgcatcactgcagggccagtgtgggcgcccactgcacctgctcctgcagccccgtcagtgcggggagctctggggaggtgcgctggagcaccagcttggctggtgctggacaccccaccctggccatcaggtctctcgggccctggtcacgctggatggagagaacaacaggtctgggatttctgtgcttaaattctctgtcctttgttctggcatcaggctgggctctctcagaagcccccagaatagaaaggagggtgatggtgattccttaggagtcggccttggagggaccatcagccgtggggagaggatggaaggccaagaacagggtctgaggaggaggctcctgcatcctgaggctcagatctccaccgaggggtcagtgaagcccttcttgccctcattccaa

SEQ ID NO: 430919 - DNA, 1012 bp, Homo Sapiens
ttggggacctgggcctggcctgtgacttctccaagaagaagccccatgccagcgtgggcacccacgggtacatggctccggaggtcctgcagaagggcgtggcctacgacagcagtgccgactggttctctctggggtgcatgctcttcaagttgctgcgggggcacagccccttccggcagcacaagaccaaagacaagcatgagatcgaccgcatgacgctgacgatggccgtggagctgcccgactccttctcccctgaactacgctccctgctggaggggttgctgcagagggatgtcaaccggagattgggctgcctgggccgaggggctcaggaggtgaaagagagcccctttttccgctccctggactggcagatggtcttcttgcagaagtaccctcccccgctgatccccccacgaggggaggtgaacgcggccgacgccttcgacattggctccttcgatgaggaggacacaaaaggaatcaagttactggacagtgatcaggagctctaccgcaacttccccctcaccatctcggagcggtggcagcaggaggtggcagagactgtcttcgacaccatcaacgctgagacagaccggctggaggctcgcaagaaagccaagaacaagcagctgggccatgaggaagactacgccctgggcaaggactgcatcatgcatggctacatgtccaagatgggcaaccccttcctgacccagtggcagcggcggtacttctacctgttccccaaccgcctcgagtggcggggcgagggcgaggccccgcagagcctgctgaccatggaggagatccagtcggtggaggagacgcagatcaaggagcgcaagtgcctgctcctcaagatccgcggtgggaaacagttcattttgcagtgcgatagcgaccctgagctggtgcagtggaagaaggagctgcgcgacgcctaccgcgaggcccagcagctggtgcagcgggtgcccaagatgaagaacaagccgcgctc

SEQ ID NO: 430920 - DNA, 897 bp, Homo Sapiens
gaactggattctttaatagcctcataataagtgccatacagggtttttattcacagggcttgaatgacaaagaaattttgacaagtttaatacccatctgtgatttaaagtctggcaaaatacaggtcattgaaacagacattttaactgagttttataaaactatacaaatctttccaagtgatcataaatcagtttctcactacaggtactttaaagcaactctgaaaaagtcacacaattacacttttaagattacagtgtttaatgtttatcaggatacatttctacagctagcaggataacagatgagttaaggggcctcagactacatccaagggaatgtttattgggcgatcccaattacaccacaagccaaacgacttccagcgtttcctgtctttgtactttcttcatttccacctttgcccaagtcatctgctttttcatggaccaccagtgtgcggccaatgatgcaatggtctcctgagagtgagatcacagaatcttcaatagacacatcggccacaccatctttgtcagcagtcacattgcccaagtctccaacatgcctctcttcatcctttggcccaccgtgttttctggatagaggattaaagtgaggacctgcactggtacagcctgctgtattatctccaaactcatgaacatggaatccatgcaggccttcagtcagtcctttaatgcttccccacaccttcactggtccattactttccttctgctcgaaattgatgatgccctgcactgggccgtcgcccttcagcacgcacacggccttcgtcgccataactcgctaggccacgccgaggtcctggttccgaggactgcaacggaaaccccagaccgctgcaggagacccaacttttttgtaca

SEQ ID NO: 430921 - DNA, 814 bp, Homo Sapiens
ttggggcccgtgaaacgtcgggggacaggacccccagggagggaatcccaggctacgcactttagggttcgttctccagggagagcgacctcgtcccccgatcctgaccgcccttccggcccacgctctcctgtttggcttccacaggcctggacttctctggcttctctgcccacacactccctgcccccagtgtccctgcccctgccccagcacaggtgacttcatttctgtcctctcagctcagtggactcgctcaacttttgtataagtctccacttggtggcagcagcttgctgatgacttgttttaaaactttcatcctaaataaccttttgatacttgaatatttttaagttttatacatagtttctaatttttttccgaacagatccagatacctaataagatgctggaatgtaatccctggacaatccgtgtcctggcagcatttggtcttcctctaagcgcctggctccgctgttctcaggagtgggttctgaagtctctggagaacaggatacgtggagggttaggaaggggccaggcctagagacgggagactccctcccggagcaggtggaggcacaggaccattcgctaccccatctgccggcacctgcgggggagcccaggcattctttgtaagccctcctgaccacctggctcaaagaaaacagaagcatggaggccgccaagtattttcaagaaataaccccatgaatattccatcacttttttagaaagaggggcttggggcacgcagaggagagaagggagagcaaactgagagccaagtttccagacagtcctg

SEQ ID NO: 430922 - DNA, 888 bp, Homo Sapiens
ggaggcgaagaggaagccagtgagcagcgcgcagaagagatggtagccatggtggtgttcagggctcctgcccacagccgtggcccctgccccagcacagcccgagccgataaaagagtgggaggttgtcgaacaggaatggataggcgaaggctcctgtgcggaggaccttactgagcccagggctttccagctccaggaaacgggagtagcaggagaggccggtgcacaggaaggagttgagtgcggcggcaggcacaaagaactggtgcaggtggccgtgcagccaggaggccggcatggagtaggcggcataggggaaggcgcagcccagactgtagaggctgagcgcgccgtagtcgaggaagtagcagatgtggcgcatgcggggcgacatggagctgaaggtgtgcgcgcagcacgacgcgaaggggtagaggcaggcgggcagcaggaagaccagcagcggccagtggtacggctccgcacggaagccggggccgcccgccagcgccaggagccgccacaggaagtacctgcggcgggcgcgtgctcaggccgccgcggacccccgcgactgccgctgcagcccgtgggcctggacggtccctgcccgcctgggtaccccctctgagctcaaggccgcggcctggggcagagcctcccctcaccaggtgggcaggaagtgagtccagatgttgaccgtctcgttggtcatctggaaggagctgaggacacagtccaaagccgagctggtggggcggcggtagccagacatgatgccatcttcccagaacacccagagcttggtgggtgctcctaagctggtgggtcaacaggcccagggctccacgggcggagtccaaggctgctgccagccaggcccaa

SEQ ID NO: 430923 - DNA, 487 bp, Homo Sapiens
aagttttatttttccaaaatacagctggttggacctattcatgcattttcaccagcagctggagcatctccacccttggtatttctggtgtaaaatacttgagctgtgtgctttgaaaccagtttgataagtcctttactaaggagctcctgaagggctgccctggccagggagcctcgaatcttcagtctctcagagaccacagctggggttataagtttatagttgggaacttccttacagagtttatcataggtagctttgtcaaacaagactaagttattgagcttgtcccgaactttgcctttggaccacttcttctttttggccttgcccccggatttgttcactgggtctttgtctttcttggccgactttccagcgtccttcttcttcttgtcgtccttaggcggcattgcgaagctcggagaatagcagcagacaccgcagcctcgtcaagatgtcggccaacttttttgtacaaagt

SEQ ID NO: 430924 - DNA, 1132 bp, Homo Sapiens
agtgtttttatttcctcaaaggagccacgccattggccttcccaaatacctcctggtatccttccaatttccaccactcccaaccgtcagattccattcagcttcctccaacctcagaccaaccactttcttttcacaagctcagaccttccaaatattttaaaaatgaataaatgttaaataccaactttcactattacagaaaggggcagctagaaaagtttactctgtgcacaagactgcgacaccccgctcgtagaagctgcgaggatcctcctttgtagcaatttcgaagtccacggtgaagatgaggtctgcacgggtgaagttcaggtagacaggtaaggttaccacactggccttcttctcggtgtttgtctgcttgacccagcgcagctgcgtcaggggaagggcggttgagatggcattggacagtgacagcttgttgttgttgcacgtggccccttgaagtttcaaacccgtgactccgaagctgcaagcgtcaagggtggcgccctgtgaggtggtgacgttgacttccaggcagagctcctccagggaccagctgttggcctgggccacatactgcctggtggcagtgatgtacgcctcaggcacgaacaggccacccaggcacacgtggatgttctttagctccttggcgccaccagatgcagctgccagtgagatgttctgcagctgtttgatcctctcgctgaagtcggacacccactggatgacggtcatgccggcaggcaccgtgtagtgggaccagctccgaggcaagatccctttcactagctcgttgatcagcgtgcgcaagtagttggtctgcttcttctttccttcgcacacctggacgacatctgcaaggtcctggcgaacgtcctgaagcagctttgcgcccatcttcacttctctctcaaagaacctgaacaaaggatccttgatattctccacggtgcgcttgaggtggctcagcgtctgggggatgaggtgcagccagttggacgcggtggtgtgcagtgtccgcatccaggcagggcgcccgtcggacgtggagtctgtcctcgtcttcttctcagtctctgcgtaggccaggtcgtcctcatccaacttttttgtacaaagt

SEQ ID NO: 430925 - DNA, 1403 bp, Homo Sapiens
tctttgttcaaacatagctcagtttttctggcaccaaagcaaatttgggttaggttcgtgtatgcagagacaacctatgaggagggcccataaggcaccctccacttttgcatgaggagatacgaaagcagaagtaatgggatctgtacttggggcacagagagggtttcagaggatccttgtgaaacactagttaaaagatgacgagtggggagaagtgcgaggaaagaaggaaattagtctgactggctttctgtcctgcaccattgattcaatggagactggcgggaggaaatggaagactagggttggagatgggatgggtggggcaagggatggaaaggaaaaggcagacaactaatgcgttccatttataacaagtaatatatatcaaagacttaaaggagattaaagaccaatcagaataatttggcaactttaattcttaggaagatcaaagttccctccaaacctaatttgatgttttattactaaaagcaaagaccagtatggtacagtattactccagagaaattaaaggaaaatccttagggcggcttcacccacattcattttatgaatggatacctcccctacctcaaaatgctttagggaggtactgctaccattacatggttccttattaaatttgaaaagtgcctgaaagtttgggcaccagaaagacaccccaacaacatgtgtctaaactgcaacttcaggttaatatgactaaagcagttacattgtgagaagtgctgaaggtatgtgatgtctttcccggcacaaaggtggccttggttcctcaccagatggtgtagccaccatctgaaccacccatgaagaagttccccttccgctgagttacgaggacgttggctccctgcatgactgcaagctgagcagcattgggagggcatccaggaggtggaggaggaatgttgccagcagtagccccagctccaaatctggcacctgcatcataccctccttccaccagcactgtggagccaggtggatagatgggaccgactggataataagccatggggattgtggaacctaaaggcccaacagccacagactgggccatgggaagatacagagaggctccaggaaatgcggctgacatggtggggactgtggcagcccctgggtgcacaaagctcggacgatagagctctgagtaggcaggtggagcatcggtatagggtggagcctgaggaagatgcaaggtctgagggtatactggattcccaggaggctgcacagggtaggttggctgtgttggataaagacctttgctgttcatggtggttgcgggtccggtttgtctcggcgtcgcggacggttatttttttcgtcctaatatacctgttcggccaacttttttgtacaaagttggc

SEQ ID NO: 430926 - DNA, 994 bp, Homo Sapiens
  misc_feature (841)..(882): n is a, c, g, or t
acaaatatgttactaacaagaaaggttgttctgagatccaaacttctttcaaatcattggtccatgctgattaacatcagccgcacacaacgactggttgtcatcttgtgggactggtctccattattgcctatagtctttgtgacttctccagctagggaattctccacaatatttgattgcacaggtcctgggcaaatgttagaaactattatacctgggtatgtggcaagttctgttcgaaggccattaaaaaaaccccggagagcatgcttgctagcacagtatccaatggaaagaggtacagatatgatacccaggatgctattcacagtaacaatctttccttgcttcctctcgatcatgtgaggcagaacacattttgtcaaggacaccgtccctaagtagttaagctctattagctttctgtagacatccaagctggtatccatgcacagagaacgctgggacattccaccattgttgaccagaatgtcgattctaccaaactcctggagaacagctttggtagccgcttcatgggaaccagtgtcggtcaggtcaaggggcaaaacaagtatatctttttcttttaaattgccattctctaggcatcttcttttcaccctttccagctcatgcactcttctggctgacagcacaagagaaactcctagtttagacaactggtaagccagctcctcaccaattccactcgaggctccagtcacccacaccaccatatcagtcagctcccattctgggcgtcgtccctgccactcggcccatagtagcgtcaggtcgccgtcagccctcaggaagcgcagcagctgcaccaagnnnnnnnnnnnnnnnnnnnnnnnnnnnnnnnnnnnnnnnnnntcccagttcattgcggccgcgcacgcccagctcggggggaagaagacggcccgcaccagagtcgcgtcgctgccctgcgggatcgcagcgccaccccttcggccagccccaa

SEQ ID NO: 430927 - DNA, 723 bp, Homo Sapiens
ttgtacaaaaaagttggccggagccctctgtagacagacagaggcgcggagcccccggagcccccaaaccgcagacacatccccgcgccccagagccccggcctgcgcgcccagccgggcccgcgcgatgccctcagaccggcctttcaagcagcggcggagcttcgccgaccgctgtaaggaggtacagcagatccgcgaccagcaccccagcaaaatcccggtgatcatcgagcgctacaagggtgagaagcagctgcccgtcctggacaagaccaagtttttggtcccggaccatgtcaacatgagcgagttggtcaagatcatccggcgccgcctgcagctgaaccccacgcaggccttcttcctgctggtgaaccagcacagcatggtgagtgtgtccacgcccatcgcggacatctacgagcaggagaaagacgaggacggcttcctctatatggtctacgcctcccaggaaaccttcggcttctgagccagcagtaggggggctcggcctgggagtcggggggccccggtcaggccctgcccagagagctcctggttcctgaactgagctgcctctaccgtggtgggctgggcaggcatgtgcccccctagtcagagggcaccaacccacctactctgcccctgggtggatcctgggccggtcgtgttagggttgtccctctgggtgctggctggtgggatgggggagggtgggga

SEQ ID NO: 430928 - DNA, 379 bp, Homo Sapiens
gcagtggagggggcaggacctcttgctggtgcagcaccagatgctggagcaggtccaccggcccttacattgcagatgaggctcccaatgttgacgttggccagggcctttgcaaacaagccaggccaaaaaggctcaacatttacaccggctgctttaatgagggcattgatcttatcctccgtgactgtcacctcatcgtcgtgcagaatgagggccgagtagatgcaggcgagcttggagacagaggccatggcgcgggcgagtgtagggctggcgctgccggacgcggtgctagtcgccggatgaagtgagggcctcaccccaacgcagccttagcttcctcggaaggaccgagcacctgggcggcagctgccaa

SEQ ID NO: 430929 - DNA, 915 bp, Homo Sapiens
ttcagaccatctctccgcatggcttggtgctgaagttggtatggcagctgcaccattccagttcccaggaatgggcttaggatcaaaggttgctatcactccaaagtcttcacacacacgatgcaagatgaaacgggccacccagagatgatctcccatgctgattcctttcacaaggtccaatctgaaattcccactgggcaggcatgacctcggcattagtccccgcaatcttgactccagcatacaagcaggcccggtaatgggcctccacgatgtccctgccataggctctgtctgctcccacaccacagtaatatggaccctggggccctgggaagccgttggaaggccaaccaaaggggtgcccatctgtccccatgagggtatactcctgctccatgccaaaccaggggtgctggttgctcaccatgtccattatccgtttacaggtgtgcctcaaattggtctctgcaggccttcgattgtacttgaaaacttcacataacaccagcttgttagggtccttacggaaggggtcccgaaacatggcagcaggcacgagatacatgtcactgttggaaccctcagactgtaaagtactagagccatcgaaattccactcaggcaactcttccacacacttgggctcactgtccagggtccgggtcttgcagcgcagtccttctccagtaccatcgatccagatatacatggcctggactttctcaccctgaggcagggacatgtacacctgcttgatgcctttatttaagtgggaacttgctgaggtggtcatggtggaaggtgttctggtcgccgagcaggcgggcgggtaaagctaggccgcgagagcgaggttaggagaggagaggaggccgcagtactgctcacacgctccgctcttctccccaa

SEQ ID NO: 430930 - DNA, 1459 bp, Homo Sapiens
tgtctcccttttcgagaaaaaaacttagtacaaactagtagttacacgatccctttcaagtttctcttaagttgtgcagatttcctttgtggtttggcttggtttagttttttaagaggtcgaaagaaagaagtaaagcatctcgatgtgcccaggactccccatcacatgcccagggacaaacgctgcaccctggaccaccagagctcacaaagtgttcagtagtaagaggaggaaagatgcaggttcagtgtttgaaggacgttctagcctattgataacatcacggtccagcctcatcttccccctgtgccatcccctcgtggtgtgtgctgtggggtgggagggtggccagtgcacgcgtgattgcccacaggaggagatgagctgggccagtagagggacaggtaagtgtccagggccaaggcatctccatctcaactcctccccactccacttgtacagcaggagccacaggcctgtgtgaaaacacaggacaggccctgtgccaacaaaacaccattcacaaaagcaggcggccgcagcagcccaggatgggggctggggtaggaggtgatgcccacgcagggctgctgtggtcagccctgagctggcatccctggggcccgggatggagtggcaccaacaggcaagtggggcggccacaggacatgatgccagcccaactccaccatctgcgcccaaacttggacaggatattagaaggtgtaaaagtagtccagtataaatatatatcttctacaatattttaaacatataatttgaactttaattttggtaacgctaattgttaggaacactacctggttgcttatcctatagcagtaaattaaaaataaataagcactctggcgtgaacagtcttctcagcgctctccctctgcctttctcctttcctgatgctgagacacgatcagcactgtcctcccgacagaacctattcctgtgtcctggtgtcacccccaacagaacctgtccctctctcctggtgtcacccctgacagaacctgtccctctctcctggtgtcacccccgacagaaccagtccctgtctcctcttgtcacccccaacagaacctgtccctctctcctggtgtcacccctgacagaacctgtccctctctcctggtgtcacccccgacagaacctgtccctgtctcctcttgtcacccccaacagaacctgtccctctctcctggtgtcaccccaacagaacctgtccctctctcctggtgtcacccatgatagaacctgtccctgtgtcctcgtgtcacccatgacagaacctgtccctgtgtcctggtgtcacccccgacagaacctgtccctgtgtcctggtgtcacccctgacagaacctgtccctctctcctggtttgcaggttgtgcagtttgttattcacaaatacagcatttattttcccaacttttttgtacaaa

SEQ ID NO: 430931 - DNA, 948 bp, Homo Sapiens
ttggctccggcgcagtgttgggactgtctgggtatcggaaagcaagcctacgttgctcactattacgtataatccttttcttttcaagatgcctgaggaagtgcaccatggagaggaggaggtggagacttttgcctttcaggcagaaattgcccaactcatgtccctcatcatcaataccttctattccaacaaggagattttccttcgggagttgatctctaatgcttctgatgccttggacaagattcgctatgagagcctgacagacccttcgaagttggacagtggtaaagagctgaaaattgacatcatccccaaccctcaggaacgtaccctgactttggtagacacaggcattggcatgaccaaagctgatctcataaataatttgggaaccattgccaagtctggtactaaagcattcatggaggctcttcaggctggtgcagacatctccatgattgggcagtttggtgttggcttttattctgcctacttggtggcagagaaagtggttgtgatcacaaagcacaacgatgatgaacagtatgcttgggagtcttctgctggaggttccttcactgtgcgtgctgaccatggtgagcccattggcaggggtaccaaagtgatcctccatcttaaagaagatcagacagagtacctagaagagaggcgggtcaaagaagtagtgaagaagcattctcagttcataggctatcccatcaccctttatttggagaagaacgagagaaggaaattagtgatgatgaggcagaggaagagaaagggagaaagaagaggaagataaagatgatgaagaaaacccaagatcgaagatgtgggttcagatgagaggatgacagcggtaatgataagagagaaaactaagacatcaaagagaaatacattgatcaggaagaactaaaccaagaccaagcctatttg

SEQ ID NO: 430932 - DNA, 1535 bp, Homo Sapiens
tcacatttaattttatttgatttttttaatgctgcacaacacaatatttatttcatttgtctcttttatttcattttatttgtttgctgctgctgttttatttatttttactgaaagtgagagggaacttttgtggccttttttcctttttctgtaggccgccttaagctttctaaatttggaacatctaagcaagctgaagggaaaagggggtttcgcaaaatcactcgggggaagggaaaggttgctttgttaatcatgccctatggtgggtgattaactgcttgtacaattacgtttcacttttaattaattgtgcttaaggctttaattaaatttgggggttcccttcttagagcagctcgtactgacgaaggtgcatgcgctgaatgatgtcacggcagtcgttgaacacacggcggatgttctcagtgtccacagcgcaggtgaaatgagggtagcagtagtgacgcccatctccactggcagtgctgatcctcagaaactcatctcgaatgaagtacttggcccgggtcacgcgtgggtcctctccgggctcgggagtagcatcctcaggagtagtgtagcgagcaaattctggaaagtagtcctcaatcttcgatttcccagcaaggactttctcagcgagcagatcttgcttgttgaggaacaggatcacagagatggtgcgcagccatctgttgttccagatgctcttgaagaggttcagagcctcctgcaggcggttggtctggttgtcctcccggatgaccatgttgtagctgctgctggccaccacgaagatgatggcagtcacatcgttgaagcactggatccacttgcggcgttcatcgcgctccacccacgtcaaacatgtggaagttgactttgtccacctggaacttggtctcaaagattccagaagtcaggacacggcagcgaagcaggtcctgatcgctcggcacatagtcagcctgcttgatcacgtcgatcttgtccaggaagtactgggcacagtcaatcagctggtactcgttggagcgttcgtagcaggcacgcactccttcatcctcccacagagccttggcatgctcatagaattcgggagggaagtcaaagtcaggcacgttcatcacactcaggatgtagtccactctgaactggttctcggggttggccagctccacggggggcaccaggttgctcatggcggccacaatggtttcaatcgcctctttcaggttgtttttgatgtcctgcactttggttgccttctcaccatcgctgttgctccttgcagcctgcgggtcctcttcgccgccctctccattaaacccattaacatgcaggatcctcatctgcttcacaatggtgcttttaccagattctccagcacccagcagcagcaggcggtgcgtggcccggtagacctgcttgtccttctgcagctgcttctcgatctttttgttggcctcacgctgcgccttctcctcgttgcgctggtcctcggtcttactgttcccgaggcagcccat

SEQ ID NO: 430933 - DNA, 1024 bp, Homo Sapiens
ttcagtccaccaccgccgagctggcccatggtgttcacgccacaggcccggacccacgatgcaagtagtagtaacccttctcaccccagtcagtgccccagctgttcttgatggcccaaaagggaacgtcagagcggttgccgtagcccacaagcaacaccgcatggtcaatgagccaagggctgcagaggggccggagagggcgggagatcccgtggcggtaaaactgcatgccaaaggcattgatggccacggagattgggcctctcttggccagccaggctgccagcttctgctcgttctggctcagctccacggagtcattgatgtagaccttggccttctctgctgagaagttgcaggactgcatgtgaccctggtagctgtagtcatcctctgtctccagccctcccaaattctttatggccgagtaggcattggagggcaagccgcccatgcaggccttgtccatcttgtcacagtccaagagctcctgttcagagagggagagcagggtcccctggttgagaaaccactggccctccacattgcctgtgactgagaaggcccagcaggagccacacatgccctggtctttgacttttgtgacagcccccttactcctccagtcccattcaggtggggcgaggtcacccacagacttggcttgcttcatcttgttgccaggctctttcctcaggagagtattcaggtagatagtgcggaactcctcctctgtgagatcactgaacttggtgactccatactgagctgtgccacggtccagggcctggatcttctgtgctcgcaccatgttattgacaaagacggacaggcgccaccgggcttcttcctttgactcatatgtccggttataggtaatgacaaagttcttgaagattgaagccatcttcacaggcaagtcctgggacaggggatcctcattcaacagggaaatgactgagctgaaagtctcgtttctgttgtctggatggttttgggacagagaagaaatcatggccaa

SEQ ID NO: 430934 - DNA, 1299 bp, Homo Sapiens
tgaacgccctgtcttgatgaggtcgaggatgaggttccagaggaagcgccgggccttggggtccatgcctgtggtgggctcgtccaggaagatgaaggctgggtacccaatgagggcgatggccgtggagagcttccgcttgttgccgccgctgtaggtgccagccggcttgtctgcgtacttggtcagctccagcttctccagagcccacttcaccacccgggcctcgtccttccaggagatcccacgcagccgcgtgtacagctgcaggtgctcccgggccgtgagctcgtcgaacagcgcgtcacactgcgggcagtagccgaggctctgctgcacctggagcagctccttcagcacgctgtgtccattgacgaaggcctcgccccccgtcgtgctctcgtcgccggtcagcatcttgaaggtgctggtcttgcccgcaccgttgacgcccaggagcccgaagcactcgccaggacgcacacccaggcacaggcggtcaacggccaggatacggccaatcttccgggacttgtagaccttggtcaggttctcaatcttgaccatgtcattgtcggcgtctccccggagcactcgctgccgctcactagccacgtccacatcatcctccacaggcttggtagacacaggcatgcgctgtggccgccgcaggaagttgtactggcacatgatggtcaggaggaagcccacgacgccctcaaccgccatggccaccagtccgcgggtgacaatgtcccactcgaacggggacttcatcttgtcaaactggccaatcttggcgtagtactcgttgatgtactcgttgtaggccatctccatgagcccgtggcccaggttgtagttggggaaaatgaggaagcagcttttcaggtaactgttgacaaccttcaggtccttgtcgtgctcgaagagctgtagcaggaaggtggccacggtggcggtgatgccgttgaagagattgatgacaatgaggaacacgtaggcggagctggggacctcgaaccagaaggaggccgggtacatgatgggcgtgatggaccacccatagagcaggaagagggagaggacggcagggaagttggtgggcgacgtgtaggccggcaggtcgaacacaaacaggatgatgacacagcaggtagaagaaaaacaggtagttgagcatgtcccacacgtagttcgccagccagtagatgatggggttgcagccgttgacaaactgcagatgcttggccttggtggatttttcggccacgaggaagacaacgaagctggccggca

SEQ ID NO: 430935 - DNA, 712 bp, Homo Sapiens
ttggcgccgcagtcttcgccaccatgccgccctacaccgtggtctatttcccagttcgaggccgctgcgcggccctgcgcatgctgctggcagatcagggccagagctggaaggaggaggtggtgaccgtggagacgtggcaggagggctcactcaaagcctcctgcctatacgggcagctccccaagttccaggacggagacctcaccctgtaccagtccaataccatcctgcgtcacctgggccgcacccttgggctctatgggaaggaccagcaggaggcagccctggtggacatggtgaatgacggcgtggaggacctccgctgcaaatacgtctccctcatctacaccaactatgaggcgggcaaggatgactatgtgaaggcactgcccgggcaactgaagccttttgagaccctgctgtcccagaaccagggaggcaagaccttcattgtgggagaccagatctccttcgctgactacaacctgctggacttgctgctgatccatgaggtcctagcccctggctgcctggatgcgttccccctgctctcagcatatgtggggcgcctcagcgcccggcccaagctcaaggccttcctggcctcccctgagtacgtgaacctccccatcaatggcaacgggaaacagtgagggttggggggactctgagcgggaggcagagtttgcctttcctttctccaggaccc

SEQ ID NO: 430936 - DNA, 978 bp, Homo Sapiens
agcaacaggaacccacaaggcgacactctagctaaggttatagatagctgggagacaagggccgctccgcagacgcaggaacaggccagatctttataaataaacatccagtaaagagaaatgacaattctaaatcatccgcatacacagagcactctagggggtggggcgccgggggcctggaggggcgatgagtgggcccagatgtccacggcacggggcgggcgggggcaaggccggggaaacagacgatgggcactaggacactgcgcatgtacaagaccaactactgggggcggcggccccgtgcgtatgtgtcaggctgttcgttctggaatgaggaggggtggtctttacataatattctgtggctggtgggctcggagagggtctactttgtggagaggatgagggcgacgatgagaccgtagaggccgagcacctcggcgaagatgagaatcaggatcatgcccacgaatagtcggggctgctgggcggtgccccgcacgccagcgtcccccacgatgccgatggcaaagccggctgccaggccgctcaggcccacgctcaggccggcgcccagctggaggaagctcttgtagaggctgatgtcgtcattcagggagttggcgatgaggactgccaccaccaggccgtagatggcgatgatgccagccatgaccactgggatgatggacttcatgatctgctccggccgcatgacagacatggccgcaatgccggtaccgctcttggctgtgccataggcagcgcccagggcgctgaagaccatggcggccgaggcgcccatgacggcgaaaaacgaagcatactcggggccgctcttggactcggacatgtctgcgggtggggagggggcaagctctgcgggccgaggcggtggcggaggcgggggcgaggacgggccgggcacgaaggtttgcgggcgggcggcggcgaaggggatccggcccccaa

SEQ ID NO: 430937 - DNA, 799 bp, Homo Sapiens
acatccttgcctggccccacacacgcacacggcttgcttggttgggccaggccaccacagtctgtctgggcccagccagcgctggaccccattacatggatccagcccagttctccaattccttcatgtcgtcgtcctcctcttctttcttcttggcgggttttgatggtagggctatagagggaacatttggtagagggactgtttcgggtccactgatttccagcaaattcttgtctagttcctcctgttctagttcttctaattccgccatgagctcatcctcgtcaaactcttctccaaaccctacaggtttcgaaattgctgttgaaatctcctctgcaagttcttgctggtcagcaatgtcctgcattaactcatcaactttatcgatgtccatgttgtcatgggccgccttcatggccttggcggcatagcccatgttcttgagcacctcggtgttggtgttggcattctccagggcctcccgctggaactcgatggttgataatgtgccgtcgatctgcgccagctgcttctcatacctcttcttacgcttcagtgcctggagggccgcgcgcttgtttttggtgccgtgcttcttggcggccgtcagctcctgctcgattttcttctccaggaactcctgtttcttgcttaacatctcttccgtgtcccgcagccgctggatggcctcctggggggtcgggccgcccttgccggccttaccccctccagccccgaacagcttcccgaacaccgacatggttgctgctcgccgcgccggccttcgccgccc

SEQ ID NO: 430938 - DNA, 923 bp, Homo Sapiens
aaaataacatttttattatataaaaatgtaaaaatccagcaaaaccagaaatacgaatatatttttctgggctttcacatttgttgatttttattcgcgatctttttcaatacaatttacaccctcatccccatttccagtctgattatacaagtgctaagtggcagaaaggtctggaataaatacatcaaaaagaagaggcaaagctgtgaaactaagttgcatgcaacaggttctatgagggtgggggaagtgtctgagaagtaaaagagagtaagacaatgtaactggaagattttagctaaagttctttcagtcatctttgtctttggctccatgtttcaggatgcgtgtgaactcgatgtaattgaaattcccctttttgtcaataggtgcttctctgtacagctcatccacttcctcatctgtaaaccgatcccccatggttgtcagcagctctcttaggtaatcttcctgaatggtgcctgttgcttcttcatcaaagcaagcaaaggcgtttctgatgacatcttcaggatctgtgccatttaacttctcaccaaacatggtcaggaacatggtgaaattgatgggccctggggcctcattcatcatggcatcaaggtatgcatcagtgggattcttccctagagaagcaagcatatcatgcaaatcttccttgtcgatgaagccatctctgttctgatcaatcatgttgaaggcctctttgaactcctgaatctgtgactggtcaaacatggcaaacacattggatgttgcacgctgagggcgcttcttggtggtcttggtctttgcctttttgctcgacatggtggttgtttaattccgacgccaaacaccagaaccggggccgccctgcgcgagaccgcaaacgacagcgaagagcgttaggctgtggccaa

SEQ ID NO: 430939 - DNA, 867 bp, Homo Sapiens
cccacgggcacagtgccaaagccgcccatcttgtaccacgtcctgcagcggcaggcgcaggggcttgtccgtggggcgcgtggggggcaggatggtgtccagggcctccagcagggacacgccgcttgcgttgccctccttacgctccaccttccagcccttgaaccacggcatgttgggggagggctccagcatgttgtcgccgtgccagccggagatgggcacaaagggcacggtggccgggttgtagccgatcttcttgatgtaggcgctgacttccttgacgatctcgtcgtagcgcttctcgctgtaggccggctctgtggagtccattttgttcacgcccacgatgagctgcttcacacccagcgtgtaggccagcagggcatgctcccgcgtctgcccattcttggagatgcccgcctcgaactcgcccacgcccgccgccacgatcagcactgcgcagtccgcctgggatgtacccgtgatcatgttcttgatgaagtcgcggtggccgggggcatcgatgatggtgatgtagtacttggtggtctcgaacttccagagggagatgtcgatggtgatgccgcgctcacgctccgccttcagcttgtccagcacccaggcatacttgaaggatcccttccccatctcagccgcctccttctcgaacttctcaatggtccttttgtcaatacctccgcatttgtagatgaggtggcccgtggtggtggactttccggagtccacgtggccgatgaccacgatgttgatgtgggtcttctccttgcccattttgctgggagtgtgaggggctggcgggacccggggtgctctggctcagggcgaggggggctgcagtgccaa

SEQ ID NO: 430940 - DNA, 510 bp, Homo Sapiens
ctttgtttcaagttttaatcaaagcttgtatataagattactttattcctgcatcttctcaatggtttcttccttgtatttgcccttttcctttcctacttggcgagatttggctttccgttcgaggatctttttgcggtctttgtccagttttagcctagtgataaccaccttgctggggtgaatgcctacgtggacagttgtgccattagccttttcccgctgcacccgttcaatgtagataacatatttcttcctgtaaacctggactactttgccaatttgctgacctttatagtgtccacgtacaacctgaacttcatcatcctttcggatgggcatggatcgcacgttgtacttctgtctcagctctttggaaagaggggaagacataatcttccttcgaatgtgggaaggtgcattgaaatgccttttgcgattcttgcttcggtcggaagtcacaaagggattaaacttcattttggccgctcccgcttcggtgatggccaa

SEQ ID NO: 430941 - DNA, 912 bp, Homo Sapiens
gcttctgcagcgcggcgcgcgtggcgtctcgaagacctcgcgcacgctttcttggtcttggcagagcactcgaggtagtcgtaggcttggatgcgcacggccatggcgcggccgtcatccgtgcgcacgggttcctgcttcatgcgggccagctctgtgcggacatgctcgtcgctgcgcaggtctttttttgttggccaccaggatgatgggcacattgggacagaagtgcttcacctcggggacccacttctcggggatgttctccagcgagtccgggctgtccaccgagaagcacatgagaatgacgtcggtgtccgggtaggagagcggccgcaggcggtcgtagtcctcctggcccgccgtgtcccacagcgccagctccacctgcttgccgtccacctcaatgtcggccacatagttctcgaagacggtgggcacgtacacctcggggaactcgtccttactgaacacgatcagcaggcacgtcttgccacacgcgccgtcgcccaccaccaccagcttcttgcggatggccgccatgagcgggccgggcccgggcagcaggagggggcccgcgaacgcctcgctgccctcccgctcgccgctcactgctcacctcgggctgcgcgcaggtggcgagagggtcgctagctgcacccgggccccgcggtggcgcgttctctcgctgcgcttcggctgccgcggcgggggcggtgggggcgcgggggcatagggcgcaccgtgcgtctcgccgcgctgctcccgggcggtggtcgctctgctcaccccaggccggggatcggcggctttgtgcgtaacgcgggctcgggcagcagactcgggcggtggactcggcctagctctctcccgggtctctccgggcctcgctgagcatacaagacaacccaa

SEQ ID NO: 430942 - DNA, 968 bp, Homo Sapiens
ggcccaacccatcccggcacccccacttgcactcagaccagccctggaggcccaggatcacccagccgccatgggtgggggggccacacacagggtccattcctttcttgcggttccccaggtgtgccctcgccccacatcctgtgctgtggaccccggagcctgggctctttctgccctggaggttggggaagtcctgggtcagcaggggtgggctcgggcgtcctcttcaccgtgcgcgtgtgttgggggcatatgtaggtgtgtaatgaatgtgcgtgtgtacgaataggtaagggtgaactctgcatgcactggcttcctcgggtctgtacaggaagtggctccgtgccccccgcctggcccccaggtattattttttccggaccaggaaggccacaccgagaatcagggctatggctgccacggccacacccccagccaccagcagggggttgaagttctcacaggaccagggacctcggcccccaggccccccactggcagcctcatcttcctccgccccgtccccaggacccttgggctccggggttgcatcgggactgctggggaccgtgggggctggcttcaggttgctgtggttgttgagaagggcagggtcggccttggccgaggtcttcttggcaggtgccgtggtgggggctgctggcggctgctgcttctcggccggggcctccttcttcgagggcttggtcaagggggctttcccatcggctgccgggggtaccttggcctcggtggtgacctggggcaccttggtgtcgggcttggggctgctggctgacttccctctggactccatggtgggcggggcgtatgggacaggcaggtggctgcaccagaggggctcaggacagtttgtcgcccctgggcattctatgggcgcgtcctccggcctccccggggctgcgcgctcctccgcgggatccaacttttttgtacaaagt

SEQ ID NO: 430943 - DNA, 861 bp, Homo Sapiens
acaaaggcagatggatcagccaagaaggccttgaccttttcagcaagtgggaaggtgtaatccgtctccacagacaaggccaggactcgtttgtacccgttgatgatagaatggggtactgatgcaacagttgggtagccaatctgcagacagacactggcaacattgcggacaccctccaggaagcgagaatgcagagtttcctctgtgatatcaagcacttcagggttgtagatgctgccattgtcgaacacctgctggatgaccagcccaaaggagaagggggagatgttgagcatgttcagcagcgtggcttcgctggctcccactttgtctccagtcttgatcagctgcacatcactcaggatttcaatggtgcccctggagattttagtggtgatacctaaagcctggaaaaaggaggtcttctcgggcccgagaccagtgttctgggctggcacagtgacttcacatggggcaatggcaccagcacgggcagcagctggcaccttattggccagcaacatgtccctgatctcagtgaggtcctccttggtgaacacaaagcccacattcccccggatatgaggcagcagtttctccagagctgggttgttttccaggtgccctcggatggccttgcgcatcatggtgttcttgcccatcagcaccacagccttcccgcgaagggacatgcggatctgctgcatctgcttggagcccacattgtctgctcccacaatgaaacatttcggataatcatccaatagttggatgatcttaaggaagtagttggacttccaggtcgccctgtcttccctgggcatcacggcggtgcgtcagggattgccacgcagccaa

SEQ ID NO: 430944 - DNA, 767 bp, Homo Sapiens
tattttccacgtttatctatatcttcataggtcttgtgatgaaccttgatatactctgtggaatctggctcaaactgggcaaagcagagattgaggacatcaacatgcctgtcctggctatacatagtcctaagattttcttccttgaaaattattggtgtcaaaattttacgaccttcttttgggaaataaacttgtatcattcggtcccgttcttcccaagaggctttgcgtagtgtgccacttggttctctgacgacaataaaacgctcccggtgtggtatgctatatgatatatcagtaaacacatatttggttgtttctgttccttccaaaatcttatcttcagctaacacatcatttattggtactcgctcttccagaactggtggcatttttaatcgtactttagctgcctcaactgcctgtcttgtagcctcttccaactgtgcctgagtcattagcttataggttggtggcttcagttcttgtatagctggcttaaaagtcttctgcaagttcaagcctgtcattttcgtgagtatgctttgaacttcctcatccataaatgtaggtttcttggtctctgggctaccagattctgcggcctcggagctgaaccggcggcgtggcagccccatctcgaaagagcaaggtagcggttggagcaggccaccgtgccagggctggattcgagcccggaaacagacccgttccacgcccggagaactcctcaagaggctccacagcaatacagttgttcccaa

SEQ ID NO: 430945 - DNA, 631 bp, Homo Sapiens
  misc_feature (68)..(80): n is a, c, g, or t
aagtttttaaactttttatttgcatattaaaaaaattgtgcattccaataattaaaatcatttgaacnnnnnnnnnnnnntggcactctgattaaactgcattacagcctgcaggacaccttgggccagcttggttttactctagatttcactgtcgtcccaccccacttcttccaccccacttcttccttcaccaacatgcaagttctttccttccctgccagccagatagatagacagatgggaaaggcaggcgcggccttcgttgtcagtagttctttgatgtgaaaggggcagcacagtcatttaaacttgatccaacctctttgcatcttacaaagttaaacagctaaaagaagtaaaataagaaggcaatgcttgtggaatgtacagtgcatattggcggcgcacgcctcattacgattcgcctgcttgcttctcctgttcaatcgtttctttggaaggcagtggatttttctcttgcgtctctgtcttcttcagtttcgacttatcgaatttctcgatctcagccatatcgggtttgtcagacatggttgcggaggaaaagcgaagcgaggcgcacgagtacgagcgaagtctggtctgcgcagtggccccaacttttttgtac

SEQ ID NO: 430946 - DNA, 758 bp, Homo Sapiens
ggggcttatttgagggctttgccacttgctcataggcgagctcgatctcctcatcatctggacaggtggaagcgaattcttcccgggcgtaggcattgctcaagtaccgatgcactccccggaaggcctcggggatggtgaatccccggtacttcttacacaccacctgtactatgtgtaactttggcaacaggttgcagtcagccagggtgagctcgttgccatccaaaaacttcctctgagagacaccttcatcttcagcactggtttcatccacttcttctgggaggggggatgttaagtaattgtctaaaaccttcagggctttcaggagtcccttctccagattgtcattgagtgctgggtttgaattcttgatgtaggcagaaaatttggcaaatatgtccagcccagctgtgttggactcagggttcagagctgccagcttggggtacctgggagggcacagcactgcctccagaaattcctcaatcttgttggtgtctgtgtgcacttcagtgccatacagcaggaatgggagctgcccccctgggcacagcttctgcactgtctcggtccgccttttggtgtcaacggtggtaacattgaaggtgactcccttgagccacagtaccatgaacagtctctgggagaatgggcagttcccaatcttggccccatcactgccagccttcacgaacaattcgacctgcggttgttcttcagccatggttgcgtcgccaacttttttgtacaaa

SEQ ID NO: 430947 - DNA, 415 bp, Homo Sapiens
tggctgagagcacaggcaccagcttggcgttgtcctgcagcagctctcccaggagcttgggtgagatggtgaggaagtcacagccggccagtgctttgatctcgcccgtgttgcggaaggaggcgcccatgacaatggttttgtagctaaacttcttgtagtagttgtagattttagtgacactctttaccccagggtcttccaggggctcataggatttcttgtcggtgtttgccacatgccaatcaaggatgcgcccaacaaatggggagatgagggtcacacccgcctcggcacaggccacagcctgggcgaaggagaagagtaacgtcatgttgcagtggatgccgtgctgctcctcgagctcctttccagcctgaattccttcccaggttgatgacagctttataagaat

SEQ ID NO: 430948 - DNA, 703 bp, Homo Sapiens
gggaacaaaacaataaacacctttattacatgggtgaagacaaaacaaggatttatttgcctttgcgggccttgattttcctaagatagaactccaactctttgccctctagcacatagccatctgctcggccacactgtcccggccttgaagcgatgcacgcaagaagcttgccctgctggaactgctcctccaggagactgctgattttggcattctttttcctttcatcatatttcttctgaatttttttagatcgttttttgtttaaaatctcttcttcctcaggagtcagcttggctcccttcttgcggcccaggggcagcgcatagtgggactcgtaccactgtcggtacggtgtgctgtcgatgagcacgatgcaattcttcaccagggtcttggtacgaaccagctcgttattagatgcattgtagacaacatcgatgatccttgttttacgagtacaacactctgagccccaggagaaattccccacgtccaacctcagggcacggtatttcttgttacctccccgcacacggactgtgtggatgcggcgggggccaatcttggtgttggcagctgggcgccccaactcatacttccgcttcttgtggtagggctttctcttgcccccggttttgcggcgcttgtgccagttgtcccgagagatgcccatcgctcggcgctggctggaaaccaa

SEQ ID NO: 430949 - DNA, 1312 bp, Homo Sapiens
gtcattactttttattttgaaggatttgtgaaactcttcacatcatggtgagagtttgtatgattaataagaagcagctttttcatgaaatgcttggaggtgaacgagttctcagcctgtgagatccgaccatcccattaactttgaagtttctcttgattaatagaagaaaaaaggggagggtgaagaaaaggaggaacatgctaaaaaccttatgacaatcatccaaatgtgaggaaagaacaaccgattcaccaactccactttttctattttacaactttctacatctcactcttgattttggccttcctggctgaaacagcctggcagtccctagagcccctgagaagagccctggttctccaaaagacagaggaggagaagccctgcaggatgcgctgaccacttcccagagaactgacagtccgtgctcccaaaagtttgaaccaacagcctaatgtgaaaagaaactgcactgaaaggtaaaggaggaaatggtgatgaactgggcttatgtgagaatgtctatattttcataacacagccccagaatctttctctcagttacagcctcaggcaaaccacgttctggttggtgggttctgcagggatctctcccaccactgagcctctagtcccaaaaccatccttgacaacatcgtgtgtctgttacttccctttgcccacctccaggccacctggggaagcccacaggcagccaagaccctgaaatgaaatgaacacaaagtctgactcggtaagtattagtttcaaacagaacactaaagagaaaagttgaagctgcaatgtgtgtttaaggcagagcccagcagatccgtgtccacccatgtgccaataagacaatgggcaaagctacaaatggcaagagaaaaatgggactattaatgcgtgtggaaaaggccttaatagttaagttacagctaagaatgtcatgtcttgggttagaattttcatttttagcaccgttaatgtattcacttaaatctatgttagcaccttgtctccaggcagaacaacaaaccatccaaacattttaaacattgggggaaacacgaaggggagggttaaagagagaatccggtactgtggaaggagtggatttagatcacaagatccttgtcgatatccttctgcttgatgccgaagcagccggcccactcatccagggcgatgtacttgtcattgtccaggtcacaggtctcgaaaaagcgggtggtgcaatgctccatggggatgaggggagcacgcagtggagccagctcggtgtgggagaggtacccgtcaccaa

SEQ ID NO: 430950 - DNA, 909 bp, Homo Sapiens
gacagatggagatgggcagcagggcattgctgcattgttatctgctgttcagacttggtttgtcttgtccaagggtgacgaaagagccaggcaccagggtctcatgggatgaggtacagggtgggagatgggggaggggctgggggctgaagggagcaagaaagctgtagctgtgtggggctggcaggatgttgaagaccgcctctgctgctctcacatggggactgggcccagatcctgcttggtcacacccagcccagaagacgggtcctccagttccagtgactctttcggtggagcgtcagtgggcttttgctccaaggagtgcctgctcatttcaaacaggagccaatggtgcatccagctctcaaagaccttccagtctatggtctccatggtgttcttaaggtgtctcaggttctccgggaagctccccttcagtggcgggtacaccttcagggggtcagcattctggagcaggtgcatcacatggtcctctgtcatgttgccatacttggtggcattctgcatgggcccctggggcagggctcccatgggcagcgcctgcatcagcagcggggtggccatgcgcatcttgctcacaggcttgggaggcttgggaagcttcatgcgcaggttctccagctgcaggttctgggaggtgactgtcagtttgtccagccggccctgctgctggtacaggaagtaggcggtggtggcctggccagcgaggagcagagtcaccaggatggaaaagcctgtgtacagggctccgcggctgcacttgctctccggggccccagggcgccggcccagcatgggcagttgctcattgttggagataaggtcgcgctggtcatccatgactggcttctgatcttcccgacagctcctgcttctcctccccaa

SEQ ID NO: 430951 - DNA, 1240 bp, Homo Sapiens
cggcaagggagcggggcccagtccccagcggccggcagttgcccaccgtgctggcccccaagcagggctatgcgttgaggcctggaagttcccacagccgtggtgggcggctcctggggactgtgtctgagctcgggagccagactgggccctggaggaaagggggccccgggtcagggaggggcaggttggctgggtgtggtcagcagcagcatgacggggttagagatcaggcccagggcctgggctgcctgccttgaggttccagagaagcatcctggaagctgaagctcgggccctacctggccgcgccgggctgccctgaggagcaggtggggccaggtggcctcaggacgccagagcccccccatccacgggtcccctccgtccagccacagtgagtccaatgtccgtggtcctccagccgcactcgctaaggtttatgcttgaagtgcgcctccactgcgtactcctggggcagcatgggcctgtccaccgccttctggaaggccgccacccaatccctctggtcggactccgtctcgcaggcaaacagaaacttgcggtcgggcgtgacgatggtgatgccatgtggccagtggtggccctgggtggacggcgggaacccatgcagcaccgtgtagccactctccttgctgccaatgaagacttcccctcgggcgaaggcgtccagggggtctttgaagtacatgagcctgcggtcatccatggtgaaccagcgcttccggaagccttccgtttgcttgggccccgtcttctccatgtagccttccttcaggtagttcctggagagctttggcaccagatctgcgtcgctggcccctgggaatgccacctgcaggtagtggaagcgagcagctcggagtgcattgaaccagtccacaatctccttcccgtcctcatggtagatgaagatgttacgggtgctgttgtccttcaggtaggtgacctgcaggccgtgggggtggccgatcttggccggctggaaggtggcgttcaggtgctcgatcttcatcacggccttgggctccttggcatcatttctgttgaaatacttcagagcaccctctcgttctgtcagcacaaacttccggctcaaaaactgcccgttgtcccggccacgcttccagagaaaaccctcacggtaccctgccgagtagggctcctgcttctccgggtagatgaactcctgtcgctcgtacttggcccggatccccaa

SEQ ID NO: 430952 - DNA, 1418 bp, Homo Sapiens
  misc_feature (290)..(308): n is a, c, g, or t
ggctccttatacatattaaataaataaatagcacatctgctatcaaaataataaaaaaataaatttcaagtattacaaagaaaattatcattggtgtggttccaaacagttttttttctctctcaaaatgaagagctttgcccgtggtctcaggacagaataaggaggggggaaactcacccaaaaacaaataggcaaagttaaaaatattggtccccgttattttgtggggtggagagttggaggaatcagtagacgccaaaagttcatgactgtagctcaaacccaannnnnnnnnnnnnnnnnnntccaatgtcccctcaaaaggcaggtcactggcttgcaaagtaggcagtgttctcctttctatagtatctccctccctgtccagattcatgttacctctctccctatctaggcccttcgcaaactaaaagtcccgtgttagaccaaggcttctgtatttaggtattgattttaggtagtcagaggggagaggggaccacagctatcaagcccctatctgtatcaaacttcagagttgatgttcaaagaatgaggcctgcgagggggacacgagaaactattctcaagagcaaagcaacaggccttccatgtcaaatcgaaaaatacaaccaagttaagcacaatcatgcacccgtgcacgtccaccccctacccacatattctgatgagactcaacatccagggggagagagaaaactgcgcgagcctggagctgcacgggaatgcggacagagacatcctctccagcagacgccagccaaagtgggtgcaacgggcggggagggcttgaatggttcagcatgaaaatcccccacttgattgtaccatacctgaagcacagcctcagttcctactcaattccaaccaggaaaaaaacatgcattctttaaaagctcttcccaaaaaacaaacagcaacggctcttctctccacgcccagtttcaggtgtctaaatctcccaccctcacccaggacctgtcccttgagctgggaggaggatctcagggctcacagcagaaggcaggaaagaaaagtgacctttggcacaagctttgagacatcctgaaaagggtcatttggacaaactctgctgccgagtttccaaatggtttcatctgggcacgagaccccccgtcccacctaccccagggtttgaggcaatgaggagaaaccaacaggctgagacgacaggtcccatgctttccatcaccacaaaagtgtcatagacgccatgaagggaaggccaggacaaagtccactcttccgaccttcccaaggcaccggcagagtgccaggcacaaggcagatgctccaagacagtgtgcaggcagctcttgaagaagtggctgcgagtgaggccttgcttgggccactgtccccacctgggccaa

SEQ ID NO: 430953 - DNA, 1613 bp, Homo Sapiens
ccagcagctcggccagtatgcagcccacagccttgcagagaacagtggacctcactgcggccagacgtctgctgaccccgccagcgcgaggaacagaggacttgactgcagccagacctttgctgaccctgccagtgtgaggcaccctgggtcagggacactgtgaaggacaggcagggaccactggctcccctcctgggccccgcaggcctcccggggtgacaagtgcaggggcaggcgtgcctcctccagacctctgtgctcccagcctgagaacagcaagctaagttctcacacctcctcctgggtttccaggctcaggcccacctccctgggagtgggaggctggcaaagaccccactgcactcctgcccctcccctgaggctgagctcaggaaccaggtgacccggctcctgtcccagcccttcctgaggccccaggagcggtaaccgtatctcctcaccacatgtcgatgctggtggtctgcgtggtggttcccaacagcagttcaggggctcggtacctacacacagaagcacccacctcaatacggccggctcctctcccccagcccaggcctccacaggacacagcctccccgagagcctgtgctggcctggaaacctgtcccaactcggaccaccctctgccccaggccctgcagatccaggtggcacacacagcaatggttgccgggggcgagagctgtcacgtgcagcggtgtcctgagagtcgcagggaccacggaccctcggcacacagccacaccagccactaccaacccgttctcagatggggagtacacgacactggggtcgtgattgattctgaccaactctgatattcagccctggctaagcatgaccctgtttggttaaaagtatccaggaggaagaaccagggaaagcatgcaagctgcctgtccttcagtccgtgaagcagccttccctccagagatggtttcacggccacggtgtttccagctctcaaggcgaggtgtgtctgatctaggcaggcccttgacgccactgagcccgtctctcaccattttgtggcacagccctgctgtgtcctggaggctgtcctagacccaacgtttctgagtgtgcacagaccctgtagcttaacattcccaaggccagttgcagcttcggcctgacatccccaaggagacctccaccagacaggcctggtccccaggggccaccatgcttcagaaggacttaccagagagtgaccaccttgggggtcattggctttactgggacaccataggcccgggccaggccgaaatccgctgcagcagagaggggagtgtgtgtcaccaagtgccatctagggacagggcctggcccaagttgcacccacctgtcttcacacaacccttgtcggtcatgagcaagttggaaaccttcaggtccctgtggataatgaagttcctgtgcagatactggaggccccggagcacctgcagcacgatgcacttgacctgagcctccgagaagggtgttggcatattctccaggaggctggccaggtcctgctcacagtaacccatcaccaggaagatgctctccaggtggttccccacaaccacctccttcagctccaa

SEQ ID NO: 430954 - DNA, 1236 bp, Homo Sapiens
gaggactttatcgggatgttagtagggaaacatgagagggtgaattccagggaatagacactaggaccaaggtggcggtcaccttaaagagccataaataaacttaaaaaataaattaaggtgaggaggtgccacgtggggaggctgctgggactatctgggaattcttagggatggaattttggaattggaaaggggaaataagaatttccagccgtctcacaaaagggtgtgaaatgatcacttcaagactccctgctgccctaggctgggagttggggttctggggctccaggaagaggggaggtctgggctcggctgaaggggtgaagggggccgggtcagggtcgttcctccaggaagcggtaagtggggttctcatagccgtgccgctgcagttcgcggagctgctgctcctccagggtcagcatggggtccacctccaccacgccatggctgatagccccgtagggcttcttcctgcgcaggagcagcatggagaggacgatgagggagcctccgcccgctcccatgatcagcagacccgacacagcctcacgggacacccctgtcccagctggtgccagctcatccctctgaatctccgatgagtggaaagggaaaccccttggaacagacgcattcacctttcgctcatactgttccagcgggttcatcttctctttctcaggggatgcagcatcttgttctgtggacccttttggaagggtcatgggggtgtctgcatccttggaatctggaggctgcagcccacccttgtcctcgctgctgcccccaggggcaggggcttccaattcactgggacccaggtgttcagagtggaggagttcctggatttggggccgcagctcctgagccaggtgggggttctggtcaagcagacccaggctctgattcaccctctcctcaatcacttgaaggtgggtatgcacctggaagcgcatctgctgtgccttctcgggatccacggcggccacatgctggtagtggcgcagcgtgtgcctctgttccttctgctccgcacgcaggtagcgccgcagggccaacaggacacgctccgcctgaggcggatctgcctgcagggctgccaggaagccctccaaggcagcccggcgctggtcgttgataagggcgatgacgcgggtggcgtgggtttccaccaggcgctgtcgctcactctttgacacgctgctcctccccaacttttttgtacaa

SEQ ID NO: 430955 - DNA, 1056 bp, Homo Sapiens
ctccgcccgctcccatgatcagcagacccgacacagcctcacgggacacccctgtcccagctggtgccagctcatccctctgaatctccgatgagtggaaagggaaaccccttggaacagacgcattcacctttcgctcatactgttccagcgggttcatcttctctttctcaggggatgcagcatcttgttctgtggacccttttggaagggtcatgggggtgtcatccttggaatctggaggctgcagcccacccttgtcctcgctgctgcccccaggggcaggggcttccaattcactgggacccaggtgttcagagtggaggagttcctggatttggggccgcagctcctgagccaggtgggggttctggtcaagcaggcccaggctctgattcaccctctcctcaatcacttgaaggtgggtatgcacctggaagcgcatctgctgtgccttctcgggatccacggcggccacatgctggtagtggcgcagcgtgtgcctctgttccttctgctccgcacgcaggtagcgccgcagggccaacaggacacgctccgcctgaggcggatctgcctgcagggctgccaggaagccctccaaggcagcccggcgctggtcgttgataagggcgatgacgcgggtggcgtgggtttccaccaggcgctgtcgctcaccagacacctgctcctccagagtctgcagaatggactggaagtgctcattcagggcctgtctgtcggctttaggcaggttcttggactggttgtctgccatggcccattcacgcatcacctcattaatctggcgcatcctacgctcctccaggtccatcttggccctcaggaacccctcgtgctcactgatttccccaggcatgccaaagtaaatatccacaccgtctgtgggcctcggggtgggagtgactttgccgaccactgcaagtgtatgggagcttgggggtgggaccgtttcctcttcctcttcagcctgcggaggctccacgaagtaatcatctactggctgtgggaaggattcctcctcttcctcgccaa

SEQ ID NO: 430956 - DNA, 887 bp, Homo Sapiens
tatgaaaagcacagtcgtgtgcctttcaaaaaacagtgccagacagttgaaggccaggaattgcaccatcccaaatcatcatcatctgacagggaggacatgcagaaaatgccagattctgactcactatttgccctttcgtgtcttactggtgtttcctccttccaatggtgatgagggaaggctggttcactcttcgaagaagaggacactggtggagggcgtgcataggaatgtaaacttttgctagtggctatgatgtgtacaggagatgatctattgtaaaatgagcactgcatcagtggactttgtggactggtcgcgatatttgccaattctgttagccagtccacctcattttcacggtaagtagtttctggtatgtctgaggtattttggttccaagatgatcttgggtattcttgatgtgaaacatctgaactcagctggtacatgccagattgggtaggatcactttgaactgcctgaagttcaggaaggtcatcaagctccatgtgttcatcacaggagttatatccaggtgaagatggcaaattctcattacactgcagcaactccaatgagtcattcattcctgaggctctcttgtccatcaccaacaggagtttctgtactgcattaggcatctgatttgtcttcacttcccacaccatgttatggtgctctgactgccgcgaagtgccggcagcccaggcgcgggccgctccggccacgacaacaccaccagcagctctcgtaccccctctccgaccgacgtcggcctcccccgcgcgggttactgctcccgcggcagctcttactcctcaaccgaaactttcctacttaccaaacccgtcgccattaccaagtctttcaagcttcgccaa

SEQ ID NO: 430957 - DNA, 471 bp, Homo Sapiens
gaggcaatttattaacccagcatggtttgttctaatgcttcttgttggcagctgccacctgtccggcgattctgtccagatctctttgtccctgaggtgtcagtttgcggccgccatcttggtccttttccaccattttcagcccctccagggcttggaggacccggcgggccacactcttggagcctcggctgaagtggctgggcatgacgccgtttctctgacgtcccccatagatcttggtcatggagccaaccccagcgccaccccggaggtacaggtgccgcgctgtggaagcagctcgcgtgtagaaccagttctcatcgtagggagcaagctctttgtgcttggccagcttgacggtatccacccattcggggactttcagcttcccggactttttgaggaaggctgccagagctctgacgaactcctgctggttcacgtcttttccaacttttttgtacaaag

SEQ ID NO: 430958 - DNA, 920 bp, Homo Sapiens
taaaagggctgcaggtggataccggcttccttcaagctggaaaaagattagaaagatggtgaaaacaggaagacttcctcatcccactatcaggaagatgaggaaagagatcaggaggatcacaggtggagaggagaagaggaccatgctcgatcctctctggtaataggctgagattccctctcgtactgggtgatacacatctgctcaaccacgcgctccatcatcttaacgtcggtctcggtgaagttctcccccttggtggttgtggtgaccgtgtgctgcttgattgtgatattgacgcagtcgtgcacaaagttgttctggttgctgtactcatccatgggcctgtagtacacttggttggggtaacggtgcatgttttcacgatagtaacggtcctcatagtcactgccgaaatgtatgatgggcctgctcatggcacttcccagcatgtagccgccaaggccccccaccactgccccagctgctgcagcaccagccatgtgcttcatgttggtttttggcttactcggcttgttccactgactgtgggtgccacctccttgaccccagccaccaccatgaggctgtccccagccaccaccatggggctgcccccagccaccaccatgaggctgcccccagccaccaccatgaggctgcccccagccaccaccgccctgaggtgggtagcggttgcctccagggctgccctgccccgggtatcggctgcccccagtgttccatcctccaggcttcgggcgcttcttgcagaggcccaggtcactccatgtggccacaaagagaaccagcatccagcagccaaggttcgccataatgactgctctcggtcgtgaggagaggagaagctcgcggcgccgcggctgtcagcgactggctgggaggacaggcgccaa

SEQ ID NO: 430959 - DNA, 1200 bp, Homo Sapiens
gggggaaaaccgggccccagactcccccatttggttcctgggaacacagacacctggaacttggcctctgccgtgatgtgcgccctcccacgcacccaagcgttatatggggcatggttcggaggctgcctcctggcccagcctccagagagctatggaccagacaggtggagcgtgaacagggttgctggggcagcggcgtgtggaaaggggcgtaactcacacaggccctccagctcatgcaaggagaagcaagaggggacagccctgccaagacagaggttacagcagggcgagagcatggtgtgtgtgtgcagctgggccggctctgggccacggcagagagaaggcaggggaagcggtccacggggtgggagaaggcaagtcagggcctggctctgaggagaagcctgggtccccactgtcccagctgagggccacctcccgcggaggaatctggtgggggtggattctccagaggtggggacaggggcagctgagtggccctggctcagtcggggacctcagggtgggcaggcagtccgctctcgccgcgccggtaggtctcccagaaacctctgtccagctgctccagctgtgggcccagtggcaggtggccggccaggtgcatgcggagggtctccagccagtgttccagcttcacaaaggatggcctcttctcggggtccagatcgcaacagcgcacggtgatggggaagaagctcggggggcagtttggggggcagtagcggtccaggaatcctcgcacgttgaggccaaagtccatggtgcggggcaggtagtcagggtctgcgttcacccgcccgatgatctccacaggacgatcccaaaggagaacacatccaccttctcatcatagctgcggccgttgatcatctcaggtgccatccagtaggggttgcccaccacggtgtagcgcttcttgcggtctggcttcttgaggctccgcaggccctcaggctgagtcttctcgtccaccatgagacgcgccagcccgaagtcagccaccaccacattcttgttctcgcggaccaggcagttgtgggagttgaggtctcggtggatgatgttcatggagtggaggtaggccatccctgatgcgatgtccttggcaaagctcactctctggctccatgggtactggctgtccatgctcttgatgatgccccggagcgccaa

SEQ ID NO: 430960 - DNA, 680 bp, Homo Sapiens
aaaaagtgaggcgagacaggttactatggtaactccagcagatggtccatcttttgtgacagctccagctgggaagtgcagatggatgtctgtgttgtcaagaagatcaaaacttccaaaagcattggtcagctggtacttctttgcgttgctgcggagccagctgatagcgaggtgggcggactccttcatcacgtccccgagctggccggtcagagttaactggccctcgccatccattcgactcgcctccacgaacatgatttctccacctaagggagtccaagccaaacctattgctactcctggctgactcaaacgctgagataccttgaaagaagaagaatgatcagagttgggttggcaaatgctaaaggtgactgataccacacaatcctgcaagagtcggctgactccacagaagacttcagccacttacctcaaagtccttgttacctaacatgattctgcgtcacattcagcacttactctctggctttctgccagaagaaagacctaaacttcctctttgacatttatcagaggcaattttaccttaaaatatatgtaaataactttgctttttatgagccagatctagctacacatgccctagttttcaaggaataaacccaatagttttatctaagtatctttattgggctgcaaatatatatata

SEQ ID NO: 430961 - DNA, 1598 bp, Homo Sapiens
ccttccctcccaccactattcctaacctggggcctggcaggggtggagtgatgtgatctaaagggtccctggagaagggtggagtggaagaggccagggtcttgggttaaagggaagattctgaggtctcagggcaagggaaaggtgttggatgaagactgaggcagtgcctacctccctccacatttgaggatcaagcaggtgtggcaagaacagagccctggcctgggctctgctggccgcagcctcaggagccagggttaaggccagagataaatgaagattgagccattgataaatgccaatatatgtttcaggtatttcattaggatcctcccatcaagcagggaactagatgtttgagaagatcaaacaacatcctgactttggggtccttaagacctgggttattctcctcccagtcctagtgggaggctatccattccacaaagactcaaaggcaagaggcctggagaagcaggggctcctaggaccccgcctgcatgcctctctgcctccaatagtgactccctaagctgggactcctcaggcttactctgagggacaccaggaagctcaacctctttcccacagaggagaatctctgagatccaaaaaacccagccttcccccctcctcatcttggtcttgcttccctctccctccagcctgttgctgctgctcctctgggtgccaagatgtgtcctcaggtgtcttggtcagctgatgatggacacgcagcacaggaggctaagaacagagctctgtggggcgaggtgtggggagaggggcctgctctcacctagacccaaaacactgaggtctcctactggtgatggtgtcagatcccaggcctggggagccctttagtggggtgggacctcaggcagacccccaaaccaaagggagccagatgcccaagttcaagtcattagtgatatgtggcagggctgacagagaaataatcctggaggtctccaaagctgctgggaatggaatggcgatgaaaagcgcaggagtgggcagggtgtggtgggtgatggtggcctcactcagagtggaccaaggccccagctccttgcccaaaaccaaagcccttgggcccgaagtttttagcataacatcctttgcagtaaatctcgccatccttgtctgccagggtggttgactcaaggcctttgccacacttggcacatcgaaagcaggccttatgccaggactaggcagggaaggaaatagttaatggctgccaccagtgatgagggtaccctccaccccaggcccactccctttgacataaccatggtataagggctcaagccacttctgaagtctactcagctggtgctgctgggaggacatggcctatggtgcaaggcagtagagggagaaggccagggaccacacgccacctcgcaccatcttccatgctatgttgcaatggcctgatgattagggtcaccagctataccacaaaaggcaggtgagggggtgggtttaacaccaaagtagctgttaccccactggctgggccagatgagccttctccagacccatcttgccagtagatcagtggtgtgagccagggctttgcccaa

SEQ ID NO: 430962 - DNA, 875 bp, Homo Sapiens
acagagctctgtggggcgaggtgtggggagaggggcctgctctcacctagacccaaaacactgaggtctctactggtgatggtgtcagatcccaggcctggggagccctttagtggggtgggacgtcaggcagacccccaaaccaaagggagccagatgcccaagttcaagtcattagtgatatgtggcagggctgacagagaaatattcctggaggtctccaaagctgctgggaatggaatggcgatgaaaagcgcaggagtgggcagggtgtggtgggtgatggtggcctcactcagagtggaccaaggccccagctccttgcccaaaaccaaagcccttgggcccgaagtttttagcataacatcctttgcagtaaatctcgccatccttgtctgccagggtggttgactcaaggcctttgccacacttggcacatcgaaagcaggccttatgccaggacttcccagcaccaatcaccttctccgcagcatagactgcctggctgcatcgggggcagcgctcggagccaccaatcttctgggcaaatttggatgcattggggttggtggtgggcctgtggccaggggcttcctcgtgcttgatacccagcgactcccccttgtcagtgctgagggtgcctgcgccctgcccgtagccatagcctttgggcccatacttcttgccgtagcaggacttgcagtaaatctcctcaccatgcacggccacagtggtactgtccagattcttcttgcagaccatgcacaggaagcaggatttatggaagctgttgccttcgcactgaacctcttcggcaaagtaaaccgtcttctgacacaccccacatttcttgcctcctccccagttcggcccaa

SEQ ID NO: 430963 - DNA, 938 bp, Homo Sapiens
tttttgtcataggtgactctaataatagacttattgttgcaaaaccagtcaaaatcctaccaaattaaaaagaagtccctcattgacttgttgggtgtaggtggtaccccatgtcctcccacaccaaaagagatcagttctggcaagaaagctccaacgtgccttgatggtgctgttggtaggatgctttaggccaggcacgtcccagcgatgttctgctggctgaggtacaaggtgggaggagaatatgcctcattcattactcaatcaatttcttggccttgaagaagcgtcgcaggtagaagacctgccaggtagctagtccaatgagacagaacattgaaaagatgctgaagtataggacccgagtgtttgttgactcgttggtatcacgcatctcctcttctctcttcttcatgtaggcaaaatcattaacaatagattctgaaaggtcttctaggcgtcgcagctctacctctaatggtttgagcttctcaacttttgcaatctcttcgtaatttttcgcctccactccatgcttcatgtctaggatcacgagttggtcaggtatccgccctgttcccttgctctcaaaacacacttcaaacatgtcataatcttcagtggtaaaggcaaatttccccttggttgcatcctctttggagtagagaatatggccagcagaatctgtgatcttgaggtggctgcgcaggccgccagcgcccccagactggtcggagatctcgtacgcgccagtcactagcaggtccttgtgaatctcctcacggaggcacttgcgagagttaatgggcagatggaaggagatggcaaggaccaatctggggccgagcaggaacaaaagcagcaacgctaacggaaaagggccgcgccgggctggtgggccagacaaaccagacatggtgctggagactcgccaa

SEQ ID NO: 430964 - DNA, 757 bp, Homo Sapiens
ccagaggctaagaggaagactggccaggcccaaggacccagccatcaaaaccagcctcaaatctggttgtgatggagaagtgactttgctttaagaaaaaaggaggcaaggtagggagagcgcccacactgtccatgctccaggccccctgggccagctccgagaaggcgccagtgaaggaccagggaccaggccagggtgcgggcaggcatcactgtctctaggggtttggctactgttggcctgggagctgagagaaggcactgagagggacagtaggcggaggaccaggtgacggcagcatcggggacacaggtggggccactcactggtactggccctttagtgctttgccttgcccttggctcgaggggtggcaccaatggcggcagcagtggcggcgctggctgtggtggtggcaatgcgcggagaacggcgggttccactgcgagtgttgggggaagccttggacagggccttctttgaggctccccgccgcagaaggctgttccctagcttcttgggtgtgttgaggatgctgaaggccatcgactggcgccggtcagcctgtttagtagaagctggagctgctttcttctgggcctcagtagtgctctgtttgcgcccttcatgtcggtctcggggagtcatggggcgtgggaaacagctggtggccttcttagactcaggagttccagggccctggtggggctctagggagacccgtttgcgctgctgccgggtggtgatgccccaa

SEQ ID NO: 430965 - DNA, 1228 bp, Homo Sapiens
gaggggctttcagctggagaccccattggagctcttgaaatgaataagggaataaaattgggagaggatttggagatacacccgtaagtgtaggaacagggcgagatgatcaagggaagaagggactgctgccccaagccagaatatttctatggctctacaagggaaggggcggggcctgtgttctcaccatagacactagagcaagagccccatagaaggaacagtggttgatcactttccaaatgtgatggtcacttcatcacccagagggcctcttctttggcacatgccagggtccctccacctctactggctataaagctcaccccacgattcagttgggcctcaccttggaatcccacccacaacctccttaactctcctgacccccctgaaatgtgcaaaccaccaggcaagccggtggcaaagtccccatttgtcctcaacgcaacggtcatctccaagaggctacctggggtccagcacttgctggggagaggtgataagagtgggagccccccacctccaaccaacaccagtctggcccaccagctgtgaatttggttctgttctacccccagaggatgaaacagtcttcccagccacattttccagtgagcctaatactatttgcaattagttttgctttagtttgcggggattgaggttggtctggtattacgtgtctgtgtgtgtggcaggggaggggcgggcagtcggtgttagcttttcagttcgtcagtgttcacatttacacgaaatccccttggctaggatttccaaatttcctggctgtgaggcggcctggttcggcaactgttaccgatttctccctcaagaaagacacagccagggaggcaaatcggtaagagaaattctgattctctggaacttaaagtctttcaccaaaggtgtcttcctgtgtgacttggcggagcagttgggatggtcccaccgttgagcacgacggccatctcagttggctgatacacgttgcttctaaacggagcgctgggtcttttccccaagctgccactgggtctttttcccaagctgccgttgggaaatcctgctgttcggagagctgcattgtgttcatccatggagaaggccttgttctccatataggcccgcggcagctgcacgtcctcctcgaaggccgtctcccgcatcctgggctgcgacgtgtcgaagtagttgggcgtgttctcctgcagggctccaa

SEQ ID NO: 430966 - DNA, 1570 bp, Homo Sapiens
tgataccaacagaggctggacaaccagttcctccaaaatgttggaaataccaccctttcggacattaatgcttgcagtttttctccctgggcatgccggtttcttagttctgttactgtagaaatgggattcaggccggcattttcagctagtgtagatggaatgacctccatagcatctgcaaaagcacgaacgcagtaggattccataccactcagtgttcgtgaatattcagttaatcgtagggccaactctatttctggagcaccacctcctgcaataagagccctcttcttcactaaacaacgaataacacatagggcatcatgaatggagcgctcagcttcttcaatcaccagtttgttagaaccacgaacaacaattgtaactgtttttccagggctggcacagcctgtaatcttgagcagtttgccagaaccatttaaattgacctcctcagctaactcagcagaacccagcatgtcagcagtaaattggtcaatatgagcaactggcttggttccaattgtcttacaaatgaattcaatgtcttctctttcaatatccttaatcaccatgatcttcattttattcagaaagtgtaatgcaagatcactaagagcatctcttagaatagatttctgtatgagaaggacattacatcctgtttttttaatttgcttcactaaatttaaaatataggctctctcttctcgcagcactcggtccatctgggcatagtcagaaaccactatttgattatccatgtctgttttgggagcagataagcaaaactgaataagcccaatcttggccttttcaactctggttatgccagaatttgacactttttgggtgagaaccagcccttccaccaactcacagtcatccaatgtcccaccaagcttcttaactattttaatatctctaagatctacactggtggctgtggctgggtcaatcactttcatcactgcatttacactcattggagaaagcagacttgaatactgagaaaccacctttgagttcagtgaagtggttgcactatttaacaaagtttctctgtcactcagttccacaggtcgagacatgtcagtcaagatttcaatgcccttttccagggccttctggaatgactcagaaatgatggttggatgaatccctttctgaagaagcttggtacaagaatctaagagggagccagcaatgatgactactgatgtggtgccatctcctgcttctatatcttgagccttagacagctccaccagcattctggctgctggatgtaatacttgcatttgtttcagaatggtagcaccatcatttgtaatggttacatcaccttttccatcttgaatcattttatccattccttttggtccaaggcttgttctaatagcatcagcaaccgctttggcggcggaaatgttgctgaagcggatctgggctggcttgtcgcggtcctgataggcgcctttcccgcggccgccggcagccccggcagtcgccccgctccggggtgccacattctcgggcatggcaaactccggtgtgtctgggccaa

SEQ ID NO: 430967 - DNA, 599 bp, Homo Sapiens
gaaaactttttattgctctttttggatagaaacgggaatttatttgccaggaaggatgatcccatcatacttctgctggaaccagcgcatggcctcctctttgctgattctgtgtttggccccaatgcagcctgtcctgcgcttcttgtctgcgatgctgaaacctggcctacccagcaccacatagaagtccaggccatagataccaatgcttgggtcatatttgatacccagatcgatgtgttcctggatcccaaaaccaaagtttccagtatctgagaagttgttttttcttaactcatactcccgcacctttagacccttctccaagatttcttctgccttggcccctcgaactgtgcagtggacagcaatcttttcatttctccggatgccaaaggatctgacagtgtatctagctttggaaaacacaggggtctgccctgtgagctgctccaacaccttggctgctcgcgtcagtctgtctccactctccccaacacagatgttgagacagagtttgcggatgcgaagttcccgcatggggttctccttttcaccttgatcggtgcgccatgatccaacttttttgtacaaag

SEQ ID NO: 430968 - DNA, 706 bp, Homo Sapiens
gacttcggtgtctgagtcccaagccggctggggtggatgagtacaaagatgggcccggcgggctctagaagtctgggaggccggaggcctgctcccggccccgcacggctggagactgcaaggcgggggacccgcgctcgggaactagggataggattgagtggcagagccgggattagcaactggggagatccgcgacctgcgcgcgccctgtagtggctatagagagtatcacaccccacgcctgctggcttctggtgaccggcctctttccttgcctggccggtttctggaagaggccaagatgggagaaattctcaggattttttcaggtgggcgataccacctgggagggagatcgtggccacgcctcagagcatcactaaggagcatcggggtggaggaaaaggggaaggcctaaagaggtcccaagctgattcattggtgtccttccctccccagctcagaccaccacaggccagggtcagtgacagggccgctatcttgccctgccttggggagccctcaaccaaacctgggagactgggataggagtgcctcactcccttacctcttctgcaagccttgggcagtctcctgaattgatcatgactttgggtgacacggaggccgcccagaaaccctcaaactctgttcacttattcccaattctcattcttggcttgtcgaggggaggatgagccaa

SEQ ID NO: 430969 - DNA, 841 bp, Homo Sapiens
  misc_feature (773)..(792): n is a, c, g, or t
tcatttattttacataacagcaatagtactcaccaagaaagggatataaaccgaaacttcgatgaaaatgaaattcctcaagagaatggcaatgcctcagtgatttccccagcagatcattcggtcttcaaccttcccacaaactgatgttctttcaagttcacttgaggcagaacacagattgttaaaggaaatgggctggcaggaagacagtgaaaatgatgaaacatgtgctcccttaactgaggatgaaatgagagaattccaagttattagtgaacagttacagaagaatggtctgagaaaaaatggtattttgaaaaatggcttgatctgtgacttcaagtttggaccgtggaagaacagcactttcaaacccacaactgagaatgatgacacagagacaagtagcagtgatacatcagatgacgacgatgtgtgaaggatttcctaacagctttagaaatcttagtgtgatacatctctcatacagtttggggtgaattgtaaaaatgaagaactataatttatgtagtgaaataccccattagaagaggattttttgggggacttcaatatgaagaaaaccaagaatgttttgttgggctgtgttgaacattatttctttgtaaatgaatgttgtaggaatgaggacttgggttggtccaacattgactttcttcatcactgcaacatttctctgactagcaatgtgacgatgtaacaaatgagattttctcatttaataataaaaaattgtgtaatgttttgcnnnnnnnnnnnnnnnnnnnncccaactttcttgttcaaaggttgtgcggccgccaacttttttgtacaa

SEQ ID NO: 430970 - DNA, 852 bp, Homo Sapiens
ttctagcttcccgctctctctttgttgctcttctagctgtcgctctgttctttctgctgctcaatccgcttctgtctctctgccagcagttgcttttatattcttcgtgctcccggagctgttgctcctgtagtaactgttgtctccgaagagcctcggaacgttccttgttctcctgctgcagtctcaggaaatctcggcgaagagtagactcaccaggcacgttcacaatggaacttggctctccttcctgttcaggcacttcctcctcttcttcctcactcccactgtactcatactcagtttcatctttctcgcctctcttcttcctggtacgatctatatgatccttaagctggattctaacttgcctttcatttggctgatcccttataaaaggatgtttcaaaagctgctctgtagagggccgctgcatgtaattcttcaccaggcacccttctataaaactaaaaaacttcttcgaccatttttttgacttcagccggggaggagggtttctgggaatgagaaacagtgctctcattggatgcatgtcacagagagggggagcaccttctgccatctcaatggctgtaatgccacaagaccaaagatcacttctgtaatcataggtggcatctgggttctcatcacaggcgatgacctcaggagccatccagtagggagtgcctatgaacgtatttctccgccccacagtcctgtccagctgagcactcacaccaaagtcaacaagtttcacctctgcattctcagtcagcaacacattctggcccttgatatccggccaacttttttgtacaaagtggcatataagaaagcatgctcatcaat

SEQ ID NO: 430971 - DNA, 1209 bp, Homo Sapiens
ttataaagaaccattttattcatctgttgattttcattcattattttcatcaattacaatttttcctctcgtgcatcagaggaaatcacaaaagacctgacagatttacgtagtcaactgagtgcgtaggttgctcaattagtagtacattagtgagtgctaattgataagagatcattttttttcttatataaggatatttatgacattgtaaatgccctttggaccaactcaggacaaggtacaaaatggggcccatggatggagctgtgagcccagctcaccactgttcaactctcttctctgaaacaaattgtccatggggaccctcagcatctgggggcaaaagggccaagtacacaggggtctctgcaccttcttctgggctcttggtggccttgggtcccgccatgtcagttctcacccaccctgggcagcaggcattcaggaggatcttgtcccctttcctctgctcactcagtttcctggcgtggatcctggacagaacggtgacgccaatcttcgtcaccccgtatgcgctgctgggccagccctccttctggtgcactcccttctttgtatcctccacaaacttgttcatgagccccaccagctcctcctcagtgatggtctcactgcggaacttctgctgcagctctgggctgcagcttttaagggctctgacgctcatgatgctagatacgttcaccactctcccttggggttttattagagggagtaattctgtgcacacatctcgggtaccaaagaaatttgttttcatcgtcacttcagcttgaatatgaaagggtgtgggatcagcaaccttgaaggcgatgcccgcgttgttgaccagcacgtccaggccccagtactccttgcgcaggaagtcgcgcagggcgcggatgctctgcagatcgtcgatgtccagctggtggaagcgcgggctcaggccctccgcctgcagctgctgtacggccgcctggccccgcgtcacgtcccgcgccgtgagcaccacgtcccccgagaacagccggcacaggtcgcgcacgatggccaagccgatgcccttgttgcctccagtcaccagcgctacatggatgccggacgacatggctgaacggggcgcgcggaacacctgcgtggagaacagacctggctcaggccctgggaatctctccgcagcgtgccaacttttttgtacaaagt

SEQ ID NO: 430972 - DNA, 1294 bp, Homo Sapiens
ggagggggcccttaaacccagagctcaccccaaaatgcattgacccttcaatgcatggcaggagtaggatgggaaaggtgagggggtttgaagatggagtggcagaatgaaaaatcaagtcagtagatgcagaggcgaagtcatcaatggtaaaccaggagattaaagaaggaaaaggtagggaaagggtgccgtgaaaggttctccctgagacccccagggagaggtgggggccggcttgcctgttaatttaatattaaattggggatgggaatcgagaggaaaaagttattcaggggatgatttctcagcctctcagcctgtacaagagaggctgagggcccggggccctcaccagtcatagcggcgggactgtcgggaaggggagtcctcaggtccctggatggccaggcggggaggcccctccgcccttcgtcccccagcccctgaggactcaagccgccgaaactccaggggacgctgctgccggaatcgggaggtctcccgccgccactcgtcatcaaacgctgcggcctcactctcatccaggttgatatagtcctgccgctcctcctggtcccccgtgcgatggtttcgggagcgctggaggatgtgagccctgtcccggatgtgatgcccaatggacatctgctccagtccactgtctgaatcccgaacagtcctccgtgtctcccggatcccgcctggtgccgagcgcatctctgatgtctcttggtagaccttgggggcaccatcacccgtattggagtaggagatgacagtggaagatgagaaggtctggcaattgcctccagctgtcatgtgttccatgtttccaatcatgtcattcatcatcccaaacatgtccatgaaaccacccgacattcccagcatcccaaagggggagacagcccagcctgctgcatccggcggctggcaggcctggtccctggcatgttgccatctgtgatgctgaggaaggggctatatccaaagccacctgacaacatacggctcatatgctgacggtgaatagcaaagggatccatcaggaacatgggatcctcaggctccacgtccctcatgaagcggaacatcctgatctcagctccagggggctccacacagtgcccgattcgggctcagcggcccatccggccggtttcgcttcccggtacgctgcagggtcagggtcgcggcccggaacgtggggattggtccgggcttgagctcctcggccttccacgccgcctcctcccacagctgccaacttttttgtacaaagttggccaaa

SEQ ID NO: 430973 - DNA, 996 bp, Homo Sapiens
ttgggggccttttatctcggtgctgccgggggaggcgggaggaggagacaccaggggtggccctgagcgccggcgacacctttcctggactataaattgagcacctgggatgggtagggggccaacgcagtcaccgccgtccgcagtcacagtccagccactgaccgcagcagcgcccttgcgtagcagccgcttgcagcgagaacactgaattgccaacgagcaggagagtctcaaggcgcaagaggaggccagggctcgacccacagagcaccctcagccatcgcgagtttccgggcgccaaagccaggagaagccgcccatcccgcagggccggtctgccagcgagacgagagttggcgagggcggaggagtgccgggaatcccgccacaccggctatagccaggcccccagcgcgggccttggagagcgcgtgaaggcgggcatccccttgacccggccgaccatccccgtgcccctgcgtccctgcgctccaacgtccgcgcggccaccatgatgcaaatctgcgacacctacaaccagaagcactcgctctttaacgccatgaatcgcttcattggcgccgtgaacaacatggaccagacggtgatggtgcccagcttgctgcgcgacgtgcccctggctgaccccgggttagacaacgatgttggcgtggaggtaggcggcagtggcggctgcctggaggagcgcacgcccccagtccccgactcgggaagcgccaatggcagctttttcgcgccctctcgggacatgtacagccactacgtgcttctcaagtccatccgcaacgacatcgagtggggggtcctgcaccagccgcctccaccggctgggagcgaggagggcagtgcctggaagtccaagacatcctggtggacctgggccacttggagggtgcggacgccggcgaagaagacctggaacagcagttccactaccacctgcgcgggctgcacactgtgctctcgaaactc

SEQ ID NO: 430974 - DNA, 851 bp, Homo Sapiens
ctttgtacaaaaaagttggccgtcctccgcccgaacccgactgagcctgttcgcgtcgactgcccagagtccgcgaatcctccgctccgagcccgtccggactcccccgatcccagctttctctcctttgaaaacactaagaataatgtcactgcatcagtttttactagagccaatcacctgtcatgcctggaacagggatcgtactcagattgccctcagtcccaataatcacgaagtgcacatctataagaagaacgggagccagtgggtgaaagctcatgaactcaaggagcacaacggacacatcacaggtattgactgggctcccaagagcgaccgcattgtcacttgtggggcagaccgcaatgcctatgtctggagtcagaaagatggtgtttggaagccaaccctggtgatcctgagaattaatcgcgcagctacttttgtgaagtggtcccccctagagaacaaatttgctgtgggaagtggagcacgactcatttctgtttgttactttgagtctgaaaatgactggtgggtgagcaagcacattaaaaagccgattcgctccacagtcctcagcttggattggcatcccaacaacgttttgctggcagcaggatcatgtgacttcaaatgcagagtgttttctgcctacattaaagaagtggatgaaaagccagccagcacgccctggggcagcaagatgccttttgggcagctgatgtcagagtttggtggcagtggcactggtggctgggtccacggggtaagcttctctgccagtgggagccgcctggcctgggtcagccacgacagcaccgtgtctgttgctgatgcctcaaaaa

SEQ ID NO: 430975 - DNA, 876 bp, Homo Sapiens
ttggggagaatactttttgcgatgcctactggagactttgattcgaagcccagttgggaccaggtggaggaggagggggaggacgacaaatgtgtcaccagcgagctcctcaaggggatccctctggccacaggtgacaccagcccagagccagagctactgccgggagctccactgccgcctcccaaggaggtcatcaacggaaacataaagacagtgacagagtacaagatagatgaggatggcaagaagttcaagattgtccgcaccttcaggattgagacccggaaggcttcaaaggctgtcgcaaggaggaagaactggaagaagttcgggaactcagagtttgacccccccggacccaatgtggccaccaccactgtcagtgacgatgtctctatgacgttcatcaccagcaaagaggacctgaactgccaggaggaggaggaccctatgaacaaactcaagggccagaagatcgtgtcctgccgcatctgcaagggcgaccactggaccacccgctgcccctacaaggatacgctggggcccatgcagaaggagctggccgagcagctgggcctgtctactggcgagaaggagaagctgccgggagagctagagccggtgcaggccacgcagaacaagacagggaagtatgtgccgccgagcctgcgcgacggggccagccgccgcggggagtccatgcagcccaaccgcagagccgacgacaacgccaccatccgtgtcaccaacttgtcagagagacacgcgtgagaccgacctgcagagctcttccagcctttcactccatctcccgcatctacctggctaagacaagaccactggccaatccaagggctttgccttcatcagctt

SEQ ID NO: 430976 - DNA, 902 bp, Homo Sapiens
cccaccaccttgccgttctccatgatgatgtcatccacaggtttgttcagcatatatgtccccccatagatggcactcaatcttgcaaaaccctggggcagctcgcccaagccgtagagcgggtataaatatgggctcttgccataccgggccagggactcactgtacaacttgatgcggttgacggtctcaaggcagggctggtccaggtagtcatcagtgcggtagagcgccagggcatggccagtgaaatcgatgacatcctggcccagatcaaacttccggtagacgtcacgcatgctggtagtctgggggtcaacgccctcaaaggtcttggggtcattctcatcgaagtttgccacaaacaccaggaacttgcggaagcgccgtttctcaaacatgcccatcagattggaagccaaggcctcagtctcagtggacggcactttgtagatcttgccccccttgtagacaaagctgccctccaccaccttgaagtccaggtagcgagtcacctctgtatacagtagcatctttaccagctgcccgttagccatgaggaatttgggaatcaggtcaacattccagtctcggcctcggcccatcgactcagggggcccctccagcaactgaaaacgcttatacagctcctccaggggtgtgatggaggagctctcgcccccgtagtaggggttccggtccatgtgcagcaccttcttcccgttcacagacatgatgcccgacaggatgcattcggtgagaccggtccccagcacgatcacatcgtattcctcgtccatggtcaggcctcggtgccagcgcccgctcggctcctcctcctccttcaccgcagcagtcgccgtctctttccacggccgccgccccaacttttttgtacaaag

SEQ ID NO: 430977 - DNA, 247 bp, Homo Sapiens
ggatccgccctagaatggccacattaccagtgaaggggcattttttgtcaatgtaggtgccatcaatagcctccttgggtgttttgaagcccagactgatgttcttgtagtaccgcgggagcttttccttgccagtttctcccagcaggaccctcttcttgttttgaaagatggtcggctgcttttggtaggcacgctcagtctgaatgtccgccatcttccccaacttttttgtacaaagttggca

SEQ ID NO: 430978 - DNA, 950 bp, Homo Sapiens
gttggggatgagctgttcttgttcagggggctccgggtcacggggtcaaatggacccacacgctgcaggtgctcctcgatgtccttgcggtcgtaagttgatgccactgggcgtgatgcacggctcccgcatcagctcaaagctgatcttgcccacacaggtagtcggggatgtctcgcttcttcctcttctcatccacctgagaaaaaagctcgtccatgtccgccatgtacttgtcgtgcttggcctcaatgcaggcctgctgggcccggacgtggctgtcgtcctcatcaccctcgtggtttcgctggcactcttccagctccctctcacgctccgcggcaatgagcctggagaggtaggagtgcagctcgctctcctggtggatgcgccgctcctcaatgctgttccagcgcttcttcttcgcgattcgaagagcgctggggatgtcgtccccgaagttcagccgctgctccttggccaggctgtaagctcgctgcagattggcgatggcctcatcatagctctccatctccagctggcactgccccaggaagaagtgcgccttcacagactgcccgtccagctccagggcgcgccggcagtcggccagggcctgctcgtgctgctgcatcttcaggtagcacaaggcccggttggtgtaatacacggccaccagcgggttccgggtgatcgcgcggccgtagcaggccgccgcctccgggtactttcggcccacgaacagacgattgccctgctccttgagctcctgcgcgctcgggctcttctcggggcttccgccgccagcgcccagccgtgcgccgccctccttctcctccttgcccttcatggcgccgcgcggcacggcctgggctccgctcccaagctccgcgcctcgcggcccagcgcccgcagccggagccccgcagcccgagcccgcgatccgccaa

SEQ ID NO: 430979 - DNA, 1042 bp, Homo Sapiens
ccaatgaacttgagcacattggggtgttccaggtggcgcatcactttcaccttcagtcagaaaagttttctgggtctcctcatcacatcgaattaactctttcatgaccatcactttgcccgtggctttgtgtgtcacctgaccccccctcccagttctcagcttgatagcctgcccaaagaagcccttccccaggacctccccatggattaggtcacagggccggaagatctgctgtgaatagctgctggaacaacgaagggattctgagcggctgatgtcacgggctgaacagcaggggctcctttggggagctggggccaggggacttggagatactgttactgcgccttagggaacgtctcctcagtgtcccctccagattctccttggtgtccagggtgctgagggcgtgggggtgtccggcattctgcatgtgaggagcgagccgggcctccagccgcagctggtccaggcgttgggagacggggtcatgttcaatcaacagctgaagtgtctggctcgtctggctaattgcatcctccacctcctccactcgaagtgtgcggacgggggtcccattgatctccaggatgcggtccccagggtggatggcgtttcgattgttgggactgatgtgcatccggttgacctctttcacttgcacagtggtggcgtagttggagcaggcactctccacgggcacggagaagccccgcctgccttcagtggtggccggcatggagatgagcgtgacagagtagggcagctgctcctgaacagactctgtggagagtctctcaaacatgggtgccagcaccacctcattgtggcacttcccacagtagagggtggcatgctgcaccagtgcatatgcatccccatcctcaatgatcaccttgcagctcatacaggcaaagcactctgggtggtacttgaactccccagccacctgtgagcaggtggggagaagggtgtacaaagggaggaaggaagtgagttatcactgttgctggagtgaggacaggggtgggtgaaccaa

SEQ ID NO: 430980 - DNA, 833 bp, Homo Sapiens
tttaattgaggcccgtcagctttagttctctttctcttgcacagttttagttccccggagacgtccagtccggcgggcagcaatgagaccccactttcggccagcaggggcatctctgcggatggtggagggcttgccgatgtgctggtggttgccacctccaaaaggatgctccacaggattcatggccacaccccgtactcgtggccagcagttcctctttgccttatatatgtggtacgcccggccagctatcaagatgggtttgtcaattcggccacctccagccaccacaccaaccacagctctgttggctgaggagataaccttcttggagccggagggcagcttcacacgggtcttcttggtctcagggttgtgggagataacggtggcatagttccatgatgcccgggccagcttgccacggtctccaggcttctcctccaggcagcacacgatggtaccctcaggcatggtgcccacagggagcacattgccaatgttgagctgggccttcttgccgcaatacacaaactggcccgtgtgaatgccctcggcggcaatgaacagctccgtccgcttcttaaaccgatacggatcccggaagaccaccttggcgaggggcgcgccgcggcccgggtcgtggatgatgtccttgacgatgcccttgatgtagccgtgccgctcagcgaaatccacggcgcgcaggcgcgcagcgcctttacggtgcttcacgtgcgcgcggaacacagacccggcgcccttcctctgtccacggatcacacggcccatggcgacgggtcctgttcaccccaacttttttgtacaaa

SEQ ID NO: 430981 - DNA, 909 bp, Homo Sapiens
gctgctgaataggtccaatccaaccaatctcgatttatttcatcatctcctccacaatagggccacgttgtgcattcatccgcaaattttgattggctccaggattaacaaccacttgaggagcagcattctgattggcaggctggttttcagctggaaactggttgtgaataggggctggagcaggtgcagagaccacaggtatctcttgtgcacttggtggtggaacaaaagcccctgatgcagcagtggctgctaaatattgcatgtagtactgtcgtgcatatatctgctggaaccaggaaagctgaagccacccatagggtgtgtaaccggagaaaccaggacccaggccttggaatgcctgctgggcagcttcaggccttgagatgttttcccatccaggggaagaaaggttccgaagaacttccctttgccttaaaccatcacttgaggaatcctcaggatactgtccccgattagaaccagcaggctcctctgtggattcagccaccttggcgttgatttctggcatttttgaaggactcttcacattgcacaccagatgcaaaacatgccgtttttcctgctttggaagcaagtccctgagacattggtgatccaacaacagcttcccagaataaattaacctctggtcctctggacgcggacgctcggggtagacgcggctcaggtgggccttgaggtggcccacactccagccgcggtcgccactcagctccaagtcgcggtggcgctggttggggctcttcaccaggagcgtgacgggctcgggttcggtctcggactccatggcggcggcggcggtgtcggggctccgctgcgctcctaggtgccaggcaggcggcgtctcagccgcccgcaatctctgcaacgacagttcaccaa

SEQ ID NO: 430982 - DNA, 1293 bp, Homo Sapiens
  misc_feature (1085)..(1094): n is a, c, g, or t
tttcatggagccacgcagactggcccgggaagcaacacccaggttcaacatttaagagcactcgctataacattctttttggacgcaggtggtggaaaagtttaaaaaacaggcggaggagtgacggggggatacaagcatatcctatactgggggtgacggtcattcaaagagcaaattactgcagcttatatcttttccactatgttgcaagaaatgaatctatcctgacccataatatgaaagatgcgacgcacatgcattcccgaggctctaaaatcccattttaaagaaccgtttcacatcctcgtggagtggagagtggtccacttgacttggtgaggtcagaagttcctgaagatccctgtcgtccccgttggcgggggagcccattgtggagctgtggggactgccacactcaccatgcacctgttggtttgcagggacagaggtgcggccctgactcttctcaccctgtgtcatccgggcttgtctttcgtctgtcaagtcagtcctcctgcgtgactgatgggtgcaccacgcttaggtcacccgttgcagggaccggaagtccatggctctgccgcaaccctgagcggtttgcagtcccccccggggaagaagcagtcagagaggctcacgctcacctactttaaaaacccaaagccacttcctcttcacctgcctgggcctcagcgtctctgcgcttgtggtttctcgtccccgagggctgactgagctgctccggaagggtggtgtgtggtcaaccttggttggctgagaggagcaatttcctggtttccacaagtaaagacagccccatcccttgggacctgtcctttccgtccctgtccccttggcttctataggacttccttgtcttagattcataaacagcaagaggaactgaggatgcttgaggggaccacctagttaccaaagccaagcaaagaataaagctgcccgacatcatccccaggcttccgtggcgctctcggtcacaggagctctaggccaatggttcctcttgactgtttctgcaccaaatgagaggaggggctgctctgctctaaggcgtggcggcnnnnnnnnnntggtggccacagattaggggacctcaggttttcctcaaaaacccacacagggaaagaaacttggctctaaaagcaaactcaacgaattccacatgccctgaagagcacgtgataaaatacaagggtggtggcggcgggatccctcaaaggaccacgagaggcacggggtctttggtgatgaaagtgctaacctcggcgg

SEQ ID NO: 430983 - DNA, 1400 bp, Homo Sapiens
ttggggttgtaggaccggcgaggaataggaatcatggcggctgcgctgttcgtgctgctgggattcgcgctgctgggggcccacggagcctccggggctgccggcacagtcttcactaccgtagaagaccttggctccaagatactcctcacctgctccttgaatgacagcgccacagaggtcacagggcaccgctggctgaaggggggcgtggtgctgaaggaggacgcgctgcccggccagaaaacggagttcaaggtggactccgacgaccagtggggagagtactcctgcgtcttcctccccgagcccatgggcacggccaacatccagctccacgggcctcccagagtgaaggctgtgaagtcgtcagaacacatcaacgagggggagacggccatgctggtctgcaagtcagagtccgtgccacctgtcactgactgggcctggtacaagatcactgactctgaggacaaggccctcatgaacggctccgagagcaggttcttcgtgagttcctcgcagggccggtcagagctacacattgagaacctgaacatggaggccgaccccggccagtaccggtgcaacggcaccagctccaagggctccgaccaggccatcatcacgctccgcgtgcgcagccacctggccgccctctggcccttcctgggcatcgtggctgaggtgctggtgctggtcaccatcatcttcatctacgagaagcgccggaagcccgaggacgtcctggatgatgacgacgccggctctgcacccctgaagagcagcgggcagcaccagaatgacaaaggcaagaacgtccgccagaggaactcttcctgaggcaggtggcccgaggacgctccctgctccgcgtctgcgccgccgccggagtccactcccagtgcttgcaagattccaagttctcacctcttaaagaaaacccaccccgtagattcccatcatacacttccttcttttttaaaaaagttgggttttctccattcaggattctgttccttaggattttttccttctgaagtgtttcacgagagcccgggagctgctgccctgcggccccgtctgtggctttcagcctctgggtctgagtcatggccgggtgggcggcacagccttctccactggccggagtcagtgccaggtccttgccctttgtggaaagtcacaggtcacacgaggggccccgtgtcctgcctgtctgaagccaatgctgtctggttgcgccatttttgtgcttttatgtttaattttatgagggccacgggtctgtgttcgactcaacctcagggacgactctgacctcttggccacaaaggactcacttgcccacaccgagggcgacgcgatcacagcctcaagtcactcccaagccccctcct

SEQ ID NO: 430984 - DNA, 893 bp, Homo Sapiens
ttcccacaacagctcaagcaattgcgatccaaagaggatttgaaaatatgagacttctaaggcataatattgtttgcagtgtacaccaaaatcttctattttattaagtggaatagtctggtactcagaaggtccttcatcaggaggtttgtagccctttgggtatgtcctaaaggcgccaagattcacttttccgtgcggatattgttcttgttggatcaatcaccactgctacaaatggttcctggaactgctgattgagcatctgagtactaacatcaatcccagaaagccagcagccatagccagggtggctatgataccacccgattgcattttcaaggcggccaacctgttttgcattttctatgtatgcagccatgtattcatatgcagcagcctgagcatttactcgggtttcagtgccctccacaggcaaagcaaaactgtccataatgatcatggtttcaccatccacctttcctagcatcagacccatcacttccaagttgcctcccgatctggcatgcatcaccatcttcagcagagccaatgctgagattttgcagtacttaaagtaatggtgatccttagtccagggcttcgccgccaggatttcttgctgctgtttcttgtcgtatttgtagatttcatcgatactctgagcttcctgcatgttgttggccagttcccaggttttctgggccataccgctcccggacgccgccatcgccgaggaagcggagaagttgtcgtctctacaaccaagacgcaactttacctcgctaggtttccgggtgtgggccttgaccctccgcaccacgggaacaaactcttacctagacttggtggggcagccccaacttttttgtacaaagttggcttttataagg

SEQ ID NO: 430985 - DNA, 879 bp, Homo Sapiens
ttggccggagcctgcgagccgagaccgtaagcgcccggggccggccgggcccgcactccccggacgcagacgcggttcgggctccgcgcgggctcggccgccggggtgggcggcgggccggggcgccgaggggtcggggctgcggtcggcccgcaggggtgcagagggacttgtagttggtccgcccccagctcctgccccggccaggagactgcgcgtgccgcctactgggggaaggagcctgcaggcgaccgcggacttctcgcagggaattccgcgtcccagactgtgggcggacgccgcagggagggaggctcgcgaccccgagagcgcaccgcgtcccctggcctgggcgagctctgcttccagggccgtggctcgctcggcggtgaaatgcacttaatttgtcacccaagtcggaacactgattttcatgcgcgtccgtgtgaagagaccaccaaacagtctttgtgagccatgtggctagaaatcctcctcacttcagtgctgggctttgccatctactggttcatctcccgggacaaagaggaaactttgccacttgaagatgggtggtgggggccaggcacgaggtccgcagccagggaggacgacagcatccgccctttcaaggtggaaacgtcagatgaggagatccacgacttacaccagaggatcgataagttccgtttcaccccacctttggaggacagctgcttccactatggcttcaactccaactacctgaagaaagtcatctccctactggcggaatgaatttgactgggaagaagcaagtggagattctcaacagataccctcacttccagactaagattgaaaggctggacatccacttcatccacgtgaagccccccc

SEQ ID NO: 430986 - DNA, 889 bp, Homo Sapiens
ctttgtacaaaaaagttggtggggaatccgctccagcggggcgctccagtccctcagacgtgggctgagcttgggacgagctgcgttccgccccaggccactgtagggaacggcggtggcgcctccccagcaaaccggaccgactgggtccagccgccgcagggaatgacgccggtgctcctacagccacggctccgggcggggaaggcgagccccacagccggccctgcgacgcccgcctgggcagcaccgataaggagctgaaggcaggagccgccgccacgggcagcgcccccacagcgccagggaccccctggcagcgggagccgcgggtcgaggttatggatccagcgggcggcccccggggcgtgctcccgcggccctgccgcgtgctggtgctgctgaacccgcgcggcggcaagggcaaggccttgcagctcttccggagtcacgtgcagccccttttggctgaggctgaaatctccttcacgctgatgctcactgagcggcggaaccacgcgcgggagctggtgcggtcggaggagctgggccgctgggacgctctggtggtcatgtctggagacgggctgatgcacgaggtggtgaacgggctcatggagcggcctgactgggagaccgccatccagaagcccctgtgtagcctcccagcagctctggcaacgcgctggcagcttccttgaaccattatgctggctatgagcacgtcaccaatgaagacctcctgaccaactgcacgctattgctgtgccgccggctgctgtcacccatgaacctgctgtctctgcacacggcttcggggctgcgcctcttctctgtgctcagcctggcctggggctttcattgctgatgtggacctagaaagtgagaa

SEQ ID NO: 430987 - DNA, 881 bp, Homo Sapiens
ttcatgaaagtctgggaaatgttcatgcataaggttattgccttagctgacttaaaattgccccatacaatggtacatatcaacccttagtgaagccttttaaaaaacaaacaggttgaaaaatgggttaaagtaggcaaatacagcatatctgcctttagagctatcaactcaggaattctctcaattatgaaatcttgcagagaagttatttttctttctcaaaatccaggtgatgacaatattccttactccagatctggcattttttcatcatcactgtcttgtgaatcatcatctgctccatctacttctggtaaatctacatcctcatcaccacccatgttgttcatcatctcagagaaacgatcaaaattagacatgtcttcatctgaatcatcttcccagtctttccaattattgaagtcgacactaagccaattaagctttgccctttcttttgttaaccttggccatgactggccagattctccttttcgtaaacaacataaaattgatctgtccgttcttttatgcttggaatcatttggatcaatacagtgaaaaagatcaatttcatttaaatgcttaaaattatcacttcctccgagacaactgaatgtaagtttggatttttcaaaatttacattaacatccttactgtcttcaacacaaaattcaatgaagacatagtcccttcgatcgtaccactttgcagaagcaggctgcattgtgaacggggcagggggacgggcgaactggtgggcgggcctctctggcggcggctgctgctagggagtcgacttctctccggtggcgactccgctttttctctccggtcgcgccctcttctcgcttccctcaggcgacggcggccccaa

SEQ ID NO: 430988 - DNA, 462 bp, Homo Sapiens
ttttcagggggaggggtggcttaacattcccaagccccgggaataagcggagagagggaataagcggagagaggaagcgtgggggaaggaacagccatgctggagggagagggagcttcttggagtaaaaaggttaggagagggcaatcttcgtgcaaaagggatggacagatggcccaggaaagacagaagagggaggatgtgaggaagggtgagggctggaggcagggagaggctcgagtgtggaagcatggtgagcaggaagccagtgtgcatagggtcttctctcaccaggaagagaaagagcttaaggaggtaagagaatccgaatgagaatggccgcaagagctgcttgtcaacaggaataaaaaataagcgtgtcaggaaaagaaatgacagttacagcccaagagtgcatggaatgagatgagtgtgcaaaagccaacttttttgtacaaagtt

SEQ ID NO: 430989 - DNA, 856 bp, Homo Sapiens
  misc_feature (788)..(807): n is a, c, g, or t
tttgatataaattttcgagtcaagtcatagccctggactctccaggtggcctcccaaattcgattttgaccccctgaccctgtctcacggaggcatagcatccaccctaagtaaaggatttagccaggaatgacagctttccactgagtgttattggggacagtataaacagtttggaaagcaagtaaggaggtgtgagggctagcaatcattaaaagcacattaaaaaacaatttttaaaaatctttattagagaaagttgtaaatgcatatctgttacagaattcctgtgatttgtagagttttctagtcagttttgaatataaataggtcacatatctttatctttttgcatactttgttacaaatatgcaaataagataggcatacttgctacaaaataggtacagcaggaatgtaatatgttcagaaaaggcaaactggttattaaaacacattaacaggtaaggagtttctaatattttaaatactaaaattttacatgtgtattttgaagtttttaaaatggaaaaataaagaacctttaaaaaacccaacagtgtggaataaagataaacttgttgcactcaaggtacatttttactttgtaaagcaagaagccaatacactcagttggataaaaatgagagaaaaattgtaaatatagagagttacagcttatagagctgaagaggaataaaccaaaaaaaagtgtctttgaataactttatgtattttcaacagtttaagatatcagaaacttggaaaataaatatgatatatatatnnnnnnnnnnnnnnnnnnnncccaactttcttgtacaaaggtgtgcggccgccaacttttttgtacaaa

SEQ ID NO: 430990 - DNA, 906 bp, Homo Sapiens
gggtaaaaatatgcagtgatatattaataatattaacttaaagtcaccatcagctcagattcatttctggacaacttttgcagtattgagaaatctccaccaaagccataaaagtatttctccaaagttaaatgcactttattcactatttctaagtttcatatgaaccagcaattgtgtttcttataggcaagtgcattttggggagctgagaggtaagacatctccaacaaggaaggagagaggatacttgggattatatttggttcagccttatcaaaagagagcctttgaggaaaattcagcactactgtgcctactttttatttaacttttaatctaaattcttttgaattcctttccatttgcagttttcagagagtctgatcctgaagactttcacctcctggtctggcagaagattcctcacagacagcaagactgcgagtcagtttaccttttcctgctcctgacttggattttcttctttcttgattctgagcctccagccgcctctgcagttccagtttctcctcttcatccagactttctgatttaacaatgccgttctctggagtggccgtctcctgctcagtccctccttcctctgctattgcctgattcaggtctccttgctcagacattctcccagatgcaaattaaaataacaagattttatgccctttggtgcagaattcctgctgtaggtcttggcgacttactagcggcttctgtcgttctacgccaggaaaatccacacaagtgatcagagacaactggagtcccatgtccccattaacagttcggaatgcccatctccatgcgattcccttacacagtgtgacacatcgtcaacactaatgaccagcttccagcaaatcacgttcacagcttgatccagcccaa

SEQ ID NO: 430991 - DNA, 906 bp, Homo Sapiens
atgatgatggccaggggcaggtttctgtaggggttgatcatttcctctgtgacgaaattcaagtaattccatcctccataggcaaagaggccgctgtataatgccagcacaatgttccccacatccagtttggtgcttcaaatgagaagttgggatctagattggacacatcacccttcccgatctggacgaagcccagcaggatgatcagggccagggccaggagcttggcggcggcaaaggcatcctggacccgggtggcggccttcacgctgtagcagttcacggccgtgagcagcagcacgcagaggcaggccacgagcttggctgcctcctcgggcaccgggcaggtggggaagagcggcttgagcaggtaggtggcgaagaccagggccacgatgtactgcgatgaaggccggatgatgagcagctcgatccagagcttgaggaaggcgggcagcgagccgtagacctccagcatgtaggcgtagtcgccgcccgatttggagatggtggtgccgagctccgcgtagcagagcgcgcccacgatggagaagacgccgcacgcggcccacaccaccagcgccagccccggcgagcctgcctccttgagcacgcccgtgggcgtcacgaagatgcccgagccgataatggtccccacgatgatggccacgccgttgagcagcgtgatgttccgctgcagggtcacgccctcgccctcgcctgccggcgccgagccgtccgcgctcttggcggccagcatcttctcccgcgcctcttccttctcctcggccgccggcgccgctagcgcgcgccgcttcgggcccgcacccgccatgctctgcgcaccggccgggcctgggacacccgggagccgcggcccagcgagcactgtgcgcgccccaa

SEQ ID NO: 430992 - DNA, 894 bp, Homo Sapiens
gatattttgccactcagccaagaatgaggatgcatcttcagattctctatgtcccgaacctggaacccatccacgccagcttgcagccaaaactccagagcatccttcaccttggtggccacagtgtcaacgtgagtggagaaccacgagttctcaccccggtagttgggagtaaggtccagaatgacacggatgctcttttttttagccgattgcaagagactgtcaaaatcttccttggagccaaaattggggtcgatctgcagcaagtcagtctgagcgacatcatccttctggttcttgtgaattggacccagcacaaggcccttcaccttcagagagctcaggtaatcgagacgccccttcagacccgccaggttgcccgcgccgtggccctggaaggcctgaaggtcgccgatgcggtagagggcgcccgtgtgccaccacttctgcgccggtagctcgcgacaacgcggcgctcgcacgattatgaccacggcaccagcaagcatgccgagccagccgagccagaagagcagcagcagtgcccagcgggtgcgtacccagccggggctgcctgccaccttcagcagctcctccttggacaggcccgtgaacttagccgcggctgccgcctccgcctcgtcttccgccaccttgatcttcaccagaccattcttctcggctcccgccagggacatggccgccccagacgccgcgttcatcggctgcttctcgggctctaactcattcagctccacctccttcatatccacctcggtgtcctggctcatggtgcctgcagaaccggcgacacgacgcagcttgcggtcagatggtggctcaacccctacctggaccctgggactcagaacccaacttttttgtacaaag

SEQ ID NO: 430993 - DNA, 765 bp, Homo Sapiens
ggcagatgggcactcgccgatttaggtattaaatgtcaattaatacgtgcataaagtggctgataaaataacttaaagtgttacaaaaaagagacagtccacggtggcggcaggcacatgcaggcgggactgggtcagacactccagggctgcacatgttccagctggcctgagtccgacacgtcatagctggcccttgtacttggccaggatttcatgaggggccgtagcttgagccaccactgttctttgggaatcctgtgctcaaaatccgtttgcttcttcagctctgccacaggttgaaaaataacgtttcttttgcttattcccagcacacaaatggaatcatcggtggtaaatttttttcctctgccccgggcctccttgagttttgcagtgatccactccatagctctggcagagattttggttccaaagtttctgtcaaatggagagggtgccccaccctgctgcatgtgacccagcacgttcttcctgcagtcaaacacgcctttgccctcttctgaatacagctggtaaatgaagtcggtggtgtagttttcactgcagctctcatttctgagcacaaggcctctctggatggtggtcttcattttctccgtcaggtgctccacgttggactgcagatccctgatgtcgaagggctcttcgaaaatgtatgcggcatcagctccagccgcgagcccccccatgttggccaggtagccacagtagcgcgcacaaggccccaacttttttgtacaa

SEQ ID NO: 430994 - DNA, 830 bp, Homo Sapiens
ttgggacccgggaaggggcagaagctagcgagccccgcccggccgccgggaaggtgggggaagccccgtgcaccccccgccctccggccgccgccgccccgctggccctgcagccgtcgccgctgcctcgggctacagccccgggctcggcggtcccggctggggaaggagggcggcgagcgcgtccggagccgccggagatggcgggagggcactgcggcagcgtccccgcggcggcggccggcagcggcgagatcgtccaactgaacgtaggggggaccagatttagtacctcaagacaaactcttatgtggattccagattcttttttttccagtttgctgagtgggagaatttcaacacttcgagatgaaactggtgctatatttattgatagagatccagcagcatttgcacccattttaaattttcttcggacaaaagaactagacttaaggggagtgagtattaatgttctcaggcatgaagcagaattttacgggatcactccattagagaaaataaaaatggagtactgtttttctgtttgcatgtactcttgacaagtttgctttgaaatgtttttagtaagaaggcttctcttatgtgaagaattggagcgttcctcttgtggcagtgtcctttttcatggttacttgcccccaccaggtattcctagtcgtaaaataaacaacacagtcagatctgctgattctaggaatggtctaaattctacagaagtgaagcccggggaaatggtacacagcctgttctctctggaacgggagaagaaactgttaggctaggatttcctgtggatccacgaaagg

SEQ ID NO: 430995 - DNA, 898 bp, Homo Sapiens
tttggagagcctggactgtgtactatttgctcgatctctgcccaaaatgaagaaggtcttggaagtcctcatcgctgccactaaactccatagggtcacttcttctacactagtggtataagggtcaaacgctacaacactgacccaggacttgtgcccgtggcctctggctattactcggcagtctacaaaggaccagactgtcaccaagtcgtcctccccacctgtcacgatgtacttgccatccgggctccagcacacacacagcaagcccccaaagtagcttttcatcgtaccgtgcagctccactgagtcaaagttgaacacccgcagaaacccgtcctggctcacgcacgctaagaacttgccatctggggagaaagcaaactcgttgagggccccctcgcccaccgtccacttaaggagagggttcctcgtggatttgctcttgcaagtgtgcacggcaaagctctctccctgcttcagaagctggtagtggggggctgtggtgccacaagtgtgctccacattatataagtacatgttcccactcgagtgggctactaggaaaaggctttccgaaccgggaacccatttgacacaggtaactcgtgacttgtctattagtctttcctcattaaaaagtttgctagtttcttttttgattgggtctataagctggacttggcctgcggaaaagcccactaggagagagacactttctgctgtggctgttaggtggttgaagtcatgacaagtaggctgtgttcctttgtatatccttttatctattggtttactcaagtcagcagccttcccgggtggtgaattgggtcttaatctcgttcatctccttccctcctccctccgtcgccatcttggaaagcagcgttcccaa

SEQ ID NO: 430996 - DNA, 876 bp, Homo Sapiens
gaagccgggccatgtagaagtcccagagtgcccagcgtgggcgtttcgcccgtgcccgggcaccggcagtgaggcgaagctggcggtgagcgcctggcgcacggcctggagctgctgctgcagcgccagcgtcctccgctctccagcgccagctctgctccagacgctcgcgcgcgctgctcatgctctgcgtgtgcctctgcagtaccgcgttctgctcctcgaaggccacattcatcttccgcaagcgccgaagctccgcctcacgcgctttgttttggtccaagaactcttcagtgaagatgggaacatcgaaggtggagaagccatcgcagtccccacccttgtgtccattcaggagagtgttcatgagcccagagctcgagtcttctttcttgatcttcttctcctggatcttctccgtgcacatcttataggcttcagactgctggtacgcccgcagctccttcatgtactgctgcttctctctctcggcctcatccaggtaccgctgcttttccgttggctgcagcttgctccactcggcgcccagcatcttggtgatctcgggaaagggcagatccgggtggcgcgtgcggatctgctcgcgccgctcgttcaggaagcgcacgtagcccgtgaccggtgccttgggcccattcggcagaatcttcttccgcttcttgcccttgggccagccgcgtttcttcaccggctcctcctcgtgggaccccttctcgcccgcgcgtggaccctcgccgcgctcttgcttgacagtcaccacgaagcccccatgctggcccggagccttgccgcccgccggcgcggcggccgcgccgggctgcttggggccgtgggacatggccgctccgccaa

SEQ ID NO: 430997 - DNA, 931 bp, Homo Sapiens
gtggcagctcctcctttcgaggctggtggctgacttgctgaactgccgtgggctgggtcaaagtacctgtcaccccacagcttcttcatcatgtcctctactttcttggcccgctcggcaggccccaactggccctccccttggcggcgaacttggccacatacatctcggcaaactgcttcagggtgaaggcccacccgtggaggccagacccaaagcccacggtaccgaggacaggatcgatcatgatgttgcccatggggccgctctcgccctcgccgtaggtggagatgatgacgttcacgttctccacgatgcgctggaaagtctggtagagctcctcgggctccagctgcagctccagcagggcgcggtccatcttgttcatcatcagcacaggcttgatacgctcggcaatggcctgccgcagcactgtctccgtctgcacgcacacgcctgacacgcagtccaccaccaccaatgcgccatcggtgactcggagggcagcagtcacctccgaggagaagtcgacgtgcccgggggagtcaatgaggttgatgaggaagccggcaccgtccttgctctgcttgatgaagttcaagtcattctccgagagctcgtagaagagggagatggcagttgacttgatggtgatgcaacgctcctgctcgtccttccgggtatcagtgaagcgtgtctccccggcccgggccgaggcgatgatgcccgccttgcacaccagggagtctgtcagcgtggacttgccatggtccacgtgggcgatgacagacatgttgcggatgttggccttcttgtccatgatggcgcggatctggtctaccgtgaagttcaccatggtggcggatggcggtggattctcccaggtagaaccgaaagaagcgagtcgcgccccaacttttttgtacaaagt

SEQ ID NO: 430998 - DNA, 928 bp, Homo Sapiens
aacttttaagtacatattgtgactgtccatagtccacgcagagttacaactccacacttcaacaacaacatgctgacagtcctaaagaaaactactttaaaaaaggcataacccagatgttccctcatttgaccaactccatctaagtttagatgtgcagaagggcttagatatatccagagtaagccacatgcaacatgttacttgatcaattttctaaaataaggttttaggacaatgacagtaagataagggaagaaaacatggaggaatgaagtcctaattactatacatgcatatttttttgacagtagggagaaaccttttacagataagttacaaacaaagaaaaggcaaataaacaattttgtacaagaaatttaacacattctgtacaaggtcttcactttgctgtcatcatttgtacaaactcttcatagtttacttgaccatcaccatcaatatctgcttccctgatcatttcatcaacttcttcatctgttaacttctctccaaggtttgtcatcacatggcgaagttctgcagcactaatatagccattgccatccttatcaaacacacggaatgcttctctaatttcttcttcactgtctgtgtctttcatttttcttgccatcattgtcagaaattcagggaagtcaattgtgccattaccatcagcatctacttcattaatcatgtcctgtaactctgcttctgtgggattctgcccaagagatctcattacagttcccaattcctttgttgttatagttccatcaccatctttgtcaaatagtgaaaaagcttctttgaattctgcaatctgctcttcagtcagttggtcagccatgctgcaagcgctaccggtttccgagacgcgaccacacaaccactcagctcgctctcccaacttttttgtacaaag

SEQ ID NO: 430999 - DNA, 889 bp, Homo Sapiens
tatttagctgccaatgcccaaaacgagtgcagttggtacctgatgtcccaagcaaaggtttactgaagtgtcaagatcttcacaaactttctgataaattgatcctccaaattctgtcccatcattgacattagtgtgtagctggaagtcccccagtcctgtagcccactgcaaagttattccttgtcagctttgatttggcactgtcaaaggtcatctggtagccagcaagccagccctcataaccaaagacagctgaaccatggattgcaggtccagcaaaatcaaagtcaacatcacaaccaaggtttatacactccctcttgtaagaagacttgattttaccacttttctttcctgtgtttggtgagaaggtagtatcaaatgtcagtttcaaaccttgacaaatctggtcttcaattgcgatttctgttcccagagtgttatcagtgttccacttttctgtgaaagtcagaccatactcacaccacttgtatttggtctccaaggtcccagtaactttaccagtgtctgtattagatgaaccggacgttgaaaattccacgccactgcaagactttgttttcacatccagtttcaccaacccaaaaccaaatcctttgttgaaaatatctctggcagctttgccaaggtcagcatatgatggaggaatacacattggacgcgcgcaagtctgtccgtgggtcgccatggcgaggccgcgggaagaggggaatctggtggtgtcctgaggggggccgccgccaccgctccgctagctgctgaagccgcttggcacgctcgcggtcgggctgcagctgcagcagctggagggcgaagtgaaggagacaccgttccgccggccgcaacccccaacttttttgtacaa

SEQ ID NO: 431000 - DNA, 489 bp, Homo Sapiens
tccctcgggtaactttttctatggcttcaccatttcttcttcaaaatggaagaaaaatatcccaaagtttagaactggatcacttggccctttctcttattatctcctcccagtgcgaggtgcgggcatctcttaatgcccagcatcgtctgggatctgcagtaaggctcaacacattccagccttagcacaatcttctatgtggttttagccttcttccggaaaattggctttgtctgcccaccatagccactctgcttccgatcatagcgcctccttccctgggcatacaaagaatccttgcccttcttatactgtgtcactttgtgaggctgatgcttgccacacttcttacagaaggttcttcgggttttaggtacgttgaccatctttgcagcagggctgttttgtctatatgatgaaaacgagaaacagcgcccgacacctggcccttcgcagctctcgctaagtcgcagctctcccaacttt

SEQ ID NO: 431001 - DNA, 845 bp, Homo Sapiens
gggacaatgaccccgaaaactcacagaaatttttgaggcagcatggggaaagtacagagaggtcttttgtggtgccacatggcgttttcaatttcattaagtgaacatttacttcctctgagcaaaaggaaggggccagatggtttgggtctaaaacacacttcagctgatccaacttaaataatctgaatttaaatcactacatctctccacatactcaatagccccttgcctcaaatgtgagtgggcctgtaaagttagatacttagttgcaagcctggcttattttattaactaagtgtgttaccactgacgccaaattcctggccaaactacagtaatctatttaaacaatagagaggattcgctcttcatagccacactgaatgtgccatcacccccacccacttgtcagttggagaaatgcagggcttaaaggtgctagctaatccgtgatcgtcaagtggcaaatttctccactcttcccagatgtggccttggctaagcctttctgattcactagacaaatgaaagaaatagcgacagaaaaacaatcaataacttgtcattccaccttttcccacaaccaagaattaagggcttccataaccgtcctccgacaagcatctttgggcttgttgacaagcagccatttgcgagacagagtgtcttttattcctatagcagtagatctgtccaagaggccacctctggagctcagagacctggcagcaccaacataaagacccaaatataaacagggccgtggtcccatccgactcacaccccaggatatccatgggacaaacggggggggtgcatacacccaacttttttgtacaaag

SEQ ID NO: 431002 - DNA, 698 bp, Homo Sapiens
tccaagaccccaacccgaccctccggggcctgctggtacctgggcctggaggaacgagggcccggggaaggcggcagcaccagcaccgccgagtcgccagcgcggccgaggccggcctgttgggaggaggcagccggggaggagtcagggccagagccttgggccaacacacccaggagggcctagcccggctgttcccaggcccgacaccagggggcccccggccctcgccgaccagcggacccctgccccttcccttggagccaaggtgtcgggggctcccagccctcgccgaccagcgggccccctgccccttccctcggagccagggcgcagagactgccagggtccagagagggagggaggcatgcgggttctgccggggaccgggcagcaggaaggcagcaggtgacagctaagcacagagtcctctgtcacgcacgctattatctgtgtgcaaagacattgcacactggggcctggctccgatcccacggaaccagcagagaggaagcacgctgcccttttgcactgaggagatagaaacataaagggatgaagcaaggggtcgaagtcccctgggagtcagggccggccagggcagaggccctcttcccaaggagagctggttcctctcctcagaggcgggagtctgggctaaccagcctgtccctactctgctccaacttttttgtaca

SEQ ID NO: 431003 - DNA, 923 bp, Homo Sapiens
tttctttttccacaaaacgaacatttcagacttctttttaagtaacgggtatactctattatacatcatatggctacgttacgtggttttcctaaactctactcagaaagccggcactcaaacgtcaaacagaaacttctccttgattagactttattctgtaacaaccacagaaattaatctgggtctcgtgatagtgtctacagtgaaaagagcacacactagtagaagcacacagtttagagagctgaaggtacattaaaacatcgtctataggtttcacaaattttgtttttaaaatattttttccaaactaaaagctgcagaaaattagttcttaaatattctactgaaaactcttgagcagctagcattttaaatttcttaagctttttattttcttaaaaatatttaaatgagtgtagtatctcatctttttgaaaaataatccaaaaaaagattacaaatctttagttttaatcagtgtgaccaagggtttgtcatcaggactgtaatcttcataggcgatggggctcacatcatacattgcaggccgggatttctttccaaacctggcatgccggatggatgcaatggcattgctgaactcgctgtcgatgctgcggcagttgtagaactcctcataggctggcctggaagaaccctggtattcaatgcggctgatgcggcaaatccccacgatcaggatgatcagcataaggatgaaggccacgcagagggctccaatgatgatgtagagggagtgccgtggcatgttggtgaggctctccgccatgtgcccggacttccattggaggtggatctcacagtttgctcccacccaaccatgcgggcagtggcagttataaccattgggctggtccaggcagctcccaccatggtggcaggggttactgtcccaa

SEQ ID NO: 431004 - DNA, 1455 bp, Homo Sapiens
gtttcaaatagcaggatgcccaggttatttttcgtcttagccaacgtggggtcatcaggtcccagttttgtctgggtagatctcgagggctctttgataataatattctacttcttcatacttgccctggttctggcacagtaaggccaagttatttaactgcttgcaacatcggggtgatccttccccaaaaccttttctcggatttccagagctcttttacacaacggctctgcttctttgtacttccctcttttaccataaaggactgcaaggttattcaaagtcgccgccaccgcaggatgatctttgcccaaagttttctcacgaatagccaaggcatcattcagtaggttagctgcatctttgtatttattctgatccctgtacaccaaggccaggatgttgagcatggtggccacgtccgggtggtcgtgtcctgaagtcttctccaggtcctccagggcctgcttgcagaggggcacagctacctcgtagcgcccctgcgaggcgtactggatcaccaggttgtggagcgtccgcagccgcgcggggatctcgtagccgccctgctgggcagccgcggctgcactgctgtgctgctgctggattccttgccctgggtcgtcttcatcattggggaaaaggtcatccagaggctctttggtagaatcagtgtctttgtcctcggatggggaaatgtcgtcatcatatttttttagctgattcataaactccagatgcttcttctcctcctccagttgagccacagactgctcactcttctgcagtttctgctgcgtgttggccagttcatcccgtagccactgattctcctggcacagacgacgaacctgcgcacgcagtttctgcttctcggactccacagcattcaggtgatttgacaaagccatcataacctgtgcctcactcaggccgagctccaacatctccagtgacttccggatcatgtttgatttctcctccaccaaattactttcatcatctttcttcaaacacttcagtgtctccagcaaactttgtaaaatggaattgtgctcattcttcaaagcttccagcccctgaattacttgctttgtcttagaaataatttcatcctgtgtaagcttctccaacttgtcttcctttatgtacaccattgtggacatgttgtcatacattcgccttgctcctgagggccgcgctctctcgcgctgtcagcacctggagcgccgccgggcgcgcgcgcggagcagcgactgtgcgccgagcccgcctcggctgtgtgaggcacggcgcagcagtcaccagctaggggcgccggagctaccgccccgcagcatcctcggccacccacgcgctgtccccttggccgccgagcacagccccgcggctcctcgcaccagcagcccagccgacccagccagtcccgctcggccgcctgcgccgctccaa

SEQ ID NO: 431005 - DNA, 614 bp, Homo Sapiens
ccccccaccctccacctctgcctttcagcaggttggggcagccagaacccttccatttccagaactgccagagactgggacgctggggaaggtaagggcgcagcagcagcagcgggagattgaactggggccacctgagctcccgaggccccgtggggagggcgggtggggaggagaaggccttggcctgcctgaagctggaggcctcagcaaaggagagaggtggccaggcccatgctccaccccggcctgggctgccaaggtccgggctgggcacagtgtccattttctaacagtctggcgggagaggggcaggcaggaggcaggtccaggccccagggtgcagagatgtctgtctgggctagggggcctccagcactccgggctggaagcgtgctgtctcctggaagatgagctccttcagccgctccttaggtaggtcatccagctccatggcgaaggtgaagggctcctcggccactggctcatccgtcgggtcatagtactgctccaggtaggggtgagccagcgcttcctccactgtgatccgtttattggggttaaaggttaacatccgtttctcagaggaggtcaagggccaacttttttgtaca

SEQ ID NO: 431006 - DNA, 440 bp, Homo Sapiens
ggggcttggattggtgccccatccccttcctgattgagctctatgaaggactcttggaggaataaaataaaatgcaagcaaagtgctttgaaagaagggaggacaccctattcctgctaaggggtagaggaagaaggtgaaggcggctaggtgcccataagagaaggctggcacaatcttcattcccgccagtgtgatttcagtctcaaaagatgagtatttggctgagaaatggaaggatactccaggctccctacggagttgtgctggggccatgctgagctgcccttgcaggcagccctgggtgctgggggcagacatgcaggacactgggaagagtcagaaccacaggtgggagggaatctcagagcccaggctccccactgagcttggccagctactcctttttataagctccttcagagccaacttttttgtac

SEQ ID NO: 431007 - DNA, 1286 bp, Homo Sapiens
ttttttgataaagttacttatatttttttccaccaagactgggtgttggggccatgtgtgagttaaacttcaattcccaaatttcaggaaatagaaatcagaaataaaagttgagaggggaggaaggagggaggcaagccaaggaataaacaagagttaactagaaaaaaagaagaagggtatgtgtggtgggcatttctgggcaaagcccattccctgagggagggggttggcagggcagcttgatctgcctcatgcaggggagggaggaaagatcccctgggggacccttgcagtcccctcttcctagggcttcctgctcccaggggaaaaactaataccagagagggatcagccacaacctcaaacagggctctccacccacctgtcacccgggtttgactcccacctctgccctgcttgggaagcatgtgagatcagctatctttgatcccctccttctgttgttttcccatttcacaagattctgatgtaaagggggaagggatataacccattttgggactactaaacttgtcacagcttctgcttccatgtgagctcctgttatcttgtctggtcctatcccccagaagtgcctcctcccaccacaactcccagagttgggatgtgggggccttgctcaagtgcctctaaccctctgcagtagaaatgtcttcttcaggccccttaggaatttaatcaaaggccacaagtgagtccagaccaaccaaataaactattatgggggagacagaagggtgggagaagtcagtggcaaagtctgggcagggtggacttgactgcattggatattctctgttcctttacacgttgctcttggcatggcatgccaccagagggggctggaggaggggctggccgatgaggagaaaaagagggaaatgctggggagttactctacttttcacttcccttctctccttcagggaaggatggaattgggcagtaacccagctcagtgcttggaggtaagataatagcctccaagattagaggtggaggatgcacctcctgcagctttttcactaggcctcagagggacagcaggccccttaggctagggagccacagcagctcagccagtgccttgcccgacattcaatcactccttcttcattttcttcctcctctccattcagcttccaggagtctccttaggacaccaaacccccacccgcagcgaagttgaggtctaaagaaaaggtgggagggcgtggagcaatgttttttgtagttagatttgtgccaacttttttgtacaa

SEQ ID NO: 431008 - DNA, 322 bp, Homo Sapiens
acgccattgtgcctggccctattttatccatataattggtcactttcctattagaatatacaaaacatgcatgttgctcatgcattagaacatatgtcccatgagcaacagtttgtgcttgttcatgatatatattccagtgcctcagtcaatatttgttgaaggttgaataaatgacccacctggtactcagacttttgtcctgccccctcttcccaccccacctcattcaactctcaactcttcagctctcttggttttaggggaaacactcccaccaatggccttcctgccagaggagatcagacatcctacagagact

SEQ ID NO: 431009 - DNA, 549 bp, Homo Sapiens
ttttgacatttcatgagacagtggagccattttgggagcgtgtattattttgatgacttccctactttcagtgctccctgcctcgccaggggttcctccctgccacatgctctgctcctgctcctcccactgggtaagcttggctgtccttggtgctgctcccgccacctggacacttgcgttgggagcagggaaggggccggcccaggcttccccgggccgttgcccttcccatgggcccctgctctggctgtgccagaaaaaaacccacagccactgtgactcccaacctcgcgatgcagccgggcgctggcccgtccctggccctgggcgcccacggtggactgggctcacaggggagcggcagggagggctgggtcccagcaggcagcacgaggtcagccttggtgtacacaggccccgggcctcctccagaaagggagagatggccaggaagagcaagtaagtccttggcctcagggcccacttggccacacttggaggtgtgaggagtggctcctggctggctgggcttctttcgtcctccca

SEQ ID NO: 431010 - DNA, 869 bp, Homo Sapiens
gttaaacagtggagcaggtcctgagcgggcacggcccaggcctggaggagcggccgcacacacagccaggcgctaggctcccttgcgggacctcgggaagggggaagagcgtcaacaatttacggagggtccagccgctgggtcagattgagacaaaccattgtgtggttgggtttgggtcagcaggctggagagggttctgttctttttgatcattatcgtttggggccccaagggagggtcttgggagccacctgagccccaaagctgggaaattcctcagagctgctcatgtcaggagccttctcactgctgctggcggtccagggtgcgtcccgcaccacaaagcctctggaaggtgccttggcctcttcgtgtgctgggggtttcatgtatacctgcagcgcctcactgtccaccacgtcagctaggtattcctcctccagattgaggatgtggtcgatggcttcctccacattctctgggagccccgtcacagtgacgcagttggggtctggggctccgctctgtgggaagcgaatgtccaccttgaattcgtccatgattttgcgaatggctttgccgcgggcaccaatgatgcgggcgtgaacgcggtggtccagcgggacgtcctcagaaaccatctgctcaagttcacccacaattctcagtatagcatccctggcagcttctgtgttcttttcgtaccctgtgatggtaatttggtcctggggctggttcccatcgtccttatcaggaaactggatgttcacgtcatgctccaaccggatttgggtaattactgccccctttctcccgataatcttgggatggtattttagggtctacagtgccaacttttttgtaca

SEQ ID NO: 431011 - DNA, 639 bp, Homo Sapiens
ctcatttaacttttttaatgggtctcaaaattctgtgacaaatttttggtcaagttgtttccattaaaaagtactgattttaaaaactaataacttaaaactgccacacgcaaaaaagaaaaccaaagtggtccacaaaacattctcctttccttctgaaggttttacgatgcattgttatcattaaccagtcttttactactaaacttaaatggccaattgaaacaaacagttctgagaccgttcttccaccactgattaagagtggggtggcaggtattagggataatattcatttagccttctgagctttctgggcagacttggtgaccttgccagctccagcagccttcttgtccactgctttgatgacacccaccgcaactgtctgtctcatatcacgaacagcaaagcgacccaaaggtggatagtctgagaagctctcaacacacatgggcttgccaggaaccatatcaacaatggcagcatcaccagacttcaagaatttagggccatcttccagctttttaccagaacggcgatcaatcttttccttcagctcagcaaacttgcatgcaatgtgagccgtgtggcaatccaatacaggggcatagccggcgcttatttggcctggaccaa

SEQ ID NO: 431012 - DNA, 829 bp, Homo Sapiens
ggcgccaggtaacggccctcgcagtcgcggaaggccacttgccggagcggaactccagcgtgtagccagtggccggctcggggcgcgccaccaggcgcccgtcgtggcgcaggaagcggtggtcggcggtctgcacgctgtagcgctggtcctggaaggcgagggtgatgagcgagtcgacgccccagggcacgtcgcggtccacggcgatctcgtcggccggccgcgcgctcaggtgcgcgtagcgcttacgggtgacgctgtagatgttgacctgagggtgcatggcgatgtgcacgctccacttctcggcgggggacaccgtctgcgcgaagcaggacaggcggtcctcggtgccgccgaagtagcgccggtgcgcctcggactgcagcgaccagcgaccgtcgtcgtgcgccacgatgaggaaacggcagtcgggaccgggcacctcgcgctcgcaggtcacgttgccgtccttgtccgccgccaggtagcggcccaggtggctgcgcaggcacacggccgcgctgcccgcctcgtcagggggctgctccagcgtccagatctgcttcttcttcaggctgctggcggacgcgttcaccttgaacccgaacgcctcggccgtcaggtacttgttgccgcagttgatgaggccgaactggatctgcaccgcctcggctgtgccgttggcggtcatggtggcagtagacgagaggccgctgcgcggccccgggaggtgggtggcgggtccctgcggcggcgcccctgctcctttgttcggctgccgcggcccgcacgcaccctccgcagcccaacttttttgtacaaa

SEQ ID NO: 431013 - DNA, 662 bp, Homo Sapiens
gattttgagagaaaaacaatcgtgggcagaagtatggaatggaaaataaatacaaatgtaggcttattctgctaattgttttataaccacgacaaaatagtacagagaatgccctgtacaaaacacaacaaaggttcaaacatcgagatgttcccttagcaaggctgaaaattttcagtctctggtatttggaatttaggctgcagtccttgtttttggatggatcactgggtgtgtggcacagtccatgcttttaacgaggtgggaacagaagaatggccacttggcccaggtagaagtagatgaagtgtttggtttcatgtgtcacataactaccgaagttcctccccacgatgcaatgccaggtgggattgtacttcttgtcaaattccttcttgatatgagccgcaatgtccttctgtatgttgtatttctccagcgcctgagtagcgcactccaccgagtcctgttgcatctcttccgacatgtccgcatttttgatcacggcctttcggtcgcacatggttaccgtggagaagggggctggccgactgcaacggtctcctggggggggtgctagcacagctcaggcccggctagagataccgtcgataccgaaaccgccaacttttttgtacaaagttggccattaaaaaaaagca

SEQ ID NO: 431014 - DNA, 691 bp, Homo Sapiens
ttattggcaggaaaacgagacaatccagcagccccaggagggacaggtggacttaatcctcctcttcgtcgtctccagccccagccccaccctggcctttcttggcattcttcctcttcacgcggcccgggcggccacccccgtagggagagcgcagagagaagtcgatgtgcttctgggaatccaggcggacaatgaaggacgggatgttcaccacctgcttgcggaccctgatatggcgctggcggatcagcacgcgagcgtggtggatggacttggccaagcccagcttgaagacctgggtctgcaggcgtctctctaagaaatcctctatcttcaggcccaggatgtaatccagcttcatcttgccctcatccagcaccccaatgcggaccagccgccgcagcagggcgttgccttcgaacagacgccgtgggtccttctcatcaagcgtcagcagttcccgggcggccttgcggatcttggccagggtaaatttgaccctccagacctcacgtttgttccggagcccatactcgccgatcagcttcagctcttggtcgagacgagatttctcgaagggtctccgcggggtcacataagttttgcgacaaacccagctccgggccactggcatgttggctccgcttccccgtctgcgcgtaagcaaaccccaacttttttgtacaaa

SEQ ID NO: 431015 - DNA, 874 bp, Homo Sapiens
ttggatcgcaaggtgcccttcgcctggtgtgcccccgagagcctgaagacacgcaccttctcccatgccagcgacacctggatgttcggggtgacactgtgggaaatgttcacctacggccaggagccctggatcggcctcaacggcagtcagatcctgcataagatcgacaaggagggggagcggctgccccggcccgaggactgtccccaggacatctacaacgtcatggtccagtgctgggctcacaagccagaggacagacccacgtttgtggccctgcgggacttcctgctggaggcccagcccacagacatgcgggcccttcaggactttgaggaaccggacaagctgcacatccagatgaatgatgtcatcaccgtcatcgagggaagggccgagaactactggtggcgtggccagaacacacggacgctgtgtgtggggcccttccctcgcaacgtggtgacctccgtggccggcctgtcggcccaggacatcagccagcccctgcagaacagcttcatccacacagggcatggcgacagtgacccccgccactgctggggcttcccggacaggattgacgaactgtatctgggaaaccccatggacccccccgacctcctgagcgtggaactgagcacctcccggcccccccagcatctaggaggggtgaaaaaaccacctatgaccctgtgagcgaggaccaagaccccttgtccagcgacttcaagaggctgggcctgcggaagccaggcctgccccgagggctgtggctggcgaagccctcgcgcgggtgccggggcaccaaggccagccaaggcagcggggctgaggtcacgctcatcgactttcggtgaggagcccgtgg

SEQ ID NO: 431016 - DNA, 299 bp, Homo Sapiens
aagtagttcacccctgcttcgatctaattgcaggcgcgcaccacctgcagcgcgcggctgtggtacatgttgttgctgggtttgttgtactcgccgacggcaaagtccagtgcacgccgcacaccctcctcctccacgctggggtccatggggcctcccaccaggcgcggtggcttgccgggactggagccggtcgcggggctcacggccagggccacggccaggatggccagcaggagcagcggggcgcgcaggggcccggccatggtcggctaggacgcgggacgcggggagtgggg

SEQ ID NO: 431017 - DNA, 947 bp, Homo Sapiens
agtcgaagatatcagggcctgaaagggatgaagatgtgagggaactgggacggaggccgcctccctgtagcttttggtctgcttgtggtcggatgactgagtttctcagtagatgataccacggagtcaaaaccttctaagtcaatgtcattgctgcggtccgagagatctttgtccaggatgccagatagcgaactgccggcccaagtcaatctttggactgtcacccctggtgtgtgtcagcggacccaccggtctctccggccttctcgggggcagtgcgccaggtctgctgagagaattggtcttaggtggccgaggcttttttggcggtatggcaggaacggagggcttctgtaaatccagttttggctctctctctggtctttctttttcttctgttctgtttggaagcatttctggtctttcaggaggtatctttttaatttcatgttttctctcagtggtgcctgccccttgtttgatgacaggagcggatggaggcggtggcttcttgggtctattcccttccttttcaaagtccggtggaagtaacttcacgaagttatcggggaacacgcctcgtctgccgttcagctctccttcccaccagcctacgtcgatgcagtccttattgatgagagtgactatatctccttctttgattgtcaattcatcatcattctgtgcctcatatggaaatattactttgcagtaatccttgctctttgtcctgctgtccatttctgtttttgatgagtctggagttgctgtagttgcaggtaacttcttcccaatagtctcttctcccatgatgcagccagcctcctctcttcagtttgaaaaggtcccagaactcccctggaatcctcccacttccttccaacagcacggagcctgaggacccagcctaacccatgagtcatacttgccaacttttttgtaca

SEQ ID NO: 431018 - DNA, 829 bp, Homo Sapiens
gccggcacgccttctgctgccttccgagatccgtgccgtttcgccctgcgccccctcgtccaggggcaccgccctcagcctcttcctgctctttctcctcctgggggctgtcggtgaaagggttctcgcccttcaggtagcgctccagcttcttgctgatgagcttgttgttgagaatactgcgggccaccatgagggaggacttcttggactgctccatcatgagctgcgggcagggcagaaggagctggagaggctgctctgagtgccctacaagttgctgccccgaccctgccagcttagagggaccccaccccgcccctgcacccacgcacttccagccccaccaacggagggccactccacaagcatggaaccacaacctatctgatctttgttcaaattccctctccttccacaccacacttactgtaggtaaataaaaatacagatctatatatctctaactttacggctgtattacagaaatctgatttgcttacaaaaaagctataagcagtgaacaattaagaaactaagagccaaaggtgggtgcaacctgtaacaaggtgccaactaggctaataggcaaggagcactttggggccaacggggaagatataaaaacaggaacagatatttaatgaaacgtcttttttaacccacagaattccaagaatgaagaattattcccagtcatgcaagggtgaagagagtcttctctgctggtgggaggatcaactgtttccgtattttttggaaagcagtttgacacaatgtatgaaaagtaaaaattatgtggtcattaatccccaacttttttgtacaa

SEQ ID NO: 431019 - DNA, 233 bp, Homo Sapiens
gggtcaattccagctgacctggaagggtcagcgccgcttccctcccttctcccctgcgtgtgttaggaaccagtactcgccaccctcacccgagtccccatacgaggcccggcttgccaaatgtgtgacctgccaggcacccttgggtgtccgaccctgggtggtcccagcagagaacagtccgagctgggggttggggagccctctcccaacactgctccctgcccccaagc

SEQ ID NO: 431020 - DNA, 795 bp, Homo Sapiens
ctttgtacaaaaaagttgggctggccacacgcacccaggcccagaggcctgaactgctgccgggagcttaccctagcaggcctcccctgtctgccctccacccctgtcccaccttgggcctaataggccacgctgagcttggaccccacaaggttgttccctgccatggctggtgggggtcctgagggtgtgctcactgctgtcagtcccccaaaaggcctgtctgcctagtgggctctgttcagataactggggagagacctagagggttggtgggggcgggggtccttctcagtctctgaacttcccttctaactgagaaaacacggggagccctccctcatggccggcccccagcctgcacacccaggacctcccctttcactactgtgggcctgtccctctctatccccggtgccctgtacagcctaatagccgtccctttgtaggagaatttctccctaccctaaaagaatcgacatcagaaggggcacagggaaaaaaacatgtgggctcaagagtcagagcatctcagtttgaggacctggttccccgcttagtggtgtgtggccatggaagagttacttcacctatctgaaaaataagtgagatgtcaataaaacaggtgtgggatgctgggcacacagtgagatttcaaataatagttcatgaagaaagagccttactgtgtgtgcatttaatcctcacaacaaccacgtcccattttcaccaaaggggaaactgagcctctgagcattgcccatggccacccacttagaaagtgacagtttgggc

SEQ ID NO: 431021 - DNA, 625 bp, Homo Sapiens
ttttatgttctaattccccgaaaaaatgggaactgacttgacttcagcctgtttcttggtgggtctaataatgtgacccagaagtaatcagattcaatgtaattacatttaagaaatattcagcaaacataatgtatgtaaagtatcatatccataaacatttggtctacttaatctttgactatacatacaattaacattttttaatttcaaaaattataaatgccttcgtcttgagtaaatcagatcaataatgatttactaatagatacacaaagccaaaacattaaagcattttttaaaacacaaaagctttattttatcaaaacaaatcaacagtctacctctaacaataatcttcaagagtaactgcattgtaaataaccataaacgatccgatcagaatacattcaacatagcatcgctatagaatgcaattaaatgtataatgtaaataaacaacttaaattatgcaactcgcaagatgtaaatgtcatgtggacacagaaaagggacagagacaagacaaactattgcctggcgctgaagagacgagccctcactcaacacagcccagctgcggggacctctctctagccccaccatgacgtagacacaggagccc

SEQ ID NO: 431022 - DNA, 889 bp, Homo Sapiens
atcaacctccatcggggccatgcccaagccttccccactcctccagggtgggcaagagtttagagggtaaattcagctcacttgacagccctcaggccacacgggaaggctgcaggctcagaaagggtgggtcaaagttaataaattagaataaattaggggggaggaatgcaactttgtgctgggagggccctttctctccaacacgcgagagttggtgggggggaggtgggggcatctccaaaggccactacagtgggggtaagagcggtgggggcagaagtcaccttttcctccacgtcttcccaaacagagcagaagaattaggggtggggggaagagacacacacaaggagaggaaccctcttttcctaggataaggaagggccaagaaagaggatgctatccaaccccccatctcccaagccatcgctagggttaaggatttggtcagtggatcaatgaggtgggtgatgggaacgtggtgggggaagcagaggatgctggagccctcgaggagaacagacacaggctggggcagcaggggctgggggcggccacaatcactgctcagcttctccaaagacgtcgttctgtttgcgcttcatgttctcaaagtcaaaggccgtgccagccatgcgtttgtagatgtctttgatgtcgttgcaggttgtctcaaagtgtgtggtggcatcgtaggagcaggaacagaacacctggctctcacaaccatcatcaataggctcatacaagtcactgatagccacaaacttctggtcaatgggctccaacagctccagagccggctccacctccttttcagggtccgtggtctccacagtagtgctggcaatagctatgtacttgccctgggccgccacgttgccaa

SEQ ID NO: 431023 - DNA, 1498 bp, Homo Sapiens
  misc_feature (990)..(1024): n is a, c, g, or t
  misc_feature (1408)..(1439): n is a, c, g, or t
tgacgggtactgcggagacaactgtagtacgaactggaggtggcattgtgggtggtcggggcactgaagtgatgggtggagccgagctggggatgtttgttggctgaagatggtggcggtggctgttgagggatttcattgggcttgctggggccaatcttctctttagtgtcatcctctggcaccaggcctttggccttgtgaatggcctcaatctgctcctggagggtgatgttggcctgggcagttgctgggtccgggccatgctgcctgagtggccatcccaggtcaccttttcctctggcttctggatctcctcctcaccgatcttcttaccaatggctgtttcctctacaccgaagatgtcagtacgccgctcagccaactgcttcaagctgctctcaatatccagacctggtgcgtacacctcatcatcgctctgcttctcacggatggagcgatcccgctgctccagccagcgagggtcaagaagtccaatgcgcatgtgttcctgcattttgctggcggggatcttctccccagtaatgggggacacaagatactcatctggagcaggggctggaggcaagggcttggaggctttgggatcataatccttgcggacaatgacttggtctggagttgggggcagaggtggaggcatgggtgtctctgggggtgggggcactttctgcccttcttcttcatcatctgaaccctcatccatatcttgtacttgggtgtcctggtccagctgggaaggaggctcctccgccttctcctgtttgtcatcctcctcatcagactctacctccatctcaacttcctcactctccccaaacttttcatagcgctcctgaatgaggattcgggcccccagctcctctggcgtggtggggggagggaagttcccttgctcattgggttggaagtccactgtttccaccaccacaaaatcatgccagtcgatctgagcataggccacccgcnnnnnnnnnnnnnnnnnnnnnnnnnnnnnnnnnnnacgttcctggaatttggcccattccactcggtaacacacctgatccaaaacttctcgggggttttcagcctctttcttgagctttgaaaataaacctttgggtggaatcaagatcttggtgtactgttccactagcttcgtgaagtagttgaagaggctgtgctgtgggcggagaaagtcaaactggtagttgcgctgctctttctgcatcagctgggtcagaaactggcgcccattcctggccacaaactgagccgtcagcttcaccacatccaagtcgaaggctgagatagagggaggatcagcaatgaactcaaactcaggaggaggctctttgggcacgatggtctcttggattacttgggcttggaccttctggggcannnnnnnnnnnnnnnnnnnnnnnnnnnnnnnnatgaccttggggatggcggcggacggctcctgagccttcccttccttgaactcgcccaa

SEQ ID NO: 431024 - DNA, 1220 bp, Homo Sapiens
  misc_feature (160)..(213): n is a, c, g, or t
ttgggtgtctccgagtccctgggagagtggaggctcattcactgattagatccagcgctgagaggcagcactgctccttctctcacgccaactgagtctcttgatctgtacatgcaatcccaggcagctcgcgaacacaaacccggggccagccgcctannnnnnnnnnnnnnnnnnnnnnnnnnnnnnnnnnnnnnnnnnnnnnnnnnnnnngctctgcgaacccgggacttttcatgcaccacactctccgcctgcttccctccgtgtcctgaaaagtgcgaccgttctcccaaggaatttccacggtcttaggagggaatgattccccagtaatattccctgccctgacccaaagtgctggttggcctccctcccagggaagactgcttcttgcgtaacgccggccacagaaagagactccgatggacttacaccgggcagccttcaagatggagaactcatcctaccttcccaaccctctggcatccccagcactgatggtcctggcatccacggctgaggccagccgtgatgcttccatcccttgtcagcagccacgaccctttggtgtacctgtctcagttgacaaggacgtgcatattcctttcaccaacggttcctatacctttgcctctatgtaccatcggcaaggtggggtgccaggcacttttgccaatcgtgatttccccccttctctactacacctccaccctcaatttgctcccccaaatctagattgcaccccaatcagtatgctgaatcatagtggtgtgggggctttccggccctttgcctccaccgaggaccgggagagctatcagtcagcctttacgccggccaagcgacttaagaactgccatgacacagagtctccccacttgcgcttctcagatgcagatggcaaggaatatgactttgggacacagctgccatctagctcccccggttcactaaaggttgatgacactgggaagaagatttttgctgtctctggcctcatttctgatcgggaagcctcatctagcccagaggatcggaatgacagatgtaagaagaaagcagcggcattgttcgacagccaggccccaatttgccccatctgccaggtcctgctgagcccagtgagctgcagagcatatggagcagaactggagcagctagcccaactgccctcgagcaagattcccttctgatgatgccatggctccaggcacccc

SEQ ID NO: 431025 - DNA, 755 bp, Homo Sapiens
tgagccacgagctctcctccaccttcacttcattgtagagctccccatcaatgatcgctggctgccccttgagccccacccggaggtgccgccgctggatgtccaccaccatgtccttccctttcagccggaagttcacacagaaagggaccgccaggtccagctccgacagggtctgggtccagcggtaattgggcaggtctgccccgttgcctaggttgggcttcagttttcctttgtccttctcatcttcctcctcatcttcctcagtatcctgcttccctggggagtcaaggctgccgttcttgagctgggcctcatgattctctgcatcctttttctggtcaatctctagctgcagcctctctgcctcttcatcagttagctccttgatctggggccctgaggtctctgacttggcttccttggccagtctggccgcccgctccgccttctcccgccgctcggcctcctgccgggctctcttctcccgccgggtcttctgtgccagctgattgtggtggctgaaagtctgtgtgataagcttctctgccatcccttcttctcctccaatgaaaaagtctgttttgcgtcgaaggaagctgaagaaggtgttcacaagctcctgcacgccgccctcgtgctgctgagccatggccagcaacatgccgtcgaaccgctcctcctcctgctctccgcccatcgcgccggctccgatccacgtcccggagctctgcactctagtcccgcgctct

SEQ ID NO: 431026 - DNA, 900 bp, Homo Sapiens
gtagtttgtaacctggcttctctgtgcaaaaatatctcttccagctcgaatgaagtcagcagcatcaaagcatggctcaaactcagttgtcacaaattttccctgagcagccaatttgtgtctgtcttctacagagtggatgggataatcctggttataaagctcatcagccattgtgggcttaggagctgttgtccacttggcgccacggtggaagtagtctttgataattgacctgtacgctcggtactcaaagaagcgtgaacgccatgccatgggagcctcgataatctcattgcccacaactatcaggatgtctcgaggcattgcactgtataaacccgtagactcaaaatcaggagttttatacttcaatgaccagtcaatggggtcaggcctccttactgtcactccttccgtttttaaaatattgcacatttcttcaatttcagcaacagcctttttcaaatgatctttgggaaaataatgccctccatgcttctggtaaaatggccagtacttttcatatgtgttggccttcacctcgatggtgaacggtggaacacaggcgttttctgctctgcccactatcacttcctctaaggggtcccattcgttgtaagaagagacagggcagtccttgggcagaggctcagtggctttgtcgtcagctgcacaggagttccgggaggaagccgtagctgcctgggtgctctggaaagttcgctgcacccatcctgtcaaggttcgtccaagccgagatccgatgtagtgcaccgcctcggcgccgcggctcccgccgcgcagacaccgcacccgcagcatcgccctggcccggctccacgcgcggaatgttcctggcctctgggccgcgtcggtccaagccttcccgagagccaa

SEQ ID NO: 431027 - DNA, 636 bp, Homo Sapiens
cgttttataggtgtgaaaaatgtattatggctttagtattgcttgcttttcttaattataaaagtttatatatttggaaaatatatgaaagaattttgaaaattataccaagacccagagaaaactattaacattttgatataatattgttgctacacctttcttcagctcttaaaacaactctctattgtgaaatttctccttctgctcctaggcatatggctacccattctccccagaaatctcaccagtgtgctcactgtgagaagacgttcaaccggaaagaccacctgaaaaaccacctccagacccacgaccccaacaaaatggcctttgggtgtgaggagtgtgggaagaagtacaacaccatgctgggctataagaggcacctggccctccatgcggccagcagtggggacctcacctgtggtgtctgtgccctggagctagggagcaccgaggtgctactggaccacctcaaagcccatgcggaagagaagccccctagcggaaccaaggaaaagaagcaccagtgcgaccactgtgaaagatgcttctacacccggaaggatgtgcgacgccacctggtggtccacacaggatgcaaggacttcctgtgccagttctgtgcccaga

SEQ ID NO: 431028 - DNA, 877 bp, Homo Sapiens
gggcccatgatgttgcaccgagcattgcacagcagcagcacgcggaccatctctgcttccccagctggcaggccaggtgcagcggggtcagcccttgggttattcacctggttcaggccagccactgcgttccttccaaggagctgcagcacagagaattgtcaccctggacagcataatggaagacggtctctcccttgtagtcggtgacatccatctgagtgtggcagtactgcaccagctccaccaggatctccccatcacccttgcggcaggccaggtgcaggggtgtgcagccctcctcgttctccgcgcaattggcacagctgatgatacggctgtgatggaagcactcgcggatccctagctccacagccaggtgggccactgaccagctggggtggttacggatgaggtcggtcaggtgctgcaggacctcagtgtgcaggacctgaggggagctctcatagaagggtagcagctgggaagaatactgatggaaattcactagggcgtcagcctccaactccagctggaagagtcggaatccactctgtgagttcctggggttgaccaggacgcagtcccaggtgcggttgggagtgttctggaacagaatcagctgcccttcctcccgaactcggtcactcgaggtgtagtcggccacagccacctccttcacccggaatgggttagagaacaagttggtgacgccactgaaggtattgaccaggcggccaaagaactgcatcttctgcggggcaggtggggaggccccaccgtcttccccctctgtctcagaatcggagacacgaggaatatccaaaggagggtccggcggagacttgggagtccggagcgccgaggaagttgccaa

SEQ ID NO: 431029 - DNA, 863 bp, Homo Sapiens
ggtttcctggtattaggcttttgagtcataagatgacaaatccctagggatcaggtggtttccccgcacgaactcttgtcaatgagaaatccctcagccccttttgtcttgggtctcacagctccagaagtgagcccgggccagaacgaagccatcctagagtccccaaggacagccctcccgtggaccccggctagggcccccagagtctcatcctcaggagtgcgccagctctgggcctgcgtgccggcggggtctgcagccacaggtcccgcgagtcccggacacttccaggacgtggtctcctggtgagacagctcctccgggtaccagtctcgactcctccgggcagcgacaacaaagtcgagtcccgccctccagcttcgcctgctgcgcgctcttgtcctctctcggccgcgccaactctggggcacagctggctcctcctgggggcgatgcagcatcacagggctccggcccaccccgggccagggcgccgaccctccctgccggaccctctctagaaggccgcgggtctgggtctggctcatcccttaaagattccaagattgggcgcactctgagctccccaaacacaaaatgatgggatccctgcgcgtgcccccacgtcacagagtggtaggggtccaggggcattctaattataaacggggctcaatcacaccccaaaattctaaacgcctccacccctaacctgcaggtgcaaacagcacccctatttcattgccggcagctactttgtactttcgtactgatagacaaagatagtgacaacaaagacggaaagaaacaagcatcgaaagctacatgaagggggtgcagcgctgttctaaaacacccaa

SEQ ID NO: 431030 - DNA, 818 bp, Homo Sapiens
ttgggcagggctggaggaagaggaggaggaaggaatctccgctctggacggcgaccagatggagctaggagaggagaacggggccgcgggggcggccgactcgggcccgatggaggaggaggaggccgcctcggaagacgagaacggcgacgatcagggtttccaggaaggggaagatgagctcggggacgaagaggaaggcgcgggcgacgagaacgggcacggggagcagcagcctcaaccgccggcgacgcagcagcaacagccccaacagcagcgcggggccgccaaggaggccgcggggaagagcagcggccccacctcgctgttcgcggtgacggtggcgccgcccggggcgaggcagggccagcagcaggcgggaggggacggcaaaacagaacagaaaggcggagataaaaagaggggtgttaaaagaccacgagaagatcatggccgtggatattttgagtacattgaagagaacaagtatagcagagccaaatctcctcagccacctgttgaagaagaagatgaacacttcgatgacacagtggtttgtcttgatacttataattgtgatctacattttaaaatatcaagagatcgtctcagtgcttcttcccttacaatggagagttttgcttttctttgggctggaggaagagcatcctatggtgtgtcaaaaggcaaagtgtgttttgagatgaacgttacagagaagatcccagtaaggcatttatatacaaaagatattgacatacatgaaagttcgtattgggctggtcactaactacaagtggaatgttacttggtgaaga

SEQ ID NO: 431031 - DNA, 725 bp, Homo Sapiens
  misc_feature (662)..(674): n is a, c, g, or t
aaaagtacattaatcaagatacacaagcttttgtaggatctaaactgaaggactttgtttcgtttttttctgcagaatcctgtacacctgtggcacttaaaatttgttagcctgtctaatgagaggtaaattatacacaacaatgatgtaaaagattaacagaccagttgtttattatgaatcattccagctttgttcaacaatggccgaaactgttttctcatattctcgtttgttttcctgataaagctgtgctgcctggctattggctggactgttaggattcggttcatccagcagagactgaattgatgtcaagatagaagatacatcatatgttggactccatcgattttgaaggatatctaaacatatgttaccatcagcatacacattgggatgaaacattttggataaaaacctaacagttggtggtttatatggatattcttcagaaaattctattactagtttaaaagtaccatcttcaaaaggtgtcccttttggtccaaatataactgcattccactgcatgatgttgttttcagatggtgcgccactgacacccacaggtgggtcctcttgtaaccgcttgaaatcccgcatgagcctcctccgggccggggtcgacatgctccgcagctgccccgcggtcagtctgnnnnnnnnnnnnngtcccgcgcagcccccccaccccccggcgcggcggccgaatcactgtggat

SEQ ID NO: 431032 - DNA, 831 bp, Homo Sapiens
  misc_feature (272)..(338): n is a, c, g, or t
  misc_feature (697)..(713): n is a, c, g, or t
ttcgctatgatggtgcctaaaatcatatattcaaagggagtattggggaattaaggaaaaatcttgttcaaagaaaagaagggtgttggaggtgcacccacccccactgaccccagtggaaagatctcaagccctctagatccttccaactcatcagcacaggtggaattattcgttctcctgtctggagtagatccctgcagatctcaaacccagatcaggtgacttctaaagggaaatgtggatattcaccttctatctcacccacaatnnnnnnnnnnnnnnnnnnnnnnnnnnnnnnnnnnnnnnnnnnnnnnnnnnnnnnnnnnnnnnnnnnnttgagagcaaagcagacaagaggagaagcttcctcctgcttcccagaggagaagcaaataaatgagatgactacatcatgtatactatgttatacagtacactgcatataccatgttatacagtacatcatatatgctatgttatgtagtaagatggtgaagactatagacagtggaaggggtcagggctgcaatttcaaatatggtggcagggccagcatgatggcaggcacctttggtcccaggtacttgggagggtgaggcgagagaattgcttgagccgagggggtagaggctgcagtgtacaatgaatatacctctgcaatcctgcgtgggtgacagaaggaggccctgtgtcnnnnnnnnnnnnnnnnngagataaattaaaaatagatagaggatttggtgggtggatcacttgcggtcgggactgtgagacctaattgggccaacggggtgaagccggagttgtaaaaggattacaaaaatccaa

SEQ ID NO: 431033 - DNA, 839 bp, Homo Sapiens
tctgcattgttgaaggcccagtttttgtctgattattaggatcctgcctcttggtgtttttaccaaaaattacgcttggggccgttctttctcctgcataatgggaggaaagctgacattttgatgaaaagcaactaatgtatgtggttaaatgatagagggcccgtccccacagcagggctggggcagatctgtccactgggcagggcaggggggtttcctggccccactcgctatcacctgagcgtgctggcctggcctgggggcatggggagcagcattaaagacacatgaccacaagggctccctgaagaaagccactcagaaatccaagcgcaagccgcggaaaggtggagaatgcacgcattgatgccaaaggcccttatttagctttttggggaaggatgagggtgacagtcattcaagatgtgacttcacaacatgtgaaacccccgtctgaggcagcggttggaaataaattacatttcctttgaaggaaagatgtgtatctccagcacttttctatctgaactcctccttgactgcttttcaatttgtttgcttgaaggccataaatacaaccccggggagttctagaaaagtctcaacgaccttgtgcaggcggtgagggacggaagcagagcacatgccgtgccgggaggtttggggtttgctttccaaacacctttgcctcctgagtagttgctgaggcctgatcataccgcatctcaggggaagctacatcgttgccaggcttcccacctcctggggcaggaatgtggatttcctctcatttccagaacatcctaagtgcagggagggagagttggtgtccccaa

SEQ ID NO: 431034 - DNA, 1108 bp, Homo Sapiens
ggggttgtgtcttccaggaagctgcggtccaggcggtcgtcaggaacaaagtcctccacactctggaccgttgctgggccctgtgcggcccgggactggctctggaggtggaggggctgcctcggtggcaggtgacgtcccaaacagcctagagatgatgctgcgccgtggggcgggggctgaggggcacgcaggtgggggcagggcctctgagggtggtacagggggcacagaggatggtggggcagcattgaggggcagctgtggggcgggctggggtgtgccggggctggagctccccgtggacacagcgcctgcaggcaccactggtgactgggagcccggggatgggctctgcccgttggccgccagtggggacgcatggccacggctgcgagcctccatcatctccaggaagatgccgtagttctggtcctccgtctcctgctgcaccgacagctcctccagcgtggcgtccatgtccagctggttcgtctccagctgccgcaacagcgtctccctctgaagctgcaaaaatgggatattgaagaacttatgaaggtactttaggccgaagctgttcttcatggaagactcagcatagcggaagtaggaggaacctggaggtctgtccaggttgtcgatgaagtcacgcacgtcgtccggcaggatgactcggtgctcgcccatgtcccggtagtttcccagcacgcacactggcacgtgggtgggcacttttggaagctcccggagaatgtaattgaaggtccactgcttggtaatgtcgaacatcatgaccaccccgttgcagttcttgtacacgtccaggaactcagcatccagggccatttcagactccgcctcctgggggtcgttctccatctttaagccgtcgcctcgcttttagcattttcctttgtctactacatcccagacttcaaccttcacgatgtcatccgtggtcttgtagctccagtggatgctggtgacctggatctcctgtgtggggatgtactcctccacgaacggccggccctgcaggcggtgccacagcgctgtcttgcccgtgttcctgtctccccggatcactatcttcatgttgtactgc

SEQ ID NO: 431035 - DNA, 427 bp, Homo Sapiens
acttttccagggaagcgtgcaccgcagtggtgaactcggggggtaggtggggggccagggtcaccagcaggcagtggtttaggagcttgaatttgaccgggtccacccgaagcttgtgcgcgtgcaggtcgctcagggcggacagcgcgttgggcatgtcgtccacgtgcgccacggcgttggtcagcgcgtcggccaccttcttgccgtggcccttaacctgggcagagccgtggctcaggtcgaagtgcgggaagtaggtcttggtggtggggaaggacaggaacatcctctccagggcctccgcaccatactcgccagcgtgcgcgccgaccttaccccaggcggccttgacgttggtcttgtcggcaggagacagcaccatggtgggttctggtctgagtctgtgccaacttttttgtacaaa

SEQ ID NO: 431036 - DNA, 764 bp, Homo Sapiens
cgttcccgccaggtctggggccgcctttcccatgttctctaaagcccagcacctgtggttcgttggcggggctcgtgggattggggtaagggctgtggttcgaggccgtctgtggccgcccccagcccctagtctgcgagacgccggccccgcctttgggcggcctcctgcctggggggcctccaggcctggctacgccgaccggcacctgaactccctgcacgcgttgcatgcctcccacagagatgggactgcttagtaagaccttgctcaggtcagtcaggaagcgggttggcgggcaccgcgggacactcagactggcaaacaccctctccgagtgctgctctcttgatcccacttagcatttttgtctcggggttgctcacatggaggactgcttggtgagaggccggtagcactgaaaagggcactggacgatctgcttttagcattcactcccacccccaacctccctggccctccctgcagctgcgatccctgtgggtcatttccctggcgctttgtttgcatggagaacagcgggtgggtacccgaagtcccaggaagctctgagtcactgacaatcattagtaatcaaagaggcaggccgtgtggcccaggagttgccaaagtctcaaagtgagggagaggccagcctgtctaccgagtgggaagatgtgtgctgactcaggccacctcctgagacctgggaaaagccaaaagctaccccagcctcagtgctaaaatgtttggaagagttccaa

SEQ ID NO: 431037 - DNA, 795 bp, Homo Sapiens
ttctcttctccctgctcctgtggcctaggcccaggttctagggcaggtacagtgaggggtgaatggaatgggcagtggtcgccaggatggcctcccacccagctcagagacctggtgaggaccacccagaagggctgtgcagagggttagaggccacacagaggggcactcatgtttttgtgggggatgcacagctcattaaacagtcaccagtcatgggaggagggtggtcaggggctaggggacttgctcacagtagttgccagctctctccaccttgccccccaaaactcagtcttgggggtgggaggaagagagtgaaaaagagagagatataagggctgagggccaagcctcctccaatttttattgctggtgaattagaaatttgcttttcccttcctgtcttggggagatagactctgagagggccccaagagaagcagctgacattggctgacctaacccctcatgccaggcctaccctgggcaggtgctgagccacctcagggcgccaggaacctctcaggtcagccttgttcttcaagggcaatcacatccaactctccccccgcccccaaaacaagggcctccggctcagacttgggccagtggagctgggaagtgggcagtgcaccaaaggtcaagcggaattttctattggaagaaaaggtgagactttggggaagagactgcctaggaagatgatgtgctgagcatgaaagcagaaagaggctgggggaatagagtgcgggtattgtacagggcagacactcgccaacttttttgtacaaa

SEQ ID NO: 431038 - DNA, 929 bp, Homo Sapiens
gaatcgatctcaatactggccttgggtgctggaagagagggtacgcttagcacgttcacaagcagtacggaggcgtcttacagctctcttgttctcactgatgtccttcttatgcttgcgcttaaactcagcaataaaatggttgaccattcggttgtcaaaatcttctccacccaagtgggtgtctccagctgtagacttgacctcaaagattccatcctcaatagtgaggattgacacatcaaaagtgccacctcccaggtcaaagatgagcacgtttctttctgctccaacctttttgtctaagccgtaagcaatagcagcagcagttggctcattaataattctaagtacattgagaccagcaatagttccagcatctttggtagcctgacgctgagagtcattaaagtaagctggcactgtgaccacagcattggtaacagtcttcccaaggtaggcttctgcaatttccttcatctttgtcagaaccatagaagacacctcctctggatagaagcttttggtctctcccttgtattctacttggaccttgggcctgccagcatcattcaccaccataaagggccaatgtttcatatcagactggacaacagcatcatcaaatctgcgtccaatcagacgtttggcatcaaaaactgtgttggtggggttcattgcaacttgattctttgcggcatcaccgatcaaccgttcagtgtccgtaaaggcgacatagcttggagtggttcggtttccctgatcattggcaattatctcgacttttccgtgctggaaaacacccacacaagagtaggtggtgccaagatcaataccaactgcaggtcccttggacatggttgctggggtgtaggcctggctccaataacgaaggaagccacaaaaaacccaagagctgcaggcgccaa

SEQ ID NO: 431039 - DNA, 926 bp, Homo Sapiens
tgacacgggatgaatcctggatagatttttcaacatggattcaataagatcagccacacttaatccaatagcccagttggtatatccttttagcttgatgacttcataggcactttcaacccaccatcttatgcacttccttccaattttcactatcattgtcagttcccatttctggattcaattcctggagagaaacacctgccacattcacaccactccacacagccacacttgagtcgccatgttcccccaaaatccatccatggcagctgctgggatgaatgccaagtttttcagccataaggtagcgaaatctagcagaatccagattacatccacttccaatcacgcggtgtttgggtaatccacttagtttccaggtaacatacgtaagaatgtccactgggttggaaaccacaattatgatgcaatcaggactgtacttgacgatctgaggaataatgaatttgaagacattaacatttctctgcaccagattgagccgactctccccttcttgctgacggactcctgcagttaccactacaatcttagaattggcggtcacagaataatctttatctgccacaattttaggtgtctgaagaaataagctcccatgctgcagatccatcatttctcctttaagcttatcttccaaaacatccacaagagcaagttcatcagccagagactttcccagaatgctgatagcacacgccataccaacttgtccaacacccactacagtgatcttattgtttggaactgttgcctcttcttccgcaactggtgcaatgagtttttccttaagagttgccattttgcacaggagagagaaggctctggagacctctgtaacagtcgtgcggagaagacaaagtcatgtcttgtcatggctctcctccccaacttttttgtac

SEQ ID NO: 431040 - DNA, 931 bp, Homo Sapiens
  misc_feature (365)..(379): n is a, c, g, or t
tacaaaaaagttgggtgcactgtgggttaagagcttgtcgctgcggtgttgctgttggagactcgattgttggtgacagcgaaagaacgataacaaaatgccggagcgagatagtgagccgttctccaaccctttggcccccgatggccacgatgtggatgatcctcactccttccaccaatcaaaactcaccaatgaagacttcaggaaacttctcatgacccccagggctgcacctacctctgcaccaccttctaagtcacgtcaccatgagatgccaagggagtacaatgaggatgaagacccagctgcacgaaggaggaaaaagaaaagttattatgccaagctacgccaacaagaaattnnnnnnnnnnnnnnnctagcagagaagtaccgggatcgtgccaaggaacggagagatggagtgaacaaagattatgaagaaaccgagcttatcagcaccacagctaactatagggctgttggccccactgctgaggcggacaaatcagctgcagagaagagaagacagttgatccaggagtccaaattcttgggtggtgacatggaacacacccatttggtgaaaggcttggattttgctctgcttcaaaaggtacgagctgagattgccagcaaagagaaagaggaagaggaactgatggaaaagccccagaaagaaaccaagaaagatgaggatcctgaaaataaaattgaatttaaaacacgtctgggccgcaatgtttaccgaatgctttttaagagcaaagcatatgagcggaatgagttgttcctgccgggccgcatggcctatgtggtagacctggatgatgagtatgctgacacagatatcccccaccactcttatccgcagcaaggctgattgccccaccatggagcccagaccacactgaccacaaatgacattgtc

SEQ ID NO: 431041 - DNA, 614 bp, Homo Sapiens
tctttgctcttttggacatctggtttgatggtatcattgccagggtttccagccagctgggcacacttccccatgtttgtcagtgaactggaaggcctgaactagtctcaaagtctcatccacagagcggccaacagggaggtcatttacagtgatctgccgaagaatacctttatcatcaatgataaaaaggcccctgaacgagatgccttcatcagcctttaagaccccataatcctgagcaatggtgcgcttcgggtctgataccaaaggaatgttcatgggtcccagtcctccttgtttcttaggtgtattgacccatgctagatgacagaagtgagaatccacagaagcaccaatcacttggcagttgagtttcttaaattcttctgccctatcactgaaagcaatgatctccgtggggcacacaaaggtgaagtcaagagggtaaaagaagaacacaacatattttcctttgtagtcagacaggctgatatctttaaactgaccatctggcataacagctgtggctttgaagttgggggcagggtgcccaattttagcatttcctgaagacatcttcctatcagctagtcccaacacaagtcgcagaa

SEQ ID NO: 431042 - DNA, 893 bp, Homo Sapiens
tctgcgttgcagtttgtaagtttccttgtcatgacacagtcgataaataaagaaacccaggtgatcaatgtttcaatgcgatcagtaataaccatgtgctcatgaatcagataggactgaggcaaataggttccagcctggatgttaataagtaactccagtaggtttctgggtggcataacaatggaagtgttcagagggatcacatagcacttatccaggttaagatctaaataggctgtaagtttcttgttaaagtcatgaacaatgttggcaggatcactatctgcaaactctgggacaggcacactgataaattcaacttcttcttcttcaaagattttaatattttcttcaattgtctggtagagagcagctggggcatctgcagagggctcatttaagatgacatcatctttgatgtactttattccacagtagtacacgtcatctggttgaagtgcaaaatatttgtacaagtatgctcctcctagaataacacctgcaagcataaatgctagtccaaagcacatgcaccaacaccaggctcttctttggccaactggtaccacatcatctgggtccttgcagtccaccgcgacggcgtcgggggggatgatgagcgcctcctcgccgctcttgggctcgtccttcttggcctccttctgggccagagcggagttgaacgtcaccttcaccatggcgcggcctggggcgccctcgaagggcggcggcgggctcggggcgcgggctgcgggctcccggctgcgattgcagcctctacggccgggctccgggagcggctccgggcggctgaagaggttcgggaagctccgcggcggcagaggcggctactgcaagtagggatctcgcccaacttttttgtacaaagt

SEQ ID NO: 431043 - DNA, 884 bp, Homo Sapiens
gatgtggtcagtgtgacatgtgcaggtgggaggggcagagggacaagacgggcagggagggtgctcctggggacagtatcttccccgccggctttcacttcttggccttgccctgggcagccacagcttccatggcttttgcgcaccgtctcttcatcccccagaaactgcatgggcttgataggcttcaagttcttgtccaattcatagacaatgggaataccagtcggcaggttcagctccatgatagcctcttcagagagaccctccagatgcttgacaatgccccggaggctgttgccatgggctgcaatcagtacacgtttcccctccttgatctggggaactatttcttcattccagaagggcagagctctggcaatagtatccttcagactctcacaggagggtagctgatcttctgtgaggtctgcatacctgcgatccttactgatgttgctgtagaaaggatggtcgggctccatcggaggtggtgggacatcataggagcgcctccagatcttcacctgggcctcaccatgctttgcagcagtttctgctttattgagaccggttagacccccatagtgccgctcattgaggcgccaagtcctcaccactggcagccacatctgatcaatggcatctagcactgtccagagggtccggatcgctctcttctgcactgaggtgaagcagatgtcaaactcatagccagcatctcgtagcgcctgcccgccgcgcttcgcctcctcgtggcccgccgggctcaggtcggcgtcgtaccagccgctgaagcggttctccaggttccatgcgctctcgccgtgccggatcagcaccagtttgtaggcggccatggcggcggaggtggggatgcgcca

SEQ ID NO: 431044 - DNA, 865 bp, Homo Sapiens
tacaaaaaagttggggcggaggcgtgcttcccgggagcgctcttcgcttccctcggggtcttgctcggacctcggccaccgcctgggatccccaggactcgtgcgtgcagcatgggcggcgtcggggagccgggaccgcgggagggacccgcgcagccgggggcaccgctgcccaccttctgctgggagcagatccgcgcgcacgaccagcccggcgacaagtggctggtcatcgagcgccgcgtctacgacatcagccgctgggcacagcggcacccagggggcagccgcctcatcggccaccacggcgctgaggacgccacggatgccttccgtgccttccatcaagatctcaattttgtgcgcaagttcctacagcccctgttgattggagagctggctccggaagaacccagccaggatggacccctgaatgcgcagctggtcgaggacttccgagccctgcaccaggcagccgaggacatgaagctgtttgatgccagtcccaccttctttgctttcctactgggccacatcctggccatggaggtgctggcctggctccttatctacctcctgggtcctggctgggtgcccagtgccctggccgccttcatcctggccatctctcaggctcagtcctggtgtctgcagcatgacctgggccatgcctccatcttcaagaagtcctggtggaaaccacgtggcccagaagttcgtgatggggcagctaaagggcttctccgcccactggtggaacttccgccacttccagcaccacgccaagcccaacatcttccacaaagacccagacgtgacggtggcgcccgtcttcctcctggggggagtcatccgtcgagtatgg

SEQ ID NO: 431045 - DNA, 715 bp, Homo Sapiens
catgaaagccactgactttattgatctaaaaaacttacaaggacagtgactgttctgccaaaaaaggagccaaatggtatcaaacggattgaaagtgagggtgggggtgagggatggggccgggaatccattcaggaaagctggtaactgtcaccagggaactggcaagggaaaaaggacgggggaggcatgcaagagcgagaatccaaaaaaaagttgaaatggttaggggagaaaactcccaaaagaccccggagtacgtcggaggtgagtacgacaatagcaatcttttccttcgtagaggacaggggaggagtccctactcggctgcaaactctggatgagggctggggattgagagcttcccagagagcatcacaagaaggcgtcgcaccactctcgaaggcatccgaagcagtcccgggactgcttggcgttggcgccacaagtgtctttcagccattcccggaagaggtcttcatctttctttagcaccagaaactggccaaggacaacataggccttgtcaaaacccctttcctccagcttcttgcccaggacttcaccaatcccagccaggctccccactggcttctcccccatgggctctgccacgaagtctcggtgcttttgggaggttgtcatcttgatcaggcttaatccgcaacttcagttcccgtaacggttcctcccgccacccggccgctcctgccaa

SEQ ID NO: 431046 - DNA, 888 bp, Homo Sapiens
ttggccgccccgcagcccaccatgtctcgccgcaagcaaggcaaaccccagcacttaagcaaacgggaattctcgcccgagcctcttgaagccattcttacagatgatgaaccagaccacggcccgttgggagctccagaaggggatcatgacctcctcacctgtgggcagtgccagatgaacttcccattgggggacattcttatttttatcgagcacaaacggaaacaatgcaatggcagcctctgcttagaaaaagctgtggataagccaccttccccttcaccaatcgagatgaaaaaagcatccaatcccgtggaggttggcatccaggtcacgccagaggatgacgattgtttatcaacgtcatctagaggaatttgccccaaacaggaacacatagcagataaacttctgcactggaggggcctctcctcccctcgttctgcacatggagctctaatccccacgcctgggatgagtgcagaatatgccccgcagggtatttgtaaagatgagcccagcagctacacatgtacaacttgcaaacagccattcaccagtgcatggtttctcttgcaacacgcacagaacactcatggattaagaatctacttagaaagcgaacacggaagtcccctgaccccgcgggttggtatcccttcaagactacgtgcagaatgtccttcccagccacctctccatgggattcatattgcagacaataacccctttaacctgctaagaataccagatcagtatcgagagaggcttccgggcctggcaaaaggcgctttccacccactccccccctgtttagtccaccaccgagacatcacttggacccccacccgcatagagcgcctggggggcggaagagatggccct

SEQ ID NO: 431047 - DNA, 544 bp, Homo Sapiens
gacttgtcgtggcccctgtctagtttctcatgggttcggtccgacttgtcatggcccctgtcggacttgtcatggctccggtccaacttttcttcagcatttgcattactgcttttgagcttcttggccgatttggtaaccacggagttggggtcatgtggggagagccaggatacaaggtctgggtctgcattccagtagtaagggagcccgcaggaagggtcgaacaccttgtaccagcttggtggtaggccctccaacgtggtggcctcgtagtccacaggatcatcgtcatagtcctcggcaatgatctcttcctctggttcaggctccagatgtttgaggatgcctctcttggccaagcgggtctgcagcgcaacgggcagcggcatagctgatagcagacagacccccaatacactcgtgcaggtagtggaaggctgtcacaccgcccgtctctctcgtgtcgccgctacgatacctgggcccacaggactctcttcccaaaacaccgaatgtcgcacctaaagtctcaacgaggcca

SEQ ID NO: 431048 - DNA, 867 bp, Homo Sapiens
ccaggttctcctctttgtacttaatggactgagtgtggtgccgcatgaaacccacagtgaggaagaggtaaatgacagcaaagatggtgtgcagccaaaggaggtcattgtcagtctgtaggtttgctattgttgtcctcccaaaactatacgggtctttgtccagcaagtcccgtgagaggttgacaggcaggatgacacacagggacaaaaagctgaccaccaccaacaggaagatgatgtgcctctggaaggacaggtagtggatggcgtcctccccacaccattccaggatctggtcatcatgcagacggaagatggcagtcagccagggacagcatcccagctcattttcaaagtcttgttgacctgaggaggaagtcgatgacaatctctgaaatctggactcgctgtctgcttctgacaccagggcaatgcggccatagtcccagaatcttcttcttataatagaaaacaccaagattaagaacaggaagcagctgacgtctatgagcaggacagtggggatgccaccaaaggtgaccccctggagcacggtgctgtttttggccgagttgtagcaataggagtcgttgggccggtccccgagtcccagctgctccctgatggacactgccttggactgccacagctccaggaacggggagtccatcatcgcgcctgtcttccctggagcacaggacaacaggacaaggcagacgttcagggctcaaatttcttgcaggttcccaccagtgctggcagagccaaaggcaggcgtttcccagggactgatcgggcagtaagccagcagcaaggagtccgggagagccagacattggacctctgcatgcctggcagtgccaa

SEQ ID NO: 431049 - DNA, 929 bp, Homo Sapiens
ccaaacacagtgggctggatgaagtaaccacggtcagcagcaatgcccccaccacacagcagcttcgccccatcttgcttcccccgtgttgatgtagccgaggatcttctttaaactgagtttcatccactgcggcccgtgctcggtcttgctatcaaaggggttcccgaccacccgagacttggcccgggcaacgctccgctccacaaactcatcatagatgtcttctgcacgaaggtccgggagccggcacagcagcactggccctggttgaagaacagggcgaagtgggcctgttccacggcccaatccatatcggcatctgacatgatgatgttggggctcttcccccccagctccaaggtcactctcttgaggttgctgctcccagcagcaacctggattacgcggccaatctcagtggagcctgtgaatgccactttgtccacatcctcatgggaggcaatggcggccccagccgtggggccaaatccaggcacaatgttgaccacaccagggggaaagccagcctccttgatcaggttggccacatagagggcggtgaggggtgtctgctcagctaccttcatcacaaccacgtttccagttgccaaggctgggcccagcttccatgcttgcatcaggagcgggaaattccacggaatgatctgcccgcacacccccacaggttcatggcgtgtgtagctgaagaagtctccgtcaatggggatggttttcccgtggtacttatcagcccagccggcataataccggagacatttgaggaccatgtccaaatccaccaggtaggagatgacatagggcttgccattgtccagggtctccaaggccgccaggtaggtccggtcccgctcgccaacttttttgtacaaagttggctattataggaaaagcattgctcatcaatt

SEQ ID NO: 431050 - DNA, 3639 bp, Homo Sapiens
  misc_feature (495)..(515): n is a, c, g, or t
tggtaaaccttcccttaaaggactttatttctctatttttatatggatcatttattaaattagaagactaaaaagtaaaaatatattttacaatcaaagaaaaatctggacaatggaccccagtaaaataatcagaagcgcacgttctgagaccactcctgcctggcaccctgcagggtagcgcccagggagcatctgcagaggggagaggagaggagggggagcctccggcgacctgtcttctatctccggagccccgcctgaggctccaagatggcacagtcaggctgtccttagtgaccgctgccacggagctggcgatcggcctgcatcttcaaacccaggagcaggagcagcagaggctggcaaggcctgggccctcagacaccaggggcctaaacccagctcccaaacccactgcagcctccccttgtgagctggcagacaagcctgtccttctgagtgtgacgacctcatccacacctgacacaggcnnnnnnnnnnnnnnnnnnnnnttgtgaaccagctaattctggggaccgctcggaggggcttcagcaagctgcttctacagtaagccacttctacagtaagccttcaaacaggaaataaagcataaaatgaaggaaagaagaatcttatttaattaaaggccttgcaaaatgtgatttgtctattaaaaaaataaagcgcttgtgaaaaagaaaactaagagatggcggcaagcgtggtcatcggcaaagggttgctctccctccagcgaggctggcccccactgtgtgggtccctcgggcccccacacgggctgctcaagggctggcagcaggggccacgtcctctctaggagacacccacagagccacatgtgcacgcgtgtggcagtctcactgcaccccagcaacgcgaaggcagaaaccggtgctggtggccacacctgggcgcctggacaccgaagcccccagcacagtgaggcctctgaagtgtggcttgtggtctgttcctgggttagagttgttaatatcacggaacataccatctagaacgttccagtcccacctgacaccttcattcccaatggagaagaaatctacacaggcgtaagaccaggccatctgagacagggaatcccaggggcccctccgtctgagtggtcggcgtctgctgaacaaataccatgtctttcttcttcaaaggatcaaaggcctttaggacccacagctgaagaaggcgcctgctgccagcatgtccctcccccacggccaccacacacttcaagtttacaaaaataaatatttatcaacagtatatttgacaaaaaccacccccaatcgatggcagaaagcagtattttctagctggcactgaaacttaacctatttttttgagggagaaaaagactaaaatgtaagcactaacttcctccttctgcatcttccacagaagacccacttgtgggcattctctttctgtccgttatcagtgggtttacatccgaaggccggcggcaagacacttgaaccacaaacaccagacatgcaggtgtctcaatggcatgcagattatttaaagtgcatcacttgtgagaagcttctcaaatttctgactgtcataaccaggtgtcacctaaaatctgtcctgtaggccaagatgctacacgcagcgcccaggcagtcagaggtaagtgagcgcctcccgcctcagaaagcttttacagggccacgctcgccaggctttcctcgcccacgctgaacccacgtcctgggcacagcagctcccaagctgtcagcagtcggctggcagtgccaccacaccctctcggaatcatgcacagtgctgcctctatcacctctcaccccagcctcgcaaggcctgttgagaagagaagctccctgggaggacacccacggagctggcacgagcgcagcaggagagacggacggcagcctccggcgggcgaaggacccggcttcagatgcccgctggctggcaatcaggcagagcctggccaaccgtgccaggcccccttcctcactccaggtgtgggttcattctgccttcaggccggagtctgtcacaaggctggctggacagtggccaggtgagccaggccagaggccggccccacaccatccacaggaagctgctcagctcaccagacccaagccctgggcaggggccaggctcacagcaaagcgcgttagggcaagggcgtgagttttcgtctgggaagttctaaaaaaaacccacagtgtgagggattgtgtgtgccttaaatcaacagctctattccaattacatcacatcacaaaatgccatgaatggaatcggaaggcgctccaccacctccaacaccctggcagaagcagctgctctctacagcaagagcattttccagaacggcatgagaaggagagacgcacgtcccagggacaggagagcgcgctgagacctcccagcacgagatgggaggggagcccccgccccgtcctggaccgccaggaaccgaaaacccacatgcacccaagaacaggtgtggacggggcggcacagaagtccacgggagggggcgacacgggtgctctttcacgggaatcttgttgggacagcattccttggggagcgccgggtcggcgtgtccaaagagcgggggcaaaacggcatcgaggcagaggctctatggctcctcccccatctgcagcagggagttgatggcggcatccttgttccctcgctgggcttccagcacggagcggatcacctcctggtccatgttggggaacatgtcctggatggctttcaggtcctcctcgctacagcggggctgggcgttcacggcggccgggggcagggccacgggcaccatgccggggctacagacagcgggcatccctgtgatgggcacatagccaacgccctgctggtacactgttggcatcaggaccacgggctggggtggcatcaccatggcagctggaagcagcgcgtaggacatgacgaggttgatcatgccctccttgtcgtccccctgcctcccgctcaggctgtaccacttgtcctccaccttgccctgcctcagggactccgggatggtgatgtgggtccaggcaatgcggtcgtccatggagaaggctctctcatcgaagatctcgagatagaaagagtccacgcctgggggcaccgtgcagtggatgaccttattccagcggggattcttggcgccattgtgtgccgtgggcgtctcgtacaccgcgtagcccaggcgcagtcggcagtaggggtccatgcgggtcatgccgtaattcttggccaactttgcctgtaccaccgtgatgttcagtcggcccacggtgcccactgcgcctccgtactgcagctgctgggccgcctgggcgtccagctggacctgccgctgctgctgtgtgggcgtgatgcggaggaagtcctgcgggagctcaccgatgtacaccggcccgcgctgagtgctgacggtggtcgccatggtgctgcggcggcccccgtggctcgccgacccgacagtgacgcgccgggcgacctcctgcgcccccgccggagcctgcgacggagacagttgtcacctcgaggccgccgccgccacagtcagctgacagccgccgcgcc

SEQ ID NO: 431051 - DNA, 667 bp, Homo Sapiens
ataatcacccacatggggctgcttggctgctttagtcactgcatcaccacgctcagagaaatacttagagatttgagtgtggaagccttctagcttggtgtggaggctggtcatcagctcaaacaccttctcctggacagccactccaaaattgttaccatcctcaatccgaggtatctgcagctgcaaccaggtggtgaccaggttgagctgctcaatgacatccttgatctcaggcttcaagcgctgcagaaggaccacgatcttttcattgcagttcactgggccacagggaggacctttgtcttcatcctcccccttcttcttttcatccttgtcttccttctcctgctgtttcttccgctcctctttctctttctccttgactggatcaggcactgggatgtccaatggggccttcagattgctcaagttggcttcattgagagctggctcctttaaaaatgcatccagctcagaaatcttcgttggggaaatagctcaccgagcaggttctctgtcttggtacagaggtcttcacgaaacacataccacccttggcttgggcctcgggctggatcctgagcatggccatgaccgggacggggggcctagcgcccgacgcgtgggtcgacgatatcccgtaattccggaccgtaccagctgg

SEQ ID NO: 431052 - DNA, 1250 bp, Homo Sapiens
  misc_feature (25)..(25): n is a, c, g, or t
  misc_feature (123)..(123): n is a, c, g, or t
  misc_feature (125)..(125): n is a, c, g, or t
  misc_feature (127)..(130): n is a, c, g, or t
  misc_feature (1167)..(1203): n is a, c, g, or t
ttttacccttaatgggggccgcggncgcccgcacaaacgcagaatggtgtttaaaaaaggcttttttggagggcgcgcgagggccggcccgaacaggggaatgggtggggacgcgccggggtntngnnnnaggcgggggtataactgatagttaattgtgcctggagaggccaaggtgaggggaaaaatcttcaccagaagcaaggttgggggaaaatctggagttcccgcagtaaaaagcagggaagtcttctgctgtactcatcacagaatgggagagagggctctcaatagatcattccctttgtttctcccctgggcttcttgagcttctcgaagttcttcaggatgatgtcatataacacagcataagcattgcggatctccatgaccatcagccggatgtcccggtactctgcctcatccagctcgtgcaccagctgccgataatcacccacatggggctgcttggctgctttagtcactgcatcaccacgctcagagaaatacttagagatttgagtgtggaagccttctagcttggtgtggaggctggtcatcagctcaaacaccttctcctggacagccactccaaaattgttaccatcctcaatccgaggtatctgcagctgcaaccaggtggtgaccaggttgagctgctcaatgacatccttgatctcaggcttcaagcgctgcagaaggaccacgatcttttcattgcagttcactgggccacagggaggacctttgtcttcatcctcccccttcttcttttcatccttgtcttccttctcctgctgtttcttccgctcctctttctctttctccttgactggatcaggcactgggatgtccaatggggccttcagattgctcaagttggcttcattgagagctggctcctttaaaaatgcatccagctcagaaatcttcttggggaaatagctcccgagcaggttctctgtcttggtacagaggtcttcacgaaacacatccaccttggcttgggcctcgggctggaccctgagcatggccatgaccgggacggggggcctagcgccgcacaaggagtggagtgggcaccgcgaagggaaagcgaaagcggtagggcgctcgcacccagctcccgctctcgacgaattcgagctcggccgatttggcctgatnnnnnnnnnnnnnnnnnnnnnnnnnnnnnnnnnnnnncgccgccaccgcgtgagctccagtcgccctatagtgagtcgtaaaca

SEQ ID NO: 431053 - DNA, 971 bp, Homo Sapiens
ttcgacagtggtataactatatttattgtgcctgagaggcaaggtgagggaaaaatctcaacagaagcaagtttggggaaaatctggagtccccagtaaaaagcaggaaggtctctgctgtactcatcacagaatgggagagagggctctcaatagatcattccctttgtttctcccctgggcttcttgagcttctcgaagttcttcaggatgatgtcatataacacagcataagcattgcggatctccatgaccatcagccggatgtcccggtactctgcctcatccagctcgtgcaccagctgccgataatcacccacatggggctgcttggctgctttagtcactgcatcaccacgctcagagaaatacttagagatttgagtgtggaagccttctagcttggtgtggaggctggtcatcagctcaaacaccttctcctggacagccactccaaaattgttaccatcctcaatccgaggtatctgcagctgcaaccaggtggtgaccaggttgagctgctcaatgacatccttgatctcaggcttcaagcgctgcagaaggaccacgatcttttcattgcagttcactgggccacagggaggacctttgtcttcatcctcccccttcttcttttcatccttgtcttccttctcctgctgtttcttccgctcctcgtttctctttctgctttactggatcaggcgctgtgatgtccaatggggccttcagattgctcaagttggcttcattgagagctggctcctttaaaaatgcatccagctcagaaatcttcttggggaaatagctcccgagcaggttctctgtcttggtacagaggtcttcacgaaacacatccaccttggcttgggcctcgggctggaccctgagcatggccatgaccgggacggggggcctagcgccgcacaaggagtggagtgggcaccgcgaagggaaagcgaaagcccgct

SEQ ID NO: 431054 - DNA, 752 bp, Homo Sapiens
tccgggaatttcccccggggtattttttgccctttcattcccaggcttgtgtgccaacccaggctggccggataattccaccccaaccttgggggctgctttgggctgcttttagttcaattgcattcacccacgtttagaggaaaatactttagagatttgaagtgtgggagcctttctagctttggtgtggagggctgttcatcagctcaaaccactttctcctggacagccactccaaaattgttaccatcctcaatccgaggtatctgcagctgcaaccaggtggtgaccaggttgagctgctcaatgacatccttgatctcaggcttcaagcgctgcagaaggaccacgatcttttcattgcagttcactgggccacagggaggacctttgtcttcatcctcccccttcttcttttcatccttgtcttccttctcctgctgtttcttccgctcctctttctctttctccttgactggatcaggcactgggatgtccaatggggccttcagattgctcaagttggcttcattgagagctggctcctttaaaaatgcatccagctcagaaatcttcttggggaaatagctcccgagcaggttctctgtcttggtacagaggtcttcacgaaacacatccaccttggcttgggcctcgggctggaccctgagcatggccatgaccgggacggggggcctagcgccgcacaaggagtggagtgggcaccgcgaagggaaagcgaaagcccc

SEQ ID NO: 431055 - DNA, 488 bp, Homo Sapiens
  misc_feature (343)..(343): n is a, c, g, or t
  misc_feature (416)..(416): n is a, c, g, or t
  misc_feature (456)..(456): n is a, c, g, or t
  misc_feature (468)..(468): n is a, c, g, or t
cgctttcccttcgcggtgcccactccactccttgtgcggcgctaggccccccgtcccggtcatggccatgctcagggtccagcccgaggcccaagccaaggtggatgtgtttcgtgaagacctctgtaccaagacagagaacctgctcgggagctatttccccaagaagatttctgagctggatgcatttttaaaggagccagctctcaatgaagccaacttgagcaatctgaaggccccattgggacatcccagtgcctgatccagttcaaggagaaagagaaagaggagcgggaagaaacagcaggagaaggaagacaaggattgaaaagaagaagggggngaggattgaaggacaaaggtcctccctgttgggcccagttgaacttgcattgaaaagattcgtggttcctttnttgcagcgttttgaaagccttgagattccaaggatgttcnttttgaggcagnttcaacctgggttcaccacc

SEQ ID NO: 431056 - DNA, 569 bp, Homo Sapiens
  misc_feature (508)..(508): n is a, c, g, or t
  misc_feature (532)..(532): n is a, c, g, or t
  misc_feature (544)..(544): n is a, c, g, or t
ttttttttggtattcaatgcgtgttcatttattttacacttacaaaagaaatcgcccacccctttgccccattcccccaaaacagtctctttttacaaacatttaaaaattaaaaccaaatgaagatagacaagttaatttcagtacaattatttttcagtgtagctgtcataattagagtttaaatttcctacaagtgaccaatgtccaagtgacttatagggaaatcctgattatcggccaaaggaaattcaatattacaagttagcaaattctagtacaaaaatagtccgtgtgttggaacagctttccttttacataggtcttaggtcagtctgctgtaatacctaacgcttccggattctctctcacaaatgggctcaatcgtcactggctgaagcaggcatgggcgcctgcagcagcagggggcttagtgtccaccttgggggccgtgctgggagacggcaggcctggggactgccttgcttggccccaggggcacctgggnaggagctccaggccctaggtccgnatcggggggttnggagggaggggttgagtttccccct

SEQ ID NO: 431057 - DNA, 309 bp, Homo Sapiens
tttacttctttataatttatttttccactgttagactataagctacatgacgacaggatccttattcttgtttaatagcatatctaaagcattcagaagagtacacagtacatagcaaatgcttaacaagtccttatcaaagaaataaaagaatatctattgggaaaagattagtgcatctacttacactatactgagttaatgaatacattatacatacagatggtttccattcattctcataggcagctatctatggtgggattgttacacaggtaaggcaaagaattgaacttgttccagattaaa

SEQ ID NO: 431058 - DNA, 1277 bp, Homo Sapiens
  misc_feature (1277)..(1277): n is a, c, g, or t
aaggttgtgtgattttggaaaaaagggcaaaatccaattttgggtccacaagaattttagggttcaaaacccttcccaatttaaaaaattaaaattaaatttcttggttaccaaccggcaacaattaattaaaagccaaaaccaagcttggttattaagattttaaaagcctaattctttacacaacacaatttcattgcatggaaaataaagtcaaacatgctgtaagaatttacaatgggattttaccagttgttagtgttcaatttccctcaagtaaacacaaatgcaaatacaagtttggacaccagtgacccacagatacatatatatacttttaataggaaattagtgctcaatactctgccctttgtgtgggggaaaacattcttttatacaaggatttttacctagctattacaatagtttaaggtaatgtacaatatatatttgacacagagagtgttattagatgttcgcactgcataaaatgaatcctctagcctttgatgtcttaaaaagaagttttacaactattagtgaagctaaggcactacatattttccttccacaatatggatttgtgtcatttaaactgaagaagttgatcttgtgtgatgacaggtatgtctgaagaggcgtctttcagagtcatctatcctcttggcatgccaatgcaagaggaaagcattcctcaaaccaaagaaatcttccaaccaaaacataggtaacatttagcctgatttcttacaaaagcttgtagacaggtgtttttttctgtacttcaccaccatgagttgggaatctatgcctgtgggccaaatcttgtctgtgcctgctgtttttgtaaataaagtcttattggaacacagacatgactacttgcttgttttgtctgtggctgcctttgtgcctacaatggcagagtcaagtagttgttaaacagggaccttatgacttaaaatacctactttctggctctttaacagaaaatgtttgccgatccctgactcgcggtgaaaaattttattttgggggcagagccatgttacagaagcccgacctcccaggaagggatctggtgagagacatagcatgtcatagacaagtcaaagggggagcatcttcccggtggcctggtgtcccaggcacatgctaggcactcagtgggtgcttaatccatttgttcggtgaatcctggggatttcttcgccaattgggtagaaagagcagactcttttgaaagaagattaacctgcccagtgcagtggctcatn

SEQ ID NO: 431059 - DNA, 499 bp, Homo Sapiens
  misc_feature (474)..(474): n is a, c, g, or t
  misc_feature (479)..(479): n is a, c, g, or t
ttttttttcacagatacatatatatacttttaataggaaattagtgctcaatactctgccctttgtgtgggggaaaacattcttttatacaaggatttttacctagctattacaatagtttaaggtaatgtacaatatatatttgacacagagagtgttattagatgttcgcactgcataaaatgaatcctctagcctttgatgtcttaaaaagaagttttacaactattagtgaagctaaggcactacatattttccttccacaatatgggatttgtgtcatttaaactgaaggaagttgatcttgtgtggatgacagggtatgtctgaagagggcgtctttcagaggtcatctatcctcttgggcatgcccatgcaaggggggaaggcatttcctcaaacccaaaggaaatctttcccacccaaaactaggggtaacctttgggcccggattttcttacaaaggttttaggncgggntttttttccggacttcacca

SEQ ID NO: 431060 - DNA, 843 bp, Homo Sapiens
  misc_feature (563)..(564): n is a, c, g, or t
  misc_feature (566)..(567): n is a, c, g, or t
  misc_feature (569)..(569): n is a, c, g, or t
  misc_feature (574)..(574): n is a, c, g, or t
  misc_feature (576)..(577): n is a, c, g, or t
  misc_feature (604)..(604): n is a, c, g, or t
  misc_feature (610)..(610): n is a, c, g, or t
  misc_feature (743)..(743): n is a, c, g, or t
  misc_feature (752)..(752): n is a, c, g, or t
  misc_feature (764)..(764): n is a, c, g, or t
  misc_feature (789)..(789): n is a, c, g, or t
  misc_feature (798)..(798): n is a, c, g, or t
  misc_feature (805)..(806): n is a, c, g, or t
  misc_feature (825)..(825): n is a, c, g, or t
  misc_feature (831)..(831): n is a, c, g, or t
  misc_feature (838)..(838): n is a, c, g, or t
tttcccagttttagcatgcaactttattaacaacatgtaaataaaatctcaaaagaatacacatatcaatataaagcacagaagtatagcttactcaggatgaatagattcattatcaggtcacgttgcagaaataccaaaaatatctcaatttatatactatatagcacaataaaaatcagcacatgttcaggatctcaagattaattggtatccataaaattgcctccctcaatcaacatggaaaacataagtattgaatttataattacaatatgcattggtttcatattgcaactccaaaaaactgtttgaggctttatgagaacagaggggtattcagagttttagtattaatcgtatgactttatctctcacttcgggatcactgtgctctgctaagtcttggtgtttctgaccaaactgttttgcttcctggaatattgaaataagctcagatttagtgaacttttccttggtaaatagctttgcctttgttttgaactgaaaatttatattctcaaatatttcaataatattaagaatattggcctttgactcanncnngngaaangnngcaaccaatgcatgcacagcgacgggngcaacngcagcaaggcgcgggcgagggcgcgcggcagggggagcacaaacacgcaaaacacggggaaaacagaaaacggccggggcacacggcccggcgggaacaacgcggcagcgcaaagcggcgcaagagtaacggncgaagtcanagagcgcagcgngcaaagggggagacgcaagcgcccngagcgaagngcagctnnagcacagcagccacagggngcgcgncaagggngcaag

SEQ ID NO: 431061 - DNA, 676 bp, Homo Sapiens
  misc_feature (71)..(97): n is a, c, g, or t
  misc_feature (141)..(157): n is a, c, g, or t
caagaggctttttccgttttatttctttgggaaaggaaaacaaaaagtctttccatcacatatggtagagnnnnnnnnnnnnnnnnnnnnnnnnnnnattccttttgtggttggacgtcccaaagctgagtctgttcatannnnnnnnnnnnnnnnncttactaatgccttctcttctccctgcccctgtggcctaggcccaggttctagggcaggtacagtgaggggtgaatggaatgggcagtggtcgccaggatggcctcccacccagctcagagacctggtgaggaccacccagaagggctgtgcagagggttagaggccacacagaggggcactcatgtttttgtgggggatgcacagctcattaaacagtcaccagtcatgggaggaggctggtcaggggctaggggacttgctcacagtagttgccagctctctccaccttgccccccaaaactcagtcttgggggtgggaggaagagagtgaaaaagagagagatataagggctgagggccaagcctcctccaatttttattgctggtgaattagaaatttgcttttcccttcctgtcttggggagatagactctgagagggccccaagagaagcagctgacattggctgacctaacccctcatgccaggcctaccctgggcaggtgctgagccacct

SEQ ID NO: 431062 - DNA, 249 bp, Homo Sapiens
  misc_feature (234)..(234): n is a, c, g, or t
ttttgaaagttgttcatttatttgtgaaaagtctacatgtgttgactgcattctaaaatgaggctaaataggaaaggtgccattagctctgagtgattaaagccatcgtaagcagatgccaataatcatgcaaaccaataaggaaagagcttaaaaacagtatttttatttttaaaaaacctcaacattaaggaggaacccttctctgaagcacatcactttcctattaaaaantaaaaaaagtacagt

SEQ ID NO: 431063 - DNA, 725 bp, Homo Sapiens
  misc_feature (600)..(600): n is a, c, g, or t
gttttctgctttaaattaaaattttatgacagtatcgaggcttgtgatgacgaatcctgctctaaaatacacaaggagctttcttgtttcttattaggcctcagaaagaagtcagttaacgtcacccaaaagcacaaaatggattttagtcaaatatttattggatgatacagtgttttttaggaaaagcatctgccacaaaaatgttcacttcgaaactctgagttcctggaatggcacgttgctgccagtgccccagacagttcttttctaccctgcgggcccgcacgttttatgaggttgatatcggtgctatgtgtttggtttataatttgatagatgtttgactttaaagatgattgttcttttgtttcattaagttgtaaaatgtcaagaaattctgctgttacgacaaagaaacattttacgctagattaaaatatcctttcatcaatgggattttctagtttcctgccttcagagtatctaatcctttaatgatctggtggtctcctcgtcaatccatcagcaatgcttctctcatagtgtcatagacttgggaaacccaaccagtaggatatttctacaaggtgttcattntgtcacaagctgtagataacagcaagagatgggggtgatttgaaatgcaatacattgttcaagtgaataataaaatagacctaaagtgggcttttacaggcaagaggcaattgtgattgttgaaa

SEQ ID NO: 431064 - DNA, 471 bp, Homo Sapiens
  misc_feature (228)..(278): n is a, c, g, or t
  misc_feature (442)..(442): n is a, c, g, or t
tgaaaggaaaaaattcaaagtttattcaacattaagaataacagacagataaaggtttggacttaacagcataaataccaccaatatcatggtgtacaattaaactaacctcatgtcaacttgtacctgtttaacagatgcgatctttgtggtgttgccaaaaggataatggattattgttatgtttggtaaggtgctcaaaattaaagactttatgtcgacttattnnnnnnnnnnnnnnnnnnnnnnnnnnnnnnnnnnnnnnnnnnnnnnnnnnntcttacacttagcctcctgcaaaatgtattgactttagttgctatatccgattcggataaggctttgctcattttttaaatgacattattaatttgcagaaaaaaccgtggaggagacctttgggctttgcagtggggggtacctagggagcagaaggtgattngccacctgggagggcagatcacttagtct

SEQ ID NO: 431065 - DNA, 2005 bp, Homo Sapiens
  misc_feature (230)..(231): n is a, c, g, or t
  misc_feature (234)..(280): n is a, c, g, or t
  misc_feature (657)..(657): n is a, c, g, or t
  misc_feature (1036)..(1036): n is a, c, g, or t
  misc_feature (1567)..(1567): n is a, c, g, or t
tgaaaggaaaaaattcaaagtttattcaacattaagaataacagacagataaaggtttggacttaacagcataaataccaccaatatcatggtgtacaattaaactaacctcatgtcaacttgtacctgtttaacagatgcgatctttgtggtgttgccaaaaggataatggattattgttatgtttggtaaggtgctcaaaattaaaggacttttatgtcgccttattnntcnnnnnnnnnnnnnnnnnnnnnnnnnnnnnnnnnnnnnnnnnnnnnnntcttacacttagcctcctgcaaaatgtattgactttagttgctatatccgattcggataaggctttgctcattttttaaatgacattattaattgcagaaaaaacgtggaggagaccttggccttgccagtgggggtacctaggagcagaaggtgatcgccacctggagggcagatcacttagtctcagacacctgcagggtgctgagaccccagtgctaaatccagatctccaattgccatcacacataggcaagcaggcctggtcccatgccttgggatcgctctaattgactgtgataaagattgagttttccttaaaggaagaatagggtaaaatgagataaactactagacgaaccaaagaatagctttgcnatttcacagaatgtctattgttttacactgggggcgagtggggagggtgccactgataattcttgcttcttccgaaaacagaccctagacatctgattgtacatttggaattactgtgagttcgccaccatatcagtgggttagaaggaacctctgggtggtctagtacaggtttccattccaccgactccccactgtggaatcccatctgtactctcctcaaagggtccttctgctttgagggatgggtcagtggaggcctgttgtatttgaagacaaaaggcctatcacagtcttgcctaatgtggtatttgaatggttcaaagtggccacttcctgaagagaaagaagtaatgatctacagccctcccctcaacanactacctccttaaggcagcaccagcagaaagataggctggtcaatttttgcctttctttgccaagtctagttaaaagaaacaacaatgtgacctcatcaggaggtcctaagctgttccttccaaatcatgtctagatgatgtcagtatgatatgatttggattcattgttaatggccaaataattaatctctgaaagatgcttaggatgaaaaggtgaaaaatgacaaagggactctcataatagctgcagcgtgcagacatgcgtctgactccggttgacccaaatcactcagagtcaagccatggcctcccgctccatgaagcagatctgccttgtttgctagttaactgccctggatggagaggcagccagtccagagggagtgttcgtgtgtgtgtatcgtgacaatgaccctacatataaggcacctgtacagactcccaaagtgtttaaatttgtaagacgaggtaggtttctgaaacctcccctggcacacaagagaatacattttattagaatctttttattnttttctgcagaaaacatttgagatgctcatttgatataaacatctaattccaagagagaccagtgctcaaatatagttttttcagctaccatttgatacggccataaatttggatggtccatgttacaatccttccacaattctccacttaaagacatcatttttctatgtttttaatgactattgccatctaacaattctacaattcgcctctttgcctgtaaaaaggccaactctacgtccacctgtgtctcatattgctatcttttatttatctctgcttaagattgcaaaagtttttgattttattattcacctgaacaatgtattgcaattccaattacacccccatctcttgctgttatctacagcttgtgacaaaatgaacaccttgtagaaatatcctactggttgggtttcccaagtctatgacactat

SEQ ID NO: 431066 - DNA, 545 bp, Homo Sapiens
ttcttttttctatataaaatgtttatttttggaggactgtgtggtctggtgtttgggagggaactccacccccaccaggccaaccatggagctagaaacagagacagcaggaagggcaaagctggccactgcctgctccaccccttcacagcccagagcagaacagggtctgctctactctcaaggtgagtgacagagagccggtactgtttctgcccctggcataccctgagaacccatgtgacttctgtagtgctcagcccctgtgcccttcctgggcctgatccacatgtgtcaacacacacactccctctcacagtctccaaacagcactgcagagcctagctgcatctgccaggttcaaagaggaatttttcacatttgctcacttccaatctccatcttccttcctctgtctcccactctcccactctcagtagccgcatcccagccctgccatactcccttctcagggacaggagactcagtgggcagctggcctcagctctcctaacaggaaaaaaacctgtacagcatagtgccag

SEQ ID NO: 431067 - DNA, 899 bp, Homo Sapiens
tttaaattttacagagtttaattgagcaaagaatgattcaggaatcagggaacccctcaaaccagaataggctcagagagactccagtgccactgtgtgccaaagacttacggacagaaaagggagtgaggcacagaaggcagaggtgaggcctgcaaacagcagggtggctacagctcgtgtctggcttattgaaacagagtttgaagtgctgctgcctgtgactgattcaagagtaggttacagtgtccacacatccaattagatgactgttcactacgtatggagaaacctataggctaaacttacagtatgtaaggaggcggcttcaggctacagctgagtagtgtgtccttacagttggaaccaggagttcatgggaattcttcatcatccagtggtctgtaaatgttgcccatgctgagtagtctgtccttacagtgtgaaccaggggttcatggggaattcttcaccatccagtagtctgtaaatgttgcccatgctgagtagtgtgtccttacggtgtgaaccaggggttcatgggaattcttcaccatccagtggtctgtaaatgttgcccatgctttagttttgttacctggttgctctgtttttatgggattgtgagaaactgaaaaactgtgactgctggagccattttcccacaatccccattttttaaaaatcccataaaggctctctcgtgagcgccgcacgttttcccttgtagtcacgagggtaggggctggagaaagcagcagagatagtcaaaaacccacagctacaaaaaatgcactcctaagagcaagtaatggcgagggctaaaaggcactgtgccccttctgggccattctaattaccacatttaaatggttttgagaaaagagaatttttatctg

SEQ ID NO: 431068 - DNA, 693 bp, Homo Sapiens
  misc_feature (643)..(643): n is a, c, g, or t
cagaaggttcacagtgccttttagccctcgccattacttgctcttaggagtgcattttttgtagctgtgggtttttgactatctctgctgctttctccagcccctaccctcgtgactacaagggaaaacgtgcggcgctcacgagagagcctttatgggatttttaaaaaatggggattgtgggaaaatggctccagcagtcacagtttttcagtttctcacaatcccataaaaacagagcaaccaggtaacgaacccctggttcacaccgtaaggacacactactcagcatgggcaacatttacagactactggatggtgaagaattcccatgaacccctggttcacactgtaaggacagactactcagcatgggcaacatttacagaccactggatgatgaagaattcccatgaactcctggttccaactgtaaggacacactactcagctgtagccttgagcccgctccttacatacttgtaagtttagcctataggtttctccatacgtagtgaacagtcatctaattggatgtgtggacactgtaacctactctttgatcagtcacaggcagcaggacttcaaactctggttcaattagcccgacacgagcttgtagcaccctgcttgttgcagcctnacctttgcctctgtgcttactccctttcctgtcgtaagctttggcacaca

SEQ ID NO: 431069 - DNA, 356 bp, Homo Sapiens
ataatcacaagccataaaactttattatacaaagtgactacaaacacttaatagatgcaaataattgttattacagtgaaggattgaaaaccaaactatttccatttaggtaaatcatgtctcaaaagtcttctaattagccctttttgcttagctgcatttcagttatcacagcctttactattcacacactcaaagggtccaggtatgtttcattgtccaacaataacaattcttttatttattctgacataaatatttcagaaattgtttgaggaacagaaatcaactttctggatttgtctacacacagtagactatttctacccgcaattctcttattctctttggtccaa

SEQ ID NO: 431070 - DNA, 925 bp, Homo Sapiens
  misc_feature (441)..(453): n is a, c, g, or t
  misc_feature (837)..(837): n is a, c, g, or t
aaggctgggagcagaatatggcggttttacttcttacattgccaaaggtgaagatgaagagctgctaacagtgaatccagaaagcaattctttggcattggtctacagagacagagagactctgaaatttgtcaagcatattaaccaccgaagcctggaacaaaagaaaaccttcccaaacagaacaggtttctgggacttttcattcatctattatgaatgacagcactgggcaaagctgaacaaaaatgtgacccttcgtaattactgggaagtctgaaagagctaagcatggagtcaaggagaactacatggtagcttgcctgacagtgttcttaaaactggttgtcttttactaggactcataatgattgtcctcaaccgagaccttgagcttgcagctaagtacttatctcttgattaaaaaaaaaaaagttggcnnnnnnnnnnnnnaacatttagtcctttttccatattggcttcttcagtgaatttttaagttcaatttgtttttattgaggtaaaatatttataacataaaactgaccagcttacccatttttaaatatgcaattcagtggattaagtacattctcattgttgtccagccatcaccatcatccatctccagaagttttccatcttcccaaattctgtgcccattggacaataactccccacctccccctttccctagcaacagccataccttttgtctctatcatcaacttcactactcatatttctcatgtaagtggaaatcataccgtatttgtcccttttgggactgggtttcccttagccataagtcctttaagatgcatccatgttttccgnggtttccggtttttttagaaaaaactcataccgtgattgccaccccggccatggttggcctcaccgcctgttatcccagcccctgggg

SEQ ID NO: 431071 - DNA, 609 bp, Homo Sapiens
  misc_feature (23)..(23): n is a, c, g, or t
  misc_feature (84)..(100): n is a, c, g, or t
  misc_feature (124)..(124): n is a, c, g, or t
  misc_feature (130)..(130): n is a, c, g, or t
  misc_feature (597)..(597): n is a, c, g, or t
ttccacatactgtcacacaactnaccatttctttcaagcaaggcaacctcctttataaatccaactcaagggctagccagtccnnnnnnnnnnnnnnnnngaaaaatataacttaggtaaaaancaaaancaaaagaagacatttcacacagactcctttttctttcgtttaaataaatttatttcttgtagctttgctctgtttagattatgtggtttttgttcagttatgagaacaatctttaaaggatggtggattgttggctagcttaatgaatggaataggaaagtggaaatgtaaaacgtcaggaaacatacattcagagctagatcagtttgttcactgagcctaaactggctaataatccattaaacacaatctcctcagaaaaagcacgaagattctaactgatacacagggtttcctcattcaaataaaagtaggatagaccaactaacctaggaagctaggctgaaatacaaagaagaaatccccattaggaatatcccagtttcaaggataaaatgcatgcatttaaatgcggttccatctggttgaaagtttggcacaagttactaaattcttccccaaaaggngaaagcccaaat

SEQ ID NO: 431072 - DNA, 2455 bp, Homo Sapiens
  misc_feature (55)..(102): n is a, c, g, or t
  misc_feature (2384)..(2384): n is a, c, g, or t
  misc_feature (2420)..(2420): n is a, c, g, or t
aatggatccacagtgatttaatattcggtgatattttcattttatgcaaataccnnnnnnnnnnnnnnnnnnnnnnnnnnnnnnnnnnnnnnnnnnnnnnnntacttagtgtttgatcaagcaagaatcctttcacacatctgccaagagagttaaaacaaatatagatgttaaataaaaggcccaggtaccaaagagcaaaatttaatgaaagccagaactgttaagtatggattcctgttgagaaaaatgtcagtctctttcagagttttcccaatgctctatttttaagaaaagtgtagtaaaaatacataatacaagttaacttttttcttgcttgtgttttcctttcatttctccattgatgaaaaagcacatttcgccagagtcttggaccccctcatagcatagaccctcatttctagcacaaacaagtctctttttatccgctcatgttacttgtgggctcagtagctggagaggcatcttactaggccaaaggcaaaaagtctttgaagcatgttgatgttaaagggttatttccaactcttccaagatgcagactccctaatggtgggtcacatcggattctgcagtggtaggctgaaggctgagaaaaatcttgtatgagggcaggggctgagagacatcagctggcagtagttaaaagcaatcatccatcttgagggtccggtttcatgaaccatgaccacattgacacgcgagagactgaacaacaacacttgagtcaaaaaagtgaagagtttgattttggaaggattctttgctatggctgaaggcaggagagtggagagacatagagatggtgtgggtccactgagagaatccacagaaaagccaataaagctgcacctacccctaggtgggctccaaaacctttagcatgtcaattgctaatgataacccctagcagagaaaattggatagaagtagggggtaagggaacaagccagaatatggttatcagtaaaagctaatgacacatggcacgcactgaatcatgcacctaggagagtgactgctggagagctggaagccagttgcaccaagaatgagagttgggatctccaagaaagctatatgtcagggattctcacttccaacaaaagctgaactcagcctgggcttctctctataaaccctgccacttcaccaatcttgctttagttcagctttgtagccccaatcatacgtatattggaatacaacgtcctcatgctatcttagctgggggaaggtcagcctctttgagttagaacctgggatcaaaggtcttaagttgccctaaatgtcattatcaacttaatccatctccctatactccttcaattatttccttggttatctcactttctaaagatgacagagcatcatctggccacatgctaaaacaacactttatattaacataaaaacccaagttctttgcatcagcataaacttcatacgtgttttcttaaacctaggatagggcacaccatgggaagctctattttgtgtgagcttttgatgaggcttcctcttccaaaattattctgtcacttttcttttacacttagcttgcttagcattgctccccatgtcagaggctccatagaagaagagagtctactccacaatgggttcctgcttagatgccaggcaaagaaaaagtgagaatcatgggcaatatctccctggctgttatctcttcccaaaattctgcttggtttaggaggccaagtgccttcagccaccagactgccgttgagcctgagcacaccaggaggacatacttctcagggccaaggttgactctgaagaaatataccataccacctatgacctatgaaatggctcttccacattaaaggaactgtttttctgagcagcagtaacttcaggagtccttctctgactgcacatctgcccctgccctctccaccaccctcatcctgagttgcttttcacctgtgttctccactgaataagtgcttaagcagtgccccacttggggaaggcagcccacttctccaacaatgtctatctccatcagaggtttgggccaaggagtggagggtaacatggagagcccccatggagaattagtttgaaggttgcttttttttcctcttgcttgtaaagtggaacaaatcttgaatctccaatctgaaaactgaagaggggtgggtagggagttggggataagaagtaaggagaaggaaagggcctaacagaacctgcaaaccatggatattagtaagaaaaaaaattgcacacactaagacacactaacaactgaattaaaataaaacagtgcagtttcctcattagtgttccagtgactctactctcagagacacaggtttcattagacagggttnctctccccttattgcagtacagtgttattttttcancctcacttagcaaacagaaaagggtgaaagaacat

SEQ ID NO: 431073 - DNA, 400 bp, Homo Sapiens
  misc_feature (228)..(340): n is a, c, g, or t
ttaaattgcaggttttatgaaataatttttttataaaaggattatgcccttatgaaaaatgccttcaaccatgagactagtccccaaagttttggggactcagatcctttcagaaagaagaaactctttggaaaaccttgggcattctgcatggctgcttacaaccacccagtgaaagaacaggcctcctcttttctcagctttacctgttttttgagacagagtctnnnnnnnnnnnnnnnnnnnnnnnnnnnnnnnnnnnnnnnnnnnnnnnnnnnnnnnnnnnnnnnnnnnnnnnnnnnnnnnnnnnnnnnnnnnnnnnnnnnnnnnnnnnnnnnnngaatgcaccaccgtgcccagctaattgtaaaattttttgtagagacagggtctcactttg

SEQ ID NO: 431074 - DNA, 787 bp, Homo Sapiens
ctccttgctcccattttaagtgccggtggatttggaaagatggatatgtagtctctgggatcattgtctttgatgtatttagagcttagcagctgtcctgtcagcccgatccctgtgtcactcggcatctctgccaatgttactacgtcctaagcagcttttcagggggcttccaggtctgtattggaagcaatgacttacctgtgttgtgagatatcccaggagccagcctctgtcactcacaggcttccagattgctctgccctggcctggggtctctgtctgaagtagagcatgaaagcagccggccccaaccctgcagggtacacctgagcctttgactccgaggaaggaaatggcgatggggggatgcagggatgatgaggaaaggcctcactctttgagtgtgtgatgaaagggaaaggatgtcaggaaggcactgagcaaaaggctgttacagctgaccttgagaggtcagccaatccattagctgcatggggcccagagagggtgaagttctttcatgagatcatgcagcaagttagtgtcaagtctagaattagaacttgggtgtctttgaccctgacagcgggagatgagcagtggccattaggtgtgatggtggttgtaggagcagccacaggcactctgaaattgaaggagtatagggagatggattaagttgataacgacatttagggcaacttaagacctttgatcccaggttctaactcaaagaggctgaccttaccccagctaagattgcatgaggacgttgtattccaat

SEQ ID NO: 431075 - DNA, 488 bp, Homo Sapiens
  misc_feature (14)..(14): n is a, c, g, or t
  misc_feature (67)..(67): n is a, c, g, or t
  misc_feature (93)..(93): n is a, c, g, or t
cccctgggggttanccctcaactttcctaaaaagatggaacaggagcatccacctggggcccaacanggcctaaaaaacaaacactttaatanttaaacataaaaaaacccaaagttcctttgccatccagccataaaacttcaatacgtgttttccttaaaccctaggaatagggcaacacccatgggaagctcctattttgtgtgaagcttttgatgaggcttcctcttcccaaaattattctgtcacttttcttttacacttagcttgcttagcattgctccccatgtcagaggctccatagaagaagagagtctactccacaatgggttcctgcttagatgccaggcaaagaaaaagtgagaatcatgggcaatatctccctggctgttatctcttcccaaaattctgcttggtttaggaggccaagtgccttcagccaccagactgccgttgagcctgagcacaccaggaggacatacttctc

SEQ ID NO: 431076 - DNA, 487 bp, Homo Sapiens
  misc_feature (450)..(450): n is a, c, g, or t
accaaagagcaaaatttaatgaaagccagaactgttaagtatggattcctgttgagaaaaatgtcagtctctttcagagttttcccaatgctctatttttaagaaaagtgtagtaaaaatacataatacaagttaacttttttcttgcttgtgttttcctttcatttctccattgatgaaaaagcacatttcgccagagtcttgggaccccctcataggcataggaccctcatttctaggcacaaacaagtctctttttatccgctcatgttacttgtggggctcagtagctgggagagggcatcttactagggccaaagggaaaaaaggtctttggaaggcatgttggatggttaaaggggttattttcccaactcttcccaggatggcaggactcccctaatggggtggggggtcacatcgggtttctggcaggtaggtaggggctgnagggcttgagggaaaatcttgtatgggggggcagggg

SEQ ID NO: 431077 - DNA, 508 bp, Homo Sapiens
  misc_feature (17)..(17): n is a, c, g, or t
  misc_feature (456)..(456): n is a, c, g, or t
  misc_feature (473)..(473): n is a, c, g, or t
  misc_feature (485)..(485): n is a, c, g, or t
cactttacaagcaagangaaaaaaaagcaaccttcaaactaattctccatgggggctctccatgttaccctccactccttggcccaaacctctgatggagatagacattgttggagaagtgggctgccttccccaagtggggcactgcttaagcacttattcagtggagaacacaggtgaaaagcaactcaggatgagggtggtggagagggcaggggcagatgtgcagtcagagaaggactcctgaagttactgctgctcagaaaaacagttcctttaatgtggaagagccatttcataggtcataggtggtatggtttatttctttcagagtcaaccttgggccctgaggaagtatgtcctcctgggtgttgcttcagggttcaacggccattcttgggtggcttgaagggcactttgggccttccttaaacccaagccagaattttttggggnaggaggttaccagcccngggagatttttnccccttgatttttcacttttttc

SEQ ID NO: 431078 - DNA, 416 bp, Homo Sapiens
ttcctctcctcccacctcatcccccaccaaccacagcttccaggaatcactgagattcacagagaaaggaagtaaacacaattaagaacaaagttatgttgaaaagatatttcaatgcacatgttgcaaacaaggcgagtcccaggaatcattccgaagaaaaagacagaatgacactgaaatccatcatgatggttatcccatcatgatgggagtaaagcctttaagggagtaaagccttaaagatctccttgtcagatgagacttttagaacagacccgacattctgttgacttagaagagctgatgtcatcctcagagcccaggtgatacacacattcctggatgtggccacagggtggatgatagtaccctcagctgagatgggaataggggcagagcgtttaggaatgggc

SEQ ID NO: 431079 - DNA, 2879 bp, Homo Sapiens
ttttttttagaaaatgttattcttttattatttcaaggaggtaatacatagcccaatatggcaaagcaaaagggaattagaggcagcaaatggccaggtttttctaagcgcctcatgctgcatctctgagctcctgtctgcccgcagcccacagctgcttacatgaaggccaggtcagtagacagatggcccaacttgatactccactgactgagaaagggctcaatgtgcagcacagcagaggcactgccaggacccagcacgctgggcggcaccccacgctgccaccaccagctacagaggctagtgccttagtagcagccagtgtgtctagcacttgattttattcctgtgagcctagagtgggcaggacgtgaataaatcctgagtcataagttaaggtgaaagacttagtagtgttaatactcttggtgagaaaagacaacacagtcttggaggagagtgggcttggagtctggtggaagaaagatagaaacccccagaagggcctcggcctgcaggcactgccttgaggccatcagagggggttttcacggtacatgatagggaggagtgaggcaggtgggcactggagggctgtttcctctggcacagttgaactagagggtcactttccactcataattggtttcctaggtctaagtcaccacacctggggctgaagcaagtcttgcctgtgcaccaagcgtggccttggaccctggagagatgcaaggctcagttctcccagtgttgaaagtggaaggactccccaactgaaggagatctttctctccccacctccagctcttttcccttacaaatgaccagggtgcaagtcgagaggcagaggcacctcctggtgcaactccaccacagtcttacagagaactcatcttggtgggacccaaagcccagccttggcatgaagcagacttattccacccatcggagggcacccagtctggtgactgaatggtggcgtgcaagtgggagtcagcagtggctctggatgccgtaatactcagatgccattcatctctgtgtgatcgtcctggctggagagctggtgaggagggactgcttcctcctggcatgcactgttcaccaaccacaccacgtgggctgatagatttttggtttgacaggtgtggaaagaatttttaaaaccagcccactgtgttctccaaacccagagccattggttttgtttgacaagaaagtaccaagagaaccacagctccactgaggctaaggcttgtgtagcacagaatgcagtatgtattgaaacgtataaaccttgtctgactggggagatgggtgagcaaagagctgccgggacccaggtcctctagtcggttgcaggctctgccgatgtctcatccttaagctcctcaaaacctgggactggcttctgtagaaagtatgtagtggcctggatcaccttgtctggtccaatgttgtacactgggtgagtgggctgcagagcgttttcgggcacacccaggaccacatcatgcaacatggctccgctgccgaagtgctgggctatggacaggccgctcaggcagtagcaggtgtggtagaaatcacgcgacttgccaggtttatccagaagcccccccgcagggcactggcagcacatcaggatgtactcctgcagggcctgctgatggaacatccagtggctcatgctaagggcagggtcaccttggggcgtgcagtgcgcggtggagcaggggcaggagccccgcctgccagaaggagtagcagccatccaccagcttgttgcagcggccctgaaatcctccttcaaatcgcatctgccggcttgtcacccattgtaataagctcttcaagttcaaggaacgttccctcttgaggattaccagcgcggccaggccacagaaggtatagccaccatgggcttccatccctggtaccccgccaatgccaccttcccagttctgacaccttgctatccattcagcagtgccctcaaagaggtctggagtgatgatgttggtcagcgaggctacggaggcagcacagtatgcgcttctcacatccacctcacctccgacatgcatgagaaaggagccgtcaggttgcttcagggagtacaaatactgaagaagcttctctctgttaatgatgtcataggcctcctcggtgccaatgatgcacaatgcattgactgctgcatatgtgggtgcaaggtgtggatactgaccgggtcctcctccaaagccaccttctgggctctgacacagctccaggaactgacacacatctgtagccactatctgggggatgggttcatctagcagttccaagctgtgcaggatccaatagcagagccatgggcggctggcatccagacactcataggcatctgtcagttgtcgaaggcctcttttcagataatggaagtgcttctccctctgcaaaacaagccttggtacaaggtggttgaacttgtaagaactgaagacctcttggatcttttcttctacttttgcctgttctatggacgtgactgtttccaccgagtcgtcctgcaaccgctctcgcgcgtgctcgggcctcagactgtacagcggctctgaccagacgggggaggaagatggagggcaatagtaggtgaaagaactcggagaagccatgatcaggagagcagcagacagtgtgtaggactctgcttcgttaagcaacacgcgcattgaaactcgagcgggctaaagcgctacggcgagcggatagaggcaaaagattttgaacgcgaatgtctcctcccgcctacccgtctttcgagtgagttactgagatgctgccgccccccattgggcagaggagctgctgcagagcgtagagtcctg

SEQ ID NO: 431080 - DNA, 653 bp, Homo Sapiens
gaggatctaccagcacgcacaggccacaaaacgtatagcgcatccattgggcttccgtgccctggtacccccggccaatgccaccttctccagttctgacaccttgctatccatctcagcagtgccctcaaagaggtctggagtgatcgatgttggtcacgtcgaggttaccggaggcaagcacagtatgcgcttctcctgtcctcactcttggcacacgttcacgtcctctctgggctctccaactgagagggtagtgacatgtctatttggatagatgttgctcaccggcatggcttcagtcgaaacggactatcgactattctattctccctacctccacatggtccaatctcccgacatgcatgagaaaggagccgtacaggttgcttcagggagtacaaatactgaagaagcttctctctgttaatgatgtcataggcctcctcggtgccaatgatgcacaatgcattgactgctgcatatgtgggtgcaaggtgtggatactgaccgggtcctcctccaagccaccttctgggctctgacacagctccaggaactgacacacacttggctcagaagtctctcactcccagatgcttcgacctcaagagcctcgtgccgattcaaccacccggcccgtacctagccat

SEQ ID NO: 431081 - DNA, 390 bp, Homo Sapiens
tttcagtgttgtatgtgtagcaggcacttgagtttatatgaagatgttcgcttcagtcaaggatggaaggagttgtgaggtggaagggagatgtgaggcagggagagaggaggcaacagagtatgaattcatgaccaccagccaccactagccaagaatgtccaggtagattggggtggccttccccaaagcatggaggattttgtagatctccttgatgttcaaccgctgctgtggttccctctgccagcaccccagcatgacatcgtacacctctttggggcagactcggggccgctccaaaacacgaccttgggtaatgcactctatgacctccgtgtttgagagttggaaccatggcttgcttccataggtaaagatctcccaaag

SEQ ID NO: 431082 - DNA, 910 bp, Homo Sapiens
ttttttttccacagagaaaaattagattgaattaacttttattactacttgtttaacacagatttacttgtcttagacaagtaagaatttatagaatctatgctctattgcactatatagaaactagaaatgcagttatactgatgtagtgcagtttgtgggaaatcaggaatggtgttctccagaatacatgaagattctcattgattgttgcaaggaatcacgaaagagatctttggtccaaagaaaacgtcttttgggcagcagagcaattcgctgaagttgcagtaacagatcatctcacatcccttcccatcccagaaatgatcctggacattgacatcaatctgtgtcaggtcagctactccttccggaaggttgtgacagttgtgatcttttagtatctttctgtagcaagagaggcgatttgcaggcatggcttgaactcctagcagcaaagttagcccaatggtgaaaacaagtaccatcagtttcattttggcttttggccctttttcttctttccttttggtcttggcagaggatgcttcttaaatgctcacactcactgggtgagtttgggcaaaaggagaagagaggaggtgctggaaggagcttctttacaaatgaacctttgtctgccttgtctctggcctgggatcgacagactcgctgctccagccaggactgtggggaggaggggagtggaaggagacaaggctgcaaggactgcctcctttggaagtgttcagtttgttccaaaccaggcgagaacgaatagaacagcttctttacagagggaaataactagtctatacaagaacctcagggaggcagactctggtagcaataaaacataaaacctgagggattttaaaagaacacagcgtgatttttcccttaagaaaag

SEQ ID NO: 431083 - DNA, 276 bp, Homo Sapiens
  misc_feature (115)..(126): n is a, c, g, or t
ttttttttccaattatctccatgtttatttaaatattttgctctaaaggaagcaatcattcctttatacttctttaaatttagtattgacatttttattttgggaaaggaggtcnnnnnnnnnnnnaacatggatacaggaaaagaaaactctccaataaaaatattgtctaaaaagtttgttttgtctgcatgatttactaaatatgtacaatttcaattcacagcgaaggtaacaaagatttaaacagccaacatcacaaatgtctcaagttct

SEQ ID NO: 431084 - DNA, 542 bp, Homo Sapiens
tttagtaacattggatttctaatttttagttgaagatatatataacagaaattctatatttgcttcccctaccccatagattgtctcagacaccctaccctggagacaccaagtccagaaggtgacttatgctagtaatccacagatgagggataagggggaccagctgcagagcttggtggtatcagcaaacatgccaaaggaggatcaaaatgatcagatagagatgaaggaaaagaccagctgggtatttgatcagatttagtagagaaaggagaaaggatttcaaaatggttccaaggtttttactccaaaaaacatgaaaaagttactggaagtgatggtgtcctggggaagggaagaggcatttattggggcaggcatcatccactgatttattttggaagtgctgtgattgagctactgaaagatgcacctgaaaacgtccagcaggacaaaggagacaccattcacctcctgagcaacacatagaccctgacctcagccagccccacttctgggcagagtgctggctccaagtt

SEQ ID NO: 431085 - DNA, 371 bp, Homo Sapiens
  misc_feature (291)..(291): n is a, c, g, or t
  misc_feature (303)..(303): n is a, c, g, or t
  misc_feature (311)..(311): n is a, c, g, or t
  misc_feature (323)..(323): n is a, c, g, or t
  misc_feature (351)..(351): n is a, c, g, or t
ttacaagttatgcttgaaataatgctgttaccaagataaagaagctccttcacccaaggaaccctggtgttaaaggcaaagattaaccaaataatcccacaagtaaactatcatgggactatgtaaatgctgtgaaagaaatgtatgggaagtcgagagaggatcccacctgggggctgggacagggtctcaacacagtagggtgagggttctccatgcaagaggacatgtgagttgaattctgaagggttgaacaaaagtcacctttacaaggggtaggggtttggaggnaagggtagggtnagggagcntgtttcaagccngaggttagttaggccgggagccaaaggnccccccgggccgggagaggg

SEQ ID NO: 431086 - DNA, 2662 bp, Homo Sapiens
  misc_feature (2588)..(2588): n is a, c, g, or t
  misc_feature (2594)..(2594): n is a, c, g, or t
caggaggactggcactttctgcgtgatttatttcatctcggcatgaactgacaaacatacgaggctctgcactatttatgcccaggattttaaaagtcaagcattaataaatacattaactacacagatcacaacagctgccctgaacttggccttcaacaggtgtagtttacctttaataaatggtaacatttgagaatcgcttagagcttgaacaggctttggaggagctttgatctcacatgagaacccgtctcctgtttcatatgcgttcaatccaaatccatccacttggcgtgtctgaagctcctgccagcacagtgtctgtgccgggtgcccgaaggctgcacagtccaggcttcctcccggatgtggaaaacgtggaaatgatgtggccactgaaagaaattcaagacaactgaaacaactgcagatttccattttcagctcgtgttttcttatgaacaataacattgcagaaggggaaatatcagaaagttgattgatttttaacccaaaaatagaactttttgtaagctaggaaagcatctaaaattaacaagaatacaaaaatgcacttttgtttacatttgctctatttagatcttacaagagattatgtcttgaatctatcctgacttcagcaaaagacaaaagaacgttgaaaacatcctatttccaaatcgtttacaggaagttacctaagagactgacagattcaacggctgctaccagaattactgaagtgacaccagaaattagcagaaacagagcagatgattaatttcttacttatttgtagccaaacttatacagtcacgagttttagttaagtagccaaagaatttccacaacattcattttcttacaggagaagtcggtgcctccacagactcagaaaccaaatcccgaagttccaaatccagctctacaaagctgcaggaagcagtgcggagtggagggatgttcccaagaggaagaataaaaccggaaggaaaaggaggaaggctcaagctcattcctctgcatctcaaatgaaccttgattggcaatacagaagggattgctgtcaactaagcaaaaggtcaggcttccatgcataacattttccccaaaagacaccactgccttttcagacatttggaaaggcccctgcgtatgggttaatttcacgagtcagacatttggaaatgccccggcatacgggttaatttcatgaggagtgtggacagctgtcatcaaggcaatagcctcatctaactattttaatgggtggatgaccaggaatatttttgcaccaacctttttcctacacagtgttggacgcagacttagaacaccactttgaaatggaaaaggtcctacctggggcatcagccgttgccaggcagtctcagcaatgcctctgccctccctgcagcagtcccaaaatgaaagccacaccttggagggtgtggcttttctgtttcatgggtgcaaaccctagcggctccacaccccagggactggcccccaaaaagcaaaaacactgctcatggcttggcaggtcctctagtatgtatttttatgtgatatcactattcagaactgtggtgtatactattctataaatttccacaataggttggccggacatcctttaatggtgggtattaattcctcttattctttacgtttcttagtgcattttgttgtgaggtgacagggagcacctggggctttgctgccgggccccacaggaagctgtgctacatctagtgtgagcattccttcactaaatgaaacgctggaaagccatgggaaccgcacaggactgtgcaaccacccccatccaacatccaccacttctcatatccttttccggggacagtgttactctggaaacctaatttcaatatttcattttcaaacactaaacattacaggaatgatttcacaagtaaaatcacagtgataacagcatatgagtttgatatttaaggactgaaaatattagcctggtcctggtcccatttcatataaaaatttctaccattaataaaattctagaggaaaaggcaggacagtgtgaatggtacattgcttaaaatgaacattatttgtttccttttgctgtaaatactgtttctacaaccatttctccagtatactcctataaaaggccaatcaagtcaggcgatatgaagtctgtttttctttcccaagatgattaaccaagttgccaagctatcccctcagttcatgagtaaccatgggcaagcagacacgtccccagaacataccgtaacccagatcataaattccagcccccgagtcatgcataaggttcaagctgatcacttctaaacacacttaactgagacctctcataaccacagactctttaaaaagcataacctatttttcaattacccactgatttctacagagatggcagttcccattactggattaacaaacaaataatattaaagtaggcaggatttcaactagttacgttccagtaacttttcctcttacagtaagaaaatgggttggattcggagttcaaatgttcgcctctatttgtgagcatggatctcatcctnaaagtnataatagtaagtcctctgtatacacacttgaaaagtaaaatgttaaatgagaaacgacccaactgatt

SEQ ID NO: 431087 - DNA, 543 bp, Homo Sapiens
  misc_feature (475)..(475): n is a, c, g, or t
  misc_feature (484)..(484): n is a, c, g, or t
  misc_feature (512)..(512): n is a, c, g, or t
tggccttttataggagtatactggagaaatggttgtagaaacagtatttacagcaaaaggaaacaaataatgttcattttaagcaatgtaccattcacaccgtcctgccttttcctctagaattttattaatggtagaaatttttatatgaaatgggaccaggaccaggctaatattttcagtccttaaatatcaaactcatatgctgttatcactgtgattttacttgtgaaatcattcctgtaatgtttagtgtttgaaaatgaaatattgaaattagggcttccagagtaacactgtccccgggaaagggatatgaggaagtgggtgggatgttgggatggggggtgggttgcacagtcctgtgcgggtttcccatgggctttcccggcgttttcattttaggttgaaggggattgcttcacactaggatgtagggcacagctttcccttggggggccccggcaggcaaagncccgggggngcttccccgttcaaccttaacaaccaantggcacttaggggaacgttaaaggtttaagg

SEQ ID NO: 431088 - DNA, 890 bp, Homo Sapiens
  misc_feature (830)..(843): n is a, c, g, or t
agcggacagacgctgggagcggccgaggcgacgtgatttcttctgacttgaggcctgcagtgtgctgtgagagatctaccactagattatctcaactttggtctcctgggacgcagctcgttgctgacagtcagaacactgaattcttgccgccaggatggggaaatcagagcagcaatgcatgcgcccggaggtcatgcaggacttgctggaaagcacagactttacagagcatgagagtccaggataatggtactacacacggcttcttgagcagactgccccagtggacactttgttcaagtggaagagtttagagaaaatatatgggcaactttttcccttatggggatgcttccaacatttgcagaggcatgtcttccgcaccttcgatgcatatggagatgggacaatagactttagagaattcagtcatcgtccttgagtgtaacttcgagggggaagctggagcagaagctgaattgggccttcagcatgtacgacctggacggaaatggctatatcagcaaggctgagatgctagagatcgtgcaggcaatctataagatggtttccgtctgtaatgaagaatggctgaagatgagtctgccccagaggaacgagcagtaaaagatcttccgtcagatggactccaatagagacgggaaactctccctgggaagagttcatccgaggagccaaaagcgatccgtccattgtgcgcctcctgcgagtgcgacccgagcagtgccggccagttctgagccctgcgcccaccaatcgaattgtagagctgcttgtgttcccttttgattcttctttttaacaannnnnnnnnnnnnngccaaacaatatcaatggtgatgccgtcccctgtgcggtctgatgcg

SEQ ID NO: 431089 - DNA, 1313 bp, Homo Sapiens
caggtcgtaagccactttattccagtcccttgaacatcacaggctggttttatttgggacagaacaggttttgtttcccagccttagagtctgccaagcctctagcccactggccttgagagatgagtgtgtgcccaaccaaatgctggctataccagttacagcctccactcataaaagggaaaaagcaaaatctttatggtaaacaaacactgatctccacagctcttaacaagaatgtttatagccccaaaccaatgaatggacatgtaatcaacaaatgatcaaatactacatcatttgaggtgttgaattttcccctagagactcagttcttgtgcaggttgggcctgggaaagtcccaagccatcagctcaggtccagccagcctcccggatggccagatatgcaggagggtgggtttccttcatcccccaggttgatgaaagacttttccaccaggctggcagggcagggcctggagcactgaggcagagatctccctgcccgagcacctcggcccgcccttctcattccggtttcctttgacccattcttgggtgagcgccagtgttctagaaaggggagtaaaggccaggttctagaatggctttccccccccaccctgagatcaggtctggaatgttagaagggcatcttgtacatccactgggaataaattgccttgcacttggcggcttcctctgcagattgttgctgcttttcctggctgcataatcctttcctcatccagaggcttccgcttagcagagctttctaggagccctatgagcctttaatgccctggttttgccctgcccctctgacccctgcctccttcaggtatgcacctggccctcaccactgtgctcctgtgggcatgggggagtctccaggcctttgaaattgtggagaaggaaaacatttttcagaggaccccctgccctgctttcctgatgtttgaaaatgcagcctacctggccgacatgagctttgagcttccctgtcactgcaaacccgaagaggtgccagctgtagtctggttctaccaaaagcacctaggtaggcagccacaccaaagtgcttgacggactttgatggggcgggtgctgacggaggcaggccagggtacgttttgggcagcgacatgctgatccgcttcagcatccgcatgttcagcttgttggttttcagggctcagtctgaggactcaggcctgtacttctgcggcacccgcaagggggactacttttacgcctacgatgtggacatccagaacagtgagggaatggtggccactttcccctcgtgcc

SEQ ID NO: 431090 - DNA, 1518 bp, Homo Sapiens
  misc_feature (190)..(221): n is a, c, g, or t
  misc_feature (279)..(296): n is a, c, g, or t
  misc_feature (434)..(442): n is a, c, g, or t
  misc_feature (701)..(711): n is a, c, g, or t
ggcagttatataaccagggtgggccccaatatttggcgcgaacagtgagttttttccgcccccgtattatatctcacccacggggcgccccaaataaatatcccccgcaagggggggctatctccggctcggtgatattgccctgctagaggggttttcccgggatttactcgcacaccgcttttttgtnnnnnnnnnnnnnnnnnnnnnnnnnnnnnnnnagaaagtgtttatataagaattaacgcccccacactggtgtgggaagaaggctccccnnnnnnnnnnnnnnnnnnatttcatttcaatttccgggcttgggcggtggggtcttcccatgttggacaagaaccccgcctaaggggcccctacgcaacccctttctttggaatttttttaggaaaagccttgggggtttacacccggcggggggnnnnnnnnnctgggggagtacaccgccggccttatttccaatagacgcggggtttttttaggcgagaaggggattggtccccaggtgcgcttgcgttgcacggggcgcgggtggcgccaaggggaggggtttgaaaactttcgttgagggcccagggttggcctaaaaaatcaatcattatccatgtttattttccttaggggcgcccgcgctctaaaattaatttttgagaaaagcttatttgagggccgaggcggcccgacaagannnnnnnnnnncgtttgttgggcggacgtaggacatagttgtgattcatgaaagaccaaaaacatgctttaatgccaggcaagagctacacagtcaactgatttacgggccactccataggctatgatttataaattatatattattaaatccaccgtgggcatacagatgggatgggacagcacccccagctccctcccactctgaatgatgtatgaacagttgagcactctgtagaatccttcaggtcgtaagccactttattccagtcccttgaacatcacaggctggttttatttgggacagaacaggttttatttccaaaggtccctgaacacagcaatgacaatgaacagcccagcagaggagtgacataaaccttgaggcatgcagtcttctgggtgctgtggagtcccttggccaaacttgagtgcactggattcgacatacaaagaccttcctgggaaggagaaggagaaaaacaacctccgagaaaatacagacagggtcagtggcaggccaggacagggactatttctatacattctggaagtgtcggcattcatcagcctgcatgtggctcacttttctttctggaatagccggagacctctactcctcactccagctctaggttccaaggaacagagtgggtctggctcagcgagatgtcatgactaagggcagagcccaggcaggtttctcaaaacattaactgattccacctaccaaaggagaatcaaaggaaggaactaggacttcgattcagagcagggaaaagtgggatgcagctcctgagcactgccaatagggcatgc

SEQ ID NO: 431091 - DNA, 3065 bp, Homo Sapiens
  misc_feature (95)..(95): n is a, c, g, or t
  misc_feature (1691)..(1691): n is a, c, g, or t
  misc_feature (1731)..(1731): n is a, c, g, or t
  misc_feature (1958)..(1966): n is a, c, g, or t
  misc_feature (2150)..(2164): n is a, c, g, or t
  misc_feature (2983)..(3015): n is a, c, g, or t
gggaatagccggagaccttttactccctcactcaagctttagggttcaaagaaacagagtgggtctggcttcagcgagatgtcatgactaaggcnagagcccaggcaggtttctcaaaacatttaactgattccacctaccaaaggagaatcaaaggaaggaactaggacttcgattcagagcagggaaaagtgggatgcagctcctgagcactgccaatagggcatgctaggtctcctcacccagtctgccttctgtgtcttaggttaattcgctattttccaaacacagattttaacacttggccatggaggaatttggcaagttttggtacagaaccactgtgaggaactgacccctggaggaagactaggattatttttacagagtctaggtctcaaaatttcaccctatggatttggttctttttggtctaccatacaaatttggatttctgctgccaattacagcagactcaagtcatatataaaaacctggaggttagcatgtctagtcacatttttctcctggtcatgatgtctctctttctgtggttcctcttctttggcaagtggcttggcagcaaatatacccactagggacctctctgccttctcttagtggcaagttccccatcaacaaccttgagaatttgggcctccctttgctaactacttgcaagagtatgactcgcctgtaaccagcaaatttttactcttagctttcaattcaaattagtgtgtctgaggtcaccagaccaaacagcaactcagacttgtgctgtcacttctggaaatagaagtctgcattcaaagagcacggcaatggaaaatacttttggattctccataggggggccttggaaaccacagacacacttgcccatgtctttatgatgaatttgatgactgcccaacctctgattctttaacaggggcagggaaactgaatattccagacctggctccctaaccatgcacacagattaaaccactgggaagttccaagaatgtacgtgatgttttttcgagtctgcagagtattgatctgctcagaaaagcaccatgccgccagtctaatgctgtcaatgggctgctgggcctgagagggaaaccaccctactggtcccctgtcatacatgttaacattcctgtgctccaattgtcctgtcccactaccacctgctctgcatctgccctctaggcatggccactctggaaatgcattcaaaattaaagttgggccctagtcagggttactttgtatttttatggaatatataaaatatacttgtcgattggtacatttgtgcaaagacagatatgacttccaaacaagacagacattcattatagttgtcttacttcacaataagctactaaaaacagtcttctggaataagattgtattagtgctcactaaacatgcatttcatttaaacaaggcaaaacacttaatttggtctgcattacccaatatgttatatacagccgtctttttattttatcacaataggcaacaagatgggtctggttttggaatatgttaccatttgtgtttaatttccaaagacacgcatattagctcaactagtgtaaacctgtgaaaaaatagctgagccatctttttcctctcctctgttaatttatcttgaaatgttcacagcttaggaaactacagcctgctggggnaagagaggggagtgggcccccatggggaaaatgtcccagnctcgctggaaatagcctcaccccagagggtaacttgttcttggggaatccagcatccggtgccatccatcacccctacggcacgtgtgacaacagacccaggtggggagttttgtctttcaaacaaaagccccttgaagcttgcaatagaatcacaggactggatgggtttcccttcttttgccccaacccccgagtcttacgttttagaacagagacattagaatnnnnnnnnntaatagtaacgattaaaaatcatcaaacaatgaacaccacgaagtctgtccatgctctccacaagcacactggggctctgggcattcccacgaagcatccacgacaaaaagaagctgaaggcgtcacggaggaaggcgcatcagaccgcacaggggacggcatcaccattgatattgtttggcnnnnnnnnnnnnnnnttgttaaaaagaagaatcaaaagggaacacaagcagctctacaattcgattggtgggcgcagggctcagaactggccggcactgctcgggtcgcactgcaggaggcgcacaatggacgggtcgcttttggctcctcggatgaactcttccagggagagttttccgtctctattggtgtccatctggcggaagatcttttctgttcttttctctggggttgactcatcttcaggcattttcattacagaggaaaccatcttatagattgcctgcacgatctctagcatctctgccttgctgatatagccatttccgtccaggtcgtacatgctgaaggcccatttcagcttctgctccagcttccccctcgaagttacactcaaggcgatgatgaattctctaaagtctattgtcccatctccatttgcatcgaaggtgcggaagacatgctctgcaaatttggaagcatccccataagggaaaaagttcccatatattttcttaaactcttccattgacaaatgtccactggggcagtctctcaagaagcctttataccattcctggatctcatgctctgtaaagtctgtgctttccagcaagtcctgcatgacctccgggcgcagcttgctgttctgtttccccatcctggcggcaagaattcagctcactcagaagaagtgcaagatttaacagtccatgctctgcagcccctggaaacagcagtagcagcagcagcaaggtccagcatccaccagattctcacaagcctttgacaccgctctcgacgaattcgagctcggccgatttggcctgatnnnnnnnnnnnnnnnnnnnnnnnnnnnnnnnnngatgcgtccgccaccgacgtataacatccgagtcaccctatagtgagtta

SEQ ID NO: 431092 - DNA, 842 bp, Homo Sapiens
ggtgttctagaggtccttgccatttactccatggctatgatttataaattatatattattaaatccaccgtgggcatacagatgggatgggacagcacccccagctccctcccactctgaatgatgtatgaacagttgagcactctgtagaatccttcaggtcgtaagccactttattccagtcccttgaacatcacaggctggttttatttgggacagaacaggttttatttccaaaggtccctgaacacagcaatgacaatgaacagcccagcagaggagtgacataaaccttgaggcatgcagtcttctgggtgctgtggagtcccttggccaaacttgagtgcactggattcgacatacaaagaccttcctgggaaggagaaggagaaaaacaacctccgagaaaatacagacagggtcagtggcaggccaggacagggactatttctatacattctggaagtgtcggcattcatcagcctgcatgtggctcacttttctttctggaatagccggagacctctactcctcactccagctctaggttccaaggaacagagtgggtctggctcagcgagatgtcatgactaagggcagagcccaggcaggtttctcaaaacattaactgattccacctaccaaaggagaatcaaaggaaggaactaggacttcgattcagagcagggaaaagtgggatgcagctcctgagcactgccaatagggcatgctaggtctcctcacccagtctgccttctgtgtcttaggttaattcgctattttccaacacagatttaacacttgccatggagtaaatggcgggatcctctagaacgccaccc

SEQ ID NO: 431093 - DNA, 812 bp, Homo Sapiens
  misc_feature (691)..(691): n is a, c, g, or t
tttcaagattaaatcaaagcctttattaaacattcctctttcaaacagcctttcaaacctatacccctccccagacttgggaactgccagagctgtgaatcattttcatctgacagggatcagatccattcagacctcacaatattgaaaagccaagccagacacaccacactgggcagagatccaccgtctgtgccccactcgggatataggaaaaaggttggtagcgccagctctcaaaccagagctcaagcacaggagaagaggaacccacagtctgaccctgctattatagttccagacctagccatgctaaactggacaaacagctcctgggctgccatttgctgaggcgcatgcgtgtgcttttccttctcttctccacaggaaaaggtgagagatggaggaggcaattttcagttgtgtgtgggtttgatttaaggctttggctgtggtctattgatattaaaatactttctgggaacgccatcttccaagctccccattggaacaaatgtattttcaaaaatgaaaacattgagcaaagatgtggagcggcaatgctgctgctggcccaggcctctcatgtcaggatggtgtcgtacacctgctccgtggagtcggcctggctggccagctgcgtcagggaccttcggttaaccttgttcagcaccttcaaactggccacatncaggatcttggagagggactgaacacctctcacccctgcgcatcttgaggagttgacatttgcctgtcgctgtagccctgaccacgggatcttattcttgtgtcgcaagaagagccttcag

SEQ ID NO: 431094 - DNA, 182 bp, Homo Sapiens
  misc_feature (116)..(116): n is a, c, g, or t
  misc_feature (118)..(118): n is a, c, g, or t
  misc_feature (170)..(173): n is a, c, g, or t
tttaaaccattactgtgactttattataatagttaacaatattttagtggtatacaatcatatcacaattactcaagctatatacaaacaggtatttatataagcccacatttaananagaaaaagcaattaatgacctccccaaaatcacattatcatcaacaagattnnnntctaaaggt

SEQ ID NO: 431095 - DNA, 3506 bp, Homo Sapiens
  misc_feature (3102)..(3102): n is a, c, g, or t
  misc_feature (3105)..(3105): n is a, c, g, or t
  misc_feature (3109)..(3111): n is a, c, g, or t
  misc_feature (3134)..(3134): n is a, c, g, or t
  misc_feature (3138)..(3138): n is a, c, g, or t
  misc_feature (3147)..(3148): n is a, c, g, or t
  misc_feature (3154)..(3154): n is a, c, g, or t
  misc_feature (3156)..(3157): n is a, c, g, or t
  misc_feature (3178)..(3178): n is a, c, g, or t
  misc_feature (3190)..(3190): n is a, c, g, or t
  misc_feature (3193)..(3193): n is a, c, g, or t
  misc_feature (3197)..(3197): n is a, c, g, or t
  misc_feature (3204)..(3204): n is a, c, g, or t
  misc_feature (3206)..(3206): n is a, c, g, or t
  misc_feature (3210)..(3210): n is a, c, g, or t
  misc_feature (3221)..(3221): n is a, c, g, or t
  misc_feature (3223)..(3223): n is a, c, g, or t
  misc_feature (3225)..(3226): n is a, c, g, or t
  misc_feature (3234)..(3234): n is a, c, g, or t
  misc_feature (3240)..(3240): n is a, c, g, or t
  misc_feature (3243)..(3243): n is a, c, g, or t
  misc_feature (3251)..(3251): n is a, c, g, or t
  misc_feature (3258)..(3258): n is a, c, g, or t
  misc_feature (3261)..(3262): n is a, c, g, or t
  misc_feature (3265)..(3266): n is a, c, g, or t
  misc_feature (3268)..(3270): n is a, c, g, or t
  misc_feature (3277)..(3278): n is a, c, g, or t
  misc_feature (3280)..(3280): n is a, c, g, or t
  misc_feature (3286)..(3286): n is a, c, g, or t
  misc_feature (3297)..(3297): n is a, c, g, or t
  misc_feature (3301)..(3301): n is a, c, g, or t
  misc_feature (3303)..(3303): n is a, c, g, or t
  misc_feature (3312)..(3312): n is a, c, g, or t
  misc_feature (3314)..(3314): n is a, c, g, or t
  misc_feature (3319)..(3319): n is a, c, g, or t
  misc_feature (3330)..(3330): n is a, c, g, or t
  misc_feature (3336)..(3336): n is a, c, g, or t
  misc_feature (3341)..(3341): n is a, c, g, or t
  misc_feature (3344)..(3345): n is a, c, g, or t
  misc_feature (3351)..(3351): n is a, c, g, or t
  misc_feature (3382)..(3382): n is a, c, g, or t
  misc_feature (3406)..(3406): n is a, c, g, or t
  misc_feature (3408)..(3408): n is a, c, g, or t
  misc_feature (3436)..(3436): n is a, c, g, or t
  misc_feature (3438)..(3438): n is a, c, g, or t
  misc_feature (3443)..(3443): n is a, c, g, or t
  misc_feature (3449)..(3449): n is a, c, g, or t
  misc_feature (3454)..(3454): n is a, c, g, or t
  misc_feature (3461)..(3461): n is a, c, g, or t
  misc_feature (3465)..(3465): n is a, c, g, or t
  misc_feature (3468)..(3468): n is a, c, g, or t
  misc_feature (3477)..(3477): n is a, c, g, or t
  misc_feature (3484)..(3484): n is a, c, g, or t
  misc_feature (3488)..(3488): n is a, c, g, or t
  misc_feature (3492)..(3492): n is a, c, g, or t
  misc_feature (3498)..(3498): n is a, c, g, or t
gttttgagaattaggacagtttattgtttgaccaacatgctgagtcttttccacattttacacagtttaatgtgaaatcaacatggcggctatgtcttctgagcccataacagatggaattgccaccctctgtgctcctcacagccaatcactttaaagggatgggtgaggggaaagtgaggggagaagtggacacacaccgcgagatgcaggctggccttcaatgctatggaggcttcccacctcctgaaggaaccatctaaacccctgctgcaaggatttcctgatgaaaccacacactgctgggagtgccaaccagacaggggtctggagtccaaggagtttgcacattgagatcccaaggttttggaacacctaaatagttcatgtcaaacaaaaattcaaagggtgtcctgatctgtgtgggtgcccatgacaatcaatcagagtagacttggggactggcccttgtgcagtagagggagcccaaaataccaccaatattttcactcatatgttgggaggaccctagtgtcctaaccaaaaagagtagagatggtctgaggaacacacccacacacagcagtccttgctgtgtaataaatatggagtcacatttgttcacacacagggcagcaatggatgaaaaatggaaacttcactggttctgatcactcctaacttgctgggtgatcttaataagcaagttgcccttctccatcctggttttcctgcctgtagacaggaaaagttgtgacagctctgcttcacatagctgtaacaaggtgacaatgcctcacattctttggggagaggcagttcggaaacgagtgtgcgcacaatctgctcggttgatgcacacagacatccttctgttcagctgcccctcaagtggctcagacatgcctcactgtcctcggctacctggtcccatctcatcctgacatcctcacctgccttccatcttgtgaaggaatgaggctgctctacctgcaggatgctgaagccaggagggccatccctttattgtcacaactggtatcccagggcagggcctccccgcactggctagccaccaggatgatgcagacgttgcaccccagatgtgtctgcactcttaactaccaccatttcaatccttgtttctgttgccagagatactgaaactggtctggccattgctcccctcagacctgggaacatgactgaatgtttaaggatgacaagaagagagcagcgatagatagcaaggaggcctctgaccaagggaaactgctgccaacagctaccaagccaactagccttggatcacacaactgcagccatggtgctcatgattctgatgtcacaccttcatgttgatgtatgtatgatcacccagcaagttaggagtgatcagaaccaatgtgtttccacttgtaaataggctgtttgctttttccatcttacactcaactttcctgatgcctgcagaacaggagctttgttgataagcttttaagattcacccccttcactcccaccatccccaaaaaagaaggccaagaggatcctgctaatctgccaggtcacgtctagtctttggggagagggactgaattgctcaattgagaacatttcctcaaaggaatcctccaatttgccctctgctaacccatctggattcagcaaagatgcaatgctcttgctggggtgctgaggcaatgccatgacatcttcttcaagagcacctaacagtttattatggaaccttaactctgtgccaattctacctgcaagcaaggggacagggatggtgcctgctcaagacaaaaatcagggaaccaacaacttctgaaaaagaggtctggctgcctttccacaccccaggaagggaggggcggaaaccgcacgtgccgaagggagcgccatggaaccactgagatgggaggatgggaggaagccaccctcagcctcagaggccaaggggctggggagaacccaaactcaaagagaggatgttgtgtgcatgctaggaaaggcaggactcactaaggccatgtcaaaccaaatgctatcttttactgctcctctaggccaggatggaaacacagtccacggtgccttggatgtgtgtgcccctgagaagggaactgagtttctactgttttatgggatgtttttttaaaaaagctaatctttagtgccaagaaaataaaaatctaccatacgttcattcactgagacccagtgcagattcctgtaaatggggcggtctcagaggccacaggtgatggcccccgctgccaaccaggcaggacactgtcatgtggactcctgtaaattctctcgaggtaagtaagcactcttccaacaagcaccacttgggggtgtgcccatggtggggggacactggcccacacaggcatgcacacccgtgcatataaagtacatagagaaatggtggagatattcccgtgggctatgtttgcctgtagtttaacacaactatgcattattttattgatggcaagacaatcacaagttatttgacaatattaagtatttcttatttcaacacgttgcagtacttttgaatttccaaaacttatcacaatgcaagttccaacttgagagcaggagaaacaagaatatacattgagcacatgtatctccgtgaggatgtgtttgtggaaggtgtatacacaagtctatctctatatataattatgtacacacatataaaaactaaacacatgacatctgaaacacgttcaaacattggtccttgccttctgcaagaggtgctcagtgggatcctgcttcctctcttcttcacctgaagataaattccttgctagagatgagctctggcatacagcctcctaggcagagggtgtgtggcaggcccactgcacaaatatcagtcctgccagattctgctgcacttactgcctgccatttcagattaatttctgagaagtttcaaaattcattccaacgaccttgtggagttcagcccaccataccccagatggtcattcatcccatctatgacatgcccagcagcagcctggagggagagccaatgacagcagggagggtggggtttacattttgggnagngtcnnngggcattgcacctggctttgtgnaggntcagggcanntgagtntnngtctatttggaatgctgggcnaagtgggttatntcncttngtggggngngagngttctcttttngngnntttgcggnttctcnggnctaagccntttctcnggnntgnntnnnaaatggnngngatggntctctgggggnaacngnctttctggngnccccncctgaaccacntcctcnggtgnccnnagcgcncaacagtagccacaaagatatgtcacaaagncttaactgcgccatgccactgggngnaaaatagcacaaatcagcttttccagananactcnacatantagcnctgaggnctancanatggatttnaaggtgnggtntgcnacacancccccccc

SEQ ID NO: 431096 - DNA, 438 bp, Homo Sapiens
tttaagaatctttcaacttttatttctagcatacattcatctggacctttttgtttctttacaatgttccccctaagataaatgaatacaataaaaatataatccaactaccagcaatgtttctaaccagaaaagaatctaaaatctctggtgtgataatataggatttttttaaaaaatataaacttcataccagaaataaagcctgaatattctctttctttaaaaatataatttttccttctttgctcttccaagtaaatcttaaaatgaacctgttctagtctatttttaatctaggcaattataacactacctagcagggttttttcctttataccttgttctgtactgtgaatcaactaataattgcaaacgtctttaaaaagtgagatgccatttggctgtagcaagattcttcaagagatgctgaaaatt

SEQ ID NO: 431097 - DNA, 618 bp, Homo Sapiens
tttataatcaaactcttgggttttatttctgtaaaagctccagctctaccttcccctgaccccaagtctagggctaccggaaggtagagaagctctgggtggcagtgcaggaggcatagggcacaccccgggagcgaatctgtagggtatggaaggtgaggggtgggttggggcctgaggagcctgggttcagggactcagtgtgaggctccatgacagtcacagggactgcataggacagcacctggggccggtcgtcatggcgtctcagcgtgcccttgcccaggaggtgtaggatgcaggagaggacgtcagtgctgctgcatgcagaccccttaccaaggctgctgaccaaacccctgggaggacacgggcccttctgccaagcctccagcaccagacagacaagctggtcaatgtgcagcccctcatctccatgggccttgaggattcggacgatgaggcagttcagaagattccgtctcttctccaagttctggccgtcttcaccctcagcttgcaggtacgtctgaggtggatgagccgcacaatgtcccatctcgacctgggttccttgctgccatctcgaattctgaggacccctcctgtatatccttt

SEQ ID NO: 431098 - DNA, 553 bp, Homo Sapiens
ttttttttccagaaatacttctttttattaaaacacggatcattattaaaacaccttgaggtacattaaataaatacagcctttccagttgtacagacaggtctctggtggcttgaaaacaatttcctataaattctgccttagcagcctctgagagtcagcatgggtggggagaagcatctgtgtgtagcgagctttctgtggcctggtgtgttacaaacatttaatgtggatcctcatctccagccaagggagacctgaagtccttgcggatgatgctcccccttctgcgatcttgcttgccatagagttggggtccatgttctccccactcagcaaccttgtggcccccaggctggggtcaacggtgggtgtcacagcaggtgccaaccccctttgggtcttcaggggagggcaggggatgcccggggcccagctgagttggagaaggagcgtgtcacccccaaagcagccacagttgggccatttcagatcccagagggaggattattggggcgggggaaagacgcatagggaggggaagcagccagct

SEQ ID NO: 431099 - DNA, 871 bp, Homo Sapiens
cccctgttttttattgtttttgcatttgtgttccaaccaagggactgtttatttgacaggaaggaattttgagaacccgtgttagtcctggcccagacaggcaggtgaggtgtgccgggggtctctgatgggggcctcaaagactgcctctcccctcataggggactccccgggggccacgcttgtgctgcaccttcaggtctcatcgaagtccacgccaccagctggtttcttactcttgaacccggggttgatgagcgactctcctggacaccgcctcctgactccaggtccagggccacctctctggggatctgggtctggtaagaagagctgaggccctgcaggccgggggctcttcctcgggctgacagctgtctcttctgcagctgccagtcgccgctccaggctccacacgcgttttgccaggcccagtgtcagcgcccgcagcctgggggctgcctctgggcctggtaccttggagaggtcaaaggccagtgccgagggcccccctgaaagcgtcagggatgctctgtcctcctgcagagtcagagccacagcttgctgctcacaggctgccctgaaccggggggtgatgtcctcagccgcactcaggccaaacgggctttgagggccgccaggctgtccggcgtgaagcaggtgctccaaagctccgcggcgtcggtcacgtagaggttgaagccgccgcggtccccctccccgctttcctccccttcgcagtagcacacgaagcggggcggctcggggcccggcggcagcgtgcagagcggcggcgacagcggatccatggcgccgggcgagcggaacccgcgcctcggccgattaccaccgcctcgtacctagcctagtg

SEQ ID NO: 431100 - DNA, 763 bp, Homo Sapiens
ttttttccaaccaagggagctgtttatttgacagggaaggaatttgaggagccgtgttagtcctggcccaggacaggcaggtggaggtggtggcggggggtctctgatgggggcctcaaagactgcctctcccctcataggcggactccccgcggggccacgcttgtgctgcaccttcaggtctcatcgaagtccacgccaccagctggtttcttactcttgaacccggggttgatgagcgactctcctggacaccgcctcctgactccaggtccagggccacctctctggggatctgggtctggtaagaagagctgaggccctgcaggccgggggctcttcctcgggctgacagctgtctcttctgcagctgccagtcgccgctccaggctccacacgcgttttgccaggcccagtgtcagcgcccgcagcctgggggctgcctctgggcctggtaccttggagaggtcaaaggccagtgccgagggcccccctgaaagcgtcagggatgctctgtcctcctgcagagtcagagccacagcttgctgctcacaggctgccccacgagggccgccaggctgtccggcgtgaagcaggtgctccaaagttccgcggcgtcggtcacgtagaggttgaagccgccgcggtccccctccccgctttcctccccttcgcagtagcacacgaagcggggcggctcggggcccggcggcagcgtgcagagcggcggcgacagcggatccatcccgggaattccggacgc

SEQ ID NO: 431101 - DNA, 176 bp, Homo Sapiens
ctgccaacagtgagggtcgctgtctgcccattgatagaggccagattgtcttggaagttccaaagttgcaacgatttctgtaagtggagtttttctgtttgcttagagatcagtgaatattgtgtccttggtcttatctgtgatgatcttatcccgaacctgaacttctgttgaaa

SEQ ID NO: 431102 - DNA, 887 bp, Homo Sapiens
  misc_feature (385)..(432): n is a, c, g, or t
  misc_feature (436)..(436): n is a, c, g, or t
  misc_feature (838)..(838): n is a, c, g, or t
tcttatagtaatgctgttttaccaagactttatagcagatggacccagaaagaattttctgctattgtgttcactacaacaggatagggacatcagacagccccagaaaccccttccagatctgatatgggactattaatttttatgctgttaattggtattcattcacaatgcagttgaagggggaaggctccactgcattctttggctaaggcctgaatgcttgctcatctgtaagatctatactcgaggttttgttttccttttaaaattctttagggagagagggatggtttctgaggggttctgaaagtatgattcaatgtgcaacatacaggtaggtcttcagcataagctgaaatatatgcatgtaaaaactttgacnnnnnnnnnnnnnnnnnnnnnnnnnnnnnnnnnnnnnnnnnnnnnnnntgtnccccccccatcttacagaagttgaggccaagggagaatggtaggcacagaagaaacatggcaaactgctctgtgctttcaaaccaaagtgttccccccaaccccaaatttgtctaagcactggccagtctgttgtgggcattgttttctacaaccaaattctgggtttttttcttctttctttaaacatagaggtaccaccacaagggatgccctactctctcgcagctcttgaaagcatctgtttgagggaaaggtctctgggcaagcaagtggttatttggattgcttgcttccctttttccacctgggacattgtaatcataaaataacagttaatttccaacctcaaaaactattatgggcctgagcacagcctgaaatctagccagagttttaactnctttctggcttcccattgtctggtcactttataaattccaggttttctg

SEQ ID NO: 431103 - DNA, 1458 bp, Homo Sapiens
  misc_feature (328)..(344): n is a, c, g, or t
  misc_feature (347)..(362): n is a, c, g, or t
  misc_feature (1340)..(1348): n is a, c, g, or t
  misc_feature (1380)..(1380): n is a, c, g, or t
  misc_feature (1395)..(1395): n is a, c, g, or t
  misc_feature (1402)..(1402): n is a, c, g, or t
ttggagcggatagatggacctctctcgttgattaagaataaacacaagtaggggtataatacggagtaaaaacctccccagattgattagtttttaaaagagagcgagcgatatatcttactctccccaagaaagcttttttgttggttttttgggagaggtaacgccagggagaagtctatgtaatgttcctaagaggagtatttatgtgaaaagaaaaaataacagattatgtaatgataggtgtattttatttatattttggtcggtgcgggcgcccccacaaaaagaaagaattttttgtataaataagatatattttttggannnnnnnnnnnnnnnnnagnnnnnnnnnnnnnnnntttttttatttatagcgcgctgtagcggataaaaaggggggagcgcgaaatatagagaagagtatatttatcgttgattgttatttgaattgtaattgatagtggggtattggatgtgaagtatggttggtgaaagtaatggatttgtgtcttattgtttttgttatgttgaattgtcaacagtgtttttatttatacctacaaaaagaaaacaagatgatggtatcaaaaggacaatttacaaactaagaatagtaacatagctttcagcatcctgtgcctgaacatcacacatctacaagtctttcaagtcttaatgcaacaggaatgtgtctggagaccagcaagaacatcaatagagagcactgatcccaagcaaaagccactaaccttttagatgagaagtccacacaacgaattgttagggaggattggggagaagcagcccattgcttaatacattggaaccctttccctaagttgagtttcaaccatgaatgcaataactagcataaaacgattcttctgctcatgttctgaagccaacagcagaacctgaattataagtgacagacatggaggcagaagagttaaactctgctagatttcagctgtgctcaggccataatagtttttgaggtttggaatttactgttattttatgattacaatgtcccaggtggaaaaagggaagcaagcaatccaaataaccacttgcttgcccagagacctttccctcaaacagatgctttcaagagctgcgagagagtagggcatcccttgtggtggtacctctatgtttaaagaaagaagaaaaaaacccagaatttggttgtagaaaacaatgcccacaacagactggccagtgcttagacaaatttggggttggggggaacactttggtttgaaagcacagagcagtttgccatgtttcttctgtgcctaccattctcccttggcctcaacttctgtaagatnnnnnnnnnacaaaaagagaagtaaagttaagaagaaagtngaaaattaaaaaaanagatgtntaagtttttacatgcatatatttcagcttatgctgaagacctacctgtatgttgca

SEQ ID NO: 431104 - DNA, 1083 bp, Homo Sapiens
  misc_feature (91)..(91): n is a, c, g, or t
  misc_feature (548)..(556): n is a, c, g, or t
  misc_feature (596)..(596): n is a, c, g, or t
  misc_feature (1060)..(1060): n is a, c, g, or t
ttcccgggatgctttctaacagcttctgggtgcagattttcttcggcatccttttgcactcagcttattacaggtaggtagtgcttaaganaagtcatggaggactaaagcctaagtccttttcacttttcctccatctgaaggtaggtgagttcatcctcttcatagtaatgctgttttaccaagactttatagcagatggacccagaaagaattttctgctattgtgttcactacaacaggatagggacatcagacagccccagaaaccccttccagatctgatatgggactattaatttttatgctgttaattggtattcattcacaatgcagttgaagggggaaggctccactgcattctttggctaaggcctgaatgcttgctcatctgtaagatctatactcgaggttttgttttccttttaaaattctttagggagagagggatggtttctgaggggttctgaaagtatgattcaatgtgcaacatacaggtaggtcttcagcataagctgaaatatatgcatgtaaaaactttgacatcnnnnnnnnnaattttccactttcttcttaactttacttctctttttgtnccccccccatcttacagaagttgaggccaagggagaatggtaggcacagaagaaacatggcaaactgctctgtgctttcaaaccaaagtgttccccccaaccccaaatttgtctaagcactggccagtctgttgtgggcattgttttctacaaccaaattctgggtttttttcttctttctttaaacatagaggtaccaccacaagggatgccctactctctcgcagctcttgaaagcatctgtttgagggaaaggtctctgggcaagcaagtgggttatttggattggttggcttcccttttttccccctggggacattgttaatcctaaaaataacaggttaaattcccaaaccgtccaaaaactattaatgggccctgaagccacagcttggaaattcctagccagagttttaaccttctttcttggcctctcccccggttttgggtcaacccttatcaantttccaagggtttccttgcctcc

SEQ ID NO: 431105 - DNA, 1887 bp, Homo Sapiens
  misc_feature (51)..(87): n is a, c, g, or t
  misc_feature (1403)..(1403): n is a, c, g, or t
  misc_feature (1882)..(1882): n is a, c, g, or t
gggatgatcactcactatagggcaattggagctctaccgcggtggcggcgnnnnnnnnnnnnnnnnnnnnnnnnnnnnnnnnnnnnnatcaggccaaatcggccgagctcgaattcgtcgagagcgggagggctgaattgttttgcagaggaagatggcatctgtgctttaaatttctcattactgggttagaaaacaaagagggagtgccctgcacattttcttttgtgcttttaaatgtttcttaagttggaacaggtttcctcgggcctgttttgactgattgctggagtgcatttgatagttaaaaattactaattggttttatttcccttcacactctgcctccccacttctccccccgttactgaaaaataaccattttagtgtcaggctagaaattgaattgctgagttttgtgtatcctttaaattaaaaaccacaagtgtttattgtagtggttaaactgtagcatctcagcatctgggtggaagctgcctatatttcttcccagtttaactggggaccatctgtgaaattaattttccatccagacagctgctgtgagcaaatgaacataaatgctcgctggaaatttactaaccagtttttatattgacctgcagtgtaaaaagcacatttaattataaacaatatattcaaaatgggcaaattttattttcaaatgcagtgtagagctagattaaaagcaactctttgccacctactctgcccttttggcaaagttaccttgaacaaagaatcttaagggtttattaagaactctttattttcttcataccctgttctctgcagtgctttctaacagcttctgggtgcagattttcttcggcatccttttgcactcagcttattacaggtaggtagtgcttaagaaaagtcatggaggactaaagcctaagtccttttcacttttcctccatctgaaggtaggtgagttcatcctcttcatagtaatgctgttttaccaagactttatagcagatggacccagaaagaattttctgctattgtgttcactacaacaggatagggacatcagacagccccagaaaccccttccagatctgatatgggactattaatttttatgctgttaattggtattcattcacaatgcagttgaagggggaaggctccactgcattctttggctaaggcctgaatgcttgctcatctgtaagatctatactcgaggttttgttttccttttaaaattctttagggagagagggatggtttctgaggggttctgaaagtatgattcaatgtgcaacatacaggtaggtcttcagcataagctgaaatatatgcatgtaaaaactttgacatctttttgtgtaattttccactttcttcttaactttacttctctttttgtnccccccccatcttacagaagttgaggccaagggagaatggtaggcacagaagaaacatggcaaactgctctgtgctttcaaaccaaagtgttccccccaaccccaaatttgtctaagcactggccagtctgttgtgggcattgttttctacaaccaaattctgggtttttttcttctttctttaaacatagaggtaccaccacaagggatgccctactctctcgcagctcttgaaagcatctgtttgagggaaaggtctctgggcaagcaagtggttatttggattgcttgcttccctttttccacctgggacattgtaatcataaaataacagtaaattccaaacctcaaaaactattatggcctgagcacagctgaaatctagcagagtttaactcttctgcctccatgtctgtcacttataattcaggttctgctgttggcttcagaacatgagcagaagaatcgttttatgctanttatt

SEQ ID NO: 431106 - DNA, 858 bp, Homo Sapiens
  misc_feature (130)..(187): n is a, c, g, or t
ctcgaggtttgttttccttttaaaattctttagggagagagggatggtttctgaggggttctgaaagtatgattcaatgtgcaacatacaggtaggtcttcagcataagctgaaatatatgcatgtaaannnnnnnnnnnnnnnnnnnnnnnnnnnnnnnnnnnnnnnnnnnnnnnnnnnnnnnnnngtccccccccatcttacagaagttgaggccaagggagaatggtaggcacagaagaaacatggcaaactgctctgtgctttcaaaccaaagtgttccccccaaccccaaatttgtctaagcactggccagtctgttgtgggcattgttttctacaaccaaatctgggtttttttcttctttctttaaacatagaggtaccaccacaagggatgccctactctctcgcagctcttgaaagcatctgtttgagggaaaggtctctgggcaagcaagtggttatttggattgcttgcttccctttttccacctgggacattgcaatcataaaataacagtaaattccaaacctcaaaaactattatggcctgagcacagctgaaatctagcagagtttaactcttctgcctccatgtctgtcacttataattcaggttctgctgtttggcttcaagaacattgagcccgaagaatcgttttatgctagttattgcgttcatggttgaaactcaacttagggaaagggttccaatgtatttaagcaatgggctgcttctccccaaatcctccctaacaatttgttgtgtggacttctcatctaaaaggttagtggcttttgccttgggatcagtgcctctctattgatgttcttgctggtctccagaccacattcc

SEQ ID NO: 431107 - DNA, 674 bp, Homo Sapiens
  misc_feature (263)..(320): n is a, c, g, or t
tcaataacattgctgcccgagactttcctaaacagagtttcagagtgggagagtaggcatccctgtggtgtactttatgttaagaaagaagaaaaaacccagatttgttgtagaaaacaatgcccacaacagactggccagtgcttagacaaatttggggtgggggggaacactttggtttgaaagcacagagcagtttgccatgtttcttctgtgcctaccattctcccttggcctcaacttctgtaagatggggggggacnnnnnnnnnnnnnnnnnnnnnnnnnnnnnnnnnnnnnnnnnnnnnnnnnnnnnnnnnntttacatgcatatatttcagcttatgctgaagacctacctgtatgttgcacattgaatcatactttcagaacccctcagaaaccatccctctctccctaaagaattttaaaaggaaaacaaaacctcgagtatagatcttacagatgagcaagcattcaggccttagccaaagaatgcagtggagccttcccccttcaactgcattgtgaatggataccaattaacagcataaaaattaatagtcccatatcagatctggaaggggtttctggggctgtctgatgtccctatcctgttgtagtgaacacaatagcagaaaattctttctgggtccatctgctataaagtcttcc

SEQ ID NO: 431108 - DNA, 731 bp, Homo Sapiens
  misc_feature (385)..(431): n is a, c, g, or t
  misc_feature (434)..(442): n is a, c, g, or t
  misc_feature (571)..(571): n is a, c, g, or t
  misc_feature (585)..(585): n is a, c, g, or t
  misc_feature (594)..(595): n is a, c, g, or t
  misc_feature (619)..(619): n is a, c, g, or t
  misc_feature (680)..(680): n is a, c, g, or t
  misc_feature (693)..(693): n is a, c, g, or t
ggatagtaatgctgttttaccaagactttatagcagatggacccagaaagaattttctgctattgtgttcactacaacaggatagggacatcagacagccccagaaaccccttccagatctgatatgggactattaatttttatgctgttaattggtattcattcacaatgcagttgaagggggaaggctccactgcattctttggctaaggcctgaatgcttgctcatctgtaagatctatactcgaggttttgttttccttttaaaattctttagggagagagggatggtttctgaggggttctgaaagtatgattcaatgtgcaacatacaggtaggtcttcagcataagctgaaatatatgcatgtaaaaactttgacatnnnnnnnnnnnnnnnnnnnnnnnnnnnnnnnnnnnnnnnnnnnnnnngtnnnnnnnnnatcttacagaagttgaggccaagggagaatggtaggcacagaagaaacatggcaaactgctctgtgctttcaaaccaaagtgttccccccaaccccaaatttgtctaagcactggccagtctgttgtgngcattgttttctancaccaattnnctgggttttttttcttctttcttnaacatagaggtacacccacagggatgcctactctctcgcgctcttgaaagctctgtttganggaaggctctggncagcagtggtattggatgctgctccttttcactggact

SEQ ID NO: 431109 - DNA, 318 bp, Homo Sapiens
  misc_feature (240)..(276): n is a, c, g, or t
attgtcaacagtgtttttatttatacctacagaaagaaaacaagatgatggtatcaaaaggacaatttacaaactaagaatagtaacatagctttcagcatcctgtgcctgaacatcacacatctacaagtctttcaagtcttaatgcaacaggaatgtgtctggagaccagcaagaacatcaatagagagcaccgatccgctctcgacgaattcggagctcggccgatttggcctgatnnnnnnnnnnnnnnnnnnnnnnnnnnnnnnnnnnnnncgccgccccgcgtaagctccagtcgcccatatatcttctccc

SEQ ID NO: 431110 - DNA, 1144 bp, Homo Sapiens
  misc_feature (27)..(27): n is a, c, g, or t
  misc_feature (77)..(77): n is a, c, g, or t
  misc_feature (223)..(234): n is a, c, g, or t
  misc_feature (284)..(292): n is a, c, g, or t
  misc_feature (634)..(652): n is a, c, g, or t
gcggccgttctcctctgttgttactangagcggggggcacccacaagaagagatgagttttgtttaataattgcggngaagcagcaagaaaattcctttagaacagcttgtcccacacacaaaaccaccaatgtgtttcttttttcccacaagggaattctccgagagagagtttccaaagttgcccccccacaaaaatatggaaaggtttttgaaaaacaannnnnnnnnnnnaaaagggaaaaaaggggcccgggggaaagctttcttttttgggggggccnnnnnnnnngggtttccagagtttttttgccaaaccgttaagggaaaaataaattttttggggacccccccaagattttcgtaaaagccctgccagggttttcccaccttgggggttttgggatttcccccccttttggggattccttttgggaaagaaatgggggaaaccggggttcaagctaagcttccttttgagattccaaaagctaaaggggaaattaaagggaccccgggcaaatccactttggggtatataatttgccgtcaagcaatatttttcttcctctgtaagaaaaaaaacacgtaaagtctatttcagaataaatttctttatattcaagtagtatgnnnnnnnnnnnnnnnnnnngctgaattggtattgactttttctattaaaatgggtttattcaatggatcagtaaacaggcagcttctttcacatctgggtgataaaaccatttttatcatcaccagaagtcaccccgccctcgccttcctcctcctaaggtctgtgggttgatgtgtgcgttttgtcactgctattgatacaacctcattctacaaggcctgctcgggtgcgcgcttgtgaaaaatgaccgactgtctctgctggtactgctgcttgcgcctcttttttttgtcacactggcacagcagcagcatcttgaaagtggttctgaatgttttgttgcacagagcatagcacacggggttcacggtgctgttgatgtagcacagccagtagcccagattccaaaaggttttggggtatgcagctggtcacaaaaggtgttcaccagaaccatgatgttgtatggggtccaagtgatgatgaaggcaagcaagatcgcactgaggg

SEQ ID NO: 431111 - DNA, 493 bp, Homo Sapiens
  misc_feature (446)..(446): n is a, c, g, or t
  misc_feature (453)..(453): n is a, c, g, or t
  misc_feature (468)..(468): n is a, c, g, or t
ttttttttagcaacaggctctgcctaaatatctcaagaaaatactttaaagaacaaaaatcttcatgccaaattagcaagatacaggaaaaaaggtaagtgggcaaaatacagggaaaaaaagctaattcaccctgacagttgttacacaaagctgagagagtctttccctctcacatttacaaagtccaggagcggaaagactttcagcaggagtaagccatgagggtttggacaaggctggtaggggaaaatgttatctcctgggcatactgggaagctgagagtccagggcaggtgaatggggttggagatgggaatgagggaggacagcatctgaggcagtaaatcctgggaactaggagttaggcatattcaaggcagggctattcttatggcaccccaaggttaagtttctgggctggggaggaagccaggttgggcaanttaaggntgttgaaattagggntcccaaggggaccagttcccagttt

SEQ ID NO: 431112 - DNA, 452 bp, Homo Sapiens
ttttttttcttggtcttcataagattgaggtaagatttttgcagagaaatttctgtttttgataacctttatagaagatgctaccttttctcagcaggttcatggaaaccttcctttagtagaagacaatttgatgttctggagggctcgaaatagcaggtgatcaaagtatctgaatactccactagagtgaggaagcttagaaactccacttttgtcttttgaaatttgcatagctgcaatcttattgagggtattacgcatgtagtatcccagcagaggccctgaaaaccagggacgacgattgctcttcaccacaagattctaggctggcatttctaactgagggacaaactaaggaagggaaggatgcatgggctcctgttcctaggtggcttaaaggggaggagctaaacggatatgggtaagtctggggaatgggagatagtccc

SEQ ID NO: 431113 - DNA, 429 bp, Homo Sapiens
  misc_feature (404)..(404): n is a, c, g, or t
ttttttttgctttcatttcatattttattacatcaatggcttgaaaatttttatttaacctcagcaaatattggaaatagaaaaatgaattctgcagaatttcacaaataaattttccaatttccactaacaaatgttatcattcaatggctaagcagttataatgctatgaacattcaccacaatgaatgtgctgaaatagaaaacaggcaaagagacattaaaatattacttacaacagcattattacaacatattttctttaaaattccaacgtggatttcatcacttcaaaaggatatacagcatttccattatatttggcaaacttaaccttatacatctttttaaaatcttggaaaattttttaggctggtctaaaaaggcacttgggcaaggtcggntaggtctaccccatggggggttact

SEQ ID NO: 431114 - DNA, 133 bp, Homo Sapiens
aagttttcaatgttttatcatatttgatagcagctttttttattggttacaaaacctaagcccatatacaaaattaggaacacatttagatgcctcttttgaaagaacgttttagtctttttaaactgagttt

SEQ ID NO: 431115 - DNA, 506 bp, Homo Sapiens
  misc_feature (454)..(454): n is a, c, g, or t
tttggagacagctgttttttaatattgcatacaggctagcagttcattgaaaacagaggagagaagcctgaaggttagatcttagaagaaggcagttcttcatgcacagcttttgtcaatcctgatttggtttgaaaataaaaatcatggaataccaaaatcaaaggagagttgattaagggaaagggaaaaggggatcatcccaggaagggtgatgtcactggccaggaaaatgtcaggcgaggttccatgtcctcactcaagtccaaaggtgctggtttcctctactgctgttaacagcttttcatacaacatgggagtacgaggggatacggtgggaagatccagtcggttgaaggcatgtgtgtgcccgggggaagagaagtaattttcccccatttcttctatgcagaagcgccgaagccccatttgctcccacggtggggcttgcgancttttcgtaggggcacgttgggatttcccgtgacaatccgcaggaatctcag

SEQ ID NO: 431116 - DNA, 1974 bp, Homo Sapiens
  misc_feature (1552)..(1552): n is a, c, g, or t
  misc_feature (1555)..(1555): n is a, c, g, or t
  misc_feature (1559)..(1559): n is a, c, g, or t
  misc_feature (1568)..(1568): n is a, c, g, or t
  misc_feature (1575)..(1575): n is a, c, g, or t
  misc_feature (1577)..(1577): n is a, c, g, or t
  misc_feature (1582)..(1583): n is a, c, g, or t
  misc_feature (1605)..(1605): n is a, c, g, or t
  misc_feature (1614)..(1614): n is a, c, g, or t
  misc_feature (1616)..(1616): n is a, c, g, or t
  misc_feature (1619)..(1619): n is a, c, g, or t
  misc_feature (1621)..(1621): n is a, c, g, or t
  misc_feature (1639)..(1640): n is a, c, g, or t
  misc_feature (1646)..(1646): n is a, c, g, or t
  misc_feature (1655)..(1656): n is a, c, g, or t
  misc_feature (1720)..(1720): n is a, c, g, or t
  misc_feature (1752)..(1752): n is a, c, g, or t
  misc_feature (1834)..(1834): n is a, c, g, or t
  misc_feature (1836)..(1838): n is a, c, g, or t
  misc_feature (1946)..(1946): n is a, c, g, or t
  misc_feature (1950)..(1950): n is a, c, g, or t
  misc_feature (1967)..(1967): n is a, c, g, or t
gaaagtctttcatcgtggaccacaacagtcgagctaccacttatcattgacccccgaatccctcttcagaacggtcgtcttcccaactcatctacactcacctgacagcacctccatgaggctccgacagttacagctgctgagagaggcctcagcaagtttctagaaacagaggagcctctttactggccaggccaggacccagcttagtagctgctattcgaagccaacatcaacatgagtcattgccactggcatataatgacaagattgtggcatttcttcgccagccaaacatttttgaaatgctgcaagagcgtcagccaagcttagcaagaaaccacacactcagggagaaaatccattacatcgggactgagggtaatcacgggcttgagaagttgtcctgtgatgcggatctggtcattttgctgagtctcttgaaagaagagattatgtcctacgtccccctgcaggctgccttccaccctgggtatagcttctctccccgatgttcaccctgttcttcacctcagaactccccaggtttacagagagccagtgcaagagccccttccccctaccgaagagactttgaggccaagctccgcaatttctacagaaaactggaagccaaaggatttggtcagggtccggggaaaattaagctcattattcgccgggatcatttgttggagggaaccttcaatcaggtgatggcctattcgcggaaagagctccagcgaaacaagctctacgtcacctttgttggagaggagggcctggactacagtggcccctcgcgggagttcttcttccttctgtctcaggagctcttcaacccttactatggactctttgagtactcggcaaatgatacttacacggtgcagatcagccccatgtccgcatttgtagaaaaccatcttgagtggttcaggtttagcggtcgcatcctgggtctggctctgatccatcagtaccttcttgacgctttcttcacgaggcccttctacaaggcactcctgagactgccctgtgatttgagtgacctggaatatttggatgaggaattccaccagagtttgcagtggatgaaggacaacaacatcacagacatcttagacctcactttcactgttaatgaagaggtttttggacaggtcacggaaagggagttgaagtctggaggagccaacacacaggtgacggagaaaaacaagaaggagtacatcgagcgcatggtgaagtggcgggtggagcgcggcgtggtacagcagaccgaggcgctggtgcgcggcttctacgaggttgtagactcgaggctggtgtccgtgtttgatgccagggagctggagctggtgatagctggcaccgcggaaatcgacctaaatgactggcggaataacactgagtaccgggggaggttaccacgatgggcatcttgtgatccgctggttctgggctgcggtggagcgcttcaataatgagcagaggctgagattacttgcagtttgtcacgggaacattcagcgtgccctacgaagcttcncancccnccgtgggancaatggncntcggnncttctgcatagagaaatggggnaaaattacntntcncnccagggcacacacatgcnncaaccnactgaatcnnccaccgtatccctcgtactccatgttgtatgaaaagctgttaacagcagtagaggaaaccagcncctttggacttgagtgaggacatggaacctcncctgacattttcctggccagtgacatcacccttcctgggatgatccccttttccctttcccttaatcaactctcctttaatnannntattccatgatttttattttcaaaccaaatcaggattgacaataagctgtgcatgaagaaactgccttcttctaaaatctaaccttcagcttctctcctcttttttcnaatnaactactaacctttatncaatatt

SEQ ID NO: 431117 - DNA, 456 bp, Homo Sapiens
gcctcatgtggaatgctccgacaccagcctgccaacgcacagattggcctgatggaggggaacacgttctgtaccacgttgcagcccaggctcttcacaatggaccttaacgtggtggagcataaggtgttctacacagagctgttgaatttgtgtgaggctgaagattcagctttaacaaagctgccctgttataaaagccttccgtcactcgtacctttacgaattgcggcattaaatgcacttgctgcctgcaattaccttcctcagtccagggagaaaatcatcgctgcactcttcaaagccctgaattccaccaatagtgagctccaagaggccggagaagcctgtatgagaaagtttttagaaggtgctaccatagaagtcgatcaaatccacacacatatgcgacctttgctgatgatgctgggagattaccggacaattccacttagg

SEQ ID NO: 431118 - DNA, 1928 bp, Homo Sapiens
  misc_feature (1100)..(1100): n is a, c, g, or t
  misc_feature (1108)..(1108): n is a, c, g, or t
  misc_feature (1111)..(1111): n is a, c, g, or t
  misc_feature (1122)..(1122): n is a, c, g, or t
  misc_feature (1133)..(1133): n is a, c, g, or t
  misc_feature (1142)..(1142): n is a, c, g, or t
  misc_feature (1150)..(1151): n is a, c, g, or t
  misc_feature (1156)..(1156): n is a, c, g, or t
  misc_feature (1163)..(1163): n is a, c, g, or t
  misc_feature (1166)..(1166): n is a, c, g, or t
  misc_feature (1169)..(1169): n is a, c, g, or t
  misc_feature (1173)..(1173): n is a, c, g, or t
  misc_feature (1182)..(1182): n is a, c, g, or t
  misc_feature (1202)..(1202): n is a, c, g, or t
  misc_feature (1208)..(1208): n is a, c, g, or t
  misc_feature (1252)..(1252): n is a, c, g, or t
  misc_feature (1258)..(1258): n is a, c, g, or t
  misc_feature (1274)..(1274): n is a, c, g, or t
  misc_feature (1302)..(1302): n is a, c, g, or t
  misc_feature (1304)..(1304): n is a, c, g, or t
  misc_feature (1374)..(1374): n is a, c, g, or t
  misc_feature (1382)..(1382): n is a, c, g, or t
  misc_feature (1401)..(1444): n is a, c, g, or t
  misc_feature (1456)..(1456): n is a, c, g, or t
  misc_feature (1493)..(1494): n is a, c, g, or t
  misc_feature (1499)..(1499): n is a, c, g, or t
  misc_feature (1517)..(1517): n is a, c, g, or t
  misc_feature (1520)..(1521): n is a, c, g, or t
  misc_feature (1527)..(1527): n is a, c, g, or t
  misc_feature (1552)..(1553): n is a, c, g, or t
  misc_feature (1555)..(1555): n is a, c, g, or t
  misc_feature (1557)..(1558): n is a, c, g, or t
  misc_feature (1562)..(1563): n is a, c, g, or t
  misc_feature (1573)..(1574): n is a, c, g, or t
  misc_feature (1579)..(1579): n is a, c, g, or t
  misc_feature (1586)..(1586): n is a, c, g, or t
  misc_feature (1590)..(1590): n is a, c, g, or t
  misc_feature (1593)..(1593): n is a, c, g, or t
  misc_feature (1600)..(1601): n is a, c, g, or t
  misc_feature (1615)..(1615): n is a, c, g, or t
  misc_feature (1631)..(1631): n is a, c, g, or t
  misc_feature (1633)..(1633): n is a, c, g, or t
  misc_feature (1642)..(1642): n is a, c, g, or t
  misc_feature (1654)..(1654): n is a, c, g, or t
  misc_feature (1663)..(1663): n is a, c, g, or t
  misc_feature (1666)..(1666): n is a, c, g, or t
  misc_feature (1668)..(1678): n is a, c, g, or t
  misc_feature (1697)..(1697): n is a, c, g, or t
  misc_feature (1713)..(1713): n is a, c, g, or t
  misc_feature (1770)..(1770): n is a, c, g, or t
ggttatggggtcccgatggagcttttgaccgatcggaactgttttttgaaaattgaagtgacggtgtgttcttcgtatctcaagaatacttcaaggataatataaagggttctatgagccagaggaattcccaattcactttgaaattaccatacctatcttgccatatcaaacatttcaattctgttaactaaatgaactacataatatccttaaaaatcagccagagaagagaaaaacaaatctcgtcttcattattgactttgaaccaaaacttattctttcaaaggagtagtttaacctactaaatatgtctattataagatcttctttcttagaaagtagtattccttctttttcattcctgaaatggtatttcttacacttaaacaagttatggacaattgttagctaagtatcagttatgataaattgctaaaattaaattatctgtttaaggtacatataacacattcctatagcctttaaaactgtattttctttcacaaaaatttaaataaatgtgaaagtaggcaatcactagaagtctcatggtacataaactttgcatcaactttgacgcccaaataaggatgaaatttggggtacaaatcctccgtttcccaaaaccagtggcaaaaaatttatatttttaaattggtataatttttatgcattttcaaacatttactgggaatattcaagtttacctaattaatcacccggaaagccagcagtactgccaaaagctcttggtatattcagtagtcactgtgaaaacttttcatttctttaccatttggcaatggctcagtttctattttccaattatgttttggaataaagtctatgaccattaactatgcattttttgttgctatctcatagcccgtgcactgtacatatttacagagaaaaaaataaaggattgaattttctgtccattcattcattcacttatttgaccatttggagccatgtaagaagctcacagactcagaaactcttcagctcttcctcagactcaaatcactgttggtcactaatgctgacaaagaagtactttccgacgcatcatctttccttaggttcaaaaatgnttctcganttntttgaaggatntctctcaagcntttgttttnttgttcannttganatattcnttnttnttcnttgcaaccntgttgctcgtcaatttcaanggcttncctcattactgctgccatttcagttatctggtcaacatgtgctngcagtnccttggagtgctgctnttttaacttcattattatacccggatcntnttttttgctagccattagcaatctaaacatttgttctcggtacttgctcattataagttccaaggccganttattttnttccagagatgtacgtaannnnnnnnnnnnnnnnnnnnnnnnnnnnnnnnnnnnnnnnnnnngctggattcccntaactaacgtggaccgtggccgatgtctcgcgatttnnttaantttttgaattttttcctnatnntttttnatggcttctactcgttttttgaganntntnntttnntcaatcagannttttnctgcatntttnttnttttttnntttttcaacaaganttttagcgtcggcaantnctttttcanttttgcaatttntttttaaanatntnnnnnnnnnnnattccctcgcagctttcanttttggcgatgcggantcaaaccctttaccaaccgggacctatgcactcaagggaagagactccgcgcccccntaatccgcctcctcagcaagcagacgcagaatcggacggaggcagcggacggaaggccgggaagccagtggcgttcaacgccatcaccggcggggtagacacctccgccgaccgcctccgaccggcgctcccggagaactccagcctcgcgagatatc

SEQ ID NO: 431119 - DNA, 1674 bp, Homo Sapiens
  misc_feature (290)..(299): n is a, c, g, or t
  misc_feature (512)..(512): n is a, c, g, or t
  misc_feature (1587)..(1623): n is a, c, g, or t
atttcttagaaggggggcccactctattgtagacatgagtaaagatgctttctcacggggaggggttgcctcccgtgtgttttgttacaacaagcgcccataggaggcgccgaggttgtggtggtttttaaaaaacctttgtggggagaggcacaaagaaaggttcccacccaccataaaacccccttgaaccgtgtcttgaaaaaagtcttttccttgttttaacctccccttgcctagggtttatttcctccctttattcaaataaaggcctgcccacaagtgagttnnnnnnnnnntttagggccccatgggggggagcgcttgctttacttaatccttaccatttaaacaaaaggcattttatttcttttgcaaaatcaaaggactacaaactattcacaatctgaaataaaacatttaatactttgaccttatgaaatcagtttaaaattaatgccaagaaaatatctttgatgtccagaaaggaaatgactgtttcacagcaacanctaacaagagcaaataaataaagcgttggactgaataacctataaaacctgcaaatatctaacaggctgtacatgatacaatacacagaaaattaatgagagatttaaagtttctacactgaacagcatggctattaaagacacaacattcttttaataaatttcatttatttgctgatctaatctgggagggaaattcaatgtaaaagcacttttaaaatggaccccccttccatccacaccccaaaagttgactgtttatttagtgtacattctgatttgcttcccagtgccttctctccagtccatgttgaggtgcttcaaaggatgtgtcgagatgcatcaaggaagaatccttcggacttgttacgatgtaccatgtcaatcttggagtgctgctcttttaacttcattattatacccggatcatcttttttgctagccattagcaatctaaacatttgttctcggtacttgctcattataagttccaaggccgactgatgttcttccagagatgtacgtaattctttgttttcttgttgcaactctctgatttgtctgttttcttgctggattcccataactaacgtggaccgtggccgatgtctcgcgacttcattaagttcttgaatttcttcctgatactgtttcatggcttctactcgcttgttgagagctgtggtttgctcaatcagagattctgctgcatcgtcatgatctcgttaatctttcaacaagagctttagcgtcggcaagtgccttctcaattgtgcaactcatttctaaagatatattctgctcttagtccctcgcagccttcagctgtggcgatgtggactcaaaccctctaccaaccgggacctatgcactcaagggaagagactccgcgcccccctaatccgcctcctcagcaagcagacgcagaatcggacggaggcagcggacggaaggccgggaagccagtggcgttcaacgccatcaccggcggggtagacacctccgccgaccgcctccgaccggcgctcccggagccgctctcgacgaattcgagctcggccgatttggcctgatnnnnnnnnnnnnnnnnnnnnnnnnnnnnnnnnnnnnncgccgccaccgcgttagctccaggtcgccctatagtgagtcgatcattccg

SEQ ID NO: 431120 - DNA, 1005 bp, Homo Sapiens
tcggccagataacttcgtatttatacattatacgaagttatggatcagggcaacatcggccgagcgtcttaattcgtctgatgagcggtaactgtaacgctgaggaaatgaaatctcgcgaggctggagttctccgggagcgccggtcggaggcggtcggcggaggtgtctaccccgccggtgatggcgttgaacgccactggcttcccggccttccgtccgctgcctccgtccgattctgcgtctgcttgctgaggaggcggattaggggggcgcggagtctcttcccttgagtgcataggtcccggttggtagagggtttgagtccgcatcgccacagctgaaggctgcgagggactaagagcagaatatatctttagaaatgagttgcacaattgagaaggcacttgccgacgctaaagctcttgttgaaagattaagagatcatgacgatgcagcagaatctctgattgagcaaaccacagctctcaacaagcgagtagaagccatgaaacagtatcaggaacgaaattcaagaacttaatgaagtcgcgagacatcggccacggtccacgttagttatgggaatccagcaagaaaacagacaaatcagagagttgcaacaagaaaacaaagaattacgtacatctctggaagaacatcagtcggccttggaacttataatgagcaagtaccgagaacaaatgtttagattgctaatggctagcaaaaaagatgatccgggtataataatgaagttaaaagagcagcactccaaggaactgcaagcacatgttgaccagataactgaaatggcagcagtaatgaggaaagccattgaacattgacgagcaacagggttgcaaggaacaagaacgaatatttcaacttgaacaagaaaacaaaggcttgagagagatccttcaaataactcgagaatcatttttgaacctaaggaaacgatgatgcgtcggaaagtactttcttgtcagcattagtgaccaa

SEQ ID NO: 431121 - DNA, 686 bp, Homo Sapiens
tttccgtaagtataaacattttatttcaatttaaggtagtagcaatacaaaataagttttgataattataaagtagagacaatgaaaaatcccaccctatttttagaattttaaaatattgagcatcattctgtcctgatgggtttttatgtaaagtgggaatttacatgacaccagtatcttggcaattcactttttttgaatgctacatatcccaatcaccatatattaaattctctattttcttcaaagtgctattgccacaagagactgaacgatacagcaatttaaaaaaagaccacacaaactaaattgtaatgtcttcaatatctcaattactgttttttaaaaataaaaactgcagtagtgaatttctttaagttcttgctacatgattgaatgggagataacctcaacaattttcattcttaggcatgagcatcttcatgctaaggtagtctatacttaaaagctttattctttcataacacctgggcaacaaatattttaaaatcataaataatgggaaattaaaatcagttatggtggcacaattcatttggtaactagttgcccaagatgtatagtagaatcaagcaggtttaacttccacatgctctgcaaaaaagggaaacaatggaaatatttcggtatatagcccactattccactcaaggaatctatcc

SEQ ID NO: 431122 - DNA, 339 bp, Homo Sapiens
  misc_feature (70)..(70): n is a, c, g, or t
  misc_feature (102)..(102): n is a, c, g, or t
  misc_feature (258)..(258): n is a, c, g, or t
  misc_feature (312)..(312): n is a, c, g, or t
tttggtggaaaatccctttattatggtgaaaattactttcagcagtgacataatgtaacaacacatttangcaacattttacaccacacaagtaaattaagnaaagtgtttctttgaaaatttgtcatcatagggacattatttctacattaatgccagaaaatgccaaggccgtttatctcaaggcaaacagggctccctccttccttttgggtattttctttttaacacaaatgaaatgacttgccattttaacanatcctcaattctaaaagtgatctctcagggggctttgaactaaggtcggcaagntttgaaatgggggcttcacattttttg

SEQ ID NO: 431123 - DNA, 1542 bp, Homo Sapiens
  misc_feature (134)..(220): n is a, c, g, or t
  misc_feature (1438)..(1458): n is a, c, g, or t
ggggggaatccaacccctttttttggcccggttttccttggaaaaagttttgccccgttttcttttcccttggggccccgggcccaaaaaaatggttttaaaaaatttttgggggcgggggggggggcaaaggnnnnnnnnnnnnnnnnnnnnnnnnnnnnnnnnnnnnnnnnnnnnnnnnnnnnnnnnnnnnnnnnnnnnnnnnnnnnnnnnnnnnnnnatatttaaaatactgtttatttgtgatttaacattaattagcattacatctaagagcaatatcagataacatttatacatttttccacaggacacagaggttcattggctcattctttatgccaaagcaagtaaatagaggcattagcaaaaggtgcaatagttcactgttatgtttaaaaaatatttatgcacattgcattcatttagatatatatatttttaaaaagttatggaaaagcatagttcacaggttactatttctacatacattgtaatacaacataaatgatgtagaacattaaaaaaatcttccaatagagagttaagcaactgaaagtttccaccaagagattaaaacactgattccagtagttagtgagatctagaatgacatttccaggctctggctcaactctgcattatcatatgcacacaaacagagccagctccaaaacacactgtaatcaatgtaattttttgcatgccaactcacccttaagaaacactttgagttatttttacccacgatcattctggatcattgattttgcatcgaactgtgacatcacttgggtgaaaggggaaacgcctatattaagcctaggtttaaatttgtatttacattaaaaagaaaggtcactgaaaagatttttttaaatctgtaaaaatcaagaagtggtagttttcttactggtgggattagacctgctgatttcttctagtgctgccctctaaagatacaaaaaattagaaagatttgacccttttaaaactcaaatatcaaccaagaaagacattgcttttggcagagaagcagaattttagaaatttgggacatgtttccaacaaatcacactttgtatcctatcgtgaatatgagtcaccatcaaactagaattcttcttttcacatcccatcttttgtccccttaatttttcactttccctttcattctttttcatttggctaccttatgagacttttctttactcattagcaatactaagagaaaaatacagtttaagattcaaatatgaatctagatgtacctttacatgctctaatcctgttttaacaccaagtccctggattctggagttatatttaagtatactcagtaccaagcagccttaagtatgctctactgtgaaaagattggctaatatgcttaggacacttttatactgaacggtatacaaacatccacaaaccaaannnnnnnnnnnnnnnnnnnnngccagagttaaactaaataacccatgttatgtgtacaaatccgctctcgacgaattcgagctcggccgatttggcctgatccat

SEQ ID NO: 431124 - DNA, 286 bp, Homo Sapiens
  misc_feature (45)..(45): n is a, c, g, or t
  misc_feature (220)..(220): n is a, c, g, or t
ttttttttcatgtttaatttctttattttctccagaatatcttantatggaaacccaagttgttactttgagaaagggaaagacagagaaacatgaagagacaaacatttcatttccatttaacttatggtattgtgagcagtcacttttgtaggcaacacttgttttctttgtagaaaagaaataaaaaacaaacagcaccattaaaggattgcatganccctgatttctaaacaaaacactgtctaaaatttttcttaaatgcttgttgcactcggtcacattt

SEQ ID NO: 431125 - DNA, 462 bp, Homo Sapiens
  misc_feature (178)..(212): n is a, c, g, or t
  misc_feature (391)..(391): n is a, c, g, or t
  misc_feature (422)..(422): n is a, c, g, or t
  misc_feature (452)..(452): n is a, c, g, or t
ttttttttcatgtttaatttctttattttctccagaatatcttaatattgaaacccaagttgttactttgagaaagggaaagacagagaaacatgaagagacaaacatttcatttcatttaacttatggtattgtgagcagtcacttttgtaggcaacacttgttttctttgtagaannnnnnnnnnnnnnnnnnnnnnnnnnnnnnnnnnncatgatccctggaattctaaacaaaacactgtctaaaaattttcttaaatgcttgttgcactcagtcacatttagtcaggtatcaaagcaagcgtaacagtattaaattgtcgcagtcttactgaatccacctgctcccccttctgaggggttttacacaccttttctgagtttttccngtggggataatatattctttggtagagggtncgagggagggttttacctttccggtatgcngatataaatg

SEQ ID NO: 431126 - DNA, 529 bp, Homo Sapiens
agatatttgaacatttattttacaatcgactgaatatattatgtatatgaggtaagcaacttttgtagagattgtatgtgtgagataatgtaatgttcttttccagtttttggactacagttgaataaactttttaattatttaaaaacatctttaccgaataacatgtgatggttttttgtataatgtatttgattttgtaaatacgtatttcctgatgtgatttttgtgagaaatgctaaatcttttagtatatcatgtcctctcaaaattggcaggagctaaataatagtttgtgggcgatttgtattgtgtactgtacaataactggggaacttttataattataaaaatatatattaacttttagtgtgttgtttaaacaaatgactggaacatactaaagatattagtaggatttttctgaatatttcagacttgaactcaggctagctttcttgtgtttttcaaaacaaaatggtgtcttgtcttttaaaatcaataaatttgtttccttgttacaaataaa

SEQ ID NO: 431127 - DNA, 414 bp, Homo Sapiens
tttagattagtaaaccacagcaaagtttattcatgtgccagggacataaagatacattaattgtttgtttttctaggctgccagtataagcttttcaaactgtttaaagtaaataaaaccaataatacagctagataccacattgcaaagaaccctaatgctatttatcagctttaaaatactttccaactgaaatcaattacattttaatatacacatattatacagaaattacctatagctcttttaaaaatcctatgacattaacatgaaactttattagaatttaagattctatatgcagacctgataaagccttaaatttaattattttggagtaatgtcttcttaagaaatggtagataggataaaataatttacagatttatctgccttcgaactggaaggaatttt

SEQ ID NO: 431128 - DNA, 909 bp, Homo Sapiens
  misc_feature (64)..(64): n is a, c, g, or t
  misc_feature (98)..(98): n is a, c, g, or t
gttttcatcaaacaagcatcgctctttctcgttcgtatttatcttttattgtacctactgcctncctccatctcgttatgccgttctcgctttgactnttctaacttatcttttaacatcaagatttctttctgcagggccagctggtggctttctgaatcatgcacctccttcttcacatttttcacttctagcacatgggaggcctcacgtctgaccaattcctcttcataaaataagactttcttctccagctcggatttgattttggaaatctcttgctggtgctctaaggtggcacccgctccccggcctccttgcttcaccttgagggcctccagctcgctttccatttgcttgcagaagttctcgctgtgctcacgaagcttgcgctccttggaggcctcagcaacagcatcatcaagctgagcttccagctctttcctgagcttctcagctctccgcatttcctgccgcatggcgtccaccttctgcgtggccacctccatctcctcctccttgtctcgcagctgccgggacaccttctgcttctgggcacggagctctgccatgcgctcgttcagctccgagaactcctgcagggccagctttcgctgctgatgggcatctttgagttccttggcctgggatttcaaccgctctgaggcttcaaccagttgcttgtgcagctcctccttctcctgccggaccacgcggtgctgcttctccagcccccgcagccgctgcgtggagtcctcacgctcttggcgaagcgccactgtgtcctcaagctgtcgctcgagcctgtttgaatctgctattttattcttcaagcgttcgatttcttcatttagctttttgatttctttatctcgcctcgtgccgaattcgccacccaggcctcgctcc

SEQ ID NO: 431129 - DNA, 833 bp, Homo Sapiens
  misc_feature (37)..(37): n is a, c, g, or t
  misc_feature (54)..(54): n is a, c, g, or t
  misc_feature (128)..(128): n is a, c, g, or t
ttcttgaaaaaaaacgagtgcaaagttggtaactttnaacccccccggggaaanccctgccaggaatttcctttcaagccaacaaaagttccccccaagcttccaaacttcctgcagggttgtcttcnagcaagccttattaacagacccactttgggaaagtaagtaagaatggggtcccccagccctgtaaaaaagatggtggtgaattgatgtttggaatgttgaagtgaatgattcgccctcccaaactctgccagccagggccctggaagttggttgcattgaccttttgaagcttctggaaatagtttaagtttgagttgttcacatggacacaaaactgcctgattccattagaatccatgaaaactcttgaaggaaacggggaattactcctgaagataacagagttgtctacacaaacccagcttgaagaccttacgctgcctggaaggcagaaggagaaaactgtcctcggatggagaagatagcagtccctgtcgcagcagcaatttatatcgcaggctccaggagtcaagtcacagacacagatcggtaagactgggaagaggtccacagtcctattcccaggggccgagggagccacgagagtagggaccactgtagggagtccaggcacggccgggcgagttgcagtcgcctctgaaggggactggagggttccgccatccgtccctcgctgcagctccaaagacgtgggcactgcccctgatggggaggaagagggctgaggccggacgccatcggggaacaccagaaagaacacttgcaggagcgcgagctgtggggtgcgcatggggcattccccc

SEQ ID NO: 431130 - DNA, 1622 bp, Homo Sapiens
  misc_feature (17)..(17): n is a, c, g, or t
cagagccagaccacagntcagctgccttctaccatgctgctggaattagtacaacaaagctctcaaccagttttatttttcctcacaatgaacggaagaaaaaggcagaaataaatggtagggtcatttgctagtagaaaagaaagctgggattccccatttactttggaaactgaggagaaagaactgctttccccactcgtgtctgggcaaagggtgtgcccagatgttggcaaaggaaccagacaaaatcaacagccagcagttttctgttccaaacagttagctcctctacagtccagagggaagctattcctgagttcattcaaggtgacagcagaagtgtttctctctttctgcttggcccaactgtgcctgagggctgatggatccagaccttgtaaacattcagctaggtgtaacataaccagaaaggctgaaggaaggctcttggccttcccagcttgagaagtaggggcctcatgtgtatctggtggcctgcagagcccaaagcagagagctatgatgaataaaatatttttattgcttttctaaaataactcctttcatatacaaggattccttcagttaggtcctctattatcctaaatgctctctggtcatgagcaggtgaggttctatttagccaagataagtggctgcctcagagtttctcatagggaaaactgaaatctgattattttcttttcttcacatagtctctaggttgagaactccaagtagtaagaggcacaggataaggatgggagagactgagcatttttgagagaatactcctctgctgaatgccactttgaagggaaagaagtcgaatggccatttccagtccattttgggttggccccttggaggctgtggcttctgggtaatgtccacaaagttcacaagagttgtcaaagatacttctgtaacttgctgagaatcctgtatagactggcactggtataggaatcgaactcctgatacatgagcttgcgggttggacaggagacctacatatgcccacaatacctggatctccagggaaactggtatgagacagcaggaagtacagtttatagctgaaatgctgcagtgcctgttgaggatcctggtccaccctcctttctgggctgggtcagcattaccaaagatggcaacatactctggtctgggccttccatgaagagtctgataaatctcctgctgcaagtggctgcagtctgccttcttcaacctgagcttgcatccagatattgcattcactccaaactgcacttcatgtcttttaacagagcaacttccattaccctggctctgtaagagggtcattgagtaacttatatcatcagtcagagccaagagtggcttcccaactatatagccaggattcccacttctaggactggtgagagaagcagctgtgctctgttgaaaagccctgaagcgaaggatgaagtgttgctgtaaggaagcgcctggctcaacagtcaggttggtttgtcccaaactgacagaaactttctggattccaaaagtcccattggtctctatctcataggtgacctgagaaactacattctgacaagttttcatcccgggattccggaccggtccagcct

SEQ ID NO: 431131 - DNA, 1191 bp, Homo Sapiens
gcctgctgttttttgtttgaaaaagcccctctaagtcgaaggacttgaaagtgttgcttgtaaaggaacgggcctgggctcaaacagtccaggtttggtttgtccccaaactgacagaaaactttctggatcccaaaagttctcactggtctctatctcacagctgacttgagaaactacattctgacaagtgtttccagccaccagaggagcattagcctgtgagttaagtattacaggaaccctggacctccatattctgtggatcagtcatgcttcttggaacctttaagactgtgaagttatagtaagaggcagcattgagggctgaatccaaggtacagctactagccaggttcttgaaaaaacgagtgcaagttgtacttttactctctaggaaacctgcaggattgctttcagcacagagtcccccagctccaactcctgcaggttgtctcagcaagcttattacagaccacttggggaagtaagtaagaatggggtccccagccctgtaaaaagatggtggtgattgagtttggaatgttgaagtgaatgattcgcctccaaactctgcagccagggcctggaagttggttgcattgaccttttgaagcttctggaaatagtttaagtttgagttgttcacatggacacaaaactgcctgattccattagaatccatgaaaactcttgaaggaaacggggaattactcctgaagataacagagttgtctacacaaacccagcttgaagaccttacgctgcctggaaggcagaaggagaaaactgtcctcggatggagaagatagcagtccctgtcgcagcagcaatttatatcgcaggctccaggagtcaagtcacagacacagatcggtaagactgggaagaggtccacagtcctattcccaggggccgagggagtcacgagagtagggaccactgtagggagtccaggcacggccgggcgagttgcagtcgcctctgaaggggactggagggttccgccatccgtccctcgctgcagctccaaagacgtgggcactgcccctgatggggaggaagagggctgaggccggacgccatcggggaacaccagaaagaacacttgcaggagcgcgagctgtggggtgcgcatggggcattcagggcctccgggtccgacgtaggcctccgcggtctccaatcgca

SEQ ID NO: 431132 - DNA, 472 bp, Homo Sapiens
atgttctcattctcctttaatgctatttattttgtattactatcataatgttcgagtcacaaatttgtgatttttttcctcagaaaaccacagagagacaactagattccaaaaatgattaaccatatattagtatataagtacctcattataatgaacaaaaaattcctcacctttggactagtctaacataagtttgaaagcctttgcagacttttctcattagggctgcaacagggccacccaggctcttaaaaagggatactgaggtaacttatatcatcagtcagagccaagagtggcttcccaactatatagccaggattcccacttctaggactggtgagagaagcagctgtgctctgttgaaaagccctgaagcgaaggatgaagtgttgctgtaaggaagcgcctggctcaacagtcaggttggtttgtcccaaactgacagaaactttctggattccaaaag

SEQ ID NO: 431133 - DNA, 1408 bp, Homo Sapiens
ttttccataaaaatggatttattgccaaactttaagaaaggcgcttcataagcagaagacacagaatgccaccctcctcaaggaggcaagcacggaatgccaccttcctcaagcacgcaagctaggcaggccctgcacgttctcactcctctcccagaagccagcttcctgcctagggcccagcctgctaaaggatggaaattaatagcatttggtcacttgaggtggccccagagctacttgcctacccaccaggccccagggagagtggctgggcctcaacctgtgacctacatgcagggtctctgcacccacagactctgccctcagtccagctgctgcagttagctacttgacacaggagggaactgaggctccaattcctggcagtaggtggcttggctaaagccccagccagccatggctgctggtgggggacaggctgttcctatgtgcaagatggcacggggaatcacgatgactggagcaactgatgtccttcttgtctcttgatccatggggtccagtaattggcagtgcgaaaatgcgcaccggcactgctggcactgagagttggtgcccaagctattggcacctgatggtcagtggcttgcagtgggtgggggcatctctcggaaacacgagcatggccactttgtgtcctcgcattacagaccttctgacgtccaggaccacacgatccggccaggtccatccagcaggaaagaagcatcttcctttgtccagccgtttcgcttggaattccgttgtgtaccttgatctgtacacaccttccccgggaacagcaacaagagttggaccagtgttaccaatattacactcgcacgttaaaccgacaacgggggccggatttgaccacctgtgtgttccacgccacaagagctcctaccaggatgagggagccattggagagggcaaccatacgggctcacagaacgtatggcgccccctagggggcccctaaattgctattacggcgacgtcatggaaaactgcacgatccgccgtcattttatcctaggatccttttttccccgtgacacaaaccacatgagatgttcgcgcgactcaagttgtccatagaagaacagatccttgagggtaccaaaagggttcacatataatctgcggtatgaggcatttaccatttcctccaacatgcgcgaaagatagaggagccaccgtagaggggcacagataagattagagggatgtagggaagcacgtacacggagaagggccctaaggggcccattgtatgcacaatcgcactattaccaatgacacagcacatatgccccacattatatcacctaaagcagttgctctagtccatgacgcacgcagagagacatagacgcgctgctgatcgtctgtgccacactaa

SEQ ID NO: 431134 - DNA, 1358 bp, Homo Sapiens
  misc_feature (12)..(12): n is a, c, g, or t
  misc_feature (50)..(50): n is a, c, g, or t
  misc_feature (59)..(59): n is a, c, g, or t
  misc_feature (212)..(212): n is a, c, g, or t
ccattctccagnctattcctaggacaaagagccttcatggctaaggcagncctcaaagnccagcccctcctcccacctattctgagtagctgcagaggccttgggtccagggctctaggttcatccctcagttggggggaacgtaggacccagctggagcctcttgagggagatgagaggcctctttgtgaggaggacattagctgtgtggncctctctctctttggccctgtttccttttttgcaaaacaaggacattttctgcagccccttcctctcagtgagctatgattggagggcttaggtctggaggattcaagagtggaagaggaatttaaggggtcccctagtctagtctctgcccctggatagtgtccagccttgtatatttctgaagaggtggatcccagagtggctctgatgtccacattagaaaaacttacttgtaatgatcatgtcagccttcagaagagaatccccaccaacttctgtgcctcctcagatggggatttatctggatctctgtggttccttctcagccgaaacaggtccagtatcccagtcatttcttcaaatgctgataggggtatgttggaatccgaagccacttccccgccttcaagccccagatgggctgctctcctgtaactttctaggagaagagacattttcttctttccctttcctggtccatccctgcaccctggtcctctcccagcctctcccccacattgtccctgactctaggggcacatccagtctccatcgtgctgcagcagctgggactgaggggcagagcctgttagggtgcagaggccctggctcccgaggtccagccactctccctggggcctctggggtgagagcagcttccgataggacctgcccagatttctgcatgtgcacttttgtttactgaaagagagaaaggggggggtcacagcaacatgccctggcctttctgccctgttccccaaccccactgaggcctgctgcacaggtcaatgccttcgttatcgttattgtactgtcactttgttcttgaggtagtagtcaaggatcaggaggggcagatgtcttctctgggctgcgtggggccggagcagaggtgagcagcaatgcactggttcgggagcccccatcagcctccttgtgcaaactgggcccccatgccacagtctggctttccctccatctgccccaggacaagagcaagaaggacatcagttgcccagtcatgtgatcccctgccatcttgccttaggaacagccttcccccaccagcagccatggctggctggggctttagccaagccacctactgccaggaattggagcctcagttccctcctgtgtca

SEQ ID NO: 431135 - DNA, 1334 bp, Homo Sapiens
  misc_feature (432)..(462): n is a, c, g, or t
  misc_feature (634)..(701): n is a, c, g, or t
aacggtggaagcggataagagggtcgcatgtggctgggtgagtagtaggagtttcaataggcgcgggtgcagataaaggtatggctgatttggtgataattgcgagaatgaaagatgtaaggatatggcgggagggggaggcgctatgtatgaagggtggcaggtgtaaaaaaggggtacacggactgtgaaaacacgcgtgtgtgtatacgcgcggcggtgaagaaagtggtgttgtggggggtgtaagacatactgtgctgtgtgcgggaggggcggggaaatatatatatgcggggaggggggaggcggtacgaggagcggacgcgctattggcggggcacacaagagtgataggagggtgtagacgggagaggagcggcaaggggaagggggtgggggaatgtgggatgtggagcaaatgaagggtannnnnnnnnnnnnnnnnnnnnnnnnnnnnnntgtgagttcagaatcggaaaagtattttacatgggggagggtcgcgggtgacgccaaagcgaaaaggctgtataagggatagggaaagtgtaaaaggaggtgagggatgggcaatccgattgagggaaagggaaagggggaaagggtggacgagtgacatgagtggattgannnnnnnnnnnnnnnnnnnnnnnnnnnnnnnnnnnnnnnnnnnnnnnnnnnnnnnnnnnnnnnnnnnnttaaggtggtttgtgtgtttagggtttgttgtgtgttttttatcaaatgaatactttattagagacataacacgtataaaataaatttcttttcatcatggagttaccagattttaaaaccaaccaacactttctcatttttacagctaagacatgttaaattcttaaatgccataatttttgttcaactgctttgtcattcaactcacaagtctagaatgtgattaagctacaaatctaagtattcacagatgtgtcttaggcttggtttgtaacaatctagaagcaatctgtttacaaaagtgccaccaaagcattttaaagaaaccaatttaatgccaccaaacataagcctgctatacctgggaaacaaaaaatctcacacctaaattctagcagagtaaacgattccaactagaatgtactgtatatccatatggcacatttatgactttgtaatatgtaattcataatacaggtttaggtgtgtggtatggagctaggaaatccaaagtagcgggatatttttgaaacgatccgatgttaagtttacagtcctatgccctgatttcctcaaaacctttttgttatccctcaatgccttcctgccctctaccgctttcccaccatcca

SEQ ID NO: 431136 - DNA, 430 bp, Homo Sapiens
  misc_feature (395)..(395): n is a, c, g, or t
aacaaatgaatactttattagagacataacacgtataaaataaatttcttttcatcatggagttaccagattttaaaaccaaccaacactttctcatttttacagctaagacatgttaaattcttaaatgccataatttttgttcaactgctttgtcattcaactcacaagtctaggaatgtgattaagctacaaatctaagtattcacagaatgtgtcttagggcttgggtttgtaacaatctaggaaggcaatctgtttacaaaagtgccaccaaaggcattttaaaggaaaccaatttaatggccaccaaacataggcctgctataccgggggggaacaaaaaattcttcacacctaaattctgggcggggtaaacggtttccaactagggntggtactgtattatccatatggggcactttatgga

SEQ ID NO: 431137 - DNA, 249 bp, Homo Sapiens
tcagatgtggaattttctacctgtagcatcattttggtgctcagaaatttttgaattatggagcacgaatttcaggtttcagatttttggaaatagggatgttcaacctgtatttaaacatgtgtgtttgtgtgtgtatagacacatacatttctaaaccttttgaaactgattgcaagcatcataatagttcaccccaaatgtgtcagcatgcattttctcagaataaagacatcttcctaaaccaaa

SEQ ID NO: 431138 - DNA, 535 bp, Homo Sapiens
tttgttgagcagttgtttattctggccctcacagccttggctagtccacaaaggccctggggatgggcaacaggctacaggaacccacctgtcttcctggtcagggcccctggcccctagcagcaggccaatcctggtggggcacagggttctgtgccctttggctgcctacctctgaatatcctggccagcaagccatgccttccccgcccctggggccctgggagcccttcagctcctgtccccataatgggtcctgggcctaggatgaggggaaggtcccagtttcttgtagggtgttatctgggggtcctggtgtgggttgagctggagggctgtggggccccaagacccctgtgccattggggtgctccaccctctcaaacaggatgagcatctcacagtgcggggtctgcgggaacaggtccactgccacagccttgaccggccggaagggaatgcccttcacccggttagatggggctctgaagacgtgcagaacgtagtccatggctgccccgtggttggatgagac

SEQ ID NO: 431139 - DNA, 571 bp, Homo Sapiens
  misc_feature (410)..(410): n is a, c, g, or t
tttgggtgattaaagtaaaggatttattgtaatctgcttacagtcctttgcaaagacagacatatgtttttgcataaagatataaattgcttcattttaaactaatttagtgtttttttaaattatatgaacttttggtgaattatgaactgtaccaaaccaagatttttaagagcaatatggtacaaaaataagagcagacagacaatttggactgggacaggcattcaacagtgaatttagaatatggctttgctgtttaatcaagcaaagttacctggagacacacaaagagccagtaactttgttaatacaaaaagctgatgcagaccatctccatcccaaacctggttaagtaagtcagaattcccattttataaaaactaagtctgaactaaaagctgcttttngtagtaagccatttgtttgctagcacctcccagtctgcatgctgtgtatttattacccttcaaagtgtggccttcattatactagtccaccgtaggctgactgtatttaacgacctgcctattaaataattcctggaattgcaattatgtaagaaaaactc

SEQ ID NO: 431140 - DNA, 518 bp, Homo Sapiens
  misc_feature (302)..(302): n is a, c, g, or t
  misc_feature (400)..(400): n is a, c, g, or t
ctgattcagcaggaagcatctcagacaccaaccactatgctgtcagcagttgcccggggctaccagggctggtttcatccctgtgctaggctttctgtgaggatgagcagcaccgggatagacaggaagggcgtcctggctaaccgggtagccgtggtcacggggtccaccagtgggatcggctttgccatcgcccgacgtctggcccgggacggggcccacgtggtcatcagcagccggaagcagcagaacgtggaccgggccatggccaagctgtcagggggaggggctgaagtgtggcngggcattgtgtgcccacgtgggggaaggctgaggaccgggaagcagctgggtggccaaggccctggagcaactggtggggggcgtcgaacttcctggntgtggcaagcggcagggggtcaaccccctctgggtaggggaagcactctgggggaccagttggaagcagattctgggacaaagatccttaagtggtgaaaacgtgaagtcccccagcc

SEQ ID NO: 431141 - DNA, 1145 bp, Homo Sapiens
ttttttcaaagccgcgcaatcatctgcattttatttgcacctcatttgcaagttgttaatttgcaactctgctccttccactccaggttccttctctcccatcacccctcagattccccagtggcccaggaaaaaatatcttggtctttgccaaggtagactcagccttgtcagcaggcctgtcctgtgttctcaggggaggcctttacccaaggccacaacaacagcaggaatcccgagtaagacgccaccttgacggcagggaaggctggatcttttcacagggcagaactgatttgatgaggtgaacagtaaggtgagcagaggtgggaaaggccagtgggtgaatgcaggaacagcaccaggagctagagcccaactctggcctgtgggctgtctcccggtcctcagaggcgggacggggttcctccacccaccaccactgtttccccagtgatgtagctggcatcttcagagcacaggaaagacacgatgccagcacaatcctctggctcgcctaaccttcttatccgcagggtttctttcatgctttcctctttttccttgtccatccagagcatcctgctgaagctagtcttgataagtccaggtgctaggcagttcaccctaatgttccttggggccagctctataggccagggtcttggtcaggcccagcaaggctgttttactgacattgtaaggactgaagccaggagatggactgaaggctgctatggaagacacgatcaccactgagccgcctctggaaaaagaagagagctgaccatcttcccattgtggaccagtgccctcagcccgtgtggtgtcccctctcacccaggctctctctcactctctgtaccctcgtttctccatttctggcaccactgcctttgtcatcagggctggggccttcacattaatgtccagagtcttgtcccacacctcctcagtgacatccattatgcttccaaagaaagggttgacagcagcattggagactaggatatcgatccctcgatgaagcttcacagcctagagagaggggtaagttctgggccagggctggagtaagtaagggaggtgcatttacccatgttgataaaaacttccttctgggcaaggagctgtggctcatgcct

SEQ ID NO: 431142 - DNA, 747 bp, Homo Sapiens
ccccaatccttttacagaacccgagtgggagtagccttgccacccgcaatgttcttccccgttgaccgtagctggcatctggagagcacaaggaaggacacgattcttgcaccagtcctctgactccccaatcctttgcagctgatgatgttccttgagttcttccagagagactcattcccatgaaacactttgctgaagtcagttttgataatttctggaaccacgcagtttacccggatgtccttgggggccagctccaatgccagtgttctagtgagacccagcagcgctgtcttgctgacattgtagacacccagcgccactactggattataagctgcaatggaagagaccaggatgacagcacccctcctgttctccatgtagggcagcaactggctcagcagcagggctggggacttcacgttcacacttaggatctgaaatcagagcagagcatgggtgagggcagagagacatggtcagcccaagtcctgctctcataagacacttggagccctgtaatttgtgcagtagacccaatgtatgtgcatataagagaaaccaatcccccttctgactggtgcaagaggtatttccaatttgctaatggtttcataggcaggcaggctaagtcacaggcctgtgagcagagccctgaaaatgtgaattgttcaggactgacacgaggaaggaaatgttcaggccttttaaagaaaatggggactgggggcagtgggtcat

SEQ ID NO: 431143 - DNA, 1598 bp, Homo Sapiens; identical to SEQ ID NO: 150693
  misc_feature (115)..(134): n is a, c, g, or t
  misc_feature (187)..(246): n is a, c, g, or t
  misc_feature (253)..(331): n is a, c, g, or t
  misc_feature (1306)..(1306): n is a, c, g, or t

SEQ ID NO: 431144 - DNA, 838 bp, Homo Sapiens
cagggtttctttcatgctttcctctttttccttgtccatcccagagcatcctgctgaagctagtcttgataagtccaggtgctaggcagttcaccctaatgttccttggggccagctctatggccagggtcttggtcaggcccagcaaggctggttttactgacattgtaaggactgaagccaggagatggactgaaggctgctatggaagacacgatcaccactgagccgcctcctcgtttctccatttctggcaccactgcctttgtcatcagggctggggccttcacattaatgtccagagtcttgtcccacacctcctcagtgacatccattatgcttccaaagaaagggttgacagcagcattggagactaggatatcgatacctccatgaagcttcacagccgtggccaccagccgctcccggtcctccgccttccccacatggcacacggtgcccgtcacgctcagcccctccccctgcagcgtggccaccgcctggtccacattctgctgcttccggctgctgacgaccacatgggccccgtcctgggccaaacgccgggcgatggcgaagccgatcccgtcggtggaggccgttaccagggccaccttatttgcgagcgggtcccggcgggtcatcccggagctggccatccgcaccgaattccaagcccgggcacagaggcctagcagccccgccttgtgcatggatcagaccagcaagtatgggttccactccttccagcggaggtgacagagtagggcgaaggggcaggacgaagggcgggccgcttccctgcctgcccccttcccgccctcggatcccgggaatt

SEQ ID NO: 431145 - DNA, 551 bp, Homo Sapiens
ctaggcagttcacccttaatgttccttggggccagctctatggccagggtcttggtcaggcccagcaaggctgttttactgacattgtaaggactgaagcccttgtcccacacctcctcagtgacatccattatgcttccaaagaaagggttgacagcagcattggagactaggatatcgatacctccatgaagcttcacagccgtggccaccagccgctcccggtcctccgccttccccacatggcacacggtgcccgtcacgctcagcccctccccctgcagcgtggccaccgcctggtccacattctgctgcttccggctgctgacgaccacatgggccccgtcctgggccaaacgccgggcgattgcgaagccgatcccgtcggtggaggccgttaccagggccaccttatttgcgagcgggtcccggcgggtcatcccggagctggccatccgcaccgaattccaagcccgggcacagaggcctagcagccccgccttgtgcatggatcctcgtgccgaattcgccacccaggcctcgctacctta

SEQ ID NO: 431146 - DNA, 400 bp, Homo Sapiens
  misc_feature (366)..(366): n is a, c, g, or t
tttatttttctgcaaatctttattgatcctctggttgtttcagttactctgctaggtataaggaatacaactaggaacaagacagagtatccccttgagggttacactttagtggcaataaatgagtagaccattcatacttgctctgtctcagaacttaggaacaacgagttccttggcaagaaagctatgagactttacctgaagcacaatgtatttatttaacttctatgtttatttaggagataggctacagaatgattaaatgaaaatggagagagggtactgaaggtaggattctgtatgttgcctctttgggtagtccctgcaggtgaaattaaccaaatgctggacttaaagtaactngcagattgtggataaatgttattaaagcaaaggg

SEQ ID NO: 431147 - DNA, 479 bp, Homo Sapiens
  misc_feature (351)..(351): n is a, c, g, or t
  misc_feature (405)..(405): n is a, c, g, or t
  misc_feature (424)..(424): n is a, c, g, or t
  misc_feature (438)..(438): n is a, c, g, or t
  misc_feature (464)..(464): n is a, c, g, or t
tttggctatgcgtactattacagtttattatagcaaaaggatacaaatcagaacagccaaaagaagacatacatagagcaaggtgtaagaggatcccaaacacaaagtttctgtgccctcagggacatgtcaccctcctagaacacaccagagtattgccaaccagggaagttcacttgagcatcactgaccagagtttctctcggggtttcatgacagggcatgattaattgactcaatctctatataaaggctggaactccatctctaacccctctctccacctcagagggttggggctaatatcatatggacttcaaaactccaaccctcttaatccatgggttgggncttctggtgtgggctaggcccctatttggggtcatctgggttgggcggtaactntcggggcttcactttgggnttaaccaagggtantttcccttcacctggggaaattcccnggggtttgggtcggg

SEQ ID NO: 431148 - DNA, 409 bp, Homo Sapiens
tttcttcagcagtcagttctaagacacctagtagaaaccatttgcattttctctacagtggaggagaccctaaccctctaatcatcaaggaaacacatataggctgaacagcaacctgctggtgggagatgcagcgggtgaaggtgagcagaggaatcagtctatgaaaacttgaagctctcagccccattcagctctcaaccactcagggaggcctgaggacacagaaaggacctgaagaggtaggacctgccgaggtaagccattaccacggcggatgaaaatatccctactctgtggtggagaagagtcatttttcatctgtatcaggaatggggttctactaagcttgtatttgaaattacacaattgaatcccctgtaagtcatctctgttctctgagcaggca

SEQ ID NO: 431149 - DNA, 291 bp, Homo Sapiens
tttggaaaagaagtaatattatttaacaattttctgacttaaatatcttcacataacaaaagttttcatatcaccgtcaatattacttatatacatatgccaaaagtgaacaacaacaacaaaaaaatcaaaagatgccctttcaaaataacagtaaaatgtctatttctttaggaatctgaaatgagctcctctcttaatatacaaagtccatacaatatttataataaaactactctcttctgaaaccaaggaggcaacgagagaaaataaaggcaattatttttcagg

SEQ ID NO: 431150 - DNA, 2089 bp, Homo Sapiens
  misc_feature (534)..(557): n is a, c, g, or t
  misc_feature (2003)..(2040): n is a, c, g, or t
ctttacgaggtggaaatatctatatttaattgccttaaaaatgtggggtggaaaaacacaattatacattgtgataacaaacctgtacagttaatttctgaataatacaaaacaagtgctgaaatttttttcttgatgattgagataattgtccccgaattatgacatcagctacccaaatatcatgttgccccatctgcaaatacttgaagaggaatagttaccaattgaatgcatttagattcatccttaataaaaagaaaattgcatagctttttatattgttgcaaattcatctcccaatatcattgtcagcttagtgatattctccatattttaaaatttcaatttttaaaagatacataatatataattcctaataattataaacacatcattttactcatctggttttaataacatgcattttataattactgtacaaccaaaatagacattgaattatgctgtgtgcatgtctttattcaacagtatattcttagacaccttgttcaaacaaattaaataagtttnnnnnnnnnnnnnnnnnnnnnnnntctttccagtagaaacagaatcacagtgcttcacagacaaaagggaagggaaagaagttctcatacgaaaagagatttattattacatagaaaattctcacaatagttgaaacacacttcagaaactagtaaacaccttagatagagttgtgccaattactcagcccacaagcatctgctttgtcttaattagacaggggaggtgaatgaccactgtttattttcattttcctcattaattatgaaaaactgcatttaattcatcttgcattgtgagagattggctgcgcagatgtaagtcgtaagggaagtggctgtcggtgggcaacctgaacatggcaccctgcccaaggggacccctgggtggcactgcacagtaatgcatgccgtaattgtaatttttaccatagtccaaggtttcttcttgcttcagggaaaatatcccattatagttaattgggggaggacttaagggaccttcaaactgagggctggcacactcaggggaagtactttcatagaaggattcatacgcactgcaataattgtagggtttcatggacttggaattatcaagagtcccatgccctgggggagtggtgagctcagggctgtggtagggtgggtagaaggtagagtagggtgaccttgtgtggtgtgcagcctccccaccctgacccatcaggaaactcctggcgttgagctgcaagcagcctgccaccaagtttgtagttggctgggaaagacctttgcataagttttggacgaatgtgagcagatctggtctcttgccgattctcagaatttcagaaagtgcccagatgtagtttttggccagtcgtaaagtctctattttggacagtttctgggttttagaataacaggggaccacttttcttaagttgtccagagcgtcgttgaggccgtgcatcctgttcctctcgcgcgcgttcgcttcctgtctcctgaacttgaccctttccaatcgcagctttgttgtcttttttttcctaagacccctccttctaggcaacccattttcatcttcctcttccctgtcttcctcctcttcttctttctcggtttcttctccaggggcccttttgatgctctttcctcgaaggacaatctgtttggaaaagctttctggcttcttaatttgcttctggtcctcgcattctctagaaaactttctgcacatctgggattctggcattacaacagactcatcaaacggtagtgttaacatggttctctaatcttaaattaccttaggttttaatttcattcaataatcagttttcattttgggtcttccaaatcttttcaggctgagtgtcgcatcgtctcctggagtctctagatctgtgtatatctgcactatctcgattgatctctaaaaagtccgctctcgacgaattcgagctcggccgatttggcctgatnnnnnnnnnnnnnnnnnnnnnnnnnnnnnnnnnnnnnngccgccaccgcgatgaggccgattcgccctatagtgagtcgatacatcc

SEQ ID NO: 431151 - DNA, 1594 bp, Homo Sapiens
tttgggagggaagacatttactttaggtataaaggtttactattattaacaagttatcactattatttacatgtttataaaatggaaataaaaatgacatacacgtttggtgccaaaagtggcacatccaaactaatatcagtataaaaataaattttcaagctatgtgtttttaaaataaaggtcattgaaacagtaagggggaaaaaatctgcatctggcatgtgttgaaatgcaatcatcatcacagcaaagcagccctggggcaacaaaaccagtgcctgctggaagaactgtccccacgcgctcttgcaagaacccaagcaaacaaacaaaaaaacaaatacaccagtgatgttcctgagctacagaagtttagggcatccaaactgttgtgaattcctgctaaagaggaggccctgtgggatctgagctgatgaactctcctgaagttgctcagttagggtggcacccaggacctggcactacactctgagaggacgttaagcttacctgtgaaacacaaatcctctggttaacacaaaacagcgcacgagtcctctctgtcaatcaccaatccccttgcaagtctcctggctgcagataaacagggacaagggctgaggacagacagaagccactgggtttgggagaccctgtgcccatcagacatgccctttggtggtttcggcagagatccccaatgtttcgttcattcgtagagacatgcttgttcacacctggcagcagacctcattggttaacacagctgtggccccagcagggaaagcaaagccagcccagcaaaccctctgtccaccccacatggtgttttggccttcagtggctaactttcctccttgtttcccatagagctgggccaggactgcatgcctgctggaagtggcatgctgggttagtgagcgtgctgagtgagccaactcccactctgcccgctgcagcacagaaggatgcctgcccatgcacaaagtcctccaggatcccagcaaggatgcaaatgctgtgggcagcgggaagaaaggactaatgaacaggccgcagcccacttcagagcaaccaaacattccacaggagctggtgccagctcaccccacctgggaccaggggcagcagcatggaggagaggacgccagcagtccctgcaactgtaactgtgggctccctctcacgggtcctggaccttggcccttttggctttcagagacaggtgcgttccttgttgataaaagtgtggagccagctcccaacagcccaggccgattcaatggcagtcacatctctcatgtagtacttggaggtctgtataacttcgttatagatgacccagcgaggcggcttctctgcatagaggactgacgcagggtgtatgtgcagctcatggtcatcacggatggtcctataagctccagtagaatgaaacctcgctgcattggcgaagaagccggagacaatgcacctcagaaccagatccgggtcaccttcactagacttcctgggcacttgaaacttgacaagaagctttttcaattgttctcttacagtcgcagctctgacaagacccttgtaattcagg

SEQ ID NO: 431152 - DNA, 454 bp, Homo Sapiens
  misc_feature (435)..(435): n is a, c, g, or t
ttttttttgggagggaagacatttactttaggtataaaggtttactattattaacaagttatcactattatttacatgtttataaaatggaaataaaaacgacatacacgtttggtgccaaaagtggcacatccaaactaatatcagtataaaaataaattttcaagctatgtgtttttaaaataaaggtcattgaaacagtaagggggaaaaaatctgcatctgggcatgtgttgaaatgcaatcatcatcacaggcaaagcaggccctgggggcaaacaaaaccagtggcctgctgggaaggaactgtccccacggcggcttctttggcaaggaacccaaggcaaacaaacaaaaaaacaatttacaccagtggatgtttcctgggggttacagaagtttaggggcatccaaactgttgtggaatttcctgtntaaagaggggggcccgtgg

SEQ ID NO: 431153 - DNA, 497 bp, Homo Sapiens
tttggtgattgcattatttcacattttttaatataaagattgtacacaagtgcactatttcccatttgcataattcaaagttgcatcagacactcccgtgtagactataaatatgcacagaagggacagactcctcagaatgaaaaggaaggcattttggaggttcccctttgtcttttggaatgactctctaagtagtgtagtctctgtggcaggggctccggaatccctacccttcgggttcagggcttcagggagggagttgggccacagtagttccgggatgacagtggccacgtgagagaagaaaacagcccgaggagaagggaaggcacgggtgtgtcccccctcactgtgtacacacatgtcctgggtgcacagctgctttcattcctctagtgcctcccaagatcagggcaggccgtgttgccctctggacttccaagggggaagtgagttactggcccaagtcactcactcatcaagaaccttgaagc

SEQ ID NO: 431154 - DNA, 2019 bp, Homo Sapiens
tttggaaacaactttctttacgagaatcttgagttcctaatgagtctgacctggagtaggctagaccagtgcaaatactccaggcgtgcagagcggggaggccaagggcagtgtggggaagatgggggcatcgagggtggctgagtgagtttcctaatgattcctagacctacagtcccttaggaactgcgtggctatcacactgaccgcctggaccttttgggatgaatactaaaaggtggcttttcgctgtctagtcaaggtcggtgaatgggagtctggccagcactggttgggcggggagggatggtatgacacctgcctgactctgcccggaaacaagggggggacaactggaaccaggtctactctggcttggggagtgattcagagaaggctttgaatgccccttactttcctcccaaggagctcttctgcctgcctcagcggctatagcaagagtgtggactttggggttcaggcccagcactactcactagctgtcacttggtctttctgagccgcatttctgttacgtaggtggaggccccttcccataggattgtcacgcggaataaagacaacgcatgctgaggacctggcgcagagcagacccttagtaacaggagctaatactgggatacaaacagccccaggtccccaaaccatccaaagagccctccctgtttcctcttccgtttcaagaccattgggggaaacggtcttgcccttcctctgccgtagccttcctcagtagaacacaccacctgggggctgctgtgtcttgtttgcttttaaattttcaataacttggtaccagctgttctagtatttctatctccccgccaggaagctgccttcctcccactgcaacgccacctgtcaaaagcagagagcctgtgcatgccttcttttcagacaaaaatagttctcagatcacctgtggcctttgccatctctgatggaagatagtctcaacctgtttcctcacttcccctccaaaacccttgctccaggtttccatccagtatctctgccacctccagatctggagcttcctccagtccttgcccagcattaagctgggcacccgattctctgcagagatagccccaccacgggaaggaggcataggggcttccctgacatcaagagaagaggacgacacacgacccaagggtggaagagactgtggttccccaaagcttcccagtgcacttgagggttcacactctcccaccacatggtagcaccttgcctgggcagtggatccttcacctctgccctcacctcttccttattgtgatggttcccaaagggctgcgtacagagatggagggaatgacactgcccaggtaaccctttcatatacactgacccctttcttccttgctgaagacctcggctagctctgtcatcttcattttgtagatgcagcacagccgggtcttaaaagaggtcaaacagcagacaagctctaggcctgtttaactcgtgtgttaaccgggtcatggagaggagctggacaagctgctctctgccatcccctctagcaccatttggtgacttaacttggacaacagccatgtatgggaaatattaaaagcaagtacagccacagcagcagctgctggggcctcggggtagcccaggccctgggagagccaagagggagggcctcaggccggcatcctacccttcagagggaggctcctttcctgttgctgtttctggttccaagacgccttccccaggaccatgagttcaaggagggttcaggcataatacaggcaactcccaatccgctctagaagagggaaagtttccatagtgcagagacactccctgctaccaagaaaaggtgtccgtgagcccatcctgacagacgagatgcgctgaggcctgtctcctgcagccactggcttcctgtcccagtgataggcttccacagccagtacaggactagttccgacgcgtggtcgacgatatcccggtaattccggaccggtaccagcctgg

SEQ ID NO: 431155 - DNA, 1842 bp, Homo Sapiens
  misc_feature (1570)..(1570): n is a, c, g, or t
  misc_feature (1577)..(1578): n is a, c, g, or t
  misc_feature (1627)..(1627): n is a, c, g, or t
  misc_feature (1635)..(1635): n is a, c, g, or t
  misc_feature (1644)..(1644): n is a, c, g, or t
  misc_feature (1660)..(1714): n is a, c, g, or t
  misc_feature (1737)..(1737): n is a, c, g, or t
  misc_feature (1739)..(1739): n is a, c, g, or t
  misc_feature (1741)..(1741): n is a, c, g, or t
  misc_feature (1743)..(1743): n is a, c, g, or t
  misc_feature (1745)..(1745): n is a, c, g, or t
  misc_feature (1750)..(1750): n is a, c, g, or t
  misc_feature (1754)..(1754): n is a, c, g, or t
  misc_feature (1787)..(1787): n is a, c, g, or t
  misc_feature (1809)..(1809): n is a, c, g, or t
ggtttccggaagaagtctgttctttaatacctaaatgtttccccaccgcgcctagaatcagaccactgagaaaacaggaagtattctgtccctttaatagctttgttttaggggtaactcccctcgccttgtggggaggcttaggacgggcgggtgcaatcctcgaaggggagtctcagcgaccatgggggacaccatccacatgcaggcggtagttggggcctcggcagcgcctctcggggtgccgggggtccctgttgcccctcagtgccctgtgggccaagggctgcaggggccggctgttaccgctgaggctctggaagatctgagatggaggattctggctcaggagtctcagggagtgcatctgaagggaggtgatattgagggcccggtcaatgaggatccaggtgacagtctcggagcagggcggggtgctgagagagccctgataggtgatgaagccgaaggattcagggaacaggagctccaggctcaggtcttgaagaaagtaggcatcattcttgtaggagatgcgagtgatggtgtcgcggttaaggaggcgactgaggaatgggttagaggtactggcaacgttgacaaagaggctgagaatggccaggccattggggccgcgggaggcagcgctgaaattcccgtagagttcctggttgaagtgaatgagctgcacctcagcagagaagccctggtggttgatctgatgttccgagccggctccgtcgcgagctccaaacagcagccgcagttcactgagtcggtggctgtaaaggaggggacctccagacacattgaccacaggtcggggtgcaggcaggaaggagacatgtcggccggtgttgtacaaggttccccggagcttctctcctccagtgctgagccttaatgggggcagaaaggggtcataaagaaccctcttcagctccacatccacggggctctgccgcttccccacagcacacagactccacgctgcattcaccaggccccagaaaggaggccctggcacgaagtttccctggagattatccttgtagctccaccagtcctcggggtcaggtgctggtccgatgtgagctgctgcccccagtgcagcccagagtaccagcgctcgaggggcgctcagacgagctgcagcccccatccccaggaggcctccgagggacccctgcccaacgccctgcccccctctctcagctcctctgtcccctccttctgggaccctgtccctccaggacttccagctttcctctcctccccacagggagtcccagttccccaaatgccaaagcagccagggactgagatccgcccttcaaacccactcttcttctctctcccgtctctctgtgtctttcctctttcctctgctcttttcccggaaccctccagtctccctctagctcctgatcttcctactcctctcagccttctgctgcccccagggctacctcttggttcctaacccacacctcctctccgttctcttttcattaagctctcccaagccacctgactccaggtctccatcccgcatctcctcctcctcctncgtgtgnngtttccagatcctgcctcttctcccctctctccttcttcacctcctccngccctccntcagtgtcngcctccagcttcgtgnnnnnnnnnnnnnnnnnnnnnnnnnnnnnnnnnnnnnnnnnnnnnnnnnnnnnnncttgtcccttcctccctcctccncntncntntctcntctnccgtggtgttatttaattttgttgttgagctgngggagcaggtgatctcatagcngcaaacactcctcgggttggcttggggtgggat

SEQ ID NO: 431156 - DNA, 349 bp, Homo Sapiens
tgtgactacgggggaagatgggggcatcgagggtggctgagtgagtgttctaatgattcctagacctacagtcccttaggaactgcgtggctatcacactgaccgcctggacctgttgggatgaatactaaaaggtggctgtaaaggaggggacctccagacacattgaccacaggtcggggtgcaggcaggaaggagacatgtcggccggtgttgtacaaggttccccggagcttctctcctccagtgctgagccttaatgggggcagaaaggggtcataaagaaccctcttcagctccacatccacggggctctgccgcttcccctcaggcctttccccgtagtcag

SEQ ID NO: 431157 - DNA, 2045 bp, Homo Sapiens
  misc_feature (46)..(65): n is a, c, g, or t
  misc_feature (70)..(76): n is a, c, g, or t
  misc_feature (78)..(80): n is a, c, g, or t
  misc_feature (83)..(234): n is a, c, g, or t
  misc_feature (237)..(240): n is a, c, g, or t
  misc_feature (615)..(615): n is a, c, g, or t
  misc_feature (619)..(620): n is a, c, g, or t
  misc_feature (634)..(634): n is a, c, g, or t
  misc_feature (641)..(641): n is a, c, g, or t
  misc_feature (645)..(645): n is a, c, g, or t
  misc_feature (649)..(649): n is a, c, g, or t
  misc_feature (724)..(724): n is a, c, g, or t
  misc_feature (1152)..(1165): n is a, c, g, or t
ggggggcgcccccccccaaaaaaaaatttttataaaaatttttttnnnnnnnnnnnnnnnnnnnnaaaannnnnnntnnnttnnnnnnnnnnnnnnnnnnnnnnnnnnnnnnnnnnnnnnnnnnnnnnnnnnnnnnnnnnnnnnnnnnnnnnnnnnnnnnnnnnnnnnnnnnnnnnnnnnnnnnnnnnnnnnnnnnnnnnnnnnnnnnnnnnnnnnnnnnnnnnnnnnnnnnnnttnnnngccaagggtttaatatttattaggtttgttttaatcaggaataaatacatgatttagcaaagtgtaatgcttcccactgagaaatccctctgggtgctccccaaatgttccaatcacattcgtcacaacggaaaacaacacataagatactgtgcagacatctggagttcagggggtcaccctgccttatgcgggaagtcaatgtccacagtgttacattcatttctcatacgttggctggttcctttgaaatagccttttggaacggttggggaaaccacagatgtctccttgtataaacacactagaatctatgatacagaaaactgtgtaactgcacatacacataccagtagcacgatgggctcagatggncggnntgcttatgtgagcngagaganaggngganatactgctagcttgttcccctccttccccaggttccctttgatacagggaaacatgagttacagattcatctgcngtccactctcttcctagtaggatttggttgggagcttctccttctctggctatacattgtgttttctcccttgtctcttaaaattatgcatgacatcattaatccacttggactccccatctttcctggagctgagcatttttcctcatatggatgccagacccttcttagaataaagtaccgggtgagttaattctttagactgtatccatttcttttctaaaaaatccagctattcttacctacccgatccagccagcccttccactctgaagagcagctggaaaatgagctcctgagtgtccctcacctgtctctaattccatcctaagccatgagctgatttctctttttacacatttgtttatacattttttccctgtctacactgtgaacacctctgttggggggttaggacttacgcatcnnnnnnnnnnnnnnggcttgcctgacaccttacagaggacttaatgcaatgcctattcgggcaataaatgaatacttgatgcattcatacaggcaagaatcccagcatcccagagaagctctgtctgcgctgcaaagccatggctgcagacatcagggaagctggtgcagttctagtctcgcctcctcgatttccctgccagcagtcttcctctctctcattcttctggccctctgcagaaccagggaggccaactgacttccacccatatggctttggtgcaggagcagaccaaaggtatctcccaattgaaggctaagaagtcctttgggctaatgtttagtgtcacgaagttcctttaaaaagagaggaaagcataccagaagtccctatggattagttaaagtagttccattcagggcacccatctgcaaacccagaccttctgccaggacacagcttttgtttcctctccctctcaggcttgcccatacagaagttctctccaatgaccttggagtgtaactgtctggacaggtccagttccttggagagcagtcctggtgcccttttttgtgagagtggttttgtccttcccacacacacaatgtgtgcatacatacatgctgggctcttccaagcatcgcccgacatgtcatgatccaatgtttcgtgatgccacagccctgatcagacaccagggaggggttcctttggtcatgatgtggatagagaagatgcgaatttgagtctccatgtggcttctcttggcttctaaaatacgtgaggctcccagggatcagggaacctcgcttttcgcaagatcccaggcaatagttggaacttctgttccttttgggcatgaaccattgtgtctgttcttggctagtcatc

SEQ ID NO: 431158 - DNA, 486 bp, Homo Sapiens
  misc_feature (458)..(458): n is a, c, g, or t
  misc_feature (466)..(466): n is a, c, g, or t
tttttttggcttgctggacaccttacagaggacttaatgcaatgcctattcgggcaataaatgaatacttgatgcattcatacaggcaagaatcccagcatcccagagaagctctgtctgcgctgcaaagccatggctgcagacatcagggaagctggtgcagttctagtctcgcctcctcgatttccctgccagcagtcttcctctctctcattcttctggccctctgcagaaccagggaggccaactgacttccacccatatgggctttgggtgcaggagcagaccaaaggtatctcccaattgaagggctaaggaaggtcctttggggctgaatgtttaggtgtcacgaagttccttttaaaaagagagggaaaggcattaccaggaagttccctatgggatttagtttaaaagtagtttccatttcagggggcaccctttttggcaaacccagnaccttttngccagggtcacaggttttgt

SEQ ID NO: 431159 - DNA, 1661 bp, Homo Sapiens
  misc_feature (1641)..(1641): n is a, c, g, or t
tttttttgaaatttcaaatgtcctttattaaacctgattgctgactaattagagcctaggcaagtaggaagaaattgcacaactgatatttaactacaggttttttctctggacatattgacatattaaagtatttctcttcttgaaaatattttaaaatacaattgcagtaaaaacaattgcatgtagacattattctccatctgttttttttgtaggagactgtggaagacaggagggagttgggcgtgcacacagaatttaccctaacagctttgttagggaggtggtcccaaatactttatattgggactccgtactcaggtgactttctggttaaaaatattgaagacggatgacaactgggctttttttactttgacaactgagacaaaatgacaaattgtcagtgttcagagatccagaccaacttctcaaaaaaatatgtttacccctgatatcatcattattttagcccaactgtgccttttggggtgatccacaactcattactggctttttgttttaagtataagaatttatagggccttcaagcaagggcatcaggtaaataactagcatgtgtgtgatggctgtaaagcacagaccacatttaggacccgagagccacacccacttcctaccatacaggacttaccaggtgactgtcactttgtagtctggctaatcagaataagacttccaagttctgtcatatattgacaagaaaggctcttgaaactcctttaattagacacattgcagtactattgctattagggggtctgttttataaatattttcttatcatacttttattataaacttttttagtatgaaatttgcttcaactgttacaaacagaatcatttcctatggggtcccctccacataaggaagttattcctgtaattactatttttaaatagtcttcttaactgtgggaaaactttaccctcccccagcacgcacacacatactctcctgtgatgaggctgaatgctatccagtgcactggttcagtcagcaatctgcccatgttcctgggagaaatcagtcccagtccttttgctgtcatggtgtctccagagccacccctttctgtaacaagcattttgaaattcatccatgctcatctcatttggatttcaatgtttcctcccactcaacagccgattcggagttcttgggaattgttggaaatattgattgcattttacttcgaaagtcgttcatactgtgaactcctaaagctttccagactgcgaagctaatcacaccaaccccacaccatgcatacagggagccccagcccagagctcgcaaggcaagggaagacccgctttccggtaatgcagccgtggccatacttcccttattgaaccattcagggcttttctttttagccaatgataatgttgtaataaatccagctagcattcccgctgcagcaacggtaccaaggaaaattccacctttaaccaggaaaagccggtcattcgtggaccccggagcctccagcccagaggccggctgcccagttgcagcgcccgctgtctccatgtttaggtcgcctctagtgcgtccgtccccaactgggcccgggtggaagcgagaaccaggcggaggagaaaggttccntaccgcctcctcctgtgcaa

SEQ ID NO: 431160 - DNA, 570 bp, Homo Sapiens
  misc_feature (522)..(522): n is a, c, g, or t
  misc_feature (528)..(528): n is a, c, g, or t
ttcaaagagtcattcaccagatatatttgaagtctaagctctttgagctatacacgtgcacaaatgattcagttggtggaaatcttccccttccccttcattgttaaagttttcaaacttaaaatagtgctaaagagatttgcataatgtgcgtcatggaaatgctgaggcgattctgactttcacagtgctaggaggttcccttgcaacacttcaaggagtctttccatttcttatcgttctcctaggaaaagcccctcttttcccccctccccaaacccaacctagtgaaagaattacttgatctgagacaggttaacattgacacagagcaataagttttactaagactaactccagaggccatacacttcattgtgtttcttttatgactacacagaatggtcatttcaacttttactaagttgttaaaaatgtcagatgtgtcttttaaaaaacatttaaaaatcattttcaaatactttctctcatctagatttctttagaacctgcattctgganattcanggtagcttaaaaaatcaagtcaaatgacccacagatgattga

SEQ ID NO: 431161 - DNA, 1174 bp, Homo Sapiens
tttaaatttaaaaagatgtcctcactgcacaagtgactacgggctacaggcaaggatgggagacggaggcttcaacacaactcattgcacttagaaccgttactaaccgaaacaccatttgcttgtcaacaatgtacccttgacagcagggagaaacttctttatagtctctgcttcagacaagatttacagctttctccaaggccagaggccaattgtgaccacaagtcttgtttcttgtccaccagacccaatcctctggcaccttgtaccccccgttcctcagcaatatgctcggcctaggttccagaggcagctggaaggaagcagctatgggctcattcagttctgtttgcccaaatccagaagccctaggaaagtcccgtctgagtcttgactcctgacccttgcagtggctggagtcggtactggtgcacacccccactcccacggtgtgggtagtgctgtgaattggaaaccgcagataccctggaggcctggtagacagctgactgcccagcactgggcagactgatagtccgtaagtctgatggcaatgacgacctagagttctgaggaaaggaggtggaactcagagttcctgtgctggactgagaaactgaatctgaggttggcgagtctgagggtccctgcagggtagggctagcagcactagaagggcagctcctccttggaagattgctgccagtgctgtttccagaatgtggctggctgctaaaataccctggtgtccccgtaaatggggccaacgagtctatggacacagggtgggcggggctggaataggacgtggaagagagggatgattctgaagaaccgtgagagggggggtttccaggtctcagtgcagtagttcgataactgtatcctggagactgtgtaggatgtcctctgaagggggaggaactctgctgaaggaggctttgtgattctgtccgaggactatcacactgcaggagctagacaaagttgggaggaaacgaataaggacgcgaacaagtcccttaaatggctggtgaacatttataataccctacattcttttttcttcatcttttaaccatgtatctttttaggaaaccaaaggcagtaaaatgtctgtctttgatcaccgtattcatcttctggcataatttattacctgaggacaagc

SEQ ID NO: 431162 - DNA, 1415 bp, Homo Sapiens
ggcctgggtggcgaattcggcacgaggctctgtctccagtcacaccaccccctcccaattcaggctcaaagagtccccagctggccacacctggctcatctcacccaggagaagaggagtgtcgaaatggatacagcctcatgttttcaccagtcacatctcttactactgctagtcgctgcaacactcctctacagtttgagctttgtcaccgaaaagacctggatttggcaaaagtaggataccttgactccaacactaacagctgtgctgatagaccttccctactcaactcaggtcattctgacctggctcctcatccctccctcggacccacttctgagactggtttcccaagcagaagtggagatggacatcagaccctcgtgagaaactcagaccaggcatttcggacagagttcaacttgatgtatgcctactcccctttgaatgctatgcctcgagcagatggactgtatcgaggatctcctctagtgggggataggaagcctttacatttggatgggggatattgttcccctgcagaaggattttccagcagatatgaacatggcttaatgaaagacctctctcgtggatccttgtcacctggtggtgaaagggcctgtgaaggagtcccatctgccccccagaacccaccacagaggaaaaaagtatccctgctggagtaccgaaaacggaaacaagaagctaaggaaaattctgctggtggggggaggtgactctgcacagagcaaaagcaagtctgcaggaagctgggcaaggcagcagtaactccgtttccgacactggtgccccatggtgtgcagggatcctcagcccgaactccatcttcccctcacaaaaaattctccccatctcattcctctatgtcccatttggaggcggtaagcccatcagattccagaggcacttcttcatctcactgcagacctcaagagaatatcagcagtaggtggatggttcccacatcagtagaacgactccgagaaggagggagcatccccaaggtcctccgaagcagcgtgagggtggcccaaaagggagagccctctcccacatgggagagtaacatcacagagaaagactcagaccctgcagatggagaaggcccagagacattaagctcagcactctctaaaggagcaacagtttacagcccttccagatacagctaccagctcctgcagtgtgatagtcctcggacagaatcacaaagcctccttcagcagagttcctcccccttcagaggacatcctactcagtctccaggatacagttatcgaactactgcactgagacctggattccccccctctcacggttcttcagaatcatccctctcttgcacgtcctattacagcctctagaggtgtcgggtgccgagctcgata

SEQ ID NO: 431163 - DNA, 462 bp, Homo Sapiens
tttttttggatcaggagttttattctctctttggaatgactcccagaacagccacttatgcccagaaaatccatgatcccatctcctccatgatggaggaagctgaggaccagagaggggaagggagtagactaagggagtagccagtgcatcccaggagcaggacagaatctctgacccctgacccctagcccagtgctccttccaccacccctggctgctccttcatggaccaatgaggtgacagaggcagggcctagttcacaggctgacaagaatctgcggatgtcctcagatgtcccacaaggtgtcctcctgcagacgcccaacccagaccttgtctgctgcaatatcactaccagtgcttgcagacctccagagacaggagtctcaccacctcgcaaggcagctactccatcctgaccctgtggaaggtgtgcaaatgtgggggtgggtggggac

SEQ ID NO: 431164 - DNA, 901 bp, Homo Sapiens
ttaaaatccagttttggttcttctgggctgagtgggccctggcccttcccataggctgtggctcccctgggtgccccctctccagtggagctgacccaccgctcagcgcttggccttgcagcccttactaaaagacttgaaagtccctgggttcaccccctgagtgaattaaaggccagaggggcccgaagggcactgtgagggacagaggctcacctgggcagtgcagaagccggccgcgtgtccctccttacaggggatgaaatgacctggggaggaaaccccagccctgccctggaggttccagagtaggcgggccggtgctgtgaggcttcacaacctgctgtcccaagcacgcttgagttgtatgtgagtctgtgccgtgccgtgccgtatgcttcagctcctgcaaccccggctgagctcgatttttacctaaatatcagtctccacgggaccccaccttcattcatgccttcttgtccctggggcaatgtgtgtgcttcctcgtcccaatttccattccctggcagtgaggagcccatcgtgccagggggccctgccccacttgtccctgggaaggaataggagggtttgggtgtgacctcacagtccagaccagactgtcccagtcctatgtcagggacacccagatgtagaagctgactgagacctgctgcagggcgtgggtgctcccctctgcttggaggctgtccctggacagtgacccacccactgaggaccaggctgggtgtaccttgagctgggcacagcagcctgtggtgttgcctgtgggtggggagggccccaggtgtgcttctcccgtagcagtcctaggcttctctccctgtgccctgtgtcacctggatcctccagtaaagtgaaattcagcactgtaaaa

SEQ ID NO: 431165 - DNA, 2216 bp, Homo Sapiens
  misc_feature (539)..(598): n is a, c, g, or t
gcaaagtacgcgttgttttttcgcggcgcccaaggtaaatttattggccacatttttgtggaaaccctcttgaatgcacggggttatgggaaatgtttttggttatatatgccgcctgggtgaagaaaagggttcacccaaagtcattaaaatttggttggaatgggggtctaagggggatttgtgtttgtatttctctccagatgcggtgggaaataatatataatttctccccagacgtgttaaatttggtgcacccttagttaggaggtacatttgttttatttcgcaccaggccattaggcagcataaaatattggtttttaaaaagggaggtaatgggctttgtggccaagaaaataaattttttggaaagattgagccataaataggttaaaggttcttgggaattccttattggttattttttacaaagattcaaaatattcacctcgaccacctcctaatgtgagaagaatgaaggttcactggtttcaggccagcacagagatttgccaaggaaatgcatgtgagggcannnnnnnnnnnnnnnnnnnnnnnnnnnnnnnnnnnnnnnnnnnnnnnnnnnnnnnnnnnnacagacccaaagaggaaatgacaagggattctgcccacaaggcactcacaatcactagaagcagatcttgagaaggagaataagttttggttatgatctatcatcctaaaaggacagaaaaaaatagcggcaagcacatacaattactttatactctagttatgaaattgggcatatttagaggtggcaaatgttgattatccagtctatattttacttaaagtgttgtaatatgtcatacaaggaaaaaataagctgttcgaatcttcatgcatgagggagaaggcaatgaaaattcctccctccatttccaaacccaaatccttataattacattcaggaatcttttatagcccaaggacacaaaataaaagacaataggatgataacttcagtccatttattttggatctaaagagatgcatgcactaaacttgaagcattctaagttattgaaatatttacatcattgtacatgaatgtggaggaaattttcttcctatcttgagataaaggtgtaatagatttctggactaggctttcatatttaaagtgagttatgatttttcttaaatgagggaggtattctattgggatcaaatttatcacaacttgacccggagtgaacatagggtacagttttggaccttttctatctaattgcattatgaatctagtaaggataccactactgtaaatagtcagggctttcactgttttatttgctgtagctgaaaaatatcttatttggtttgaatgttcttgctctaattttactttgccttgcaggtttgaaacacagcaaacatcgaagttcaaagtacactaaccaaaggagggctgggcacaaacaatatgacattataaaatttaccaggtttggacatagaaacagattcagatcattatcaaccacatagaggattatttaagtggacttagaacagacatctctccatgagactcagtgaataagaaccatatcagtaaaacccatacctcctcacaggtagaggtaggagacccaatagaccagattaaacaggcagaaggcagtggggaagaagatccgagcataggagtccattttggcaatgcggatatgtatcctcccatgtctccaagctcctgttcgacaatcttcaaaacagcagaaaaaactggcacagtccttgccgtccagacactcatagccgtactcttcatctctctcttgaaggtgtgtagcattattcatttgaatggttgctgatcttgggcggatatcaatggtaggggcagggtttttcttctttttatctttgtccttgcttggtttccggttgctgacaaaataatgcaaggtgccatactccaccagagcagagaagacaaagatgaaacaaacagatacaaagagatccatcgctgtgacataggagaccttggggagcgatttccgggcaatggtgctgagggtggtcattgtcaggacagtggtgatacctaaagatgttctggctggaacagcatccttattgatccagaaagacacccaggataggacgacaatgagtgtgcaggggatataggtctggatggtaaagtatcccattcttctgctcagatcaaagtagac

SEQ ID NO: 431166 - DNA, 489 bp, Homo Sapiens
ctgggtcgtgatgtaaaaagttatttttattatgacttgcagtcaaaaaagtttgaaatacattggtcaatagagaccaccaaaaataataaacatggagtttccacgaaaaataataaacatggagattcctggtgttaacgtcaataaggatgagtactgaatgtaaaccagtcttctgctctggaatccaaggtaagctacagagttctcagtttaccatcaacactaaggttttacttgtttttcctcttaccctacactttcaggcaggggcatgggcaacagaaggaaggaggaaaacccctagtggcaatgatttacttggagtggtatcatgttcttttgagaaaaggcattttttaaaagagtaattcccaggtggctaattaaaaggctttccttctcccctataaagtcatactggtagcataaaagtgaacaggaatttgtcattacagttttgacattataaatggtctaaaccac

SEQ ID NO: 431167 - DNA, 1557 bp, Homo Sapiens
  misc_feature (264)..(299): n is a, c, g, or t
  misc_feature (680)..(680): n is a, c, g, or t
ggaaggtggagtggagctgggtgaggaagtggggccggccgccaggaccccggccccccagcgccagcacacgtttctccaccagcgtgcagtccacatcgtcgtcctggacgatcacgtcctttttcaagatcttgatggcgtagagctcatcagagcccctgcgctcggccagcatcaccttcccaaaactgccttttcctagaaccatgaggaagctgaagtcggagatgtgcaggcgtcctggactcgccccgaagaagnnnnnnnnnnnnnnnnnnnnnnnnnnnnnnnnnnnngggatgggagaggaagaggggcccatccgcacccgctcatacaattccagggggtagttacaagcctcaaacttctggaggaggctgcagttgtcagcatcggccaccggcacattgtaatactcgccctcctcctggttcagtaacttgtaccagccatccacgggcgccttgagcagctccgagacgccaaaggacatggcccccatgaagtcgttgcgggaggtccggtcccagtcccacacctccacgctgagccggcgctccacatcccctggcttcaggttgaacacaaaggtctcattccacacagggtttagcgtggctttcaccgttcgggtcttctgtttcgtcaggttccgagggtctgggatgagcttncagtttcacatagggatcagagagaccgttggggtccctaggaattaggttgcgggcctcgccaacagttacgtggatctcatctgctgtggggagcccggatctccagctgcaggcgcccgcggcgctcggtgtggtccacaccgcacagggagggcacgctacgcacacagcgccggtgcacgttcatctcgcagcaggagcatttcatgccctggtgcacaagcccgtagaggagggagccacagtggtcgcagaaggtggggctgctgtagctatgcaggcggaacttgtgtttgttccgggggtcgtccgtctgggggcccttcccagcgcctggacactcgaaggtcacaaattcgtggcatcgtcgatgaaccacaaagctgcagacttgacattgcaggccctgctttccgataccccagatgaagtcggtgcagtggctgcagaaggtgggctgcttgaagaagcgagcggtgaacttgtggctcttgacttcgtggaccaccttctgcctcagagccccctttctgcaaaacaggggccggggtcccccctctgaatcgcctacgccggggcccagaccagccatggccccagaaacgtagcagggaccaggatcctgcctttcttgggggaaacaggtggaagggagaggagctggagactcgaaggatcaaaggagccacagggaaattccgaggtgggcaggagaggggcaaggcacctccaggtgcggagcgcgccaggcagggagcggcaccccgggcgcgccggctccgccagggggagcgggcgagtggggaggaagagccaaaggcaggggcgccggcagccggaggcacgggcggcggcggtgggagctccagctccg

SEQ ID NO: 431168 - DNA, 1557 bp, Homo Sapiens
  misc_feature (30)..(30): n is a, c, g, or t
  misc_feature (60)..(60): n is a, c, g, or t
  misc_feature (100)..(100): n is a, c, g, or t
tcccaatacggcctgaataaagcgaattancctcctgggggcgaataataaatcctggantccccacagaaggtccctggtccgtgactcccatcccatncatgtgttcccttgcacatccccaaagtccagcaattttgatatgtcctttctgaatcccaacatgacgttatctaacttcagatccctataaatgattcctcttttatgaagaaagaacaatccgatggaaatctctgccgcatagaatactgcttgtggttccttaaattttcctacttgctgaatgtggtacatgaggtccccaccgttgacatattccatgacgaagtacagccgatccactgtctggaagcaggagtgcagctgcgtcaagaacgggggtttgtcaagcagggccaagactcgcttttctaccatggtgcactccacgtcatcatcctgaatcaccacatccttcttcaggattttgattgcatacagttcttctgtgcccttcctgtcggcaagcatcacctttccaaaactcccctttcccaacaccatgaggaaattgaagtccgtgagtttcactcggtcaaggttgttggaaggttgtttcctgtcttcagagggactgatgactttgttgccagcagggccaagtttggctttctcgaatttctgcctgagttccatgtttccttcctcgtccccttccggaatgggtacgttgtagtactcaccttcttcttggttaagtaacttgtaccatccactggccggcatcttcatcagctccgaaactccaaaggaaagggatcccatgaagtcattccttgttgttcgatcccagtcccagatttctacagacagtcgtcggtctttgtctgaaggtttcaatttgaatgtaaaggactcattccactgcggatttagtgtggagcggatggttttggttttttgcttgctttcattcttgggatcaggaataagtttcagcttcacataaggatctgaaagcccgtttggatccatagggattagattttttgcatctcgtactgtgacatggagcttttcatcagcaacctcagcctttaggtaaatccgccccctcttctcagtgtgatccattccgcagaggctggggacattgatgacgcattgcttgtgaacgttcatatcgcaggtgtcacatttcatcccttgatggataagtccatagagcagtgacccacagtgatcgcagaaggtggggcttccgtaagtgtggattttgaacttgtgcttgctcctggggtcatcagtgtcgggtcccttatccgcacccggacaagaaaaagtaacaaattcatggcacctcttgtggaccacaaaacagcaaacttggcactggaagccttgtttcccaaacccccagatgaagtcggtgcagtggctgcagaaggtgggctgcttgaagaagcgcgcgatgaatttgtggtccttcacctcgtgcacgttcttctgcctcagcgcccctttgcgggcgaagcggttggccacgtcctgagacgccgtggagtcgttgcccgg

SEQ ID NO: 431169 - DNA, 658 bp, Homo Sapiens
agcgggggcgagtgacagccccggctccgcgcgccgcggccgccagagccggcgcaggggaagcgcccgcggcccgggtgcagcagcggccgccgcctcccgcgcctccccggcccgcagcccgcggtcccgcggcccggggccggcacctctcgggctccggctccccgcgcgcaagatggctgacccggctgcggggccgccgccgagcgagggcgaggagagcaccgtgcgcttcgcccgcaaaggcgccctccggcagaagaacgtgcatgaggtcaagaaccacaaattcaccgcccgcttcttcaagcagcccaccttctgcagccactgcaccgacttcatctggggcttcgggaagcagggattccagtgccaagtttgctgctttgtggtgcacaaagcggtgccatgaaatttgtcacattctcctgccctggcgctgaccaagggtccagcctccgatgagccccggagcaaacacaagtttaagatccacacgtactccagccccacgttttgtgaccactgtgggtcactgctgtatggactcatccaccagggggatgaaatgtgacacctgcatgactgaatgtgcacaagcgctgcgtgatgaatgttcccagcctgtgtggcacggaccacacggagcgcc

SEQ ID NO: 431170 - DNA, 961 bp, Homo Sapiens
  misc_feature (407)..(407): n is a, c, g, or t
tcattgctaggctgcccagggaggaaaccttgggtgggtaggctgtttgagtacagggagaaaaatgcccaggagagctggaaggcagggtggggtggagtggtgtggggccccccaccaatgtcaggggctagtccaccagagcccccggtctgctgctttgtaggtctggggcaggaagagcttgcccaggcagatttctaacttgggctgaagcaatgccctttatgcagctcccagacctcagcccttgaaattctcccaatccgtgggcagtcccatgggttaagggctgaaaggcaaggatgagaaaagccctggcctccctgggacttggaggagtcactttctgtcaggccactgtccagcaatatggacagtgtggtccaggctgggtttgctgcttnctcttgggggaggatgagagccctagtctctgagggaagcagccaggagctgctggctaagcctgattccccagaaccctggagcacagtggactcccagggagccctgccttctgtctcatttttgtcttagctctgaggcaaaggagaatgagtgaacaaggtggtctggctgcaggctggactgtggctggtttgtctgtctagtagggaccaagcagggaaaggccacgaattggaagaggcaagtacagccccgcacagggaactcacagaagggtcttaaccctccccacctactgtgtcctgtacccaagcagcttcaatagctcaagagccctggggcaggcacttgattcacacagcctggctgaggactggggattagccagagaggtccctgctctgtatagggtggcatcaaacccagccttcacgggcctcaaccgtagtccctgtgctgccctcccttgtagaaagtaaagaaaatcagttctgaaacactgggaaaaagctcacctctcccagttggggcgaacacgcccacgcgtccg

SEQ ID NO: 431171 - DNA, 1266 bp, Homo Sapiens
  misc_feature (50)..(50): n is a, c, g, or t
  misc_feature (83)..(83): n is a, c, g, or t
  misc_feature (85)..(85): n is a, c, g, or t
  misc_feature (185)..(185): n is a, c, g, or t
cacacagcccttgccgcccgtgtacacatgctgtgtggagccgctgatgntgaccgcgcagaccacctcgccatgggccagcntnttgcagctgccgggcgtgccgcgggatgcccgcgcctaccagtgcatccgaggggaagggaaccggctgcatctgcccgtccgcagacacgtggaaggantaggccggctttcccccagggatgctgggtagggaggaagagacggatgaccctcggagatggggatgagactcaaatgccatcacgggggagcgtccgtacaccacagagctgctgacctggggggacaggtggaggctgacgtaggagctgggcacggagaggttctcccgttgagagtgctgtgggagcccaggctgaaggacgtggtgaagggactggacagagtcagggggctcctcagggcgacgctgtccgtggaaggtgctggcttggcagcaagctggcagaggtgactggccgagctgggcccgggggtggaagcgtcctggggcggggaggagtcacaggatttggaggcaggagtgctggcgggaaggtcattcaggatgagctccttggctctaggcagcggtgagccaaggctagaggccaaggaggctggactgtccaccaggtcccgacgggcaggaatgcagatgggtacctttccgcagggggtggtagccgggctggggggctctgagggttggtcctcgtccaccaccagattgtaatcactcttgtcttcgtcgctttcataaggtcctgatggctccttctcatctgctctctgcttcccgccaccaccagggccactcggtcgctcctcctccacgagactctcagggggcgagggagatgcactcctgctcggggctctctccactctggacccctcggcctccacgcccgcacggtcctccttgacagccgccgccagctgagcctgggcagccagggctccagacagagcaagcagccccgtagcactgccgcccaccagcccggctgggcggggggtgaggggcacagggggtgcgtggtgggacagcggctggagctgctgctgcccgatgaggctgttcagctcccccacggtgacctgcttggcgcgttctacggcctggagcacctgctgctgatgctcctgggtcaggaaggggataatctgagcgcagataccgctcagacgcttcacaatctcctcgtgccgaattcgccacccaggcctcgctaccttaaaccgtagtagtactgc

SEQ ID NO: 431172 - DNA, 1891 bp, Homo Sapiens
gcggatgtgatagatacattttatttccaccgaggtcccctgcccatcggcccccacatgcagcaggggaaggtgtgaagccgttggccagagagcagatgggatgtacggttcctaggcagggctgggaggcggctgctaggatgtctgtcctggctgctgattcccctgggagtctggacttcgggtacaggaaggggggtcatgtctcagtagaccacctcatacacggtggccttcttgtcccccgagcctgtcacgatgtatttgttatttctggagatgtcacaactcaggactgaggacgactccttggactggaaaatgctggccccgtacggcgtcctccaggcgttgagcaggttgtccttcccggtgctcacaaaccaccgtccgcaggaggcaaacttcagggacagcacgcagctctcgtggaggtgcagctggtatttctccggcttgcggacgtgcaggatctccacgttgctactctccattccgaccgccagccagtcctggttagggcagtggcccagggagaaaatctgggagctgaagtcatgctgctgcagctggcggccctcccgcaggtcccagcagcgcaccgtgttgtccaggccccctgtccagagccgagtgcctgtaatcggaaatatcaatgcaggctggcgccgtccgtgtggccctggaactgcctgtaccatagtctgattctgcaggtccccagaccacaatgtatgccatcgctgcagcaggagaagcaaaccttgagcgtctggggctgacggccagggcgtagcaggctggggctgaggaagtcagctcggccttgatacggggggtgggcgccgccaggtcccaaatggacaaggtgctggcctcaccgcccacgatcagactccggccatccggcagcaacttgcaggaacgaatgtagttgtctcggttcaggcagtcgagctgggccacgggcgtcttggccccaggctggcccacgtcccacaccttcacacagcccttgccgcccgtgtacacatgctgtgtggagccgctgatggtgaccgcgcagaccacctcgccatgggccagcgtgtgcagctgccgggcgtgccgcgggatgcccgcgcctaccagtgcatccgaggggaagggaaccggctgcatctgcccgtccgcagacacgtggaaggagtaggccggctttcccccagggatgctgggtagggaggaagagacggatgaccctcggagatggggatgagactcaaatgccatcacgggggagcgtccgtacaccacagagctgctgaccccgatgaggctgttcagctcccccacggtgacctgcttggcgcgttctacggcctggagcacctgctgctgatgctcctgggtcaggaagtggataatctgagcgcagatcccgctcagacgcttcaccaatctccgcctgcttatgcatttcaatgttgagcctgtacgacatctcataatacatgacataatgtcgctgcatttccgtcttctcgctggccagcttctcacattctagcttgaggctgtggtattgagcctgaagaaactggaattcttctttgatgcggtcgcagatctccaagatcgagaacttgaagggctggccggactggagcggggtcgggtgccttccctgggggtacatcctgccgatccgaaaagccccccaggcgccaccagagcttgatgatatggaggcggcaagagtgggggaggctgaagtggggtggtggggaggctgcccgaagaaagagggaggagggagaagcggcgcggggcaagggaccctggagtccctggcgcgcccccaagcgcgcgcgcccggggtcgtgggagcccctccccgggttggggt

SEQ ID NO: 431173 - DNA, 705 bp, Homo Sapiens
  misc_feature (31)..(31): n is a, c, g, or t
  misc_feature (35)..(35): n is a, c, g, or t
  misc_feature (64)..(64): n is a, c, g, or t
aaattcaagaaacgggtcaccatcctggtgnaggnaggagagatgaggctgtttgacggggagntgaatgtgaagaggcccatgaaggatgagactcactttgaggtggtggagtctggccggtacatcattctgctgctgggcaaagccctctccgtggtctgggaccgccacctgagcatctccgtggtcctgaagcagacataccaggagaaagtgtgtggcctgtgtgggaattttgatggcatccagaacaatgacctcaccagcagcaacctccaagtggaggaagaccctgtggactttgggaactcctggaaagtgagctcgcagtgtgctgacaccagaaaagtgcctctggactcatcccctgccacctgccataacaacatcatgaagcagacgatggtggattcctcctgtagaatccttaccagtgacgtcttccaggactgcaacaagctggtggaccccgagccatatctggatgtctgcatttacgacacctgctcctgtgagtccattggggactgcgcctgcttctgcgacaccattgctgcctatgcccacgtgtgtgcccagcatggcaaggtggtgacctggaggacggccacattgtgcccccagagctgcgaggagaggaatctccgggagaacgggtatgagtgtgagtggcgctataacagctgtgcacctgcctgtcaa

SEQ ID NO: 431174 - DNA, 1004 bp, Homo Sapiens
tgttttctttgtgtttgtttgtccccgttggtccttgccaccccttcggtgggttgttctccctcgtggtccttctcagggagggctacccctttttctcccgcccggtttgggcccctggtatggccttccggacagcttcccaggctattcggcctccccgatatccacttgccatgtatttgatgagcgtgtcagtctcacagtttcgatatagatcagccatctgggtgcatcagttcagggccaggattatggatgcggagcccgacgctgccctgcacagctggtgtaaaagcagggcaccttgctagagagctccgctctcttcattgagccgatcgtcatgcttggaactccacagtcactgttttgtccccatctagcccagccagctccacatctgtcgtgttgctcatgtagaaagctccaaagaaatctacagcacggataccagtgcttgtccggacccgcatcacagcatcaaagccaacaaccttctggacatcacgacgcaggtcactcaggaaccgctcctggtcgttctccacctgaaaggaagcatatttgtagacagagccaccagtgagctggggcacaacagagagcgtgccacatccacatactggttagggaagagaaagagatctacacagcagccttgggccacacactctttggccagggtctgataggcacctgtctgaggctggaacagagtcttctccttgtctgtattgatcagcttcctgtcatctctgttcttcagtttccctggggcctctgcaatgggcagggatgtatggaatagaaagagcttccttgcacactcagcagccttcagagcctccattccagcctggatcaactggtacaatactgtctctgtttcccttgtgtctgcaaacatttctggaatctgatcccggacgcgtgggtcgacgatatcccgggaaattccgaccgtaccagccgcttttttaaccacggttcattagtgcaca

SEQ ID NO: 431175 - DNA, 756 bp, Homo Sapiens
tttcgcagaaaggtgctcctcacagatgaaacaatggtgacagcacacccgaacaaaggagggaagcagtttttatcccttatgcagcttgtgtcctgtctccattggctgtagctggacctcacaattgtaaattaaaccgcgactggctaataacttaaaactttcctatatacgggaaaggcaatagagaacaaaggaaaagaagaagttgcttgcataaagacttagaaaagtaataactatttccaaataaggaaggggcataggctgcaagctggaacgtgcctgtgagcatgtccagcacaaatatcttggttaaagtacaaggacatagaatatacttattcccttatatctaacagctacataggatagggcttaatgaagagtcattagcacagagcagaggaggcttgaaggaagttagtctttaaaagaaactattatttctaacacttatgatttattctttaacaagaaaggaaatttcgaaaaggaaactttttactttctacaggctgatgagtgcagctaatcctcattattataagcatcactattatcatcacttgcaagagccatgtgacaatatttagatgattctgggttcttttaaagtgcatacatactcaggattcctttgggaggatgcaatttcatttatatgaaaaactgtcactaccacagtcagctctaataatatttgatatcacctggtaataaaggtttgtcggctgggtgcggtggctcacg

SEQ ID NO: 431176 - DNA, 1913 bp, Homo Sapiens
  misc_feature (21)..(21): n is a, c, g, or t
  misc_feature (1675)..(1675): n is a, c, g, or t
acacaaagctttttgagtttnatttttttcctcaggttggagattcatcgtaacatgcatgcattttcaaacagtaacagggtctcaaactttttaaagcagacgttagacaagcacaggggattgaaaattcccatttaaaaaatggaaactgcagtgggatatggagaagtcacacacttggtggggtggtggtttgtcctgcttccccaaaaggtggatatgaacttaattcacattttttaatttcagtgatctgacctgatgctgggatgtgccgagcagtactgccccctcccccaagggtgttggctcccaccgcctctcacagtggctctgcgcaagggcaagaggctcctgtggaaacttctgccctgggatactggcacaagctgccaagggacagctgagtctccttttccccatggggcactcttcataagtggcacattctagaggagggagagggccacggtcactgacccctgcagatggctggtagattggggaacagttgtctgaatgggttttccctttcaggacctcctgcccgcatgactgccagaaagagatgaggctcctagacttggggggccacaggtttaaggccagagctctgagtgttgtttaaacgcactgtcccttctagcccccaacacctgagtaactcacatgctggggtgctgcagttttctctcccaccctgaattggtaaaaagacaactggggggtaggactggctactgcaaaaagtcctgggtctttggtccacctccccaaggtatgccctggcagaccatgaagacaggaaaggcagggcaggagtgtagcctcacgccctgagcgctaccagcaggcctgtttgaggccaaaagcacaggcaagagaaagagtcaagtagggagaggggataaagagctgcctgtggtgggaacttaagagactgccactgagaacagccacaggggccactcgtggcgcctgccacagaccagcaacccctgagctaaagaaggagaggtggagcactgcttcagtctgcgcccctcagctgtggcttcccggcatgccctgtgaccccaagccgcagggtacaggaaagaagtttgtgctgggggactcaaagacccagaggttaattaacaggaaccagggccaggggccttcatctagaggtcagtggagtctccagggcactcatcactgtggctgggagactacagtgtctcggctgcggacttgtggaagaagagggggaaggatgggagaaggggtgactggatgccagccaggaatcctggccttagccctatcctggcctcgcctaatcagccatgtcgttattcttacacctttcttcttgggagacccaacattattctgagatgccatgagactgtttagcttttcttcatggccccagggagtgaggctgagggcagtcacttcccctccaatgccctcgactgcccagtaaaagaatggcgggacccaaggaggaaagagtgggggcagacaacgcttgggggatcagtccactttctctacattcaaactgcagaccaaatagaataccatgacaaaaagaagagaaaggaaacttgttttaacccagataaatagcttttaaacatttgaaagcccaaaatttggggccaaactcaaggttttgaanatagaccagcgaaagaccctttaataaaaaattgaaaattccaccaacccccagttcaaaaggttttgaaccaggcaacaatacttgtttgaaaaacaaaaagcatttgaaacaaaatgctccctttcaaagtttaacattttccaaacaccaaacttcccacccacccaccacctcatgtttaaacagtaaatccttggggtcgtctttactagtaagaaaggttacccttttcatc

SEQ ID NO: 431177 - DNA, 318 bp, Homo Sapiens
  misc_feature (24)..(24): n is a, c, g, or t
  misc_feature (59)..(59): n is a, c, g, or t
  misc_feature (99)..(132): n is a, c, g, or t
  misc_feature (292)..(292): n is a, c, g, or t
  misc_feature (297)..(297): n is a, c, g, or t
aaaccacagctcaaaatgttatgncccagtcaacaatactgtcagaaaaacaaaaagcntttgaaacagaatgctacctctcaaaatgtaaacaatatnnnnnnnnnnnnnnnnnnnnnnnnnnnnnnnnnntcaatgttaaacaagttagatacgtggtagtcgtctttaaccagtaagtatgtgttacactttccatacacattatggcaacatgatcagcagaccaaatgcagagaagccggtaggaacccgaggccacggaggctgctggaagacagctttccaagcntcagnagatctgcgcctgacgaggag

SEQ ID NO: 431178 - DNA, 2680 bp, Homo Sapiens
  misc_feature (543)..(553): n is a, c, g, or t
  misc_feature (665)..(699): n is a, c, g, or t
aagggttccaggggatttttccggggccctttaatcccctgtgggtcggggagataacaggtttttcggctgcggactttgggaaaaaagaaggggaaagggattggagaagggggtactgggatcccagcccagggattctggccttagcccctatcctggcctcggcttaatcaaccaagtcgttatttcttccccttttctcttgggagacccaccaattattctgagatgccatgagactgtttagcttttcttcatggccccagggagtgaggctgagggcagtcactccccctccaatgccctcgactgcccagtaaaagaatggcgggacccaaggaggaaagagtgggggcagacaacgcttgggggatcagtccactttctctacattcaaactgcagaccaaatagaataccatgacaaaaagaagagaaaggaaacttgtataaaccaagataaatagcttttaaacatttgaatgccaaaaattgggggccaaactcaaggttttgaagatagcacagcgaatgacctttnnnnnnnnnnnttgaaaatccaccaaaccacagctcaaaatgttatgacccagtcaacaatactgtcagaaaaacaaaaagcatttgaaacagaatgctacctctcaaaatgtaaacaatatnnnnnnnnnnnnnnnnnnnnnnnnnnnnnnnnnnntcaatgttaaacaagttagatacctggtagtcgtctttaaccagtaagaatgtgttacactttccatacacattatggcaacatgatcagcagaccaaatgcagagaagccggtaggaacccgaggccacggaggctgctggaagacagctttccaagcttcagagatgctgcgcctgacgaggagcagatccaaacttccattcttcattatgacgtggggaaatcaagtccaaacattattcctacataatccctttcccaagtcaaatttgttttctccatgagccagttggtttcaagttccctaagtcatgtagtggtcttgcggcagttgttcagacctacctatggccccttcctggggccaaggcagtggtttgacccccatctgcctcttccagaaggtttcccatccaatccagcagccccagtgaagtccaagaatgccgtctccattctttcctgacctatatgctgtgagtcaggcacagagacagtgctggttcctgcttcggaagctgggcttggccaggtttggagggagccacaggaaaccaatctattcattcaaaatggtttcacaagcgatcttcacatctttggggttatctacaagtctgaccatatctcatcccaaatccccagttcctggttgagggggtgagaagatgcaggaatgtacctcccccaatgcagaacaacagagctgtttctctcctggccagagcagcctgtggctcagttctgagggcctgggtggcaggctccgaaggcaggtggaacacctgcaggaagccactccttccaaaaaagcctgtgggctgcagatctgctaaaagtctagagcggggcaacaaggaaaaacagccccaaggctgaggccaggtcaaaacccacatcaagcctccaaactggatttcctggatcacatcctcatgtaactaggaagccacctcacgtttggacaccacactctaagatgggggcaccttgctggctgtaactctccaggcacagggagacagatctcctacaaggtcatcccggagcttaacgaggtgtctctgctaaaaagcactccaggcgcttggagatctgcccagagctaagagttcggctagaagtaagagtgcctgggaggaggtcagaaggaagaaggaaatagatcgagggcacagggcctcatttgatacatcagtttctgaagttttcccaaagggaaataaccatttaaacatgagggtcctgataaatccaaaggtactctagttcctcttgacctagtgggaggcaggctttacagagaggacttctgaactccaggggctaagacagcctggggcttgggtgatcatcacagggttctctgagaaccaggtgtccaagagcccagccgctttcctgcccctcaccatcccatgaggatgaacttattcccctctgagatctctgattctgatctgagatctctggtgttgacctggtgtattccagacaggatggaggaataatgcaacagttttcacttgaatccaagggaaaggtggaggaagttgtgcacaatactccataaattacaaagttaatccagacaagagcaaatgcagcagggcgaggtgtctgacctctccaatctggcatccatagcacttggttctggaaggacccttgtgctgggtctactgggtatctctttaattgaagggaactgagagctcagcaaagatggggagggtgggtaggctgatgaaatatgattataaatagcaaacctggagcaatgaaatttcagaaacaaaacccaaataaacccacgaagtcatctctagccccaaggtatcttaaaaggttacaaggtaccaaaaagggaacccctttttaacctgggtgtcaaatggggagaaaaaatcaagggtaagcagaaggtggggttacatcctgtgagcaggtgcacacacagcacatccccccctcgtgcc

SEQ ID NO: 431179 - DNA, 1116 bp, Homo Sapiens
  misc_feature (593)..(603): n is a, c, g, or t
  misc_feature (715)..(746): n is a, c, g, or t
tgggggttttaatttaaccagggaaccccggggcccaggggggccttcacttttaagaggttccaggtggagtttcccagggccaattcatccactgtgggtggggggattacagtttctcgggctgcggacttgtggaagaagagggggaagggatggagaaaggggtgactgatgcccagccaggaatcctggcttagccctaatcctgccctcgcctaatcagccatgtcgttattcttacccctttcttcttgggagaccccaacattattctgagatgccatgagactgtttagcttttcttcatggccccaggggagtgaggctgagggcagtcacttcccctccaatgccctcgactgcccagtaaaagaatggcgggacccaaggaggaaagagtgggggcagacaacgcttgggggatcagtccactttctctacattcaaactgcagaccaaatagaataccatgacaaaaagaagagaaaggaaacttgtataaaccaagataaatagcttttaaacatttgaatgccaaaaattgggggccaaactcaaggttttgaagatagcacagcgaatgacctttnnnnnnnnnnnttgaaaatccaccaaaccacagctcaaaatgttatgacccagtcaacaatactgtcagaaaaacaaaaagcatttgaaacagaatgctacctctcaaaatgtaaacaatatnnnnnnnnnnnnnnnnnnnnnnnnnnnnnnnnaactcaatgttaaacaagttagatacctggtagtcgtctttaaccagtaagaatgtgttacactttccatacacattatggcaacatgatcagcagaccaaatgcagagaagccggtaggaacccgaggccacggaggctgctggaagacagctttccaagcttcagagatgctgcgcctgacgaggagcagatccaaacttccattcttcattatgacgtggggaaatcaagtccaaacattattcctacataatccctttcccaagtcaaatttgttttctccatgagccagttggtttcaagttccctaagtcatgtagtggtcttgcggccagttgttcccctcgtgccgaatttcgccacctcag

SEQ ID NO: 431180 - DNA, 391 bp, Homo Sapiens
  misc_feature (378)..(378): n is a, c, g, or t
ttttatttttttcctcaggttggagattcatcgtaacatgcatgcattttcaaacagtaacagggtctcaaactttttaaagcagacgttagacaagcacaggggattgaaaattcccatttaaaaaatggaaactgcagtgggatatggagaagtcacacacttggtggggtggtggtttgtcctgcttccccaaaaggtgggatatgaacttaattcacattttttaatttcagtgatctgacctgatgctggggatgtgccgagcaggtactgccccctcccccaaggggtgttgggctcccaccgcctcttcacagtgggctctgcggcaaggggcaaggagggctcctgtgggaaactttctggccctggggnttactgggcacaa

SEQ ID NO: 431181 - DNA, 2366 bp, Homo Sapiens
  misc_feature (1015)..(1030): n is a, c, g, or t
  misc_feature (2305)..(2305): n is a, c, g, or t
  misc_feature (2333)..(2333): n is a, c, g, or t
agacagggacaacctgtggtgatgccagtgtttgacctgaatacctgtagcatccccaagtctcagatctctttcattgactacttcataacagacatgtttgatgcttgggatgcctttgcacatctgccagccctgatgcaacatttggctgacaactacaaacactggaagacactagatgacctaaagtgcaaaagtttgaggcttccatctgacaggctaaagccaagccacagagggggcctcttgaccgacaaaggacactgtgaatcacagtagcgtaaacaagaggccttcctttctaatgacaatgacaggtattggtgaaggagctaatgtttaatatttgaccttgaatcattcaagtccccaaatttcattcttagaaagttatgttccatgaagaaaaatatatgttcttttgaatacttaatgacagaacaaatacttggcaaactcctttgctctgctgtcatcctgtgtacccttgtcaatccatggagctggttcactgtaactagcaggccacaggaagcaaagccttggtgcctgtgagctcatctcccaggatggtgactaagtagcttagctagtgatcagctcatcctttaccataaaagtcatcattgctgtttagcttgactgttttcctcaagaacatcgatctgaaggattcataaggagcttatctgaacagatttatctctagttagcttcacagcctctatggctacatggttcttctggccgatggtatgacacctaagttagaacacagccttggctggtgggtgccctctctagactggtatcagcagcctgtgtaacccctttcctgtaaaaggggttcatcttaacaaagtcatccatgatgagggaaaaagtggcatttcatttttggggaatccatgagcttcctttatttctggctcacagaggcagccacgaggcactacaccaagtattatataaaagccattaaatttgaatgcccttggacaagcttttcttnnnnnnnnnnnnnnnngtttatatacatgtttaaaatttttattaaaatccaaattttctgggtgtaagcccatgcagtatgttgtgccatgcaccatctatacgtaatattttgggaggggataggggaagtttcaaggttcagatatttttaaccagtctatatttgaaatcatgccattagctttaacaatgttaaaattgtgtggtgtaaatatatcagaaaataggcatatggggaggcagtaaatactattttaagctattaattgtatgctaaaagcttctaaagcacaagtgcatatttttatactgctcttttcacaactccctgtgatctacataaagtcagactcgagattttcctttctcttttaccagctgatccttcctatgtattataaatattagactccgtaaacaaacttcatttttctttctctgtacttcatgctgcatttttaaaaggtataaacaaacagagactgaattaattgaatcagtaattacttttttccaatacaaattggaatgcagaatacttggaacttgtacatggggaaaaaatgacttatcactacataatgtgccaatgtttttttctatgttttgtaccaaaaatggaaaaatatgacaattccatgcaaagaaatgtatctaaattatttttgttagatgataagagaacttgcttggtcaggacagcagccagctttgtattgtaatgctatattatgtaaatgtgatgaaaatgtttttgtgaagtacttgtaactaaattcctacagccatttttcactcccaacagctgtttttattttacctctttggcctaaagttttcataatttcaaatttggggtttagtgtcctttatttcatgagtcacacactttgttttcagagcacattaaaatcaggatgccagaatcccatattaaggacctagctaacttgcctaggcttcagaagcttgcttgaggcaaggacaatctttttctgatcatctcactttcagttctatttggtaagtaacatttatcaggtgtcagacatcttctatatgaaatatttacagcttactcagttttatgtcaaatttcttgttaacttcaaactttttattagtaatgtgcaaatgtttaaaaatgctttaagacagctaggtactaaagcgtcaacaatttctgctctttaccagtggaatctacgggataatcttctggcctgcgaactagtctattcttccacatagtcaacttgttagaaatacaggctttcagatgatatgnggtatcagataggttatattatataacnattataacggcccctacacagggtggttactta

SEQ ID NO: 431182 - DNA, 442 bp, Homo Sapiens
tttttttcttagataaatctgttcagataagctccttatgaatccttcagatcgatgttcttgaggaaaacagtcaagctaaacagcaatgatgacttttatggtaaaggatgagctgatcactagctaagctacttagtcaccatcctgggagatgagctcacaggcaccaaggctttgcttcctgtggcctgctagttacagtgaaccagctccatgggattgacaagggtacacagggatgacagcagagcaaagggagtttgccaagtatttgttctgtcattaagtattcaaaaggaacatatatttttcttcatgggaacataactttctaaggaatggaaatttgggggacttggaatggattcaagggtccaaatttttaaacctttggctcctttcacccataccccgttcattggtcattagggaaggggag

SEQ ID NO: 431183 - DNA, 924 bp, Homo Sapiens
  misc_feature (72)..(88): n is a, c, g, or t
  misc_feature (479)..(576): n is a, c, g, or t
acctcggcctcccaagtgctgggatacaggtgtgagccactgtgcccagctgagattttattaaaaggaaannnnnnnnnnnnnnnnnataaacatgctgttgttattttctaacaggactgtcattccatttttattatttttcctatcagtggacctagttatttccagttttttgctataagtatttttacttgtgtttctttatggacatatgtgaagtttgtaaaatattaatatttacctaggtgtaaaattatgaggtcttcttagagtattggatccatacgctgataggtaataacaaactttccacaagatgattctatcaatttagccttccaaggagtatatgagtttctgttattccatatcttgaccaataattggcattgtgagactttatatttttgcctaaatgtaccttgttgtggttttatttatttgtttgtttttgagacagggtctcactctgtcannnnnnnnnnnnnnnnnnnnnnnnnnnnnnnnnnnnnnnnnnnnnnnnnnnnnnnnnnnnnnnnnnnnnnnnnnnnnnnnnnnnnnnnnnnnnnnnnngcatgtgctttcacagccagctaagtttgtaattttttgtagagatgggggttttgccgtgttgcctaagctgccctaaaattctggggctaagttgctcaccccgtttggcccttaaaaggtgtaggattttagcagtagcctccatgtctggcccttgtgggggtttaaaatcgattttgccttattacaaaattgggtcaaaattggggtggaaattacaaaaaatccttttttgggctatttaatgtcctttttctcgtggaaaccccttttattggtctttccccccttttattttttggggtggtaaataacccaacaaaatatattgcgggcccccttaaa

SEQ ID NO: 431184 - DNA, 1471 bp, Homo Sapiens
tggcggggcttggcagatgtgggtgttgtcagtgtcttagcaagctggaccagctcgtggcgggccagcgtgagtcgcagggcagcgggggtccagcgcagtgcaggcagaggcatcacagtccgtggaaggcttggaggcgcccaggtagccaggagctcctgcagggtcgtgcccagatgccgctcatacttcaggggacagggtctagcactgcctggtctgagcccggggtggcccgcggccacgtgggactgtgataggaagaggatggcagctgcgaagaaccctcgggatgctggtgttccctgaagagctggagaggtgcgtaaggagccgggggccatgaggagccccagggtgggccacattagcgagccagaagcaggccttgccctggttgctgcagctagtgctggtagcgagcggtcatgagggtgttcagttagagatgtgaagcaggcgtcacgcgttgatcagcgcccggtgcggtgaccagcgaggttgaggaagagtgtggcagcaggtctgcaggccaatctccacgctgtcaggctagcactcgaggtgtcgtggccaggggatgtgagttcccactgctgcaggaaatacttgcacagaagcgagggggccccttccttgatcaggatctcccggggcccatcttcaacggtcaggtggcaccagccaggcaggaggagccggagagcgtctcctggccaggtgggccctggggtggtgggggagatggccaggttggccacctgctgggaaaggtcattggcctcctcggcctcctcgtagagggtcttggcatagcggacgaggaagggcagcagctggcacacctccttacgcaaggatgaggtctcctcggccagccaggcacccaggatccgcaccgagcaaacacaaagggctccttctgcttctctgaccccacctgcagcaggtagtggataacagcccctatggcctccttcatgacgctcacgagctgcaccttctgtggctccttaagcagtgactgctcacagcgagtgcattcctggatccccaactccatgagggcatagcaggcggtcaccacatcctctttcacctccgtgcccgtctcctccagtgccagccgcacttccacgcacgccagattcaccagcagggccaggaacttgctcccggagctgcccgccgggatccagtcggagccgcaggcgtgtgccaggcgggctgccagcttcagtgcagggttgcgctgccaggagctcagcttgcttcccaggatgcgtgccagcccggcctgcagatcccggtagcattcagggggcacggttgtcgggggcaaaaagaggggcagcagctggcagagctcaaacttgctggcatcctcagctttctggaaatcctcactgaggccccgcaacacggccagcaggtcgggctccgcctccttccagcactgtgtctcggc

SEQ ID NO: 431185 - DNA, 1074 bp, Homo Sapiens
  misc_feature (33)..(33): n is a, c, g, or t
  misc_feature (53)..(53): n is a, c, g, or t
  misc_feature (57)..(57): n is a, c, g, or t
  misc_feature (77)..(133): n is a, c, g, or t
  misc_feature (833)..(833): n is a, c, g, or t
  misc_feature (846)..(846): n is a, c, g, or t
  misc_feature (866)..(866): n is a, c, g, or t
  misc_feature (926)..(926): n is a, c, g, or t
  misc_feature (935)..(936): n is a, c, g, or t
  misc_feature (941)..(941): n is a, c, g, or t
  misc_feature (968)..(969): n is a, c, g, or t
  misc_feature (989)..(989): n is a, c, g, or t
  misc_feature (1003)..(1004): n is a, c, g, or t
  misc_feature (1033)..(1033): n is a, c, g, or t
  misc_feature (1036)..(1036): n is a, c, g, or t
  misc_feature (1038)..(1038): n is a, c, g, or t
  misc_feature (1049)..(1050): n is a, c, g, or t
  misc_feature (1065)..(1065): n is a, c, g, or t
attgagtgtcacatgtgcacagctttgaacttngcgatcacagaacgcactgngggngggaagcaagggatcaagannnnnnnnnnnnnnnnnnnnnnnnnnnnnnnnnnnnnnnnnnnnnnnnnnnnnnnnngtccccctgggtttataagaaaggtagtccctgctggagccgccagtcgcgtctctgcagagaggagtcatagcaggggtgggagttaaagccaggcaccacggtggcagtggagtgtaatcactggggaaacatgcggattctggggaagtgtccctcctgttcctggctccagccaggccagatggcaccagggggacaggaatcagatgctcaggtgtccaagcagggataaggacaggcaaaataaataaccccccaacccccatcgtcactctgctgcaacacgacacaaaggtttaaagatctgggcccaaagactctgggtcccttcaagcaagctcaggtggaaggaggtttccccaccccccaccaggcctgtctgccccaggttgccctaggatggaggcagttcagaccctgggtcactgaagctgataggaagaactgcgatatcaatggcctaagcctgctgtctgcccaagggagccaagggcaagagccaaagggccaatttaaaggacgtggacctggggggccagaggaggcaccacagccgaggggagcccacgccctggccggcagggcacatgggctgaggcagtctgctcctgccagccctgtcttaccctggagcctccctcctgcaggggagccagacatcgggcacaatgacacctagtgccccctccctgggggntgctccaaccttncccggcctggcggggacaancacgttgatttccaagccgatccctgcccccatgggggcctgaggggcggaacgagttcnttacacttnnggggngggcacatgccctttccctcagaaaanncagaaagctggggtgttttngggaggaatctggnnaggggggggcaaattgggggctcaggganatncncctccctcctnnctcttttccgccctnggtttttcc

SEQ ID NO: 431186 - DNA, 1997 bp, Homo Sapiens
  misc_feature (1007)..(1019): n is a, c, g, or t
  misc_feature (1638)..(1638): n is a, c, g, or t
  misc_feature (1891)..(1933): n is a, c, g, or t
  misc_feature (1968)..(1968): n is a, c, g, or t
gagcgaggcctgggtggcgaattcggcacgaggggccaatgacctttcccagcaggtggccaacctggccatctcccccaccaccccagggcccacctggccaggagacgctctccggctcctcctgcctggctggtgccacctgaccgttgaagatgggccccgggagatcctgatcaaggaaggggccccctcgcttctgtgcaagtatttcctgcagcagtgggaactcacatcccctggccacgacacctcggtgctgcctgacagcgtggagattggcctgcagacctgctgccacatcttcctcaacctcgtggtcaccgcaccggggctgatcaagcgtgacgcctgcttcacatctctaatgaacaccctcatgacgtcgctaccagcactagtgcagcaacagggaaggctgcttctggctgctaatgtggccaccctggggctcctcatggcccggctccttagcacctctccagctcttcagggaacaccagcatcccgagggttcttcgcagctgccatcctcttcctatcacagtcccacgtggcgcgggccaccccgggctcagaccaggcagtgctagccctgtcccctgagtatgagggcatctgggccgacctgcaggagctctggttcctgggcatgcaggccttcaccggctgtgtgcctctgctgccctggctggcccccgctgccctgcgctcccgctggccgcaggagctgctccagctgctaggcagtgtcagccccaactctgtcaagcccgagatggtggccgcctatcagggtgtcctggtggaactggcgcgggccaaccggctgtggccgggaggccatgaggctgcaggcgggccgaggagacggccagccactaccgcatggctgccttggagcagtgcctgtcagagccctgaggggtgtccaccggggacagacccaggggcgggcagagagggaaggagggaggaggcatcttccctgaagcccccaatctggnnnnnnnnnnnnnagacttcctccccaaaacaccccagctttctggcttttctgagggcaagggcatggtgcccacccctcaagtgtaaggaactgcgttccgcccctcaggcccccatgggggcagggatcggcttggaaatcaacgtggttgtccccgccaggccggggaaggttggagcagcccccagggagggggcactaggtgtcattgtgcccgatgtctggctcccctgcaggagggaggctccagggtaagacagggctggcaggagcagactgcctcagcccatgtgccctgccggccagggcgtgggctcccctcggctgtggtgcctcctctggccccccaggtccacgtcctttaaattggccctttggctcttgcccttggctcccttgggcagacagcaggcttaggccattgatatcgcagttcttcctatcagcttcagtgacccagggtctgaactgcctccatcctagggcaacctggggcagacaggcctggttgggggtggggaaacctccttccacctgagcttgcttgaagggacccagagtctttgggcccagatctttaaacctttgtgttgtgttgcagcagagtgacgatgggggttgggggggtnatttattttgcctgtccttatccctgcttggacacctgagcatctgattcctgtccccctggtgccatttggcctggctggagccaggaacaggagggacacttccccagaatccgcatgtttccccagtgattacactccactgccaccgtggtgcctggctttaactcccacccctgctatgactcctctctgcagagacgcgactggcggctccagcagggactacctttcttataaacccagggggacnnnnnnnnnnnnnnnnnnnnnnnnnnnnnnnnnnnnnnnnnnntcttgatcccttgcttccctcccccagtgcgttcngtgatcgccaagttcaaagctgtgcacat

SEQ ID NO: 431187 - DNA, 1393 bp, Homo Sapiens
  misc_feature (58)..(58): n is a, c, g, or t
tatggccacccccaacctttattccatcaactccaggaagccaggttattctcccagngcttccatgaaggacggagaaaagggagaacatgcagtaagaggttgaggggagaggagaaagggacatggccctgcccacagccctcctttatttaaagggcagtagggtgctgtggctgcagcctctcctccaagacggatgttgcaggggagggccgttagggcaagaacccagcagctgcgtggatgagcctgaatataccccagtagtgttcaaggacaaggccctctgatccctatggcttggttcccatgtccctggtcctttaaatctcccctctccccccataactaataaacaataaataaataaattttcctaaagttgcgggaagaaggcatgaaccactggcatctgtggtgtagctttcggatgtcccagggggtgttgtggcctaattcccctagcttcttaaatggccccaggtatccaaggatcccaagagctggcaaggacaatttgcagttctttcaaatgttccctcatcattggcaaattggagtccccaaggttagccccctcacgtaatgttcttcagtcggggcacggggcaggggggaggggcccccttagctctcggaggctacagcctccccgtcgcggctctccgtctcctccgggatgtcctgcattctggtaaagtctcgtggactgtggggcggagacagacggctgctaccttcctcctcgctgccagtgtcagggtcactgctgtcttgcagccgctcttcggggctccccagttcctgcctctctcggtcctcaaagtttcgatggacagagcgagtagtgacaggtagatccaggcggtcagtgcctcggctgggctgtggggggttgaaactcaagtacagggcatcgcctgcggggagctgcgccgccgaggatccacaggtctgcggcccagggggcctcagctgggagtggctcggtctggcccagggcaggccagctgccttcgagcctcttcggcctcacgctccagcagtgcccgggcctgctcactctcccggagccgggcctccaggctgccagcttcggttgcccgttcttcacctagccgccggcagcgccgtagctcctcctgcagcagcgcatgttgccgctgcagtaatgccagttccgtggcctgcttttcaggggccacaggggcagccccagccctgccagcctccccatcccgagagttggctcggcacagcttctcccgccgctcagggccctcagggaaccgggcttccatcagagtgtcctgctgggccacagctgcctgtaggccatgtagaagtccatagagattgaccaatcgctgtaacgcctcctcttgcggtg

SEQ ID NO: 431188 - DNA, 895 bp, Homo Sapiens
gaggcattagaatataacctcggtaaaagcaggctggtacggcccggaattccgggatattgtcgacccacgcgtcggattcaaatagttgttattgttctgtattttcagtcaaaaaatcagttatatagttgattttaaagcagattaatggaaaaaaattcatgtaacaatttacctgaaaattgtataacctattcctaatcaaacccaattatatcagaatacctttctgaatttgagatttttgctctacattttataatgaataaggctattttttgaaagtatttcattttgaattctgtcattaacctcaaaagctttctactgctttgcggtgaaggcaaaatattcgataactcaacttaggccccactgttccccaacttcatggaggccagaagactttactttgttccataatgaaatataaacacagaacaaagttgtaaaagtagcatggatatgttgaaactttggacaagcttcttgtcctttggaatatgggatttatattcatctcctcaatatcccatgtatgcacagaaacttcagttctatttctatagacacaggaacctagtgactatgaacgtaattgtaataaaatgctgctcattgagccacagagacgaccctgatttcattaacattggggacaccaagaaaaaccaaagtatgctttaatacccttgtcaagctcaagttagagggatctatacttatttaatatacgtgacaatccatagatatacgaccttccttaaacagaacaatacattaattccgtacatatatgtcaatggttacctgactatggcatgacttcgaagtataaaattagtgagcacggtctgcctgtcccaaacgggatgaaggatatacacctcag

SEQ ID NO: 431189 - DNA, 611 bp, Homo Sapiens
aagtgctttgttaggctgtgtgatgttcatacattttccccatctgtgccttgtgtttcattgtcttagcggtgtctttttcccagagcataagttttaaattttgatgaagtctgatttaccacattttttcttttacacatttggtgttcatctaacaactttacctaacccagaccttgccagactttttctgtaaaaggtcagatagtaaatatttcagccttgctgtccctgttgcagctctgccattgtagcaatgaaagcagccatagacaatatgtaaatgaataatagctgttccaataaaactttatgaatactgcagtttgaatttcacataatttacaaattatcaattatattgttttgattattacaaaaacaggtagtggattggccatggtttgctgattcctggcctgacaaacccaagttcacaaagagtttcctctttgattttgttgtggtcgttgttccacaccttcttttttcactgtttccttaaggtagagtgtacatatttataagggtacatgtaatattttgatagattcatacagtgtgtaatgatcacatcaggttaattagggtatccatcatctcagatg

SEQ ID NO: 431190 - DNA, 537 bp, Homo Sapiens
  misc_feature (412)..(412): n is a, c, g, or t
  misc_feature (480)..(480): n is a, c, g, or t
caacccagtaatgacatagtttaaattttaaaatgagagttctgttttgctgtatttctcctgctagcctagctttgtattttatcatcagcttcagtatatacttgtatatatatacctggattcaaatggttcttcatacaacttaatgatcagaaagaatgctgctgtaaacaccccactcaagattgctgctggaatttctacccaaagctgtctgagagtttatctttacctcagtgcaggcttaaataatggtgctaatactggtagatatatactgtgaagcctgggttcacattcatgctaggaaaatgattttggggaaatcttttatagggagagggttacatggatttttctctttccacatatctaggaagggacttgcctccaaaggagggaatgttgncaggccaaacagggatatactcttggctgggtgccccaagggttcttggccaaaaccctggatcttgnctttgccggttaaggggccagacacttgggggccatggaagggccttggcccctgct

SEQ ID NO: 431191 - DNA, 814 bp, Homo Sapiens
  misc_feature (34)..(34): n is a, c, g, or t
  misc_feature (74)..(74): n is a, c, g, or t
  misc_feature (158)..(158): n is a, c, g, or t
ggaaccaagaccggccggcaaatggacccgaccnaacgggaaattaagggctgccggtgaatctcccctttaanatttaaaacccataaagtaagaattaagcagtgcctaattcccctgtgaaaagttggaatttaataacctttgggcttgaatcnacaggacataaatattggccatttctgtttatacttcctaagacactgttttcacaatcacttttgataagtttttagatgcaattagaaaacactacacaatgctgagaaagtgcacaactctgctacaacgagatacatgctagaggtgtaagagcagattctagtgtttggtgagcattggcacagtctgccccagcctggcacacagatgtacaggatacacactacccagcatggcacgtagttggggagcaggggctaaggcctttcaatgctccaaagtgtctggccctttactgctaaaagcaagattcatggttttgcaagaacctttgggcaccagctagagtatatcctgtttgctgcaacattcttctttgaggcaagtccttctagatatgtgaaagaggaaaatcatgtaacctctcctataaaagatttcccaaaatcattttctagcatgaatgtgaaccaggcttcacagtatatatctaccagtattagcaccattatttaagcctgcactgaggtaaagataaactctcagacagctttgggtagaaattccagcagcactcttgagtggggtgtttacagcagcattctttctgatcattaagctgtatgaagaaccatttgaatccaggtatata

SEQ ID NO: 431192 - DNA, 912 bp, Homo Sapiens
  misc_feature (527)..(539): n is a, c, g, or t
atttggggtggggggaattcccaaggcgcactttggttcttgtggcccagggattttccctagggaaaaacagggttatggccccatgtttccaccttaccctacctggggccgcgggcggcccaaaagggaattgttttaggaaaagctttctcgaggggccggaggcgggccgaacatgttatttttttccatttttaaaaatctattttgagtaacagtgagctttattttcatgtcaccgctctaggttcattcacctgttgccaacaacatgagggagtttctccacagcccttgattcctgaattgtccaacaaatcaacagtcaccaatacattgacttaaggagtaaacaagcagcttttctctacacaccaccgggcaccccaggaaggcgcagctccctgctccacccccgcctcttggtgcctgtatccagcagaaggacccagcaggaggctgaatccaagcactgctctcaggccactctatcctcatccctggatcctccagggaacaagatnnnnnnnnnnnnntcctgttttcctgctttccaaaatggagggccttaacatcaaccaaagttacaaaacaaaaacaaaacacaggagctagctgggcgcggtggctcacacccgtggtcccaacattttgggagaccaaggtgggaggaatgcttgagttgtaggagttcaaaccagcctggcaaatatggcaagaccccatctctctaaagaagtaaacaaaaatcagccgagcatcatatcacatgcctgtagtcccagctactctggaggctgagatgaagactgcttgagccagggagggcaaggctgccgtgagccaagatcacaccgccacaccctagccagggagacagagcaagactctctctcaaatcaaacatcc

SEQ ID NO: 431193 - DNA, 894 bp, Homo Sapiens
gtcactggttccgcagtgtacaaaggcttttcatttggacctggcacaaactgctccttgtttgtctgttcatcagtttgcatgggggcaatgtcactaatacaatcttcttgcatggacatctctggggattttgattcagctatgctctctttatcagtgtccattggtttcaattcctctgccattttcgcttcaacaatttcactcagtatttgattgtcattcttgtggtccgtttcttcttgtttttccaccaccatgtccatgggttcttcatcaggctgtttcttttcttcttccttggtcagagtagtaggctcaccactcaaggctgctccctggctcataatgggctcctgataaactgttgttactacggttgtggcatttaaagagggtgctgcaactaaaggagtcccatcaactacacttgctttagctccactgtgtgcaacttgcctactgctgtattgatgaggcacaccaaactcttgcaaccattctgttaatgctagctttagagccatctgtggactatagagtacatcagtttcaatatcttcatcactgccttcattttctaattttatctggatggacacagtactatcttcactgtcagtcatcactacatcttttctcactccattcatgtttgatttgtaccaggtggcaagggtgtggatagcaacgtagttggcttcaaattcacaatttggattagtgaggactccttttaaccgtgggatgagttctgtggatcttcctttgtacgggcccagaaacagtctcttctgatcataatccattagcatgaatgttatcccagattactggagctctcttaataatcttagaacccccacgcactccgaaaaaaggctcctcaga

SEQ ID NO: 431194 - DNA, 1153 bp, Homo Sapiens
  misc_feature (77)..(77): n is a, c, g, or t
  misc_feature (214)..(214): n is a, c, g, or t
attggatttccccccttttcttttggcccccccggtggacccgtgggaaggaatttgtagcaccctcggcctttttnccagggagaaacttcctcccagcttctttcttgatctgtcccttcgaaggcgtgccaccaggtggaatgtcgtactgggttcaccaggcgtgatgggcctgaccctgccgcccttgcaacgggccgttcgggccganttcggttggatgtagatcttggggagcccggggggtgttgtggttgatgaccaccctgtaccggtagggatgtccaggcccggggagggccacgtctgttgcgatcaggatcccggtagatgctggacttgaacttggctagggcggcaaagcgttctttctgcttcatcatggagtgcagagccacggtggggaagctgaatttgcgcagcatcatgcacagaatctggcaggtcttgcacgtgttggtgaagatgataatggaccagtcctcgtgctcatcctggaagcgctggatcaggtggaccaggtaggcgtccttgaccttctcaggcaccagcaggtagcgctggtccagctgctccacggtgctcaccggggcctgtgcttcccagaagaagggctggttggtggccagaccctgcagctcccggagtgtgtcggtcagcgtggcgctgaacagcagtgtctgcctgcgggccggcacagccgccaggatggcctccaggtccacggtgaagtcagtgcagccctgttccagcagccggtctgcctcatccatcaccaggaagcggatcttctttatactaaaagtgttggagctgcgcaggtgatctgccaggcgccccggcgtggcgatgaccacgtgtggtttccgagagagctccagcgcctgggccaccatgtccatgccaccgacgatgatgcagtctttcagccctagaggcttccccaggacccggaactgctctgcgatctggtaggccagctccctggtgggtgtcaggacgaggcagaagatgccatagggatcctcagacagcttcctccaggatggcggggatgcagccgagctgcacgggcgtgggctgcttcaaacccagctgccgacatgttccacgagccacgatcccgggaattccggaccggtccagcctc

SEQ ID NO: 431195 - DNA, 1088 bp, Homo Sapiens
cgctctgcggggaaagttaattctggggaacccccgggggggttcgtggtttaaagaccccccctttcccgtatgggaatttcagcgccccggggagggccacgtttgttggggtttcaggattcgggtagattgctggaacttgaacttgggttagggggggcaaagctttctttttggctccatcatggagtgcagagcccacgttggggaaggtgaatttgcgcagcatcatgcacagaattctggcaggtcttgcacgtgttggtgaagatgataatgggaccagtcctcgtgctcatcctgtaagcgctggatcaggtggaccaggtaggcgtccttgaccttctcaggcaccagcaggtagcgctggtccagctgctccacggtgctcaccggggcctgtgcttcccagaagaagggctggttggtggccagaccctgcagctcccggagtgtgtcggtcagcgtggcgctgaacagcagtgtctgcctgcgggccggcacagccgccaggatggcctccaggtccacggtgaagtcagtgcagccctgttccagcagccggtctgcctcatccatcaccaggaagcggatcttctttatactaaaagtgttggagctgcgcaggtgatctgccaggcgccccggcgtggcgatgaccacgtgtggtttccgagagagctccagcgcctgggccaccatgtccatgccaccgacgatgatgcagtctttcagccctagaggcttccccaggacccggaactgctctgcgatctggtaggccagctccctggtgggtgtcaggacgaggcagaagatgccatagggatcctcagacagcttctgcaagatgggaaggacaaacgctgctgtcttcccactgcctgtcttagcacagcccaagcagtctcgaccctccaggatggcggggatgcagccgagctgcacgggcgtgggctgcttcaaacccagctgccgacattgttccacgagccacgatgacagcccgagctccgcgaagcctgccatccttgtggccgcttgtaggggccccttgtagatcccgggaattccggaccggtcca

SEQ ID NO: 431196 - DNA, 2415 bp, Homo Sapiens
  misc_feature (18)..(18): n is a, c, g, or t
agcgggcgcgcgcacttnccgggggggtatgccgcaccccacatattggcagcagagggacacatagttctgaaaatgaacatatgttctcttccccgcgcttccctatcccgacatgaaaggtttgccccagagagagccggcgggtcccctacaaatttctggggatttgttcgcgagagcctcttcactcttgtttgcacaccccccccgggggtgccaatgcgggtacccccaggcttagatggcgactccttcaggggggaagtttcccccctcttacggggaatgttgtgtgtgtgcaagagaacccgcctttcgggtgtttggatccggccccccgggcagcacacgtctggtttctacatgtgggggtcggagagaggatttcccaacaaaagcccgtgtgagggtcacaatgggagaccccaggggggggttctttccggttgggggaaagagcccatttcttagtggggcccactggtttccaatttttaccctatacggggggggccggagcgggcccaaaagggaaatgggttgtagaaaagcctttctcgcaggggcccgaggcgggccccgaccacgcccccggcgatcgtttttccccggcgcgcccgcccgaggaaggtcaaaagacccgtttattaagcacctcctgtatgcggcacccctggggggtgaccttgggttggggtcacaacctcccggtcatgttctttcttcccctgcagcctgaatcttggccagggctcagggaaggggccagccagtggtttcggggcagaggagcagggcccgcacaacacgagcgcccacgggttctgctgtggggcactgggtaggcccccgggaagggctgctgcccccaaggaaggttcctccgaccctcagctccatggacgagtcaaggactgggcagatggccgtgtggggctcagaccaggccctgggaggggactgggcctgagtgggacccagacggtgtcctgggtggacgccccttgtggccagccctgccagccttctgtcgcttcagcgtctcctccaccttctccttgaagcgccggttcttctgcttgatcttggccagctcagccttgcgcttggcctccaggtcagggtccttcccctccaggatcagctgcttccgtttgttgatctccttcttttcgtcaaagtgggccgcctccagtttgatctcacactctcttcgcaccacgttgacctgtgtgaggatctgtagcacctcggcctcttccacggagaactcctccagcttcttcttgatctgctcctcgatggcgtgcaccaggtggatgtcgtactgtgtcaccagcgtgatggcctgaccctgccgccctgcacgggccgtccggccgactcggtggatgtagatcttggggagcccgggggtgttgtggttgatgaccacctgtaccgtagggatgtccaggccccgggaggccacgtctgttgcgatcaggatccggtagatgctggacttgaacttggctagggcggcaaagcgttctttctgcttcatcatggagtgcagagccacggtggggaagctgaatttgcgcagcatcatgcacagaatctggcaggtcttgcacgtgttggtgaagatgataatggaccagtcctcgtgctcatcctggaagcgctggatcaggtggaccaggtaggcgtccttgaccttctcaggcaccagcaggtagcgctggtccagctgctccacggtgctcaccggggcctgtgcttcccagaagaagggctggttggtggccagaccctgcagctcccggagtgtgtcggtcagcgtggcgctgaacagcagtgtctgcctgcgggccggcacagccgccaggatggcctccaggtccacggtgaagtcagtgcagccctgttccagcagccggtctgcctcatccatcaccaggaagcggatcttctttatactaaaagtgttggagctgcgcaggtgatctgccaggcgccccggcgtggcgatgaccacgtgtggtttccgagagagctccagcgcctgggccaccatgtccatgccaccgacgatgatgcagtctttcagccctagaggcttccccaggacccggaactgctctgcgatctggtaggccagctccctggtgggtgtcaggacgaggcagaagatgccatagggatcctcagacagcttctgcaagatgggaaggacaaacgctgctgtcttcccactgcctgtcttagcacagcccaagcagtctcgaccctccaggatggcggggatgcagccgagctgcacgggcgtgggctgcttcaaacccagctgccgacattgttccacgagccacgatgacagcccgagctccgcgaagcctgccatcctgtggccgctatcgaagaatt

SEQ ID NO: 431197 - DNA, 401 bp, Homo Sapiens
  misc_feature (35)..(35): n is a, c, g, or t
  misc_feature (377)..(377): n is a, c, g, or t
gaaccaacgtgtgggtttcccgaaaagaagttccnagcgccctgggcccacccatgtcccatgcccaccgaacgatgaatgcagtctttcaagccctaagaggcttcccccaggacccggaaactgctctgcgatctggtaggccagctccctggtgggtgtcaggacgaggcagaagatgccatagggatcctcagacagcttctgcaagatgggaaggacaaacgctgctgtcttcccactgcctgtcttagcacagcccaagcagtctcgaccctccaggatggcgggcgaatagccgagctgcacgggcgtgggctgcttcaaacccagctgccgacattgttccacgagccacgatgacagcccgaagtccncgaagcctgccatccttgtggccg

SEQ ID NO: 431198 - DNA, 795 bp, Homo Sapiens
atatctggggtctctttgctttcttcttttgacccctgaataaattccatctgtacatcagctctctcatctgtgtctaaatcagcctctgaaacagcaggtgggcaaggtatttccactgacaatttgacggcaatctcatcttgaattagagatgattctggagatgtttccttcttgccctcatcagctttcaaggactccatggtgagactttcatgctcaccactagattcataggactcctccttgtctacagcctcctggtgcaccaagtcaggcttggccaccttctctttgacttctgtctcactaactttagtgccttctttcatgtggccagactcaacacccataaatgcatctgcctcctgcggtgctttggatgagggggtcatgtcctgtgtagcctcaagttttagctctgttgcccttctatcatctatgtttagccctgaagccatctgtccaaagtcactaattttaacatctagttgaccctggacagcaaaatccagaccttgttccacctttttggatggttctacctcagctatctctggcactgaactaagacccttctctgctttctcagaggatgcatctgttggtattgacaaatctttggccaaagcttgctcataggttactcctaatccgaatgtttctatttcatcaccagcctcttcagttttcttggcatgttcttttgaatcagcatgttcttcactcttttctagtacagtatccaacctatcattagctttcttctcttggtcaaactccttactcagt

SEQ ID NO: 431199 - DNA, 2584 bp, Homo Sapiens
  misc_feature (92)..(107): n is a, c, g, or t
  misc_feature (136)..(162): n is a, c, g, or t
  misc_feature (165)..(168): n is a, c, g, or t
  misc_feature (176)..(177): n is a, c, g, or t
  misc_feature (184)..(184): n is a, c, g, or t
  misc_feature (186)..(296): n is a, c, g, or t
  misc_feature (314)..(339): n is a, c, g, or t
  misc_feature (1391)..(1439): n is a, c, g, or t
  misc_feature (2228)..(2254): n is a, c, g, or t
gttgtgaacaaaaaacaagtggtgtggtccaccacatagttctcctctgcgggaacaagatgagcactgtcttttcccttaatcttgtgggnnnnnnnnnnnnnnnngcgaggggtttttagaaagtttttttatnnnnnnnnnnnnnnnnnnnnnnnnnnnggnnnntttttggnntttgtgngnnnnnnnnnnnnnnnnnnnnnnnnnnnnnnnnnnnnnnnnnnnnnnnnnnnnnnnnnnnnnnnnnnnnnnnnnnnnnnnnnnnnnnnnnnnnnnnnnnnnnnnnnnnnnnntttttgtgtgttgtgtgnnnnnnnnnnnnnnnnnnnnnnnnnnaacacattttgtgattttgggttatttattttgtgcatctgtggcaataaatgagatctcagtggtggtatggatttgactgatctctgtaactgtgtatggcaaaaggaccggaaaatgaaaaccagatcccagtaaggggtagagaggggccaagagaactgaacatctgggctgccggagaaatcaaagtctaggaagtaagaggtaagagtgtactacaggggacataccccaatctctttgctccctccctcttccttcctctcccagagacccaggtccctgggactatattggatctgtctctgaagctgaaaaacaaaaggcagaggagacagtcggctctaagtgaccaatctcaagccagctttgtcagaaatcctaaataacaggagaagggtgggaagaaaggatatgattatttcttattccattttccataagaggtgagaatgacaaggacctcttttctaactcctcttgagggtgtgagaagggttagcaggaggagaagggctgggagctctgaggtctcctgtaagacctcatatctcacaggcaaggactaagaattaggattaaatattttagtgggatagctctaaaccaggattagcaagcaaagttagggcgcaaattcctggaatctgactgggaccctggcagtgaaagctgggactgttgaaaacccaatttaagtgttcgctactcatgttgagagtgcagggccaagataactagatcccaggacaggcagtttggcagtgagaacaaaaggaagacactgggaccaaggtgcctagatccctcgagagagaagggtgggtattgggaggaaaaatgaggactggggaaacccaggaggctgggttctggaatagcagcaagtcagaatttcaggatctctgttcgtcctcctcttcctcttccctctatcaggcagaagagagggaaggagggggctggagaagtagccacatggatacatttagggccagacagacacaggaatgctggaggagagagggatttagtgctgcattggcccnnnnnnnnnnnnnnnnnnnnnnnnnnnnnnnnnnnnnnnnnnnnnnnnnggtcctagggttgcacgacgccgtcctttgcggtggccacgtacacagtgtgtatgaccacagccctcttcttcctcctcatcactttccgtggagctctcgccaaaggcccgaggtttctcataaatacagcagcattttgatgagcggcggcccatgtgttcattgtccacagtgtcacttgtccattctacctttttctctggcttccgtttccgaagtttgatggtaaggctccggttctcctcagatagtcccttgaggaataagtattatttcctgttcttataccaccagtataagagaagacacaattcctaacctaggaaaggtcccagcaactcttcaaaggaaaatataatccttgctgtttctccgtcttcctccccaaatcatccttggtagtattaatacatgaaaattatttttcagtccccagcacctaatctttgatctcccttcctttttccagatcccctattctttttctcttaaaaaaacaaacaaaacctctctcattctcaagctccagccctccctacctcttatccacctattctctggcatcctggcatctctagtagcaagtattactaatctattaattactaaacttcctttaatccaagagtattaagcccaatgcaaccttctccctttgaaggcaacttaacatgtttttggataaatacttcttgtttctccatttacatctttgctctctgatttctcaaaatacctcttttcatctccttttcttgtttcctcattcctgccacttccttttannnnnnnnnnnnnnnnnnnnnnnnnnncgaatatcaatattgataatattgataagttggcctccaaccatgctttcttacactacctttgatttcctcccaacatcttcctggctccttaatcctcaatttccctttcgtttattacttacacacataaccaccccaagcagcaacacctatatcctaactgtacctccctattaccagttccttgacctgcctcctgcaccatctctgccactccaaatagctccaataccttccgattctcccagccctagatattcaaccccacacctcccatatccctaggcctagctcctccaacaactcttctaatccctgtcccatccc

SEQ ID NO: 431200 - DNA, 903 bp, Homo Sapiens
agattaacttaggatcccccgggaccaaggcagttttggccagtgagaccaaaagggaagacactgggaccaagggtgcctagatcccttcgagagaggaggggtgggtattgggaggaaaaatgagggctggggaaaccccaggaggctgggttctggaatagcagcaagtcagaatttcaggatctctgttcgtcctcctcttcctcttccctctatcaggcagaagagagggaaggagggggctggagaagtagccacatggatacatttagggccagacagacacaggaatgctggaggagagagggatttagtgctgcattggccctggagggggctgggaagggtcaggaggctggggaggggtggtgggggtcggtcctagggttgcacgacgccgtcctttgcggtggccacgtacacagtgtgtatgaccacagccctcttcttcctcctcatcactttccgtggagctctcgccaaaggcccgaggtttctcataaatacagcagcatttggatgagcggcggcccatgtgttcattgtccacagtgtcacttgtccattctacctttttctctggcttccgtttccgaagtttgatggtaaggctccggttctcgggctcggttgtcacggtaaccgttgtctcagtgacggtctcgctcagcccagcccctgcctcggccatggctaaggctcaggacagggaggagaggaggaagggggatgagacacccttccctttttctgtcgctgaggtctaagagaagcggtatcggattcagagtggtagccaggatcctccaccttctttattccccctcctcctgggcctccgcttctccacccctggggataacctggctaaccccacttccggctcgccgcttccgggtg

SEQ ID NO: 431201 - DNA, 1177 bp, Homo Sapiens
  misc_feature (602)..(647): n is a, c, g, or t
gtggagaaggggttagcccaggagggagaaagggcttgggaagtttctgagggtttccccgtaaaggccttcaatattcttcccccgggccagggcttaagaattaggaataaaatattttaggggggatagctctaaacccagggatttagccaagccaagttaggggcgcaaatttccggaaattttgactgggacccctggcagtgaaagcttgggactgttgaaaaccccattttaaagtgttggctactcatgttgagagtgcagggcccaaggataactagatccccaggacaggcagttgggcagtgagaacaaaaaggaaggccactgggacccaaggtgcctagatccctcgagagagaagggtgggtattgggaggaaaaatgaggactggggaaacccagggggctgggttctggaatagcagcaagtcagaatttcaggatctctgttcgtcctcctcttcctcttccctctatcaggcagaagagagggaaggagggggctggagaagtagccacatggatacatttagggccagacagacacaggaatgctggaggagagagggatttagtgctgcattggccctggnnnnnnnnnnnnnnnnnnnnnnnnnnnnnnnnnnnnnnnnnnnnnnggtcctagggttgcacgacgccgtcctttgcggtggccacgtacacagtgtgtatgaccacagccctcttcttcctcctcatcactttccgtggagctctcgccaaaggcccgaggtttctcataaatacagcagcatttggatgagcggcggcccatgtgttcattgtccacagtgtcacttgtccattctacctttttctctggcttccgtttccgaagtttgatggtaaggctccggttctcgggctcggttgtcacggtaaccgttgtctcagtgacggtctcgctcagcccagcccctgcctcggccatggctaaggctcaggacagggaggagaggaggaagggggatgagacacccttccctttttctgtcgctgaggtctaagagaagcggtatcggattcagagtggtagccaggatcctccaccttctttattccccctcctcctgggcctccgcttctccacccctggggataacctggctaaccccacttccgcctcgtgccgaattcgccacccagc

SEQ ID NO: 431202 - DNA, 708 bp, Homo Sapiens
  misc_feature (219)..(275): n is a, c, g, or t
aggaaaaatgaggaactggggaaacccaggaggctgggttctggaatagcagcaagtcagaatttcaggatctctgttcgtcctcctcttcctcttccctctatcaggcagaagagagggaaggagggggctggagaagtagccacatggatacatttagggccagacagacacaggaatgctggaggagagagggatttagtgctgcattggcctggnnnnnnnnnnnnnnnnnnnnnnnnnnnnnnnnnnnnnnnnnnnnnnnnnnnnnnnnntgcacgacgccgtcctttgcggtggccacgtacacagtgtgtatgaccacagccctcttcttcctcctcatcactttccgtggagctctcgccaaaggcccgaggtttctcataaatacagcagcattttgatgagcggcggcccatgtgttcattgtccacagtgtcacttgtccattctacctttttctctggcttccgtttccgaagtttgatggtaaggctccggttctcctaggaaaggtcccagcaactcttcaaaggaaaatataatccttgctgtttctccgtcttcctccccaaatcatcctcctgcaccatctctgccactccaaatagctccaataccttccgattctcccagccctagatattcaaccccacacctcccatatccctaggcctagctcctccaacaactcttctaatcctg

SEQ ID NO: 431203 - DNA, 458 bp, Homo Sapiens
acaaggaatcatccaacatgttttatttcttcgttttcaaaatgtttggaagtgcctttacagagacattaaatatacggtggaacatacacaacagatcatactgaaaccataggtaatataatgagatagatacattatacaaaaaggtatatagaagcacaatgtcataacagcatgctctgtttataatatctggtgtttaccagggaacaagaatccaattcagaaatgtggaaagtaagggataacaccttttcaaatgccagacaaaacttgtccccactgtttgctgccttgcaatcaccccaaagcacactactggctgggctgtgtaggtttggccactcactatgttctgcagctgagatccggtccacctgcctgagaagagtctgaggctgggaactgatacctaagatgcacatttcaattttgagacaacagcatgccctgta

SEQ ID NO: 431204 - DNA, 514 bp, Homo Sapiens
caccgagagccatccacagtttccttgccacaaaaccagactcgggcagccgcatgctgagcgtttggtttccaaatgcacagcctttttgggtttgcaaaagcggagctcccagagccacaaactgagctgctcttgctggaggtggcggggaagtctgggaagggctgactccttcccactgactctggaggcatcgggaggtggccgggcctcggccagcatgcaggactgacttcacagtggggctgggggcccagagctgcagaccatgatgccccgggaccaccgaacaggtgccaggtgagtggggcgtgggcccttatcttcctcagaccgcctgcctgctccccagagttgaggttgtcaagctaactcatctgcacactcattttcttggagtcttcaggaaagaaaccctctttttaggagtctgtttgagcttttctatctccacattttcaattctgaacatcgaaagactggaatatcttttgcaaatgtcctcgtgccg

SEQ ID NO: 431205 - DNA, 1260 bp, Homo Sapiens
  misc_feature (1234)..(1234): n is a, c, g, or t
  misc_feature (1242)..(1242): n is a, c, g, or t
tgaaggtgattaattgtctttattggaggaaaacaagaagtcatcaatctcattatcattatgatagaaatcttgatatgtatacatgattgtcaaggcagagaatcatttgctacatagacccatgaacaattttgcagtgccgcaaacctatgtgggttaaacttcttgcagagtttattacatgcatggaataaattcacagtttcccttcttttggacaaacatgtttttatgggaaaattgaaccaattgcaagcctggtaatagtagatgcggggacattcctggttttgatgttgtaattttttgggaagcatgctcactgttgggggagctgaaagaagggagattacattatgtgtagtgacaaaagccaattgagagattgttccaatgtttattctggacagagggtacctttgaggtcttctcacctgaacgtgggactaagataaatgttctctgaaacatggcgccccatctttcgaagcaaagactctgctgcatgcaatgtcgctgcatttctgccaccattcggacagcatttcatgtccctctgatagggccaagtgccccgggaaggagagtggcaggtgtcagggctgagagacaaacatccgagctgatgttcttgttcctttttagctctctcgcagcctggctgccaaccacgtcccagggcccctgtgccctgaagtgcagggcttccaggagagcctgggaatctgaatctgtctagattaagattttcctccgagaagcaatttaactagagtttggggtttctgagcccctgctgaagtcttatctctaagagtaaaaccaactcctcctcattttcttttttcctgtccataagaaaataaaatcacctttaaaataacatggcaaatcatcagaagacataataatcgaatgagaagttccccggagacaaaaaggttaaaaaacggatatggcgaatgcagaagcggtgttatagtacaaagggtgaatgcaaccgtttgtccctttatacagacaccgagaagccattccacagtttgctttgtccacaaaaccagactcggcagccgcatgctgagcgtttggcttccaaatgcacagcctttttgggtttgcaaaagcggggttcccagggccacaaactgaggctgctcctgctggggggtgggccgggaagtctggggaaggggcttgacttcctttcccactggactttgggagggcntcgggganggttggcccgggctttgg

SEQ ID NO: 431206 - DNA, 604 bp, Homo Sapiens
  misc_feature (11)..(11): n is a, c, g, or t
  misc_feature (60)..(60): n is a, c, g, or t
  misc_feature (66)..(66): n is a, c, g, or t
  misc_feature (82)..(82): n is a, c, g, or t
  misc_feature (101)..(101): n is a, c, g, or t
  misc_feature (151)..(151): n is a, c, g, or t
  misc_feature (180)..(180): n is a, c, g, or t
  misc_feature (578)..(578): n is a, c, g, or t
cgtgtaaagancaaaggtaatgaaccgtttgcccttatacagacaccaaaagcattccanagtttnctttgccacaaaacanactcgcagccgcatctaancgtttggcttcaaaatcacagcctttttgggtttgcaaaacgaagctccnagagcaacaaactgagctgctcctgctgnaggtggcggggaagtctgggaaagggctgaactccttccccactgactctggaggcatcgggaggtggccgggcctcggccagcatgcaggactgacttcacagtggggctgggggcccagagctgcagaccgtgatgccccgggaccaccgaacaggtgcccaggtgagtggggcgtgggcccttatcttcctcagaccgcctgcctgctccccagagttgaggttgtcaagcctaactcatctgcacactcattttcttggagtcttcaggaaagaaaccctccttttaggagtctgtttgaagcttttctatctccacattttcaattctgaacatcgaaagactggaatatcttttgcaaatgtcaggcacacctgcagccccaaccgcagganccaggtgtccccttcaaaagggtggt

SEQ ID NO: 431207 - DNA, 3074 bp, Homo Sapiens
  misc_feature (68)..(68): n is a, c, g, or t
  misc_feature (2647)..(2665): n is a, c, g, or t
  misc_feature (2856)..(2856): n is a, c, g, or t
  misc_feature (2908)..(2908): n is a, c, g, or t
cggggctctgcttcctcatcattccagctcaactcaactgtagacaccttccacagcccaagaaaganctgcagagccctgagcagggactctttcagccatcctgacaaacaggataagaggctggggcttaagaagaggctctgcagagaaggtcctgggaaagccttacagaagttttccgcttctccctatcagtgagactcggcttgagtggctgcttctcctcactgctcatcacatgtccttccccagcaggctagggcttgggcctggcatggaaggccttttggggcaatcagaggctgccacaagagcaccaagcctggcctccaagccccagccctccttcctaagtactcatcaaattcaaattcttcagttcgtgtgttatggctcatcttggccggccgtggggtccatgttctaggcttctgtttccaacttaatgacttaggcatagcgagatctgactaccaagagttattcaaaagggagtggagtgcagtcatgcagaagcaaacacgtcttcattgctcgaggcccttgtgctaaatcgggtgcgtacagaagaacacacaccgctcggtgctgaatgtttcgaggaaagcaaggagctgcggccaggggcttcttgagagccctgtgtagtctcctcctgtaggaaccaccttagctggaagcagggtggtgagctgctggggttggattatttgggactgaaatgaagcagacaggagacaaatctgggctcaggtgtatggcccacagcttttagaaatgctcttcagccgtcccccaggattgatccataggaggggccattattcagtctagtcaaaacaagaaagcgcaggactcctgggcctaagaactgcatctgaagcagccaggcctggggttttgcactgagatgaaagcacattaagcacaggggctcttacctactctcctggcaaatcatctcctgtgccactggccttgggctgctcgatctcacagacggggcattttgagtagagacaaagctctgggctttgagagctgaatagcatttttctcctgcctcatcagtcacagggactggaagtccatcttgttccctgatccttcacagatcaaggtgatgcctacctctttggagctgctgcctctagctctccacgggtgagtgaggagagttggtgggccaggtcaggcctgccgtattccagggcctggcaaagcagccccagagttcttccacaacaggaacaggcccatttggatcacgcttctccctattccagaacagcaaacttcctgggtgagggcctgctacagagatcccaggggacacttccctcagcaaagagtagagttcccatcccacaagagtcctaggaagcaggaaagcacgaaggagcagccagcctcttctccacaggcagtcatctagctttttaccaaaggggaagtgccgttgctccccaagtccagagttgcagacgccctgccccaacccccgtccagaatctccctttgcagtgttctaatccccagagcccctctgcggtatgtatagagttgttaaaaacgttcagaaacccagtgaagcccatttcgttttcaagccctcccatcactgtgactctgaaattctgccaagtacaaatattagcgtttggctctaataagggtatgagaaaatgtttcagtcttttctttgtggctacccaaaattgagatcagtgtttctaaccaaggaaggcctgggttatagacaggctcctctgaagcccacttgccctaagcatttttcacctagcattcctcttcctcatgttcagatgtgaatgaaggggcagctggaggatgtggtggagctgcagggaccgagggtcagctgagcagtggccctggcaagaaaaccactccaagtctgctccttggcttcctctcctgagcccagccttccccaacagaacacttgagcaagggcccctagagtatcccagggatggagcagtcccctcactctaggtactgatctaaccttcaagtgctcctcttcatttgaggacacctacagtagaaaccatgaggacattgcctctttctgccctcagcccaagtacctggggctagcagggcagataccagcctttctggtcctgctgctccctatgggatgtcaccctgaccttgcttaagtggccaagtcttagggtccccttattcctgtcaccattatgaaaaacacagcattaaactgcctgggaagaggacacctccttgggggagtgagccccaaggttatacccaggactcatagcccaaagcacaacctcggccattgcaggtttcacagcttcagtcagagtggtgccaggaagcccaaaagccaagagggaaggtcagcagaagctgcctggcaaggccccaggccagccaggcccaccccagagccaagagaaacttcaagcaggactgagaactggtagctggctctagtgatcctgaaagcatgttcccttcagaccagcagagtgaagacagacagatgtgtggccctaaaaggcagaacagttttgatgccagaacttcaggactgtcaccacagtccctttttacccctcctctatttacagtgaaataaaattcctannnnnnnnnnnnnnnnnnnaattttccttatttcaagctcttatctgaatgctactttctcctaccacttagtttgaatttgcccaggatatctgtctgggcccctggctgcaacccagacaatggcgagatctcctggagtgggggatattcacgcatcgggcctgttcctgacagctcagccctggtgtagggtgggactgggcattntctctgctggtacttttctgctaccactatttttgggaaccttggaaagaanaataacaggttacagaaattcggctagcactaagggaaagctttttctctgggccacatgccccagtgacccagagcatggaaagggggtcaactctggtctgggccagtgactaagaagcccaatcacattccagtttctaaagcacttggtaggcaccccacgt

SEQ ID NO: 431208 - DNA, 323 bp, Homo Sapiens
gttgagcatcgcaatcgctttattatgatttccactgtgcccagcctcagggcatcagcttcttctggagcgctgtgaaggctgggccacgcagaggagcatgcagctgtagagacagggagacagggcttggggacgttcccctcagcttgctgtcaagttaccttctggactcctgctctgtgggcagcagggtcttgtcctgactcttgctgctgctgctggctgggctgctatctgcgatgggacccacatgggctgatgctgacactgcaggaaggagcctctgggaaccgtttgcaaaaccaagagtgctgggcccg

SEQ ID NO: 431209 - DNA, 1501 bp, Homo Sapiens
  misc_feature (775)..(775): n is a, c, g, or t
  misc_feature (840)..(840): n is a, c, g, or t
gaggatcccctacgtcggcagctctaacgtgagggagtagtgatgatctagacgacgttaaaggtcaatgacaaggttacgaggctggaaggtgtcccaaccccatgtactctctgtggcacatgttggtggggtgaagggagaaaggaaaggagggaggggatttcattgtcctcaaaccgagcttctttgctccatgctatcctgggggcttcaggtgaatggctgcgctgttggggcgagcagccaggatgtagaggacattctcttgcaggaaggtaggccagtccacaaatctggactcctgctctgtgggcagcagggtcttgtcctgactcttgctgctgctgctggctgggctgctatctgcgatgggacccacatggctgatgctgacactgcaggaaggagcctctgggaaccgtttgcaaaaccaagagtgctgggcccggcggcactctgcctcactgacggtgctcccactgccccgagccaggaaggcggctcgggctcgctcccgctccttcactgtcagaagcctcaacagagagttctggggacgcaactgctgcagaagcaggagggactcatgggacaagaagtcaggccactctatgtggcctcgatgttcagggtccagggcaggaaactggggggccgcctgctcttcttggtcctcactcaggggcctgtcacggtccccccgcttggctgcttggtggcggtaacgcagaaagtcctccagtgtcagggagcaatcagggatgactttacncccgctgaaaggtctccgtgaggctatacatttccctccctcagtaagcagccaagttgatgttnttcacagtagtggcagctccagcctgtttctgtgtgggccatctccgtcacctccgctgcactgtctccttggatgtagcccatgcggcgcaggcagccatcatggaaaaccctggtgcagaccctgcacgggaagaggctctcagctgtccagacctcacaaacatcacacatctcatcgttgacaacaggctctctgggctccaggcagatttctggaggtttgtcatcatccagcttccgggtggggcggatgaacgcagggggtgtgaatcgacttgtcctgtcaaactcctcaggctccacgccgcgcccatctcggagccgctcccaggtgcgcggccggcactactctcttcctggaccaccgaggttcctgcttctgcttccttctcctcctgtacctcctggacggagccctctacagtgccacggcgggaccctggcagctcacctgtgcgtcggatggaaggcctgtcccgcagcccatccttgaaagcagacacagccagactcaccttctgcacctgctccactgtctgccgcttggacatcaacacccccatggctctttgcagtaccccactggcctccggagggtcccaacgaaccttcacataatctcttggctggcccagcctaccctatgcgccgttttctg

SEQ ID NO: 431210 - DNA, 453 bp, Homo Sapiens
  misc_feature (415)..(415): n is a, c, g, or t
  misc_feature (443)..(443): n is a, c, g, or t
agtggccaagtcttagggtccccttattcctgtcaccattatgaaaaacacagcattaaactgcctggggaagaggacacctccttgggggagtgagccccaaggttatacccaggactcatagcccaaagcacaacctcggccattgcaggtttcacagcttcagtcagagtggtgccaggaagcccaaaagccaagagggaaggtcagcagaagctgcctgggcaaggccccaggcagaccaggcccaccccagagccaagagaaactttcaagcaggactgagaactggtagctggctctagtgatcctgaaagcatgttccctttcaggaccagcagagttgaaggacagacagatgttttggcccttaaaagggcaggaacatttttgattgccaggattttaggggttntttaaccacattccttttttacccttcnttttttttcc

SEQ ID NO: 431211 - DNA, 1242 bp, Homo Sapiens
  misc_feature (802)..(818): n is a, c, g, or t
  misc_feature (1207)..(1207): n is a, c, g, or t
ttttttttgagcatcgcaatcgctttattatgatttccactgtgcccagcctcagggcatcagcttcttctggagcgctgtgaaggctgggccacgcagaggagcatgcagctgtagagacagggagacagggcttggggacgttcccctcagcttgctgtcaagttaccttctgcagaaaagcacatgggaagggcatgagggaccagagcgcattggattcccaagtgttactcaagtgttctcagagtccctctcacaaacttgggtttggctgggggacagatcacaggccaacccatgatggcaggaggctaatcttgagggcctttgtgtcaccatggctatggaaaggcctggctacttataacttgatgttcttaactgtgggttgtgcctacccagtgctatagaaactggaatgtgattgggcttcttagtcactggcccagaccagagctgaccccctttccatgctctgggtcactggggcatgtggcccagaggaaaaagctttcccttagtgctagccgaaattctgtaacctgtttattttctttccaaggttgcccaaaaatagtggtagcagaaaagtaacagcagagaaaatgcccagtcccaccctacaccagggctgagctgtcaggaacaggcacgatgcgtgaatatcccccactccaggagatctcgccattgtctgggttgcagccaggggcccagacagatatcctgggcaaattcaaactaagtggtaggagaaagtagcattttttcagataagagcttgaaataaggaaaattnnnnnnnnnnnnnnnnngaaaataggaattttatttcactgtaaatagaggaggggtaaaaagggactgtggtgacagtcctgaagttctggcatcaaaactgttctgccttttagggccacacatctgtctgtcttcactctgctggtctgaagggaacatgctttcaggatcactagagccagctaccagttctcagtcctggcttgaagtttctcttgggctctggggtgggcctgggctggcctgggggctttgccagggaaggcttctgctggaccttccctcttgggcttttggggcttcctggggcaccactctgactgaaggctgtggaaacctgcaatgggccgagggttgtgctttggggctatgagtcctggggtataaaccttggggggctcantcccccaagggagggtgttcctttttcccagggga

SEQ ID NO: 431212 - DNA, 1196 bp, Homo Sapiens
tttttatggtttggtttgctttaaaaaaggtaaagggcaaaaacggtttctagttacaaattgtcttggcctctctctttcctctcaatccacttcccctcccgccaaaattaaaatcgcaaaacgcggagactggaggttgcgggtgagggcgttccaggcccgggctccggcgccctaacttctaccctcttcaagaaagagggagcgcctggctcctttttgcctcggcagctgggtgtctgtttttaaaataataatgagagggggaaacgcgttccattgctcagctgcccccttaccaacgccttgggcctgcagggaggagggggaggaggaaacctcagcgaagatattgggaatgggggaggggtgcctccagggagcccccggagagaggtccctggagaagcactccttgggagagaggaggagggaaccccttggggagagagaaggcgagtcccctgggggaagcgaggcccctgggacaggccacccacaggtaacaggactgcgctgccccaggagagcggcaggaccggtggcccgctccccgcgcccggcgccggggtaggatgggggtgtccctgcgctctgggggctggggacaggggggcgggcaaaggcaaaagaaaaagaagggagccggcgcgaagtctcagttatgaaaaaacgcattgagctcctcgtacatggggccccggtcgtggtgaaggtgcatatcgtaagacaagagattctccgagtggacgcccccgcgcacagccgacgagccgaagactagcccgtggcccgtgggccgcgaaccgggcagcgccgagtagtgcatagagtagtggtagcttttctcgtggtcgggcgaggagtcctgcttgagtgagaagttgccattgagacagagcggggggctgagcgggccctcgtactcggagctgttgtagtccgggctcgcgccgccaccgcctgccgccgcatacagcgtctcgtaggcggcgcagtagccgtgggtccgcagggcgtgcgccgcgccgccgcccaggccgccggccgcctggcactgtgcgcccgccaggcgcgagcacgggtacgggtaggggtgcatggcgaacgggccgcccgagccgtggaagcggccggcaccgtcggcgccttgctccgtgaggaagttgcgagagttgagctgcagacagccg

SEQ ID NO: 431213 - DNA, 375 bp, Homo Sapiens
  misc_feature (11)..(11): n is a, c, g, or t
  misc_feature (24)..(24): n is a, c, g, or t
  misc_feature (80)..(80): n is a, c, g, or t
  misc_feature (85)..(111): n is a, c, g, or t
ttcaagcgacnacccggtcatccnacatttctatgccccgccattcttcgacagctaaccatccgcattgtccagtcctncatcnnnnnnnnnnnnnnnnnnnnnnnnnnnccccagctcgccttcctccttgacctcggccaacgtggcctccgtcccctcttctccacggagagggactggcttggccgcccgggctggccccggagcccctggcccgggcgcaggcggtggcggtggcggcgcgtcgcccttgtcgctcctcggctcgtcgtcttcgccgtcgccccagctggcgaaacttgggcacagtccgagagaaggccgggctcgctgaacaggcgggtcagcatggtgcctcggagaggagtcaag

SEQ ID NO: 431214 - DNA, 186 bp, Homo Sapiens
  misc_feature (162)..(162): n is a, c, g, or t
agcggatagaggctggtaccccgcctggtagagatgccacactcgctccgcggttcgcatggcgctctgaagacgccggcgcccgccgccttgaggagccgctgcccccgctccctgaagatgggggaacaatgaaataagcgagaagatccctcttctcgnctttctttgcccctctcctttttg

SEQ ID NO: 431215 - DNA, 916 bp, Homo Sapiens
  misc_feature (50)..(50): n is a, c, g, or t
tcccagccactggcctggagggtctctgggatagggaccttgagggtctnctacatggggacccccacaccagcgtctcatttcacccagagcgcatggcgccctctagcgtgaagccagtgggagaagactgggccgcggcagaaccatgaggccacactcggcccgactggtgagggattaacgttgaggtttttaggaatgtagaaagcaagcagaagagggatggtccatctgggtccctcaaaggcatgagtgacagattccaccctcaacggagggcaggtgtcaccgggagaactcccacatggaaagaaagacacaagtggctgaggatgggcacacaccgggatactgggtaccatgccctagacagccaggtctccctgagctcctctggccccgcggctccgtggacactgggctggtggcagaagctggcacgagagagtgtgccctgagccagctgctgccctagcagcctggggacgctcaggccctgcttccccacttcccaggggccaccaaatggcctcggtggatgcctttgctctacttaagacgttctttttgggacttacctcctagccaaagcaggtgttttcttgtatttgataaacctggcaatttatccagcaggagtcaggagacagaagcgggttactgggcccaggggctctgagggagcccctttccgaacagggcaaagcaggaggggcccttcccaaagccactactgtgacctgctgttctcatccgctgtggaccgtgcccccagtccctggtgaccagagaacaggccctcagcctctgcctccccagtgaccccagaacggggctggaatcagctacttttgctccccacattcctgcacattgcccgggtccagctcacccttgagaacctagagaaggc

SEQ ID NO: 431216 - DNA, 583 bp, Homo Sapiens
  misc_feature (538)..(538): n is a, c, g, or t
  misc_feature (544)..(544): n is a, c, g, or t
  misc_feature (568)..(568): n is a, c, g, or t
atatagcctttttcctaattaagagaaccacattttattcctaacttattactattaatgacagcacaggcatcaaattttaaggtgacttgtttgggcacccctttttcttctgttttggctaacactttactcatatcgtttatgagcccccaccagtcctcagtccttagtcttattttaaaaactgtggtcatgggaggctcagatgggtcataaacacatcaggttggtcatttcctgggctacataccttgtatagaataacattatacaaacaagttctttttagagttccagtatacttataataaccataaaataataggactgtagcaaccttttgtcctatctcagtgacttgatgtatacactgggaacagtcctcagtctgaggaaggtcagttgaagtccttactgtacaagtccaaattttaagggaaaatgagtcctgcgatgagttttctcatgcttcgggcctgtgtggggccagtccaggcttctgcggtgtggactgggagcagcggtttgtccctcnttcttncaggtcactttggcaggggagttngggtgaaggctggct

SEQ ID NO: 431217 - DNA, 1311 bp, Homo Sapiens
  misc_feature (32)..(32): n is a, c, g, or t
  misc_feature (35)..(35): n is a, c, g, or t
  misc_feature (37)..(37): n is a, c, g, or t
  misc_feature (64)..(64): n is a, c, g, or t
  misc_feature (68)..(139): n is a, c, g, or t
gtatctcaccagaactctctgtcaatacatcnccntncactttgaattccttttctttctcaancttnnnnnnnnnnnnnnnnnnnnnnnnnnnnnnnnnnnnnnnnnnnnnnnnnnnnnnnnnnnnnnnnnnnnnnnnaagacaaatgcctctacctagcagaagtcagttgggttggctagtgcatggtttccaaatgttcagcagagatgaactggggtaggtaattttgcaggaatttgaaccctattgtggaaatactgttatttcccttagcaatcagcaaaaactgagaaatttagtgacttgcatcaccatgacacagtatagcatttggcaggtaattgttcagcgacttaactagatgaattgactttttagaaaaggtgatttcaaattgaagaatttctggaaacaaagttcagatcctgtggtgtggctggccttggtttttacagttcaatcttgcatgcagggaaggattcatcttgcataaccactgtgctgctgcttgctaaaaccatgatgttgagatcttgctgtttctcatgggtctcctggtaccattccctcatcacttctgagtcatgagttgggatcagtgtcacctgcatgttgctgccccactgagcctttccttccaacaaagcgtcccaggacagcccggctgggctcctcagcagcagggtcattcccactcaccacgtagtaggaagaccgcactctcttgaaaaattccacatcaacattcttactattgctgtggttaggaatgtagcacaggtccaaatacacagggaggcctgggggcacagcagatgacttggtcgtcttggtagttcctggtcctgcagtggcggtcttggccgacttggatgcagaggcattggcagcattcttggtctccttgtctttctcttccccacgtgcagctttgacctcaggagtggtggtgggttttgctgccttttccacagattctttcttcttaggagaagccaccctggacactttatccgaggattctttcaagcccgctggttttggtgaagctgccaagggcttagacttcccatcactctttttgacaggtgaagatgacttggtctttgtacctggctttttggttttggtcttctctttcagatctttctttagagctttgcccaggttctgctcaatgtccaaggcctctgggtccaccatggacacatcagggtggcgtggcgaaggggctgcggtcttgcacgggagctggaggtgggtccatgtgtttgtacgtgacagttttgtctgtggggttaggtctg

SEQ ID NO: 431218 - DNA, 384 bp, Homo Sapiens
  misc_feature (15)..(15): n is a, c, g, or t
  misc_feature (52)..(52): n is a, c, g, or t
  misc_feature (62)..(153): n is a, c, g, or t
  misc_feature (234)..(248): n is a, c, g, or t
cccctgaagtaagcnggggattttacagggcatggtgccccacccatgcccntgggccaaannnnnnnnnnnnnnnnnnnnnnnnnnnnnnnnnnnnnnnnnnnnnnnnnnnnnnnnnnnnnnnnnnnnnnnnnnnnnnnnnnnnnnnnnnnncatttaatgtacatttattcttaacacgtggaacatatagtataaagatttcatactgaataaatgatattcattaagccnnnnnnnnnnnnnnnggaggaatttacatcaagttttagctacattgttgaaatacaaatatgcagattttatcactgaaaaaatctcaattgtgtttcttcatcagaacttcaactgaacctagaactttttcacacctcgattagaaag

SEQ ID NO: 431219 - DNA, 465 bp, Homo Sapiens
  misc_feature (56)..(70): n is a, c, g, or t
cgtgcgaatatatagtataaagatttcatactgaataaatgatattcattaagccnnnnnnnnnnnnnnnggaggaatttacatcaagttttagctacattgttgaaatacaaatatgcagattttatcactgaataaatctcaattgtgtttcttcatcagaacttcaactgaacctagaactttttcacacctcgattagaaagaaaacttaactatacataaccccagaaaaaaataaactataagttgattggctgctgagacagcaaggactttttacagagacctgtacagcatcgcaccaagaggggcgatatctggcaagagattaaatagctgtgtctcgctttgtgcaggtcaccaacttgttaactcgtcatactataaaggggtagctgggaggaggaccaaactgtggggatccaagggtatgtgcaatgtacaacgtcatatatattcgca

SEQ ID NO: 431220 - DNA, 755 bp, Homo Sapiens
ttttttttaggtttaatccttaactattgaaattttaaatgatgaatgtaaagtcaatccaagtctttgcttatttgcaatgcacaaactatttttttgtaacttgcaggtgaaatacattcttttcacatgataatgttttcgcccttatttatggtcttttattatttttcttgagtccttttcctttaatagtttaataagtcacttctggcttgtctagagagcaatcctagcacaataatgtttcaacttgcaaggaagaacgcccttattgagttgatagaactccaccagtctgtattagatctgtaaatcttgtgtggccatcatccattgtgtggaacatttcaccgtcatcttctactggtataatttgaaagtgctttattttttgtccctgactcattgtcagttcgaaagttttggggttactctgcctttcccgtaccaagaaaactccatccacacgtccttgctgaatattcaatctgctgaccctcatctctctgatattatgtggtcgaaaccattgtgtggaatccgatggttatcccttgtttgagttcatacttttgtttaataggcatctggtgtctacctgtaggcttcccatactgtaaccatactatatcacctccaatcgaaaaccttcttaattccgatatttgaatgcgcctcttcctagcctttttctataacatcctgttctttttgcgcctgcgaagtctccttgctctcttggcaatattctg

SEQ ID NO: 431221 - DNA, 727 bp, Homo Sapiens
  misc_feature (187)..(210): n is a, c, g, or t
  misc_feature (230)..(274): n is a, c, g, or t
cactggtgggttctgagtcttcactttattactatgtcaccagaagtcaccaccttcacttggttcaccacagatggatggatgtcataaaggagggtgccacggggccactggattcactcgagacttaaccaggtggtgggggggtctagagtggaggcccaggatggggaccgcccttcaccgnnnnnnnnnnnnnnnnnnnnnnnngatatatttgtggagccttnnnnnnnnnnnnnnnnnnnnnnnnnnnnnnnnnnnnnnnnnnnnncacaggcagtaacgctgcgggaggggccggggcaccgacaagggctgtgcgcaccaggacatggggagtgtcaggtcaagtgcatcgctgggaggcagccggcccagtcccttctcccataaactcctgggaggggcattccccctttcgtgctccttagagaatcaaaggggtcttgggccaaggttaggggtctcccagggctaacaggcagggtgtctcagttacatggggaaacctgggatccccgaggctttgaagatcaagaatcaccagggaaggatggagtagggaactaacgtcagtcccgtgggaattagcccctcaactgcgacacccccaggtggataggagccgtgcaggcaggacagtctgtgactgcccaggatgagccaactcagaaggcagaagacctgactcctgaacctctcccatcccgggaattccggaccc

SEQ ID NO: 431222 - DNA, 2740 bp, Homo Sapiens
  misc_feature (195)..(218): n is a, c, g, or t
  misc_feature (238)..(283): n is a, c, g, or t
tgcaatcgctggtcgggttctgagtcttcactttattactatgtcaccaggagtcaccacctttcacttggttcaccacagatggatggatgtcataaaggagggtgccacggggccactggattcactcgagacttaaccagttggtggggggttctaagagtgggggcccaggatgggaccgcccttcaccgnnnnnnnnnnnnnnnnnnnnnnnngatatattttgtggagcctnnnnnnnnnnnnnnnnnnnnnnnnnnnnnnnnnnnnnnnnnnnnnncacaggcagtaacgctgcgggaggggccggggcaccgacaagggctgtgcgcaccaggacatggggagtgtcaggtcaagtgcatcgctgggaggcagccggcccagtcccttctcccataaactcctgggaggggcattccccctttcgtgctccttagagaatcaaaggggtcttgggccaaggttaggggtctcccagggctaacaggcagggtgtctcagttacatggggaaacctgggatccccgaggctttgaagatcaagaatcaccagggaaggatggagtagggaactaacgtcagtcccctgggaattagcccctcaactgcgacacccccaggtggataggagccgtgcaggcaggacagtctgtgactgcccaggatgagccaactcagaaggcagaagacctgactcctgaacctctccctctgtgcttgaccttggacaagtcgctgtctccctaccccagactctgccgactctaagcgtccttgcgactctacacttatgtgaaaccttttttcctgggccctctcttgtgcttgatggggaggagggagccaccctgcagggtccagctgcaggagggcccttctccaaggaaagctttgggagcaagggagaagtaggggagggcagctgggaggaaaagggataccggacagagttgggcctggggttccccaggggctgtcctctgccaacagaaggagcgagtttccccatgaaccttccagggcagagtcaggagccctgggtcccatccaaatctcgccctccatctctcaccctctctcatctccatcctgggcaggtccctgccagagcccagcctgatggggaagatcatgcctggaagggcttctgggctgaacccgggaagagtgagggattcttcgtgagatgactcagcaccccccattcctggcaggagtcttgacagctttccctgcctagggtggcaggcagggcctgtcacaaacacccaagatggagttaagcttacctggtaccctgcctccggctgaggatcaccagcagctggctggcacccgaggagaaacagatgggcagtaccctgaggtctcctagtgcccatcagcaggagaggcttttggtggacagtgggtgagggtcagaacatctcacagcctcttgtggtgggcacagaacttcactctgccataaacactcctgccctcactcacgccctcacctttggcctggtacaggtttcactcttcaggccaacagataacctgcccccatgctggtcccatgtgggccacctggcggcgggggactgtggacagagccccttctccggattggaaaatgaagtcagcaacaaccagctgtcacacagctggctggggtcctctccatcactgctgtcctttgggaggacttggacacacctgagtttagatccgtgttccactgccaactcgcctatgcttgccgagcctcagtttcccttctgttaaatggggataatggtgctacttctctgcttaggacttcctcctctttcccttaactctggcccagctttggggccatcgaagcagggaccacccatgcccttggtatctccagcacaggggccgggtaactgctgagtgagtaagcaggtgagggatcgcctgcctcttaggattcttagatgggggatggggggatggtggtgaaaacacccagcactgggcccgtccaccacctgctctgctctgctccctgaaggacaggccagtggacactgggtggacagggggatgggcccccagcgctctcccatacctccctgtcccttatggctcagtgaagagcccaccttgtgcaagaatcgacctgcccccactcagaagagattatgacctcctcaggccccacggccctctttgggcctttgggtcacctgccacactctcccctacagcccatggtcttccctgggcctcccatgcctcaggggctcttgcctgtgtcatcctgggggcagtgtttctccacggccacagcccaggagccgacctggctgattccaaagccctgtccttgccgctctgcctcccatagggaggctggctccacagtgggccttctggaaggccaaggaaacacctctcatgcgcttggctgctgcagcccccgaaccctgactgaccccagatgagaggagaggtgacatagtgtcccagatcagttctgtttcctgggaggtcacaagggcagggaatcgaggcacctgctgggcagctggggccaagaaaaccaggcgtcagggccagctttgccactcactcaccgtgacctcgggccagtcacaccctcatctgtgccttgttgtccacccagccctaggtaagggcttagtgacccctcctagaggcaaggacagtgcgacgcgtggtcgacgatatcccgagaattccggaccgtaccagcctg

SEQ ID NO: 431223 - DNA, 445 bp, Homo Sapiens
  misc_feature (187)..(210): n is a, c, g, or t
  misc_feature (228)..(274): n is a, c, g, or t
tttttttgggttctgagtcttcactttattactatgtcaccagaagtcaccaccttcacttggttcaccacagatggatggatgtcataaaggagggtgccacggggccactggattcactcgagacttaaccaggtggtgggggggtctagagtggaggcccaggatggggaccgcccttcaccgnnnnnnnnnnnnnnnnnnnnnnnngatatatttgtggagccnnnnnnnnnnnnnnnnnnnnnnnnnnnnnnnnnnnnnnnnnnnnnnncacaggcagtaacgctgcgggaggggccggggcaccgacaagggctgtgcgcaccgggacattgggagtgtcaggtcaagtgcatcgctgggaggcagccggcccagtcccttctcccataaactcctgggaggggcattccccctttcgtgctccttagagaatcaaagg

SEQ ID NO: 431224 - DNA, 483 bp, Homo Sapiens
  misc_feature (145)..(168): n is a, c, g, or t
  misc_feature (186)..(232): n is a, c, g, or t
aagtcaccaccttcacttggttcaccacaggatggatggatgtcataaaggagggtgccacggggccactggattcactcgagacttaaccaggtggtgggggggtctagagtgggggcccaggatggggaccgcccttcaccgnnnnnnnnnnnnnnnnnnnnnnnngatatatttgtggagccnnnnnnnnnnnnnnnnnnnnnnnnnnnnnnnnnnnnnnnnnnnnnnncacaggcagtaacgctgcgggaggggccggggcaccgacaagggctgtgcgcaccaggacatggggagtgtcaggtcaagtgcatcgctgggaggcagccggcccagtcccttctcccataaactcctgggaggggcattccccctttcgtgctccttagagaatcaaaggggtcttgggccaaggttaggggtctcccagggctaacaggcagggtgtctcagttacatggggaaacctgggatccccga

SEQ ID NO: 431225 - DNA, 390 bp, Homo Sapiens
  misc_feature (187)..(210): n is a, c, g, or t
  misc_feature (228)..(274): n is a, c, g, or t
  misc_feature (322)..(322): n is a, c, g, or t
  misc_feature (345)..(345): n is a, c, g, or t
cgctggtgggttctgagtcttcactttattactatgtcaccagaagtcaccaccttcacttggttcaccacagatggatggatgtcataaaggagggtgccacggggccactggattcactcgagacttaaccaggtggtgggggggtctagagtgggggcccaggatggggaccgcccttcaccgnnnnnnnnnnnnnnnnnnnnnnnngatatatttgtggagccnnnnnnnnnnnnnnnnnnnnnnnnnnnnnnnnnnnnnnnnnnnnnnncacagggcagtaacgctgcgggaggggccggggcaccgacaagggctntgcgcaccagggacatgggggantttcaggtcaagtgcatcgctggggaggcagccggcccagtccct

SEQ ID NO: 431226 - DNA, 1352 bp, Homo Sapiens
  misc_feature (53)..(53): n is a, c, g, or t
  misc_feature (394)..(435): n is a, c, g, or t
  misc_feature (541)..(554): n is a, c, g, or t
  misc_feature (824)..(824): n is a, c, g, or t
  misc_feature (966)..(966): n is a, c, g, or t
atggcgtgcgcgaaacaactttgtgagtgtgcggcagcgctcagcggtgctcngtgtacatagaccacggagcagaatggtaacggcgcgtgtgcctgaccacacacaagactagtgcggcgcacagtgcacatcagggggggtgttctggagacaagtccgagggccgtcgtccggcgctgaggccgaaggaggaatccgggagcggggttcatgagcggggcatacggggtgcgctaaagagcggtgacacggcgtgatagtaaggcgcgcacgccctatataagtagctagacgtgaccagcggccctacacagaggcggcccgggtgccaaacaaaacggtgggcggcccgcggacgcggggctcccccaaaagcggtgtagaatgtgannnnnnnnnnnnnnnnnnnnnnnnnnnnnnnnnnnnnnnnnngcagaaagtgattctattcacggagcatgctgcctggcgaagagacattttgtgcttagaaaaggccgggccccacggggatggggccccgggctttgcggtttcnnnnnnnnnnnnnnaaacccgtttcatcgcgagtcccttgagcaggggccttttcctggtagagaagggaccaaggttaagagggccccccatggtgttcagagcacccagagccttccagccaggccaggactgtgggtcccacagaggcaaagccccttgcagaactaacctggagcgcaacatccccatagcctgtgtgagcagcacttgtacattttatttaattaaatcagccattgtacacattgcagctatgtattgttagtgttgtattttttttnccattaactaatacatgccctcatagatatattcaattagtgttatcaccatgggaacaagatgctgattcgtcaactgaaaattcacttcttctcacagtattcaagtttttgataacacagcaaaaatcaaaatcaaaanaaggtgaataaccattatgttgttacacagacatcatctgcactgcaaataacacaacagaaatgcttttcttgagctccagtgaaggttttgacaagaaggccatagggtgtctcaaaaagtttcaccatcggcctctcttattttggctgccaaagaatgtctcatttcctatccaactgccaaaaagtgctagcatttgaggcttaggagatttggcttgtgggaaacctccctcccaggaaattttttctcttggcaacattactttaaatgatgaagtgccattgtttgtcgcatttgtttttgacattcggagcaatgagtcatttttgcacaacaggaaaagaccagataattggaaaatgttcaatcctggaggatag

SEQ ID NO: 431227 - DNA, 1350 bp, Homo Sapiens
  misc_feature (34)..(34): n is a, c, g, or t
  misc_feature (43)..(44): n is a, c, g, or t
  misc_feature (46)..(48): n is a, c, g, or t
  misc_feature (55)..(55): n is a, c, g, or t
  misc_feature (67)..(67): n is a, c, g, or t
  misc_feature (76)..(76): n is a, c, g, or t
  misc_feature (89)..(89): n is a, c, g, or t
  misc_feature (91)..(91): n is a, c, g, or t
  misc_feature (95)..(95): n is a, c, g, or t
  misc_feature (158)..(158): n is a, c, g, or t
  misc_feature (164)..(164): n is a, c, g, or t
  misc_feature (172)..(192): n is a, c, g, or t
  misc_feature (284)..(285): n is a, c, g, or t
  misc_feature (289)..(289): n is a, c, g, or t
  misc_feature (293)..(293): n is a, c, g, or t
  misc_feature (1047)..(1080): n is a, c, g, or t
gccattgtacacattgcactatgtattgttagtnttgtatttnntnnnccattanctaatacatgcnctcataggnatattcaattggngntatnaccatgggagcaagatgctgattcgtcaactgaaaattcacttcttctcacagtattcaagtntttganaacacagnnnnnnnnnnnnnnnnnnnnnggtgaataaccattatgttgttacacagacatcatctgcactgcaaataacacaacagaaatgcttttcttgagctccagtgatggttttgnnaagntggncatagggtgtctcaaaaagtttcaccatcggcctctcttattttggctgccaaagaatgtctcatttcctatccaactgccaaaaagtgctagcatttgaggcttaggagatttggcttgtgggaaacctccctcccaggaaattttttctcttggcaacattactttaaatgatgaagtgccattgtttgtcgcatttgtttttgacattcggagcaatgagtcatttttgcacaacaggaaaagaccagataattggaaaatgttcaatccctggaggatagactctgtccttttttatttaaatttcatcttcattgaatatacttttctttaacaaatgactgattcaaaatgtatactgtttatatgaatatatttgtgaatatatatatgttaaaatgctacacagcttcaaccactagaggaataaggaagaggacatggaaattactcagattgttacagtcccttctttgagacaaacaaacagaagtgcacaaatgcacttaagagtttccaagggagtgtggatttcaaataaataaaccaaaaattttaaccaaaaccaaattttcaaggatttctcaatcttgtctgcaagctgaaaaacagacctagctggaaagtgaaaagtgctcactcagggtaaaaagaatggaaacaattaatgtgattagaagaggggtttgaccgtggtcttgatttttaaacgccacatgcaggtattagagaagatataaacctgagaggnnnnnnnnnnnnnnnnnnnnnnnnnnnnnnnnnnccactccaacatactgaaggagtttaaccttttatgtagtgggtaaatcttgtttccaatgaattatctacagtgcagtggccagaagaaagtaccactgtaagacagcgtggtttgctaaagcagcaatgaaaactggaaaactacagtagttatagcttttaaaataccctgccaacttgtccaagatctaaagacctgaagatgctagaatgccacacaatgtagctgccagcaactgaataccccatcggttcattctgcgtggcc

SEQ ID NO: 431228 - DNA, 4213 bp, Homo Sapiens
  misc_feature (211)..(236): n is a, c, g, or t
tgaatcattacccaaattttagccgacccattttcaaggatttctcaatctgtctgcaagctgtaaacagacctagctgggaaagtgaaaagtgctcactcagggtaaaaaagaatggacaataatgtgattagaagaggggtttgaccctggtcttgattctttaaacgccacatgcaggtattagagaagatattaacctgaagaaccnnnnnnnnnnnnnnnnnnnnnnnnnnccactccaacatactgaaggagtttaaccttttatgtagtgggtaaatcttgtttccaatgaattatctacagtgcagtggccagaagaaagtaccactgtaagacagcgtggtttgctaaagcagcaatgaaaactggaaaactacagtagttatagcttttaaaataccctgccaacttgtccaagatctaaagacctgaagatgctagaatgccacacaatgtagctgccagcaactgaataccccatcggttcattctgcgtggcctctgctcccttctcccctccctcagagtggctgttggagtcctaagccatggctggccagcaccagcaataacttctcaggacagttctgcaaggctactgacccacctttaactgggagcagtggctactctggaagttctaaggacataataggtttgaagtgcttcttttgcagtaaaactgtattatcactcgattgtgttagcaatatcttaattaaccattgttcagcaatttctagaggccttttattctgatgcccagtgtagttacaataggcagtggttttaattttaatatgttgttcatctgagcatttcagctatatacattgtacatagatattccttggaaggattcctacatagtgtcacttgaagaggtctgcaggtgaagttcttctgatcaatggattttcatggatcttgtgcagaagcaaagaacaatggaggtggccagttcccaggttagcacagacacaacaaagtattggatacagcatccagtatgaaggatgccatctttggtcacaaattagctttatagttaaagaggatgggggaaaactaaagcaaaatgccgtatatttgctaacagtggaaatgtcggggtatcccattaattaggccagttaggtcactcccctactgaaacaggaagctgcatattgagtgaatgtgtggtttctggtgtgagaactgggcagcccctcacttggcctcttgcttcaagtcctccttgcagaaatgccgaaggagctgctggagatcgcgctggaggtcgtcctggtctagtgcttctggtacatcctccaggtgctccaagtcaatgcgttttccatgctggtccttcaccacagccctcttctgtgtgatggctttactcattgttgtcctctgactgctcggtgtcactcttcaatacaacacgctttataactttggaatagccatccccttcctcgatgttgacaggttcctgtggcattccctgcaccataatctcttctttctctgtgccttcagaggatacataccgcctaatgattttcctagtaaccttctttaccacggtgtgtccatgctcatcaatgtattcttcttctgtgactgtttctgggggtatttcaggcatatcgtctcccttttcaaaagctgcatcttcatcgagtctttcacaggtctcaggctggttatcggcagactccactattacgaggctggttttccgcggagagctctcctctctgtgctctgagggctcttcgggttcttgtatgatgggagagcctccccgctcgctggatgttggggtctggaggtacagcttctcctcctctgcaggggtgctaacttcctcaggtgtcttgctgggagagctgggtactatcatagccttctgagtctctgatgtttctgttcctggagttgtcacaaaatattcctgctgatattccagagatgactcttcaggcaggtcttgcattttccctgagaaatcctgttgaacttgctccttgtgagtttggggaaagagtgctgttgctgagctgtccccctcagttttggggacgccatcctgaaaagtggaataaccaacagaaatgtcttcctctgagacgataggagggtgatcgcaggtctcactttctttagaaacagcttgctcctctttctgcttgtgctgtgcagtgcataactcctcttgaagtaccgagaacccttcactatgatccagtgtaatggtctgttcaatttctgcataactatgactgatgcgctcctggagaggttctgtgttggtctccatgagatgaacaatatccattcggttgatcttggtgagacattcaacgaggttggtatctgtagcatgtttcccatccctctctagccagtacttcaacagtgcatgactctggtcttgaagagagttgggattttcaattcgaatttgatgaatttgctcctcagtgaaatccagttctcttgctaattctgtccagctgaagccaaggtgatcagcaatataagccagcctttcctcgatccgttcctgctcatcctgtggatcttcagcatggtcatggccattttcatcagggatgcgttcaatcagagtctcaatagactcatcccaaatgggccttgtgtcaaagatgtcctcaggaactgagtgctcggtctcaacaggtggcagattttcaattactgatacttccagggcactactactttcatcgtctgaaactatttcctgctccctctctgactgtgtcagcctatccactaatttggaagcctcatcactaatctcctcaaagaattctatggaatttctgtaaaggtcaaagaaatgctccttactttcttttgtggggctcgtgccccccctgcaggaagatgtagtgcttctgctcttaactggcaatcgggatgtaagtatctttggtcttgtggccccttcttctgattctaactcaagttcctcggccctctctctgctctctgtttctgtctcagtgtaacttcgggtttttactgggcatttggtctttgaatccaaagaactagcatcagattcagatttgcttctattatctggtgcgatgcttgccatgtcctgtccctgaggagccactgtcttctggacagaggtgtctagatctgagagctgctgttcaactctttggaggggtactttgacagggagtttggactttggttttgcttcatccgccttattttcctcatctacactggatagaaaatcttcagaaactgaactctcatactctgcagatggaggtgctggggtggaagtgggcatagtccttacaggagttttggatttgctttcagtgaaaggcacattctccatgggtgcagtaggaatctcgattactgatttctgttcttctggggaagaatcgggagaatcatcacccctatctgaataaacagacctggtgagtgtggaaaaatctaactggacttgtacagctggttcagaagagtcggggcaggatatctgcttgtacaccagagagaggaggtatatcacccgtttgcacggtggggaggtccttggtccctacactaacagcttcttttgtaggtgtttcagtggaggctgaaatccccatttgggagttaagttgagcatccgaagcaggtatttcctctacttcctcactcacgtcatctggaagtaagtctggctcatcatccactgtttcttctgattctgaaagtgctagtgattcagctgatgtctccagcggtaggggatcagccccagtagccccttctttcacatcttcagagagagtctcttccctggattcttgaccaatttggaaaaagtgaaaactttcatctgcataggaccttttggtcatatcaatggcaccacttcgggtcatttcaaacaattttccttcctgaaacagaaatgggttttgctcacttgttggggtcccctcttcagttggggtcctagcaggagtggtgtcaggggtggtagcctgtgattgtctgtctaccatcaaaccaaatatcttttgttcttcctctttcacacgagcctcaaaggcttcatcgtcttcccgaatttcactccagaatcagaatccacatcagtttttgtgatgatgactttgcttatttgttcacccaaccactgttgttgcctatcaaaaaacga

SEQ ID NO: 431229 - DNA, 527 bp, Homo Sapiens
  misc_feature (78)..(86): n is a, c, g, or t
  misc_feature (210)..(230): n is a, c, g, or t
  misc_feature (401)..(401): n is a, c, g, or t
  misc_feature (407)..(407): n is a, c, g, or t
  misc_feature (479)..(479): n is a, c, g, or t
  misc_feature (491)..(491): n is a, c, g, or t
  misc_feature (512)..(512): n is a, c, g, or t
cacatttaacacttgtacattttatttaattaaatcagccattgtacacattgcagctatgtattgttagtgttgtannnnnnnnnccattaactaatacatgccctcatagatatattcaattagtgttatcaccatgggaacaagatgctgattcgtcaactgaaaattcacttcttctcacagtattcaagtttttgataacacagnnnnnnnnnnnnnnnnnnnnnggtgaataaccattatgttgttacacagacatcatctgcactgcaaataacacaacaggaaatgcttttcttgaggctccagtgaaggttttgacaaggaaggccataggggtgtctcaaaaagtttcaccatcgggcctctcttattttgggctgccaaaggaatgtctncatttncctattccaactggcccaaaaagtgctaggcttttgagggcttaggggggtttgggcttgtgggggaaaccnccctcccggggnttttttttctcttgggcaacnttactttaaatggtg

SEQ ID NO: 431230 - DNA, 499 bp, Homo Sapiens
aaactagacataccatttggtctataatccttaatctgggttttgatatgtggaaatgaatgtggttattccattataaagcaatgttttgttttgatagatgacagtgaaaagacctacatgaaccatcgaaaagttggaattctaaactcaataccagcaaagttttaatgctgagtagattacgaaatgttccatccacgctccaaatggcaaatacgcaggatggaaagtctaacagctaagttaccatattaattgcttaaaacataaaagtgttttaaagatcagttgctctatatttagaaatggctgtgagatttttgatgaaagggccttcataagtataaaaagtttcactgttatattattttgatcacggctgataacagacggccatcacaaacaccctctgacagaagtggaggaggaagtgtgaaactaaggttcaggagacacaatcccatttattgtgtttcctcacatttcagtgatactg

SEQ ID NO: 431231 - DNA, 2315 bp, Homo Sapiens
  misc_feature (456)..(456): n is a, c, g, or t
  misc_feature (510)..(510): n is a, c, g, or t
  misc_feature (534)..(534): n is a, c, g, or t
  misc_feature (555)..(555): n is a, c, g, or t
  misc_feature (558)..(558): n is a, c, g, or t
  misc_feature (560)..(560): n is a, c, g, or t
  misc_feature (575)..(575): n is a, c, g, or t
  misc_feature (578)..(579): n is a, c, g, or t
  misc_feature (581)..(581): n is a, c, g, or t
  misc_feature (591)..(591): n is a, c, g, or t
  misc_feature (594)..(594): n is a, c, g, or t
  misc_feature (596)..(596): n is a, c, g, or t
  misc_feature (599)..(599): n is a, c, g, or t
  misc_feature (601)..(601): n is a, c, g, or t
  misc_feature (606)..(606): n is a, c, g, or t
  misc_feature (613)..(614): n is a, c, g, or t
  misc_feature (627)..(628): n is a, c, g, or t
  misc_feature (630)..(631): n is a, c, g, or t
  misc_feature (638)..(638): n is a, c, g, or t
  misc_feature (640)..(640): n is a, c, g, or t
  misc_feature (645)..(645): n is a, c, g, or t
  misc_feature (647)..(648): n is a, c, g, or t
  misc_feature (650)..(653): n is a, c, g, or t
  misc_feature (655)..(658): n is a, c, g, or t
  misc_feature (660)..(664): n is a, c, g, or t
  misc_feature (666)..(666): n is a, c, g, or t
  misc_feature (677)..(678): n is a, c, g, or t
  misc_feature (686)..(687): n is a, c, g, or t
  misc_feature (693)..(693): n is a, c, g, or t
  misc_feature (710)..(710): n is a, c, g, or t
  misc_feature (712)..(712): n is a, c, g, or t
  misc_feature (714)..(714): n is a, c, g, or t
  misc_feature (721)..(721): n is a, c, g, or t
  misc_feature (723)..(723): n is a, c, g, or t
  misc_feature (725)..(725): n is a, c, g, or t
  misc_feature (730)..(731): n is a, c, g, or t
  misc_feature (734)..(734): n is a, c, g, or t
  misc_feature (754)..(754): n is a, c, g, or t
  misc_feature (759)..(759): n is a, c, g, or t
  misc_feature (763)..(763): n is a, c, g, or t
  misc_feature (801)..(801): n is a, c, g, or t
  misc_feature (1870)..(1884): n is a, c, g, or t
tttggtataaatactttattaaagaaatattgtcattttcgttaaaaaatacattagagaagagagttttgggttaccagtctttcctcacagaatcacagtgtaagatattcatttcttgacgtctctaggaaccttcaggccacggatcagcagaacatacacgaacaagggaaaaaaattcctcttaattttactgatggccccccgtctctcaggtggtctgagagtggcacttggtaaacagtgtgtgtttaatccagcctctgcctctgactacctttaagaccaggactcgaagcagagtgagaggcctccctccacccacctcggggcgagtgaagacacagcttacagaggcgttcaaagtagtgacgcagtgaggtctgaatgaacacggaggattttattactcaccattaatggtagtgaaatgcccttcggtggataccatcncgcgaggtagggatgacattccagaggaaatctgttaatggggcaacgtttttntttctgtacatttacatacaaatntcccccaaaggtttaacacangcnanaccatgtagacacgnagnngngaacgccagntcngnccncngcgcntacccgnncctattgaacgannanngtcagancnttccnanncnnnngnnnngnnnnncngttttcatatnncaacctcnnggcctnggtgggaagtgttcgcngntngatatgncncnccatnntgnttttccaaaacacacggganatganagcnaggtggtgccttctagatgagaggacagctgtagtgtngacctcccccgcacatgcgatacctcgggccgggcggtgtgacctcacaggcccacttatggcacttgcagtttggtattgctcatttggttctaggaagcggtggtgtctgagtgtgatacttcccttacgaggtttgtttttgttttctttctgttctgtagccaaaccaatttaccagcccgtcttccagatgcaggtgatcttactctcagtaaacaaaaacatgtaacctttttcctgtttctcttgggtggtaataattttagggcatttgataagagtttgacttcagaaaaagaacaaagtgaagaaatgttcagctccatctcaggtgttcacatttgtgcataacttttattgaaaggctgacagggtaggctagcggaacggaggggtgtgtggaggagagtagcagggggtgggagggtcaagttgaaacagtgggtgcctgcgaagggtctccctattagccaggaagggaacagcacagaggggttcaagcgtgacagacggtgctgggaagtgggcagccgtagcagcctcccctgctgagcccggcgggcccagatgcgtatcaggcttgggtgggtcctgccaccttgctcacttggtaccggatttcccggggctgtgcccacagggaagtgttgctgctctggcaacatttcataaaggtgttgctcaacagcttcaggtatccctaggctgaagctgccaccaaacaggcacccggcctcctcctcctcaggctgccctgggaggagagctgtgggaccgcctcgccggctgagagccattacctgccgaccgtcggcaagtcacctcactcacacccgctggactctgctcccaagagcccaggctgttttcctcaaagctagcctcttttccagtcatcgatggattagtcctgatggctgaagtgctgagcagtgtcttcgttggaccagttttttattgtcatttgaggtggagatcagagatcatgaccagaagagtgtgagtgctgtcccttgccaccaacttcctagagatttcgggcagcactctacagcttcaatttccnnnnnnnnnnnnnnngtttacacgaccagtgagactgctcgcaactttcatcacttagcatatccttccacaacacagtacagtaagtggactgcagggtggcctggtgctgagggtgatgggtgcagacgtacacctgtccaggtgcaggctcaggggcctcgctggatccttcccaccttccccaactgcctactggcctggctactggataggtcctattctgtacgtaatgggggtttgttgacaggtggctttatagcaagtactccaaaaaaggtaaaaggaatttcacaagtttggcacgcaaaggctgcacagatctaaagaaaggcctttgtaaaggtgaatgcaaactaatgttgaaacatggaaatgtgactttaaaaaagagggaaggtgaggatgtccacgcgtccgcggacgcgtggttccacccgggaaaa

SEQ ID NO: 431232 - DNA, 422 bp, Homo Sapiens
  misc_feature (305)..(305): n is a, c, g, or t
  misc_feature (314)..(314): n is a, c, g, or t
  misc_feature (324)..(324): n is a, c, g, or t
  misc_feature (346)..(346): n is a, c, g, or t
  misc_feature (412)..(412): n is a, c, g, or t
aatggggcaacgtttttatttctgtacatttacatacaaattttccccaaaggtacaacagatgcgacaccatgcagacacgcagctgtgaacgacagttcagaactcagcgtaagttggtgctatgaacgagcaccgtcagagaattcccacccacacgtacagaaacacagtttttatattacaacctcaaggacagggagggaagttttcgccgctagacatgacacaccatactgcttttccaaaacacacgggacatgaaagcgaggtggtgccttctagacgagaggacagctgtagtntgggacctnccccggcaantgggattacctcgggccgggcnggtgtgacctcacaggcccactttatgggcactttgcagtttggggatttgcttcattttgggttntagggaaggc

SEQ ID NO: 431233 - DNA, 657 bp, Homo Sapiens
  misc_feature (210)..(219): n is a, c, g, or t
  misc_feature (593)..(593): n is a, c, g, or t
  misc_feature (617)..(617): n is a, c, g, or t
acggtcccgaatcccgggtctacccacgcgtccgggaagctataaacctttgagtgcttttgtgatgtgatgtgctctatgggaggctgtgtatgagttcaatcttgagaaacttgcttgataaaaatgtgactattaacacttactgttccttcctcttgttaagagtctcttgagaagatgaatttttatttaaatactgttttgtcnnnnnnnnnncttcctggttataaaatgcttacagatattttggtccttagagttatacctatccctcacaaataacctgaaacataaatataataacagagtatgtcacaaagataggaaattcctggtgattccagagaaactggaatctctagtttgtaaggaaacatagtctctatctttggcttctttggcttgtaaagtgcttgcgtattatacagattgtccccagtttgttgactcctattatcgacttgaacctgctctagaaaggcttttgcccccattactccaaggaaactgcagtgatcaaggttgcaaattacctcgtcttttttaaaatcaagcatcattttccagtcttcatttttactgggcttatncagcagcatttaaatatggttaancaccttcttttcctttcaagtactttggtttattttggca

SEQ ID NO: 431234 - DNA, 660 bp, Homo Sapiens
tgcagcactgtgaggacccccaagttggacgtgctcggagggaaagatttatggcctctgtcgagggacctgcagcgtgagagccagtggcatctgcgcggcttgcctggctcttgctgtatcctcacttcctgtggagcggggattggctctgagaaggagtgttctctgtctgcctggcaaaggtgctgtggaataggcttggcatgccaccctcttttagagagtgacagttacagttgtaacaagcctacttcatattggccccctcagttagcctttttgaggcaatgccatttctagagttgaaaaagccctggacccaaactgcggcactgttgaataaagggcagtcctactcctgtccttttagagtggcttagtgtgacacacaggcatctcccaggccaagcacacacaggctgcgcccagttccgcaggagccgtcccacagcgtggctctctggattctcccacttgtcctccttggaaggagctcttgctggccagtgtttggaggggaggatgagtgcctgtcactgaggcctcactatggttggcgtctgaagctgggcggtcgtcaggcctgtgctgagagccgcagcccctgtgcacacctaacacaggggcgctccccctgctgcttccctggctcagttc

SEQ ID NO: 431235 - DNA, 1573 bp, Homo Sapiens
attctattattcattttaccaaatcgaggtgtagatttaaggccttttactgaatactaatttgaaaatgtccattatggttggcgatgttcgatcaacaacaaatcccagcgggctaggttctattgaaggcttgacacaagcaccttattagatctgtgatgtgtctctgcaaatcatattctatctttagacacagatgccacgattagcacctcatgagtgatgacaccacttaaaagagtggtcttctctgtgaacagcatcaaaacaagctgtcttgtaagtaaaggccgctccactgtgaatgatgttactcaccaatgtatataggacctacattttttaaagaaactcataaagaaataaagcacccgtacctctagtttttcactgaactcctcagtatagggaataaatcgactatctgtgtcccccttgtaaaaccaagtacagcgtctcacttcggctggctcctcttcccagtaggcagccttccttattcggtcatagaggtaaacatcgtagcgccctccatccgtgccaagaaccacgctctccggatctggctgaactgaattatagatttcttcaagattcaaagagtcgaacacactaaaaggcatccacagttgtttgtattctacctccttgcagtaaaaccagtggggctgaacaggctcatattggttttgaagtagaaaaggagatggcacttgaacagagggagccccaggtctggcaggtacctgctgctgtgccggtgactgcactgaagaaggaaccggtggcaaagatcctggaggcatctggtacatctgaacagggggtccagaaggtggaggatgagcaggagggcctggtgtttggcactgctgcagctggggtggtgcaatgtaaggattagccctgctgctgccaggggtatggcgatatggattgtatcctggttggggaattccttggggttggttcccaaaatatgaaggagggagactacttggctgataaggtagataagaatttattcccatcagtgaggaaggtggagcaccaggttgagccttcgaaatggatggtgaaaatgcattcgagacatcttgggatccagcttgtaaaagggagagcagtcaggggcttggggaatcctgacttgtccaactgatggttgctgcagttgttaatggtgacttgttcaatattcccaaaagggatcatctgctgctttgatacctgagagaagtaacttatatgtctgtggggcagactgtgtgtatagaacgttctgtccaatggaagctgtcctctctctaccaacatctgtggaatcactctcccggtaagagcatgggaggccggagaagtggaggcctgggtgactgggatgaagggcacattgatagctgaactccgtggccgaggaggagaaaagtaagttagtgcccgatgaggaagtggaggcgccgccgctgccaccgttaggttttctctcggccatggctgcggcccaccgtccgatacacgtctccgggtacccggtaccacaccactgaccggaaaccgatcacgctcc

SEQ ID NO: 431236 - DNA, 457 bp, Homo Sapiens
  misc_feature (64)..(64): n is a, c, g, or t
  misc_feature (66)..(66): n is a, c, g, or t
  misc_feature (440)..(440): n is a, c, g, or t
cacaatctgtggaaaggcttttcttttggaatctctccttaaaaatcatgtagcagcccatggnanaagtttacttaaatgtccacgttgtaattttgaatcaaatttcccaagaggttttaagaaacatttaactcattgtcaaagccggcataatgaagaggcaaataaaaagctaatggaagctcttgaaccgccactggaggagcagcaaatttgataacacagtgtgaatatttgttctacaaaggtgtttgttggaaccattctttgtaagtatagcttatcagatagcatagttggatcagtagatgacatgtatggtgtaccgtgtttcactgtctcagttgtgttactaaggaatgaggcatttgatccatttttttctggtctctgtctatgtgactatcttgtaagtcaataaatttctgtatagtccnggtgggttaaacttctc

SEQ ID NO: 431237 - DNA, 2580 bp, Homo Sapiens
cacagagagatgagtcatttatgcctttaatgttacatgtacaaaactgtgtattagtgacgacttatgagggtgctgaagacagaggtgactgggtaccaagaagtctgtacaccaaagaggaactggaactcaaggcaagaatgaggacaagaaaaaaagagaataagggctttgttattttcttatttagtaaaggagacaccatccacaaagatgaaagctgacttaggtagaaatgggaaagaccgaaaagttacctaagtgttttaatataacgaaactttctctctttgaggcttgcaagtagagaacagtgaagtgatataattctaactactgtagtaaatttctcagtttttgagtttctaaaggttcactgatatggcagagattgggccaaaaggtcttttcttcatgagaccaccaccataactcactgcttaaaaggagtatgaagggaaattgtgctccccttcccaccccacttaaagaaaaccacctatatacagaggcagagtaatgtggtaactagaaggcctcaactaaaaagagaagtgagtccgtccttacccatggttttcctaacccagctgcttgttgggaggaagcaaatgctactgcttgctcaacacaagttgtgacagctgttggaggatcaggcaaaggaggactctggaaagggttaagaaactcatcaataaccatgccatggttccacatgagacactaatcacatcacaagggctgcaactgtcactgatatactaggtcaagaaaagatctactttccagaaacttcaaagcatgtatgtaatatacaaagatcagtaagaccacagaaaaaataatacaccaaccagaaaataacaatgactctttataaacttgtatggggtctaaattatcccttgtaatatatatgtgtgtattcattccacagagaattagatgatccgcctccaggtaacctgctgggaatttcttgagattttggctccccttgaatggccgcatccaacttgttttgttagaactcccagcatcacagcgatggcagctctcttagattccccatacatccacgacctatatcatgtccaataaatcgtccacatcaccaccttcttcaaatacagctgctgtgtctccacttggtttgtctttgggggccagaaactttttggcttcctcagctgtgacagaacttccagaggcttcctctttggtgatcagagtaattccatcctggacaacaatttcccagaaatgatttaattgtttaatttccactttctcttgaagggctttcaggaagttgttaaagcgctgctcttctgaaaacttaatggcttcttcccggaaggctcggatgcagtctatgctcttcataaaatacggtgtttcattagtatccaaaaactgttcgatgtgatttatgagctggttactcgcttcctcaaagctggccttcttctgtttcactagaacacggaagttttcagcaggattcacacttccaacagaggtgacactgccttcagccagactggagacgctgaagtgggctcccccttgctcagtctttaattttttagctgtaggtccatcttcatggttgtcttggaaaatttcctgagcagtcacttgatcctttttcttggcttcaatcagaggaaaaagggtctttattttagagagaggaatctgacttttcgttgtcacctcagcgggaggattcagcatattccaaatatgctgctgaattgggggtagaggctcccggggatgtaaagctctgtgcagcagacactgaaataatctctgaaatcgaggatttgggattttggtggttggaaacaagtcttcaagggtgtctgtcttctcatctttctttgccaagctcatggagtcaatcaaagcatcaacagcattcaactgtgcctcggtgggagcatatttcttactgtttttcaaggatgaaaacatgtattgccgcaagtcttccatgaaaggcagctgcacatacactaaacactcatagttatgcttgatatgaggaaaagccacgccgacttgaggattagctcttttgtcataagcatatcgaactatggccaccatgtctaagtcatccaaagcatgaatcagggaggaaagtgcaactgcagctgcctcatcatctcttgctgcaaagacctttagaacttgatttcccatgaagaatcttctctgaacctgagaagatttacaaaatcccaaaacagagaagcacttcccctccgatttatatttcatttgttcctcatccactttagagaaaggaactatatcacttccatagcggaacccttgaataatatcctcttttaaaacttcagtttcatcatcatcatttaagcaataaactgtttctttttgtatatcttctttttttagggtttttgcatccacaactgtccaagtctttttaactctctcctgtagaatcgatttataggctgcaatccttatagacaaattggagccaatggtcagtcggcagggccagtgaatggaatgcctctcaattttcttgcc

SEQ ID NO: 431238 - DNA, 1589 bp, Homo Sapiens
  misc_feature (65)..(65): n is a, c, g, or t
aaagtccttcaaaggggtgtcctgtcctccctccatcctttcctttggcccaaagcctccatggnagtccaatcaaaagcatccaaacagcattccaactgtgcccttgggtggggagccatatttccttacggtttttccagggatgaaaaacatgtattgcccgcaagtcttcccatgaaaaggcagctgccacatacactaaaacactcatagttatgcttggatatgagggaaaagccacgccgacttgaggattagctcttttgtcataagcatatcgaactatggccaccatgtctaagtcatccaaagcatgaatcagggaggaaagtgcaactgcagctgcctcatcatctcttgctgcaaagacctttagaacttgatttcccatgaagaatcttctctgaacctgagaagatttacaaaatcccaaaacagagaagcacttcccctccgatttatatttcatttgttcctcatccactttagagaaaggaactatatcacttccatagcggaacccttgaataatatcctcttttaaaacttcagtttcatcatcatcatttaagcaataaactgtttctttttgtatatcttctttttttagggtttttgcatccacaactgtccaagtctttttaactctctcctgtagaatcgatttataggctgcaatccttatagacaaattggagccaatggtcagtcggcagggccagtgaatggaatgcctctcaattttcttgaagacgcacagttttctcagactctcactgaatgaataaatttcatccaacccatcttcaccttctaaagatatcatcaccattttcactatctcaagaccttctttttgctgttcggtaattccttttagtggaaaggaaggcccatggccacctaagcgaaaggggccatctcctctgtccccacttccatcttccttgccaagtgagaaaggcaagaagaattgcagggagatgtcacatttcttcaagctatgaattataatatccagctgacttttgctgaatcggctgctgaggtcagtgaatatttcaatatgcctcttctcaaacttctttcctattgtttcatgttgaatcacatccatgctcacgattagtgcatccaggaagtcagcctgttgagaacctggttggattttgctttcaatgtcctccagcaaatcaaaatctggtagcatcagatgtctgtgcactgtgatgttctgatactgatccccaccagaaaggggattgtcagtgccatctgtaccaaacaggactaaagcaatctcatccttgttctcagcaaacacctgtcgctgtacaaacatggttatcaccttctttgcttgttcaaatggggattctataccaggaatggagttactcatggtaaagcccacgtccatacacagcacaacagctgccttattccccgaccgcaccatgttgccggtcctcaggcgctttggtcgcttcttccgggcgggaacctgccgtgtcgcaactcgcttccggtggacaagtcggcagatagcggaaagagccgcttcgtttcctgctaggcactgtaag

SEQ ID NO: 431239 - DNA, 823 bp, Homo Sapiens
  misc_feature (36)..(36): n is a, c, g, or t
  misc_feature (114)..(114): n is a, c, g, or t
gggccaggggaatgggagtgccttcctcaaattttnttgaagagacgccacagttttcttcagactctccactgaatggaataaattttcatcccaacccattctgccccgttntaaagatatcatcaccaattttcactatctcaagaccttctttttcctgttcggtaattccttttagtggaaaggaagggcccatggccacttaagcgaaaggggccatctcttctgtccccacttccatcttccttgccaagtgagaaaggcaagaagaattgcagggagatgtcacatttcttcaagctatgaattataatatccagctgacttttgctgaatcggctgctgaggtcagtgaatatttcaatatgcctcttctcaaacttctttcctattgtttcatgttgaatcacatccatgctcacgattagtgcatccaggaagtcagcctgttgagaacctggttggattttgctttcaatgtcctccagcaaatcaaaatctggtagcatcagatgtctgtgcactgtgatgttctgatactgatccccaccagaaaggggattgtcagtgccatctgtaccaaacaggactaaagcaatctcatccttgttctcagcaaacacctgtcgctgtacaaacatggttatcaccttctttgcttgttcaaatggggattctataccaggaatggagttactcatggtaaagcccacgtccatacacagcacaacagctgccttattccccgaccgcaccatgttgccggtcctcaggcgctttggtcgcttcttccgggcgggaacctgccgtgtcgccgggg

SEQ ID NO: 431240 - DNA, 1094 bp, Homo Sapiens
aagcgaggcctgggtggcgaattcggacgaggcaacatggtgcggtcggggaataaggcagctgttgtgctgtgtatggacgtgggctttaccatgagtaactccattcctggtatagaatccccatttgaacaagcaaagaaggtgataaccatgtttgtacagcgacaggtgtttgctgagaacaaggatgagattgctttagtcctgtttggtacagatggcactgacaatcccctttctggtggggatcagtatcagaacatcacagtgcacagacatctgatgctaccagattttgatttgctggaggacattgaaagcaaaatccaaccaggttctcaacaggctgacttcctggatgcactaatcgtgagcatggatgtgattcaacatgaaacaataggaaagaagtttgagaagaggcatattgaaatattcactgacctcagcagccgattcagcaaaagtcagctggatattataattcatagcttgaagaaatgtgacatctccctgcaattcttcttgcctttctcacttggcaaggaagatggaagtggggacagaggagatggcccctttcgcttaggtggccatgggccttcctttccactaaaaggaattaccgaacagcaaaaagaaggtcttgagatagtgaaaatggtgatgatatctttagaaggtgaagatgggttggatgaaatttattcattcagtgagagtctgagaaaactgtgcgtcttcaagaaaattgagaggcattccattcactggccctgccgactgaccattggctccaatttgtctataaggattgcagcctataaatcgattctacaggagagagtttaaaaagacttggacagttgttggatgcaaaaacccttaaaaaaagaagatattccaaaaagaaaccgttttattgctttaaatgatgatgaatgaaactgaaatttttaaagaaggatttaattccaggggttccgctatgggaagtgatttagttcccttttccctaaaggtggatgaaggaaccaatgaaataataaattcggaaaggggaaatgccttcccccggttttggggatttt

SEQ ID NO: 431241 - DNA, 483 bp, Homo Sapiens
  misc_feature (353)..(353): n is a, c, g, or t
  misc_feature (419)..(419): n is a, c, g, or t
  misc_feature (426)..(426): n is a, c, g, or t
  misc_feature (434)..(434): n is a, c, g, or t
  misc_feature (447)..(447): n is a, c, g, or t
gcttggcaaagaaagatgagaagacagacacccttgaagacttgtttccaaccaccaaaatcccaaatcctcgatttcagagattatttcagtgtctgctgcacagagctttacatccccgggagcctctacccccaattcagcagcatatttggaatatgctgaatcctcccgctgaggtgacaacgaaaagtcagattcctctctctaaaataaagaccctttttcctctgattgaagccaagaaaaaggatcaagtgactgctcagggaaattttccaaggacaaccatggaaggatgggacctacagctaaaaaatttaaaggacttgaggcaagggggggaggcccantttcaggcgtgttccagtcttgggcttgagggcagttgttcacctctgtttggggagttgttggantcctggntggaaaantttccgtgtttcntaggttggaaacagggagggaggggccagtttttga

SEQ ID NO: 431242 - DNA, 491 bp, Homo Sapiens
  misc_feature (266)..(266): n is a, c, g, or t
  misc_feature (361)..(361): n is a, c, g, or t
  misc_feature (367)..(367): n is a, c, g, or t
  misc_feature (374)..(374): n is a, c, g, or t
  misc_feature (381)..(381): n is a, c, g, or t
  misc_feature (450)..(450): n is a, c, g, or t
  misc_feature (466)..(466): n is a, c, g, or t
gaaaataacaatgactctttataaacttgtatggggtctaaattatcccttgtaatatatatgtgtgtattcattccacagagaattagatgatccgcctccagggaacctgctgggaatttcttgagattttggctccccttgaatggccgcatccaacttgttttgttagaactcccagcatcacagcgatggcagctctcttagattccccatacatccacgacctatatcatgtccaataaatcgtccacatcaccaccttnttcaaatacagctgctgtgtctccacttgggtttgtctttggggggccagaaactttttgggcttcctcagctgtgacaggaacttccagagggnttcctntttgggngatcagnggtaaattcccatctgggggcaaacaaattttccccaggaaatggatttaattggtttaaatttcccantttctcttgaaggggnctttcagggaggttgttaaaggcgg

SEQ ID NO: 431243 - DNA, 586 bp, Homo Sapiens
tccggtatttcccgggtcgacccacgcgtccgcggacgcgtgtgtatatattaaaggatttttctaggcaagaagctcaacttttttgccccataaaaataatttgtgcttaaatagtaactcatggttttcttttattaaatggggttgttgtcagtatgttaaacattgaagtaggaggaggatgcatattgtactatgcattcaaatttatcactgttttttctgacagactttccctttgtcctttctagttatgacttgggaatggggtaacttctttatgcatagtattaagggttatagtatgaagaaatcataaaattgcaagttttggtttgcattactctaatgtgggttcatttaatctgagatcttaaatatcttgcagccttaaatcactacaaacatttgcatttttattatgccagttatttccaaaatgtattgttatacatgtcacttatgttttttagctaatattgactgtaggataatctccttgttccccctcaaaatagtcattgaaagtgtacatggaaaatattttttaaaggaataaaattttcctttaaatttacccaaa

SEQ ID NO: 431244 - DNA, 1786 bp, Homo Sapiens
cttgcggcggtcctgggtatcatttaaaagtgtttattttctaaatgggagtaacacagagggaacttttggcaccttctttccagtccatcacccccatcatgtcctcccaaacacaaagcaatggcaggagaaaccacaggacagtcacaaagtcagtcacagagagatctgtacaatcccggatagctggaattcaagagtctgtcccagctatcttgtcctggagtggggttacagctcaggggcatagggctcctcagtaggtgaaggtacccgcagctcagcatcatgccttaccacggtgaagagtcccaccactgccagcagagccatcaccatgacagcagagcaaatgctgaacatattccgagtgcctgtttttcgatcactgtcatggaggacaaggagccctaggcaagccagtgagtgcagaggtacccggaaccagttgagtacaccagcctgctctgtctcagggatcacctttctccgtaggaagctcatgctgggaaagtataatccacaagccaactcaataagtagaaaggctatgaaggactccaccggactctcctggcctgggctggtagagaaagtcaacatgaagagagagaagacgacgatgagcacagcaagggacagcaggtgcatgggctgaaggtggtacctcttggaggttgcgatacggtacagggaagagccaagcaggctggctgccatgaagctggagaagataatgcccagaggggccccgtgtgggtccagcacaggtgtccagaggaagacaaagatgaagatgacactctcaaatagagcttgtatggtgcccagcagcagcacgcggcggtccgacaggaggcagcgcaggcctccagcacaggtccttgagaaggcacgctgccggtcatagttctccccccagtttcgaagggccaaggcccctgccagagccaggagagggatggcagccacaaagggcgctacaggccccagccctatccagctggctacagcctcagctgccacacctgccactacagccagcacatggttccagaaggcagctcgagcaaaggtagctgggatccactcagcagggaagtcatgccgttccacgtgctcatggatataccaggcctcgaaggctgagaagagcagggctgtggacagcccaccaagtgctcgccccactagcagcacaaagtagtcttgagagagtttggttaagcagcatagtgagtaagtcagggagaagaggacacaagaattcttgcgacccagccaatccacaagggaggaggccactaggccaaagaggactgtagaggcaaggccacagacatagaggatggcaatttgaccttccaggaagtagtaatgctggtagagtttatagaggtagggggcctgaagccaatcagctgccagggccaggaagtagacctgatagaagtccagttgaaaccgaaggaaggagggattgctgcaggcccttccagggggtttagcccggcatcttgacagttccagccccaggcaggaggccaggaggcctacaaaagcaaggtaggcagtcaccagcatggtgggcccccggacgacctgctgccccggtctgcggggacgccccggacacgtccggctccaggccgccaggccaccctccccgctgtggctccggctccggctcgggttccagcagcgctcccgcccctcacagcctgcttccgggagccgggcaggcctctggccgccgccatgatatcccgggaattccggaccc

SEQ ID NO: 431245 - DNA, 1473 bp, Homo Sapiens
  misc_feature (50)..(145): n is a, c, g, or t
  misc_feature (163)..(180): n is a, c, g, or t
cctggggcccaaacatgcgaacctgttctccactaaaaatccagcccacnnnnnnnnnnnnnnnnnnnnnnnnnnnnnnnnnnnnnnnnnnnnnnnnnnnnnnnnnnnnnnnnnnnnnnnnnnnnnnnnnnnnnnnnnnnnnnnngaatgagactctgtctcnnnnnnnnnnnnnnnnnnggaaagaagaggtaacactgacatcgatattgctaaaaaagaagcttaatgcaagtttaacacaatggttaagagacctcatacattttctatacatttctactacccatgtttttctggtttcctagaaaactgaaaatagaacatagagattacccttcatttccacctagaatatgagaacaacaaaacactgaacaagaacatatgaatagtaaagagtaatgctggaaagaacagaaattgttctattcttgatcctagaaaataacctagggtagaatgcaactataccaaaggtgtatttgcgaggatttaatttttaaactgaaaaaatatggtaatcagatcttcagtgccaaaaattatttttaaaaacgtaggcatatacagaggctgggagtagataaaggtgaaattaaagtcataagagtatgaacaagaagcagcacatcactatgaaaaagcaattcagcacacgacaccctttaggaattattcaatgaaagccaatttctggggaccaacatcccagtgaactgttcctatttgttctcccactgttgttacctcctatttctctgtccatacagagtaaaactctgagcctaagtaaattactagccattgcagtagtggaaaataacttaatattatacacaaaagcggatgggttaacaaagataatgtaagaaacaactaaaaaaaatgtgctggagtcctgtcactcatattttcagaactttcttcttcagctgctcaaaaatcctcgatggaattgaaggtgcttctagaatatgccttttctttggtttttgactattcttccgtgaatatcttcatgagtcatttggccaggcagtccactcacaggcatctgacacattattatttagtcctggaaatggttgccgcgccacaggctttaggaggcttcctgtgggaataagcctgatgtactggtctctgctgcagacatgctgaaactaggtttatctctcacattcaaagatggcattgtttccaaggagatgcactgacaatgctatagcatcctggccatatccagttttgaaaacactacggtgtcagccacgcaccatttaggacggggagaatggaaagccagtttggagaacagacgctttcttaagagtacacgtgaatatgaaaagggactctatgctctcaagaccaaaaaagaaaccctctgcgccgcccggctacattgcgcctggtgggacaatgtacacgacccctcccccccagtgtggagagagggtaccgagctga

SEQ ID NO: 431246 - DNA, 288 bp, Homo Sapiens
gtgcacctccagcccctcttctccttgcagggctgagtcagggccaaagatggccacctccctgcctggtcctggtgggggtcacgtgaggaaaaggtgactcagactctgacacctgctgagggagcagccaggcaggaggagtaccggtgtgccgagcgcccagggtcagccatacctgcctcacctgtggtctccccagcaggccccacctgtggcccaggccttttgcctgccacccagagcagcaggcggacgcgtgggtcgacccgggaattccggaccgta

SEQ ID NO: 431247 - DNA, 871 bp, Homo Sapiens
ctgatatctgaatgtcttttctggttggcctggctcttaatttgctttgtttgcccagtatagactcggaagtaacagttatagctagtggtcttgcatgattgcatgagatgtttaatcacaaattaaacttgtctgagtccattcaaatgtgttttttaaatgtagattgaaatctttgtatttgaagcatacatgttgaaaatacaccttatcagtttttaagtacagggttttatagtgtaatatatacagagtaagtgtttgtttttgtttttcaactgaggtcaaaatggattctgaatgattttgcatatgggatgaggaaatgcttggatccttaaggagtttacgaaatctgctgttttatcaaagtgaaaaaaaattgcttattactcttcattttacactaaagcttaatgtcactaagtttcatgtctgtacagattatttaaatcatggaaatgaaaaaaatgttctctgcttgctaccaaaggacaaactcttggaaatgaacactttctgctttccttcctccaaagaattaataggcaacagtgggagaaaaaaaaggcataatggcaaatccttcaagcagggataaaagtcgatcttcaaacattaacttaagcagaccaaaaattctgatgaccgcatctagattatttttttataaaaatgattttcactatagctatgttacgctaagctactgtccaatctcttgtgatgtgtaacttttacatgtgaatattaaagtagatttctctgtcttgtactgtgatttctggtctcatttctttaataccttactcttatttttcccctccggctcgtttttctccttaaggcaaggtaatattgttctatc

SEQ ID NO: 431248 - DNA, 1842 bp, Homo Sapiens
ttgatttctttaaaaccatttacttacaaactttaattcagcaaaggtccgtgtggggagactggggtggggtcgggggaatagtccccttggagtggatgtggacccccagagtcaagggagggaagctggtggcccagttggctgggggcaaggcccagggtcacctcaggtcgacaggtcctgctggtgggcgggcccagagtttatcttcatggagtgctggtttctggcactgggctggaaggaggccagctccagggatctggccgggggtgggcaggcagaattcaagaattcatcttcaacaagcgagtgacagcagaggctccgggagatgggcacaatgtccgactcccacagacagacagcaggggactggcagagaaagcccatctctgcacggaggcccgggtaggagggggtggtggggccggttcgccaagatgaaggctttccccttctactgtccccagggtggagatcctgggtagggtggcccaatccctaggccagagctgtttggtccatagtcaagctcccagagcttggcatctgtaggctctggccagcagggcctggggccctagcttttaacgtgcatcagaaggggaatggggctagcggcagggaccccgggtccccacggctggggtataggccagatgggcaggcaggggcaggagacagccatgcctgcagcaaatgtgggaaaaacagctgtttcaaaccgcaaggtgtggaatggtggcccggacaggccgggccttgaaggaatcagagctgggggctgtccggggtggtttgaaaaataaaacttagaaaaggaaacagaagtcagttgtcaaagttaaaaaaagaggagacagtctctgtatcttcacgggaggtcagggaaacctccaaggcactcgaaaggccaaaattacaggagcaatgaggcaggagggctccggagagacgggcacagcggaggaggagatggggggagggagggagagcaggccggggcccctctctcttaaggctgcagggtttcagcgtggggagcaagccagagacataatgaggcctccagactcccccacaccccttgggctcctggggctccggctgattggtcagtaaagtctttcagagatttttctattaccgaaagagagaaaatggtttaaaaaaaacactaactaacatcagaaaacccaaaagcgatttggtgcaggcccttgagttatctctggtgccagccacttagaaaatcctcttccgcttcaggtaggagtccgcgtagtggccgccgaggccctgggagtgctggcccacatagctgccttctgggctgggctcgggcgagggcagcaggtgggcaaagctgcgtttctggccgcccagtggggtcttcagcaggtggctgtgaccattaggcccggggctgaggcccaggagcccttctccggaccccagcggggaagagccgattgccttactgaggtggctctgcttgaggccagcctgcaggccgctggtgaagtaggaagtgggcgagcctgaatagaagtgagacagggggcccccgccactcccaccgctgctccgttcgccgaagccactgggcgggggggacatcttgtgtcggctgggtccgtgaggcccaagggctggttcccgtgggtgggagaagagccgccgaggtcccatgtccgaggggtagtcgaagctgtagctgtcagacagtcctggttcggggggcaggcgggcgctgctgagggggctgagcaggcgggacttgagctggaaggctttgctgctgctctacggacgcgtggtttgacccgggaattc

SEQ ID NO: 431249 - DNA, 980 bp, Homo Sapiens
  misc_feature (497)..(505): n is a, c, g, or t
  misc_feature (587)..(644): n is a, c, g, or t
  misc_feature (799)..(852): n is a, c, g, or t
  misc_feature (868)..(868): n is a, c, g, or t
  misc_feature (900)..(900): n is a, c, g, or t
tcgggcccatcattctccacgggcccaggcccgttgcgccttccctccccctcacccggctgcgtgaccttctcccggcccgttgagggttgtgggcccgtccccagatgaagctttcccgtctactgtccccagggtgagatcctggtaggtgccccatccctaggccagactgttttggccatagtcagctcccacgagcttggcatctgtggctctggccacagggcctggggcccacgcttttacaggcatcagaaggggaggggctcggcagggaccccgggccccacgctggggtataggccagatgggcagcaggggcaggagacagccatgcctgcagcaaatgtgggaaaaacagctgtttcaaaccgcaaggtgtggaatggtggcccggacaggccgggccttgaaggaatcagagctgggggctgtccggggtggtttgaaaaataaaacttagaaaaggaaacagaagtcagttgtcaaagttnnnnnnnnnggagacagtctctgtatcttcacgggaggtcagggaaacctccaaggcactcgaaaggccaaattacaggagcaatgaggcnnnnnnnnnnnnnnnnnnnnnnnnnnnnnnnnnnnnnnnnnnnnnnnnnnnnnnnnnncaggccggggcccctctctcttaaggctgcagggtttcagcgtggggagcaagccagagacataatgaggcctccagactcccccacaccccttgggctcctggggctccggctgattggtcagtaaagtctttcagagatttttctattaccgnnnnnnnnnnnnnnnnnnnnnnnnnnnnnnnnnnnnnnnnnnnnnnnnnnnnnnagcgatttggtgcagncccttgagttatctctggtgccagccacttanaaaatcctcttccgcttcaggtaggagtccgcgtagtggccgccgaggccctgggagtgctggcccacatagctgccttc

SEQ ID NO: 431250 - DNA, 900 bp, Homo Sapiens
  misc_feature (546)..(563): n is a, c, g, or t
  misc_feature (626)..(682): n is a, c, g, or t
ttttttttctcagttcatataatttattgcagttagcacacagtttaaaaattcaccaacacaccaatagtacaaaactaaacagcattataagttattccccctcaggaaaataaaacatactatgattgtcaaagctagatgtcagtctaagttttagaacaaaggaagaatgtgaaactaagaaaaggaaaaagcaatcactcacaatgaccacaaaaagaaaatccaaaagaaagtccgttttctcacagacattgattgtcttctctaaattaataaaaattattttaacataaactgtattttaaaaaaactagaaactcttcaagtaactaaagataatgctccaaggccattttcacagctttttttgtttgtttgtttgctttaaatgccattacagccaaattaacacacatttaaccaaatatttccaaaacagtccagcaacacacaatggagttttccattcagtatcttaagcacaaaaataggctatgtttacagtagttaaggcgatcaaattttaaacaaaagcaattnnnnnnnnnnnnnnnnnncaagttaatatcccaactttttatttccaggaaacaagactgcttttagaccgtaccacaacnnnnnnnnnnnnnnnnnnnnnnnnnnnnnnnnnnnnnnnnnnnnnnnnnnnnnnnnnaaattatttccaaagttcttgagagctatcttctaaggtccagtctctgacagtaggcaagctcagtgcttcgcttttgaccgacaaggagttcaccaactcacagtggaacttgcgaatgtgtctgtacaggtccccggactgcgtgaacctgcgctcgcaccacttgcaggcgtgcggcttctcgcgggtgcggacgcgtgggtcgacccgggaat

SEQ ID NO: 431251 - DNA, 319 bp, Homo Sapiens
  misc_feature (270)..(270): n is a, c, g, or t
  misc_feature (305)..(305): n is a, c, g, or t
aggtccccggactgcgtgaacctgcgctcgcaccacttgcaggcgtgcggcttctcgcgggtgtgcaccacggcatggcggctcaggttgtgcgagtactggaagctcttgccgcactgggtgcatgtttagggcttctcccccgagtgagtcctctcgtggcgcttgagggtgtacatgcaagagaaagtcttcccacacagcgagcacgtgggcacgttgacatcggcggcgggctttctgcggatgccgtcctgcttcgcggaagtncgtgcttcaggtggatctgcaggatgtgggggctngggaagaccttttt

SEQ ID NO: 431252 - DNA, 1658 bp, Homo Sapiens
  misc_feature (110)..(110): n is a, c, g, or t
  misc_feature (833)..(924): n is a, c, g, or t
  misc_feature (1171)..(1171): n is a, c, g, or t
  misc_feature (1538)..(1538): n is a, c, g, or t
  misc_feature (1560)..(1560): n is a, c, g, or t
  misc_feature (1586)..(1586): n is a, c, g, or t
  misc_feature (1604)..(1604): n is a, c, g, or t
  misc_feature (1610)..(1610): n is a, c, g, or t
  misc_feature (1612)..(1612): n is a, c, g, or t
  misc_feature (1647)..(1647): n is a, c, g, or t
  misc_feature (1654)..(1654): n is a, c, g, or t
ggtcctattctcccctctaggctctctacctctctccaaacataacaattctcgcaccaatcgcccataatacctcttttctttcaccataaagaaatccactctccacnccttctttcgggaccaactccaggggttttacccccagtttctcagcctactctcaactttccaaagcccccgcggcatcccatcgctccaccttctaaaactaaggcttctttggcatctcacaaccaaatcccacttccacccagtgtcacaccggtgtgttccacaaatgtacaccccggccaatgccaccctgcaattaatcacatgcctcggcgcgggtgtcaaaccccttcccaggtacgtgttcacgctttcagtgcagtccttccaaagtccacattctcgcctcactaaagcatgagtttccacatattctttgccttgtcacccattgcaccccttcccccagtcagtttcacaccattccatttccttagaaacacagcaccatttggaaaaaacacactggtgttattaagactgtacacgcactgtttttatttttattttatataatttaaattgactttcccactgtctttaagttgaaactgttaagctgaataaaaacttaagctgcaaattgataacttcgctacataacaaggaaaatataaatgtttacaaacagcttaaagatttgcatgtgcagtgtgcatttataacaaacttctaattgcacaaaacccatgccagctcagagtttaggtgtacacatttacccagttgagcgttcttagaataactactgcacaagttgacaataggtcgttctctcnnnnnnnnnnnnnnnnnnnnnnnnnnnnnnnnnnnnnnnnnnnnnnnnnnnnnnnnnnnnnnnnnnnnnnnnnnnnnnnnnnnnnnnnnnnnactcatgaaaagattctatggactgaaaaagccccaggctgaaaggactggactgccttgattgacatggggaagggggttagtagactatgtggattgcggcagcagaggctgcagcctaacgtgtggttttaatgaccagcacgcaaggcaaaagcattttgcacagtgttttgttttcctgtcttgcacttacaaataaggtctatgggagtagcatggaaaacgtttgctgtttttccctttnttttttaattgcttttgtttaaaatttgatcgccttaactactgtaaacatagcctatttttgtgcttaagatactgaatggaaaactccattgtgtgttgctggactgttttggaaatatttggttaaatgtgtgttaatttggctttaatgtcatttaaagcaaacaaacaaacaaaaaaagctgtgaaaatggccttggatcattatctttagttacttgaagagtttctagtttttttaaaatacagtttatgttaaaataatttttattaatttagagaagacaatcaatgtctgtgagaaaaacgagactttcttttggattttctttttgtggtcattgtgagtgattgctttttccttntcttactttcacattcttcctnttttctaacacctacactcacatctncctttcacaaccatactncccccnanccccctgaggcccaatcacctataaccctgcctantcccccnccac

SEQ ID NO: 431253 - DNA, 567 bp, Homo Sapiens
gaataaaaataaaaaacagggagactaataaggaggctgttgctataatttaggtaggttgatggcctgaattaaaatggcagcattggagaattggtaaaaaggacaaatgaatggttggtagtggtaatgccatttagtcaaagaggaaacatgagaggaggagcaggattgggggcaagatcaatgacatgtagtgcctgagacagcaaagagcatttgttagcaattagatacatcaattagggaagatctagaaaggagatatgaatctgacagtcatttgcatataaatggtaaggaaaccatggaaggaaatgagatcagctagcgagctgacacagaacaaggcagtctaaaaccaatttttttaaaaatacgaagaacagatattgaagggaagaggtgcctgccaagactaagaaagcacacctggagatggtatctcctcacagctaagagtcactcaagtgttcaagtgtttccaggagggtaagactattaacaaggacttagccggacgcgtgggcggacgcgtgggtcgacccgggaattccggaccggtac

SEQ ID NO: 431254 - DNA, 1498 bp, Homo Sapiens
  misc_feature (773)..(847): n is a, c, g, or t
  misc_feature (1483)..(1483): n is a, c, g, or t
  misc_feature (1488)..(1488): n is a, c, g, or t
  misc_feature (1496)..(1496): n is a, c, g, or t
tatcggatctatacccgctcgcaggcctccgctccgatacgacgctgggaccggtccggaattctgcgaatagcggaactgcagtatccacttgtcgcttaaaaaccacctgagactccatttcccggcgtgctttaaaaatcgctttacacctgcaatgcggtgagggcgtggcgacgactccatttcccggcttgcctcacggcccgagacccgcaggttcacgcgggccgactcaatttcccagagcgcaccgagctctgggaggcatacacagctaatagactgagtgagtggactccgtttcccagcgtgcatcaggctctctgcttcctaaagtgcttcagggctccccgtcgtacagtcggctgacagattaccctggactccatttcccgacgtacagcgtgacccgtcattcccgcccatcattcccgcggtctactctgaggcttttgtggacttcatttcccggcgtgccacgcggctctctgtgcgggccgagggcggtgacggcggcgcggacgacagccggactgcatctcccggcgtgccccgcggcgggcgctgggccggagccggagcccaagccagagcggcgcggcctggaagaggccagggcccgggggaggcggccggcagcggcggcggctggggcagcccgggccgcccgagccccgcagcctgggcctgtgctcggcgccatgagccggcggcgggccttcgggaggcggccctggggggctcgggcagggcgcggactagctcgttcnnnnnnnnnnnnnnnnnnnnnnnnnnnnnnnnnnnnnnnnnnnnnnnnnnnnnnnnnnnnnnnnnnnnnnnnnnnggcggaaaggcatctgtcggggccatgggtgggggcgtcggggcctcgagctccgggggtggacccggcggcagcggcggaggaggcagcggaggccccggcgcaggcactagcttcccgccgcccggggtgaagctgggccgtgacagcgggaaggtgaccacagtcgtagccactctaggccaaggcccagagcgctcccaagaagtggcttacacggacatcaaagtgattggcaatggctcatttggggtcgtgtaccaggcacggctggcagagaccagggaactagtcgccatcaagaaggttctccaggacaagaggttcaagaaccgagagctgcagatcatgcgtaagtgggaccactgcaatattgtgaggctgagatactttttctactccagtggcgagaagaaagacgagctttacctaaatctggtgctggaatatgtgcccgagacagtgtaccgggtggcccgccacttcaccaaggccaagttgaccatccctatcctctatgtcaaggtgtacatgtaccagctctttccgcagcttggcctacatccactcccagggcgtgtgtcaccgcgacatcaagcccagaactgctggtggacctgacactgctgtctcaantctgnattttggnag

SEQ ID NO: 431255 - DNA, 2134 bp, Homo Sapiens
  misc_feature (43)..(43): n is a, c, g, or t
  misc_feature (78)..(78): n is a, c, g, or t
  misc_feature (111)..(111): n is a, c, g, or t
  misc_feature (113)..(113): n is a, c, g, or t
  misc_feature (133)..(133): n is a, c, g, or t
  misc_feature (257)..(323): n is a, c, g, or t
  misc_feature (1880)..(1959): n is a, c, g, or t
  misc_feature (2062)..(2062): n is a, c, g, or t
  misc_feature (2074)..(2074): n is a, c, g, or t
  misc_feature (2086)..(2086): n is a, c, g, or t
  misc_feature (2114)..(2114): n is a, c, g, or t
ctgtacacaggcaaaccttactgtggaaactaagacatcaggngctctctccactcccctggccctccagggtggggngaggagggagtagaccttgggggcagaggacangnggggagttacagctgtaggnggggcggggccaggttggacggtgcgaatcgacgttttctttaagaaaaaaattataacaatctatttacacccgggggccagggaagggaagaggagacgggctgggctggttctatttacannnnnnnnnnnnnnnnnnnnnnnnnnnnnnnnnnnnnnnnnnnnnnnnnnnnnnnnnnnnnnnnnnntaggaggtcctcatccccccaacaccctgtccttctcttccctccccacaaccagttaaaatcctcttaaaaagcccaccacaggggtgaggctggtgagggagggactggaggtggggacagggactcatttacctctgccctctagtctaggggcccagccagggcaggagcttgatgggctatggccccccttcccagcccctcttggggctcccagatggaagtggaagggtgcttggtggggccctcaggaggagttagtgagggtaggtgtggcatcggtcgactgccagtctgagctggtcggagtctcagttaaagcttgtgaggacggggtgagggtggtagtgcccgctggggacctcaagtgaggagggatgagaatggcgttgagagacggttggatggagagttcaccagcactgaagttgaagagagggggaagtgggcggttgttaggcagctgggttcccagacatcgcagttcatcaaagaagctgtgcgcacaggcctctagtggggagagccttgaggatggggtgtactccagcaggctagagcagagcgcgatggcctctggcggcgttcgagatttgaacacctttgtccaggggtgagctttaatctgagggaacttgaactccgtgtagttggggttcatctctcggatttgttcccgggttggtgttcccagcaccttgatgatctccaccagctggtccaccccactgtccccagggaagatgggctggcccaagaggagctctgccagtacacagccagctgaccaaacatcgatggatgaggtgtaatcagtggctccaaagatgagctctggggcccggtagtagcgagaacagatgtaggagacattgggctcccctcggaccaactgctttgcactgccaaaatcgcagagcttgaggacagcagtgtcagggtccaccagcaggttctggggcttgatgtcgcggtgacacacgccctgggagtggatgtaggccaagctgcggaagagctggtacatgtacaccttgacatagaggatagggatggtcaacttggccttggtgaagtggcgggccacccggtacactgtctcgggcacatattccagcaccagatttaggtaaagctcgtctttcttctcgccactggagtagaaaaagtatctcagcctcacaatattgcagtggtccagcttacgcatgatctgcagctctcggttcttgaacctcttgtcctggagaaccttcttgatggcgactagttccctggtctctgccagccgtgcctggtacacgaccccaaatgagccattgccaatcactttgatgtccgtgtaagccacttcttgggagcgctctgggccttggcctagagtggctacgactgtggtcaccttcccgctgtcacggcccagcttcaccccgggcggcgggaagctagtgcctgcgccggggcctccgctgcctcctccgccgctgccgccgggtccacccccggagctcgaggccccgacgcccccacccatggccccgacagatgcctttnnnnnnnnnnnnnnnnnnnnnnnnnnnnnnnnnnnnnnnnnnnnnnnnnnnnnnnnnnnnnnnnnnnnnnnnnnnnnnnngaacgagctagtccgcgccctgcccgagcccccagggccgcctcccgaaggcccgccgccgctcatggcgccgagcacaggcccaggctgcggggctcgggcngcccgggctgcnccagccgccgcngtgccgccgcctcccgggggccctggcntcttccaggccgcgccgatc

SEQ ID NO: 431256 - DNA, 937 bp, Homo Sapiens
  misc_feature (5)..(5): n is a, c, g, or t
  misc_feature (9)..(11): n is a, c, g, or t
  misc_feature (650)..(725): n is a, c, g, or t
  misc_feature (891)..(891): n is a, c, g, or t
ctgcnaaannncaagcttgagacagcagtgtcaggtccaccagcaggtctggggcttgatgtcgcggtgacacacgccctgggagtggatgtaggccaagctgcggaagagctggtacatgtacaccttgacatagaggatagggatggtcaacttggccttggtgaagtggcgggccacccggtacactgtctcgggcacatattccagcaccagatttaggtaaagctcgtctttcttctcgccactggagtagaaaaagtatctcagcctcacaatattgcagtggtcccacttacgcatgatctgcagctctcggttcttgaacctcttgtcctggagaaccttcttgatggcgactagttccctggtctctgccagccgtgcctggtacacgaccccaaatgagccattgccaatcactttgatgtccgtgtaagccacttcttgggagcgctctgggccttggcctagagtggctacgactgtggtcaccttcccgctgtcacggcccagcttcaccccgggcggcgggaagctagtgcctgcgccggggcctccgctgcctcctccgccgctgccgccgggtccacccccggagctcgaggccccgacgcccccacccatggccccgacagatgcctttccgnnnnnnnnnnnnnnnnnnnnnnnnnnnnnnnnnnnnnnnnnnnnnnnnnnnnnnnnnnnnnnnnnnnnnnnnnnnngaacgagctagtccgcgccctgcccgagcccccagggccgcctcccgaaggcccgccgccgctcatggcgccgagcacaggcccaggctgcggggctcgggctgcccgggctgccccagccgccgccgctgccgccgcctcccccgggccctggcctcttccaggncgcgccgctctggcttgggctccggctccggcccagcgcccgccgc

SEQ ID NO: 431257 - DNA, 399 bp, Homo Sapiens
  misc_feature (341)..(341): n is a, c, g, or t
  misc_feature (352)..(352): n is a, c, g, or t
tttttttcaggttttcatgccaataatttattgaacggaggtctgtacacaggcaaaccttactgtggaaactaagacatcaggagctctctccactcccctggccctccagggtggggtgaggagggagtagaccttgggggcagaggacaggaggggagttacagctgtaggaggggcggggccaggttggacggtgcgaatcgacgttttctttaagaaaaaaattataacaatctatttacacccgggggccagggaagggaagaggagacgggctgggctggttctatttacaagggacacaggaggggagggggtcttgaggaggtggaggtctnggggagggganggggccaagggggtaggaggtcctcatccccccaacaccctgttcct

SEQ ID NO: 431258 - DNA, 1037 bp, Homo Sapiens
  misc_feature (749)..(812): n is a, c, g, or t
ggggccccggtagtagcgagaaccagatgttgggagaccatggggcttccccttcggaccaactggctttggcactgccaaaattccagaagcttgaggaccagcgggttcagggtcccaccagccaggttcgggggtttgatgtcggcggtgacacacgcccctgggaaggggatgtaggccaagctgcgaaagaggctggtacatgtaccccttgacatagaggatagggatggtcaacttggccttggtgaagtggcgggcccacccggtacactgtctcgggcacatattccagcaccagatttaggtaaagctcgtctttcttctcgccactggagtagaaaaagtatctcagcctcacaatattgcagtggtccagcttacgcatgatctgcagctctcggttcttgaacctcttgtcctggagaaccttcttgatggcgactagttccctggtctctgccagccgtgcctggtacacgaccccaaatgagccattgccaatcactttgatgtccgtgtaagccacttcttgggagcgctctgggccttggcctagagtggctacgactgtggtcaccttcccgctgtcacggcccagcttcaccccgggcggcgggaagctagtgcctgcgccggggcctccgctgcctcctccgccgctgccgccgggtccacccccggagctcgaggccccgacgcccccacccatggccccgacagatgcctttccgccgccggtgccnnnnnnnnnnnnnnnnnnnnnnnnnnnnnnnnnnnnnnnnnnnnnnnnnnnnnnnnnnnnnnnngcgaacgagctagtccgcgccctgcccgagcccccagggccgcctcccgaaggcccgccgccgctcatggcgccgagcacaggcccaggctgcggggctcgggctgcccgggctgccccagccgccgccgctgccgccgcctcccccgggccgctggcctcttccaggccgcgccgctctggcgggactccggctccggcccagcgattccggaaattccggacc

SEQ ID NO: 431259 - DNA, 1244 bp, Homo Sapiens
  misc_feature (37)..(37): n is a, c, g, or t
tttctctagtgtttctttttgctatgtttttgttttntaatcatcatgactggctgccaggcagagctggattcaaagaaaaccctgtgacatacactttccgaggatttcggtcaacaaaaagtgagacaaaccacagctcccttcggaacatttggaaagaaacagtccctcaaaccctgaggcctcaaacagcaactaactctaataacacagacctgtcaccacaaggagttacaggcctggagaatacacttagtgccaatggaagtatttacaatgaaaaaggtactggacatccaaattcttaccatggcaaatatattattaatgagcctgaaaaatgccaagagaaaagtccttttttaatactactaatagctgcagagcctggagacatagaagctagaagagctattcggcaaacttggggcaatgaaagtctagcacctggtattcaaatcacaagaatatttttgttgggcttaagtattaagctaaatggctaccttcaacgtgcaatactggaagaaagcagacaatatcatgatataattcaacaggaatacttagatacgtactataatttgaccattaaaacactaatgggcatgaactgggttggaacatactgtgccacatattccatatgttatgaaaactgacagtgacatgtttgtcaacactgaatatttaatcaataagttactgaagccagatctgcctcccagacataactatttcactggttacctaatgcgaggatatgcacccaatcgaaacaaagatagcaagtggtacatgccaccagacctctacccaagtgagcgttatcctgtcttctgttctggaactggttatgttttttctggagatctggcagaaaagatttttaaagtttctttaggtatccgccgtttgcacttggaagatgtatatgtagggatctgtcttgccaagttgagaattgatcctgtaccccctcccaatgagtttgtgttcaatcactggcgagtctcttattcgagctgtaaatacagccacctaattacctctcatcagttccagcctagtgaactgataaaatactgggagccatttacaacaaaataaggcacaatgcctgtgccaacggaggcaaaaggaaaagggcagggcagggtatcgccaccgtaaaactacattaggaaaaggaccattttttttccaatgtgccatttgttaaattttggctaaaggcttgt

SEQ ID NO: 431260 - DNA, 1496 bp, Homo Sapiens
  misc_feature (484)..(484): n is a, c, g, or t
  misc_feature (552)..(552): n is a, c, g, or t
  misc_feature (866)..(867): n is a, c, g, or t
  misc_feature (872)..(880): n is a, c, g, or t
  misc_feature (884)..(931): n is a, c, g, or t
  misc_feature (933)..(934): n is a, c, g, or t
  misc_feature (936)..(937): n is a, c, g, or t
  misc_feature (944)..(944): n is a, c, g, or t
  misc_feature (947)..(948): n is a, c, g, or t
  misc_feature (951)..(951): n is a, c, g, or t
  misc_feature (979)..(979): n is a, c, g, or t
  misc_feature (985)..(985): n is a, c, g, or t
  misc_feature (1031)..(1031): n is a, c, g, or t
  misc_feature (1092)..(1094): n is a, c, g, or t
  misc_feature (1096)..(1096): n is a, c, g, or t
  misc_feature (1108)..(1108): n is a, c, g, or t
  misc_feature (1117)..(1117): n is a, c, g, or t
  misc_feature (1151)..(1151): n is a, c, g, or t
  misc_feature (1156)..(1156): n is a, c, g, or t
  misc_feature (1159)..(1159): n is a, c, g, or t
  misc_feature (1165)..(1166): n is a, c, g, or t
  misc_feature (1169)..(1169): n is a, c, g, or t
  misc_feature (1171)..(1171): n is a, c, g, or t
  misc_feature (1173)..(1173): n is a, c, g, or t
  misc_feature (1175)..(1175): n is a, c, g, or t
  misc_feature (1180)..(1180): n is a, c, g, or t
  misc_feature (1184)..(1184): n is a, c, g, or t
  misc_feature (1191)..(1191): n is a, c, g, or t
  misc_feature (1200)..(1200): n is a, c, g, or t
  misc_feature (1226)..(1226): n is a, c, g, or t
  misc_feature (1264)..(1264): n is a, c, g, or t
  misc_feature (1291)..(1291): n is a, c, g, or t
  misc_feature (1300)..(1300): n is a, c, g, or t
  misc_feature (1307)..(1307): n is a, c, g, or t
  misc_feature (1324)..(1324): n is a, c, g, or t
  misc_feature (1335)..(1335): n is a, c, g, or t
  misc_feature (1341)..(1341): n is a, c, g, or t
  misc_feature (1381)..(1381): n is a, c, g, or t
  misc_feature (1384)..(1384): n is a, c, g, or t
  misc_feature (1400)..(1400): n is a, c, g, or t
  misc_feature (1402)..(1403): n is a, c, g, or t
  misc_feature (1415)..(1415): n is a, c, g, or t
  misc_feature (1419)..(1419): n is a, c, g, or t
  misc_feature (1440)..(1440): n is a, c, g, or t
  misc_feature (1466)..(1466): n is a, c, g, or t
  misc_feature (1491)..(1491): n is a, c, g, or t
  misc_feature (1494)..(1494): n is a, c, g, or t
aaaaacttcataaaagtgcattgtatacattgttcatcctagaattgtgtttgtcaaacgtttgtagttttccccatccctcccaaaaaggtttttaattggtgattcagaatatttgtcatctaccaaattaaaaactgcaggtttgcaaacttggcactccaagaaagaaataggtgccataaaatgattaagtgttggcatgtgtacacctgctgtcaggaaataaacttcccgtatgttgcattttggcagacatgcatcttaaaaatgtgttgaatgaaactgcacctgcactctttatctttttcaacagtacatcctatttgtgcctttaagtgattacttttgctctcgattatctttacagatatattcgaagttagatatacatgaaattaaatggtggtgctgtttaagagtgcagtaattggtctaatccaataactcattgaaataggagtttggttcttaacatcaatgnggaaacaaaacttgtctattttgaaacatttaataactataaaaacttgagcctgagacacattagtntttcacattttaccacgtcatgtcaaaataattttcccccatatattaataaaagaaagtattaataaaagaaatttaaaataatatctcagttatttttaaaaagtaaatactttcgtgagaactgcattgatgaaacatctgaactttataatgtgtttgtggaataactcaactaaatcttattgcatttagaaccctaaaataggtcaaaaaatttatcctttgcacaattaaaaagtttccttaaaattgatagtgatgttttatttacattaaattatatattaaaatgacaaccctaatccaccccnnggggnnnnnnnnntgtnnnnnnnnnnnnnnnnnnnnnnnnnnnnnnnnnnnnnnnnnnnnnnnnanngnntcctttntgnngtnttgttccattgatttatgcatgcttgtnattgtntgttaatacacagaatctccttatacagttttttaaatagattgtnttgggaaaccttttttgttatataatgttatagttttaagaattaacttcttcagaaattnnnanaatacttcttgnatttctttntgtgatgagttttaactaaaacttgtcctacggntgtgntcngttctnnctntncntnccctncgcnttttttnccaattgcncctttgaaaaataattgtcttttctnttgtagtttattgtggcgatacttgtttgtcttttctnttgctgtgttggcacaggcattgtgcntattttgtngtaaatngctccagtatctcaccngttcactaggntggcantgatgagaggtatttaggtggctgtatatacagctcgcantangagactcgccagtgantnnacacaactcagngggngggggtacaggatcattctcnacttggcagacagatcctacatatcntcttcaagtgcaacgacggatactnaanaa

SEQ ID NO: 431261 - DNA, 758 bp, Homo Sapiens
  misc_feature (174)..(191): n is a, c, g, or t
  misc_feature (438)..(439): n is a, c, g, or t
  misc_feature (520)..(520): n is a, c, g, or t
  misc_feature (524)..(524): n is a, c, g, or t
cctgctccaccagcctctccatccactctactatcccactgtcatggtgggtttaacatttgcctgctgcctgctctgcctgctttctttacattgggtgggggaaaaaaattcctctttgaaaaagtaaagattttaccacagtaccattatactctgccccatacacatccnnnnnnnnnnnnnnnnnnaaaccaaggcaataagtgaaaaggaatctgagtttccttctattttttcaccatcaattattgctgattttccggcctcttcttggattttatctcctttctaggacctatgagtggaatgggcatgaatatgggcatggatgggcaatggcactacatgtaaccttcatcatgtaaagcaatcgcaaagcaaggggggagtaagtacagtcgggtgcgatctgtcttcactatcacttcagagacnngtattttatgttttataatttgcccccattttatttttccttgcccataactgcatgcctttccaaactaaggacctgttntganatatatatcacccatctctgaagtcacagatgacactgatgtgcacttttgaaaaggccaactgacaagcctgcgtgtgttttaagcaggtgggactgccttttagcctatttactgtggccccaatgtgcacaaacacagacatcaggcagatattggacatttaagaataaaaataatgtcttgggggcaccagttgactgagagaaattaagcaggcttcaatgaagcgat

SEQ ID NO: 431262 - DNA, 3021 bp, Homo Sapiens
  misc_feature (49)..(58): n is a, c, g, or t
  misc_feature (221)..(230): n is a, c, g, or t
  misc_feature (809)..(817): n is a, c, g, or t
  misc_feature (1876)..(1876): n is a, c, g, or t
  misc_feature (2769)..(2780): n is a, c, g, or t
  misc_feature (2841)..(2841): n is a, c, g, or t
  misc_feature (2850)..(2850): n is a, c, g, or t
  misc_feature (2862)..(2950): n is a, c, g, or t
  misc_feature (2953)..(2953): n is a, c, g, or t
  misc_feature (2957)..(2957): n is a, c, g, or t
  misc_feature (2959)..(2960): n is a, c, g, or t
  misc_feature (2962)..(2962): n is a, c, g, or t
  misc_feature (2964)..(2965): n is a, c, g, or t
  misc_feature (2973)..(2973): n is a, c, g, or t
aaaaatcaaaaatgaaatatttattaccgctttttgtgacttaacaccnnnnnnnnnnaacataacgtcacagtcctcatacaagtattttaatgtaaatttgacaaagcttaaaggtaacagcattttcttctagtgaggaacacgtgctgagaaaagaagaattcatgggacatacaataccaattccacagcagatctgatactagcaaaaacattcnnnnnnnnnncaattgaggtaaacacatagaatatctaacatgaaacaattaatagaccgaactctgtacgaagtttgttacagtattctcttgctcctttttatcccccaagctttgagtttctgataaagtcctagttatggttcaatgaccattaataactttttttgtgttgaggaaagctgcccaacttaagattgttttgtccacaaccaaggctcagaactcctggaagaagctcctgctctgtctttaaatcttcattggcaagctctttgaagaagagtcccccaaaaataataataagaattggcttatgaagcacgaactataaagatctgtttgaaactaaaggtcacatttttggaggaacaaaggccgggcatgaaaacacattcttgaagctggagttcgagtgatgaggttcagccaaaagttcatcatgatctccagtgtggttcttttctcattggcccaaccggtttaaaatatataccacagtctcttctggatggtgaattcactgatgaacccaaacagttattctttttgggaacaacacacattgtgtgtaaaacaaggatatannnnnnnnnctcttctaaaactatttgaggcaacataacggcgtgatcaacagaaatgtacaagtttaacttagttcctatatttatactacagtagttataactctcggagtctttttccagaggatctttacatggacagaattgtctcagtcagcccatgatttcacatttgtgttcttgttgcattggtcctctgttgcttgatgaaaaatgacaaaagtaaaaaataatcacagctgtctggaatttcatattaagtgtcaacatctggtcaaagttcagaaagtcttaaaatagtttttgcgtgtgtttccttttcccttgagttcccttatactattgggcatgaaatgtccataacctgtccgcccaacattgggattctacagaaatttaacattgtggggctctgtgctgacatagtcattccagggtgggtagggggtcctccgtgcatcatcatggctgggtggtggggatggcttggcaaatatgaatgcattgggggtccatgtcttaattgagtagggtgtggggtcatctggggaggagtgtaacttggctgtgccatactcattcccataggaccaccctgagaaacgtagtcccctggcatgctctgcaaacttcccccttgctttgcgattgctttacatgatgaaggttacatgtagtgccattgcccatccatgcccatattcatgcccattccactcataggtcctgcaggccggatccccatgtgttgctgaccatccaacacaaagctccccatgggctgaccctctggactatatgctgctccttggctcactgaaggatcaagaagaaaacctgctcgatttgactggtcaatcatgggctgtactattcttcttctggcattaataaaccagttgtttacttggagaattgtaagtcctgtgtcttgcgctaactgtttcttctgctcttcggaagggtacggatgtgtgagatgctggaagagccatgctctcatgatatttgttgctactttggggaaaatgcctcttttcttctggcgttttttgtccttatccggantcatcatcgtcacctgtaccaggtgaagctacactgttgtctaaaccatccccttgctcactgctgttgtctccgctctgggaagcatggcccccactggagggccctggggtgcctgctgagtgggttgaggttgcatcatcgtggtctcgccaagaagaagggttatggtcagcgagatttgtggaggagcctgaaagttcttcatgatctgacttggagctgccgtctctttcatcaatgacgaggtcgatgggcattttccccttcaaacagctaatgtatcggtggcagaagttatcgcacagttcgtggaccttttctaactccaaaagatgaaaccttagtacttgtattgcttgtatcatcaaattgtccagctctggatttgaggaaaaaagtggcttttcggcgcgaacctgcttggcgaagaccgcgatgtcctcgttgaaggagtcggaggagcagacgtctccgccagccactcccaggttcccggggagtgcaggtcgccagctcgcacttctcaaagaccagagctaacagaggaaacaacgggtgcccatagatcgcgtccttgtcccgcttcaaggcgtcgttgacagcggatcccatactggccggcatgacattggggtgcggggcgtgcgcgccgtagtgctgtgtggcgtggagcggcggcccgtggttcaggtggtgaaccggggggatcggccgcggcgcgtgagggtctccgtacatggaagcgggaacccctactccgtccatcccgccgtaatggggcagctcatcgtacctttgcgccatcagtctgcgctccaataaactcctggatgtgtcgtatatttaatatcccagtccggataagaaagtgatctaggctgaagattccnnnnnnnnnnnnccaaaccaaagagacttctcccaattctccaatatgctattttttaggggggaaaaaaagnccagtctanacaacgaagaannnnnnnnnnnnnnnnnnnnnnnnnnnnnnnnnnnnnnnnnnnnnnnnnnnnnnnnnnnnnnnnnnnnnnnnnnnnnnnnnnnnnnnnnccncccncnncncnncctcctcntcttcggtcctcctttccccctctttctcttctcttcccctcagttgg

SEQ ID NO: 431263 - DNA, 552 bp, Homo Sapiens
  misc_feature (372)..(372): n is a, c, g, or t
  misc_feature (499)..(499): n is a, c, g, or t
  misc_feature (529)..(529): n is a, c, g, or t
  misc_feature (539)..(539): n is a, c, g, or t
aattctccaagtaaacaactggtttattaatgccagaagaagaatagtacagcccatgattgaccagtcaaatcgagcagtgagccaaggagcagcatatagtccagagggtcagcccatggggagctttgtgttggatggtcagcaacacatggggatccggcctgcaggacctatgagtggaatgggcatgaatatgggcatggatgggcaatggcactacatgtaaccttcatcatgtaaagcaatcgcaaagcaagggggaagtttgcagagcatggccaggggactacgtttctcagggtggtcctatgggaatgagtatggcacagccaagttacactcctccccagatgaccccacaccctactncaatttaagacatgggacccccaatgcatttcatattttgccaagccttgccccaccacccaggccttgattgattgcacggggggaccccttacccacctgggattgattatgttaggcacagagncccacatgttaaattttgttggttcccatnttttggcggncagtttttgggct

SEQ ID NO: 431264 - DNA, 824 bp, Homo Sapiens
  misc_feature (421)..(743): n is a, c, g, or t
ggattttccgggtcgacccacgcgtccggtctatgcttaatacatagttgtctaatgaatcagtggaaaatcagaaaggggaacccctcagtactgggcaaatcaggaatgtgggtcactctacttgctggatctatgcaaaccccccgtgtgaccagaggagttgggactgcagccctcagcagcactgagttcaacaggcgcggtcccagaggcccacccgagacctgctacataaacaccgccttgagttcgctactgtctgatacatgcaagtttctgatatgtgttgccaagagttcttaagtgatagaaatactaaattgtgttataagtatgaacctgcaataaaataaaatatgattgagaatttatttgaaaaagaatgaacttgaataaactagtaaatcttgacaaccannnnnnnnnnnnnnnnnnnnnnnnnnnnnnnnnnnnnnnnnnnnnnnnnnnnnnnnnnnnnnnnnnnnnnnnnnnnnnnnnnnnnnnnnnnnnnnnnnnnnnnnnnnnnnnnnnnnnnnnnnnnnnnnnnnnnnnnnnnnnnnnnnnnnnnnnnnnnnnnnnnnnnnnnnnnnnnnnnnnnnnnnnnnnnnnnnnnnnnnnnnnnnnnnnnnnnnnnnnnnnnnnnnnnnnnnnnnnnnnnnnnnnnnnnnnnnnnnnnnnnnnnnnnnnnnnnnnnnnnnnnnnnnnnnnnnnnnnnnnnnnnnnnnnnnnnnnnnnnnnnncaatgctgcgctccaggggattatgccatgtccctgtaggttccccagctgtatgtccactgtgggttgacttgggatctc

SEQ ID NO: 431265 - DNA, 366 bp, Homo Sapiens
  misc_feature (175)..(175): n is a, c, g, or t
  misc_feature (178)..(178): n is a, c, g, or t
aatagactttattttttgcaacacttttaagcacagcaaagttgagcggagggtacagatttccaagcctccccaccgccatcctccccgactgtcgagatcccagtcacccacagtgggacatacagctggggaacctacagggacatggcataatcccctgggagcgcagatntgnacattagggctcactcgtagtgttacccattctatggaatttgggacaaatacataatggacatccatccctcattcacagtgttcatacaggaatagtttcactggcctttaaaaggcctgtgtttttccacctttttcatcccttccctcccccagcccctggacaggccaccagtaattttaatt

SEQ ID NO: 431266 - DNA, 321 bp, Homo Sapiens
tagtggactcagtattagcacttagttcatgccggtacattctttaagtcatagttaataataactagaagagaccttgtgatcatctagcccaagcccttcttttataccttgcttatataaagtattcttgactctaagaattccactatttacttcttttagaacagtggttcttagccttggtttaggaatttccagaaaaaaagcctcacattagaattttttactgtaatttcaaggatttacagaactccctgatcctactaatagagcccacatttaaaaataatatactattaggctgggcgcggtggctca

SEQ ID NO: 431267 - DNA, 1671 bp, Homo Sapiens
  misc_feature (86)..(116): n is a, c, g, or t
aacagttccctggggtcccttttggatggggccaaggtggagctgctagaaagattcctttggggagatggtcagaaatacttcannnnnnnnnnnnnnnnnnnnnnnnnnnnnnngctgttgcctcctggaaacggacttgaagtttcttcccctatgttctttccctcagctcttgggggccagaaatcccaaagggagtccgctgccccggccctccagggccgcctcctctgtttgctttgcagaggagggaactgctccttcgactctgcagctcaggcctgtccccgacacagcccccagggagtcttctagctacccctggcctctaggccgcctgacgctcagtgccttcctccgttccggggcctggcacccgtgccgggcagccttacaccagccatgcccgcggcaccacatgtgtcttctcactcgcgaggtcttgtgcccagcgcccccgggaaggcgggggcgctcaccccacagcccaggccccggggttctgccccacagtcctgcgtgggccacgtaggaagcagcgtgggggctgtgtctgctgggaggtggcttggatggggaggacagcccggcaccctgacccccgcccctccccagccctgcagtcccccactgggccggggagtctctccagcttctctctctctggttattcaggagacacattttcggccttaaaactggcatggagcgcaggccctcccttgcagaaaattatcaaggaagagggagttggcagagtttctctgccccggggctggggacgcggagctccggggaaattgttaaatcagtgttctggcgccccctgttgggggaactctggaattacaggagtgggccttgggggggactgagctccatccctctcccccgccccacccccacccaaagttgcccaccctgtttttccgttgcatcgctggtcttgtgcttcccgcttcagtctgggagccaagagccagccccacctcccttcagaggacgcagtgacttttggactttccagaggtggttctgtgtttctgcccttggctcctctccgtcttgggctggggcacttggagccctctccatgtggcgcccagtgttggggggaggcaggctccagtggaggctgagtgaggcctggtcccttccccgtgccctcctcggagctgccacagaggctaagacggctgtcctgctggtgctggccctgctggatgtggtattgaagtctggggcagctgatagcaggaaggagacccccttggatgctggtctcctgggacctgaacagtctgtcagcaatggctggaaatccttcttcctctggccaccccgggggtgccgggcaacccccttagctctaagatgtggccacaaattttttcccacttctccccggcaacctgaacagaaagttttgaccttgcaacctgtaagaaagaatccgtccgcatgactgtttacaagcgatagaaacaccgtagactctgtccccttgagctcccacccccggcccggggagccccacttggggtgactgcactgtagcttcaggccgtgtttttgcccaaatgtgatctttgggccctgcgagagggcctatcattagcgccattttttgctgttctggtgggcagctacctaccgcggggccagctt

SEQ ID NO: 431268 - DNA, 1720 bp, Homo Sapiens
gctgggtggcgaattcggcacgaggcgaggaagggccgagccacggactgtggggcctgaaactcgctcccggccaccctttctcgaggctgtggcctccgcgagagccgagcgggccgcaccgccggccgtgcgactgccccagtcagacacgaccccggcttctagcccgcctaagcctgtttggggttgctgactcgtttcctccccgagtttcccgcgggaactaactcttcaagaggaccaaccgcagcccagagcttcgcagacccggccaaccagaggcgaggttgagagcccggcgggccgcggggagagagcgtcccatctgtcctggaaagcctgggcgggtggattgggaccccgagagaagcaggggagctcggcggggtgcagaagtgcccaggcccctccccgctggggttgggagcttgggcaggccagcttcacccttcctaagtccgcttctggtctccgggcccagcctcggccaccatgtcccgccagaccacctctgtgggctccagctgcctggacctgtggagggaaaagaatgaccggctcgttcgacaggccaaggtggctcagaactccggtctgactctgaggcgacagcagttggctcaggatgcactggaagggctcagagggctcctccatagtctgcaagggctccctgcagctgttcctgttcttcccttggagctgactgtcacctgcaacttcattatcctgagggcaagcttggcccagggtttcacagaggatcaggcccaggatatccagcggagcctagagagagtgctggagacacaggagcagcaggggcccaggttggaacaggggctcagggagctgtgggactctgtccttcgtgcttcctgccttctgccggagctgctgtctgccctgcaccgcctggttggcctgcaggttgccctctggttgagtgctgaccgtcttggggacctgggccttgttaattagagaccctgaatggcaagccagagtggagcctctaaggatctgctgttacttctgaaaacttggagtcccccagctgaggaattagatgctccattgaccctgcaggatgcccagggattgaaggatgtcctcctgacagcatttgcctaccgccaaggtctccaggagctgatcacagggaacccagacaaggcactaagcagccttcatgaagcggcctcaggcctgtgtccacggcctgtgttggtccaggtgtacacagcactggggtcctgtcaccgtaagatgggaaatccacagagagcactgttgtacttggttgcagccctgaaagagggatcagcctggggtcctccacttctggaggcctctaggctctatcagcaactgggggacacaacagcagagctggagagtctggagctgctagttgaggccttgaatgtcccatgcagttccaaagccccgcagtttctcattgaggtagaattactactgccaccacctgacctagcctcaccccttcattgtgggcactcagagccagaccaagcacatactagcaagcagggtgcctacagacggggagggcaggagacgctgcagagcattacttggacctgctggccctgttgctggatagctcggagccaagggttctccccaaaccccctcccctccagaggccctgtatgcctgaggtgttttggaggcaaggggtagcactgatcca

SEQ ID NO: 431269 - DNA, 1591 bp, Homo Sapiens
aaaaacccaaaatttctttctgtttattcaaaataaaaatacacatagaattatgaaaatataggtttactatttccaccacgtaggttgatgctgctgttgaaaggcttacaaactgtttttcaagtttttaaagctcatctcgatccctcaatagagtatacctatattcactgggtgctagtttctggaaggagctctcaggtggactgcttgctacatcttgggcttgctctcctggggctgtatcagttgggtcaggtccatgatggaattctctgtgcagttttccagaatgtaagtcaaatacgaattgcttgagttttccaggaattaatacatctttgaagtctccaaacacatacatatgcctaaagctgtcaatagcgattacaggacaatctgctggagttttctgtatgtgcagaagaggatgtctaaatttgtcacaatcggcatgtaaaaagtttattgtacctttttcacttattaattgccgagctacttcattctggaatatttctaaactttctgtatcttctttcatgtgaaagagtatgagaaaaggcagtccttcttctgtcaattcctctccattttcaaatgttatttctcggacaagaggaacacatttatcttgaatccaattgtaagtcacatcaaaatttgtcatagctcccaagtacaccatatccggagcagaatgccctggtggtttgtagattatgttgtcgccactatatctttccggttttgaaacatccccaaatgcagaaagaaaggcacagtcatcatgcaaaatattcgctactcgttcaaaaactctatagttgtccgagtccttttgctcaaaatatccaatgatatttcttttgctgcgatcaagagtggtgatttctgctaagtcccgaatttcttgaatggggtcacttttttgttgcctgatgtaatctgccaatgctttcactgatcgctgacccctgtattctctcttcatcatcatcccattacgaaacaatttgagggttgggtatttgcttatcctgtatctctgggctatgtcagagtgctgatcacaatcaactctggcaaacactacttgattttcatttggaaattcttccttaatgacatcggaagcttcctcaaaaattggatgcaacatctgactgaaacgacaccagtcagcataaaaatttactaaagcaacatcagcattgtttaaaatttcatctatattctctgtatcaagacttgttatttcagttgttacaggagtaaaaacccaagttaccaggagcagaagggagcatctgaggtcgggtaaggataggaagacggcaggatgcatggtaacgctggggtccgtgacagggacaggcgctggcggctgggactgggctaggttgggttgggttaggaaagggctgggctccgggagccgacggcagcggaggattctccaggcagcggcacctcgtcctctcgacccgggctccagcggcgaacacccgggacaacttccagagaggcctctcacaccctcacttccgggtcctgcccacctcgtgccgaattcgccacccaggcc

SEQ ID NO: 431270 - DNA, 508 bp, Homo Sapiens
cccatctcagaagggctttatttctacttcatcacggtctcatacagacccagaggcatcatcatgtgtttccatttggtatccttgtgactttttgtagtgttttcccttaagaaaactttgagtaaactctgtacattgccagttaatcttttcacaataatttaaaaatggtgttgctgttggatcatcgatgcaagaagaccaacaataaaagtacagtacaaggaaattcacaacatattacagtggaacagactgagtcacatttaggtgatggcgaggacacagtagcggtatatacatgcacccgaagacgtgcaagccaagtaggataatataaggatcatacagtgaattttctaagcccactgaggactttgtaccttttcaaaatcatcctgtatcccctccagcatacagaatatctgtcttgtctactggcttcatggctttttcactacaaaaagttcactgaatcagacagtctgaagcattaaaaaattcg

SEQ ID NO: 431271 - DNA, 1925 bp, Homo Sapiens
  misc_feature (451)..(459): n is a, c, g, or t
  misc_feature (652)..(660): n is a, c, g, or t
  misc_feature (1145)..(1325): n is a, c, g, or t
  misc_feature (1550)..(1565): n is a, c, g, or t
acaggttttttccttttattcataaaaacaaatttgcaacaatttattaaaaatcgataccatgcagtaggggtacgagaaattcctcatttacatttgattctggcagttccagtctaatttaaagcgttttgtgcactaacatcattggaaaatgccttcaggccgaagcctcttcagaaatggacggtgtgtttgctgcatataaaagaacagaaccattaagtagctagagtcacttctgtgggtcttgttatttgcgaggaaattgaaaaaaaatgggtgaacctacagtatccagtaagacagagaatgtacttcgtgagttaacctagaagacagcgcacgctcaggagtcacaaaagggttacagacgcacaggctcacctccgacagtcccatacttttgtttgttttcctgctatgctgggaataatatttctacaggtannnnnnnnngtgtgtgtgtatacattatgtacaattaattgtctctttccctttgaaaaattaatgtggtcctttaaattaaatttggttttggtgaaatcaagaaagcaagtaaatactggtaatacacagtgagtgacaacaccgatttttagtgcctaaacagagaatgacttcaacttgacctgtgatgtgttaacannnnnnnnnccctaaaagctacagtacctccataacctctctttggggaaggggagcagaaagctatgctacgtgaaatagggtgctttgaaatgttggcattggtaagattcctgtgggcccttttgtcaaagcctggtggagaaaacagtttattcctgactgcagtggttctgggaagagattattgcctgcctgttgaagctgccaataggtttctttagggagtgagcgagctgctcagttgtgcagacatcctggacattgtcattcaggcctttcttgagcaaagaatgaacctgtctaggaatgtcagaaaagtcactgggagcctccctccagcccggatgttctgggtagagggctgtgctggaagcttctctgggccacacccccggctgtagggagggctgaaggtcagagtcatactcatacctcacggatcagggcggcttcactgtttggtacaaagctttcctggacaagatcaagtnnnnnnnnnnnnnnnnnnnnnnnnnnnnnnnnnnnnnnnnnnnnnnnnnnnnnnnnnnnnnnnnnnnnnnnnnnnnnnnnnnnnnnnnnnnnnnnnnnnnnnnnnnnnnnnnnnnnnnnnnnnnnnnnnnnnnnnnnnnnnnnnnnnnnnnnnnnnnnnnnnnnnnnnnnnnnnnnnnnnnggggctcaatttaaagggaggaatgatcttatgaatgagaatcaatctgctgactgatcaccccagtgatcccaaggggagagctcactggcttgtctggatggaaggctgccttctggaagccaagggaagccctcagccagcaactctctcccctatgtctacggggatgtcttttagcagagtgcctccaattcactttggtcagaaacaaagttagtgggnnnnnnnnnnnnnnnntcccagccagcccttgggccctgatgagagaggttaaagtgcacaatctttctttatcgtgtttgctgggaacagacattccatgattagctcgggtggtccccctggttactgggagcatccgataggaacacaaggacatggccaacgtggtgggtgcatgacagactgtcggtgaatgctgcagagcgtgtctgcagtgacgtgccctaaatccccacggtcccaggaatgggtgttattgtgttaacgtgtggcatttaccagagtaacaaacatctcattgggtgacacaggtcccatgtggagcatgtaagtcagcctgctccagtgcgcagccgcggcagcctgcccagggct

SEQ ID NO: 431272 - DNA, 454 bp, Homo Sapiens
  misc_feature (83)..(263): n is a, c, g, or t
aaggtccaaagtcatactcatacctcacggatcagggcggcttcactgtttggtacaaaagctttcctggacaagatcaagtnnnnnnnnnnnnnnnnnnnnnnnnnnnnnnnnnnnnnnnnnnnnnnnnnnnnnnnnnnnnnnnnnnnnnnnnnnnnnnnnnnnnnnnnnnnnnnnnnnnnnnnnnnnnnnnnnnnnnnnnnnnnnnnnnnnnnnnnnnnnnnnnnnnnnnnnnnnnnnnnnnnnnnnnnnnnnnnnnnnnnggggctcaatttaaagggaggaatgatcttatgaatgagaatcaatctgctgactgatcaccccagtgatcccaaggggagagctcactggcttgtctggatggaaggctgccttctggaagccaagggaagccctcagccagcaactctctcccctatgtctacggggatgtcttttagcagaatgcccc

SEQ ID NO: 431273 - DNA, 455 bp, Homo Sapiens
  misc_feature (13)..(13): n is a, c, g, or t
  misc_feature (35)..(35): n is a, c, g, or t
  misc_feature (49)..(49): n is a, c, g, or t
  misc_feature (85)..(85): n is a, c, g, or t
  misc_feature (95)..(95): n is a, c, g, or t
aaacaaacaaaanttaaaacaacacatattgaccnagaagaaacaggangaacacttcccattggtgccccatgaaaggggctgnaagaaggccnaagttttacttctcttcccccttcagttcatccttgaccttgaaatgctgattcccattgggttcccaaaagttctcagagtccaagaataagtggaagtaggggaagagagccaatcccgggatcatgggctggcaggaagggcctttgtccctgattcccttggtcccttgtggtcctagtaggatggccagttcatgggtaaaacctcctgcagccaaagcttgtcggaactgcagatctaagggcccaggaagagcctggaaaaatcatccttttttgggacatacttgccccctacttcctcttctctctggaacggctcacaatgagtgtgcggacgcgtgggtcgacccggga

SEQ ID NO: 431274 - DNA, 864 bp, Homo Sapiens
tgggatcttgggcaacctgcggctcttgctatggcagacgtggacgggcacaacttcatcatgaggatgaatcaggcccataccgtggctttgagcaggatgttggcagccgacccacccacccatttcatgtaccctgagagttccaagaacctgccccgccaaacgtcagcttcgtgctggtgcccttcaaggtcctggaccttcctgtggatcgccagcgcctttgtcacgggcagatccgattcacctacgccccaagtgaagtccttccttcgagtggataaagaaaagggtccagatctacaacccagcctttcttcaagtatatccacgacaggtggacagagcatcacgggcggtacccttccacggggattctggtgcttttctttgccctgcatgtgtgtgatgaggtgaacgtgtacgggttcggggccgacagccggggcaactggcaccactactgggagaacaaccggtacgcggggcgagttccggaagactggcgtgcacgacgcggacttcgaggcccacatcatcgacatgctggccaaggccagcaagatcgaagtctaccggggcaactgagccgggcctcgccgcgacccttccggcccatctatcgggcaccggggctccggcccgggacccaggaccagcaacccgcgaccaatcatgctgcagcccaggggcgtctgctgtgccccgccaatcacgagactgggggaccggccgggcctggcaccaatctgcgctgcggtcgggcggagcttctgtttctcccagccaatcatgtgactcaaggaaaacttccggcgctgtgtccagtctcctccaatcaatggccttcgggggcgggcc

SEQ ID NO: 431275 - DNA, 654 bp, Homo Sapiens
  misc_feature (20)..(20): n is a, c, g, or t
  misc_feature (48)..(48): n is a, c, g, or t
  misc_feature (55)..(55): n is a, c, g, or t
  misc_feature (64)..(64): n is a, c, g, or t
  misc_feature (111)..(111): n is a, c, g, or t
ccactcacacatacacacangcacttgggaccaaacatcatccccggnttccggnaaatagggnaccaaaattctgtgaacaactccaattttgccaggtactcaactggnaggtcctgaaaaaccttaaaaaatctgtcgccaacatttttttcccctcccaattccagaaagccaaagtgttaccatagtaacaggactatgtttaaagatgtcctattttgcatagcacataaaaagtaggtttcctgtttactcttcttgtttcccagaagggaggcgggggcgggggaggacaggaggagggagccacagctaaatcgtcacctgaagcccccagtgtgacctgctggattctagagaacacttcagcccataaggcaagggaaaacccaacgcagaaataaacgccggaacatcttgtcattgttaaatatatgatgcagtcacatcggcttcctgctctgtggggctcgtacttcctagtctacggttccgtgagatgcttcggaggacttggttatttttgcatttgctctcattattgttctttttggaatgatgttgtttttcccagaagtagctgtccaatttgttttttaaagcgctgagcatcggacgcgtgggtcgacccgggaatataccggaccgtac

SEQ ID NO: 431276 - DNA, 436 bp, Homo Sapiens
  misc_feature (134)..(185): n is a, c, g, or t
  misc_feature (330)..(330): n is a, c, g, or t
  misc_feature (333)..(333): n is a, c, g, or t
aaccctaaagtaactcctgatggccttacaagaaactccttgccatgaatgccacagaaaggagaggttggggtgaatggaaagaattacatatgtactgtggctggttacccatggcaaccctcccacagaannnnnnnnnnnnnnnnnnnnnnnnnnnnnnnnnnnnnnnnnnnnnnnnnnnngtacacatgtataccacgcacccactcacacatacacacacgcactttggaccaacatcatttccaggttcaggaaatagaggatcataatttctgtgacaactcatttttgcaggtactcactggaggtctgagaaccttaaanatntgtcgctacatttttttcccttccaattcagaaagcaaagtgttaccatagtaacaggactatgttaaagatgtctattttgcatagcacataaaaagtaggt

SEQ ID NO: 431277 - DNA, 521 bp, Homo Sapiens
  misc_feature (48)..(48): n is a, c, g, or t
ggttctccgcgggccacagacgagggttcaaatgaacaaggaaacagntcccaggggcttcggagagagaagaagaaagccccctggacccctggaggtggctttataggaaagccagcccctgggtggtggaagggaactgaagcaaggaatggctgcagattttaaatgtccactccaaagggaggactggaacttcaaatttagtgaccatggccagcaatggacactctcaaagggcaaggagttaagggcttaaataaggagataggggagacaccgcatcaggcaccatcaccctcacagcagaaaagtgattcgcagtctgtcttagctctggggcgcagaatgtaaatgtagatatacaaacatgtattttacttcttgttactcagcaaggaattacagatacattcttcactgcggtcaggccacagggcacagcaaaaggctatcccgtggcctgggagtcttcatctgaactccggctcttctccggacgcctggttagacccgggatt

SEQ ID NO: 431278 - DNA, 600 bp, Homo Sapiens
  misc_feature (34)..(34): n is a, c, g, or t
ctctgagtctgcgctgcaccactgagccgagggnccactcagcatgtaggctcaggctcaatggcacaactccctgtagcacagcacacacacagctggtcagcagagttcagggagggctgaaggacaggctgcacacgaggcactcagaaaacagcagtgaaacagaaggcaggcagcaacggcagtggtactggacctggggaacaccaagttcaagctctatatacaacgaggacacccagtccacgagggcgtgagagtacatacacatgcaagtgcactccagcgctcacccaagcaacacccttggagaaacacggactccaggcccaaatccagcctgagaccctcaaagggcagatccgctaacctcaagttttcagaagatctgaacccactgggggctcctgctcctctgcctgccccatgccagactaggattccagtgacataagcgccctctacagactcagaaggacagagaaggttctgctggaagtgggctcctcagcaaaccagcagataggggttcctttgatatttataccccaggttttttcactctcacgtgacatctatgtggggccaatgaagcca

SEQ ID NO: 431279 - DNA, 1705 bp, Homo Sapiens
  misc_feature (31)..(31): n is a, c, g, or t
  misc_feature (36)..(36): n is a, c, g, or t
tggttgggtttttgcctggtcctaaccctanaatancaagctgctggcccagctccctcgtcctaaagaggctttcctttgcctggcccaccttccactggtttgtggaaaagcttctggccccccatagactgttgagaattccaggagaaaattcctaattagcggatcccgtttgaaatgcattcttacaggactgcatatgtacaaaagaagaattggcttcattggccccacatagatgtcacgtgagagtgaaaaaacctggggtataaatatcaaaggaacccctatctgctggtttgctgaggagcccacttccagcagaaccttctctgtccttctgagtctgtagagggcgcttatgtcactggaatcctagtctggcatggggcaggcagaggagcaggagcccccagtgggttcagatcttctgaaaacttgaggttagcggatctgccctttgagggtctcaggctggatttgggcctggagtccgtgtttctccaagggtgttgcttgggtgagcgctggagtgcacttgcatgtgtatgtactctcacgccctcgtggactgggaaggcgccgtagcacaggttagattccctgctttcagggagcctggttcatttttgtcctcgttgtatatagagcttgaacttggtgttccccaggtccagtaccactgccgttgctgcctgccttctgtttcactgctgttttctgagtgcctcgtgtgcagcctgtccttcagccctccctgaagctctgctgaccagctgtgttcccagctccttttcacgtgctctttagccagccttaccctgcattgtacttacttgggtcaggtgcccctgctagactcttaagcccctagggggcagggatctgggggcgtcatccacctctgcagccctagcttctggtatagcatgtgataggacatagcatgtgatggggcttctcggataagaaagggatgagtccatctgttcaccagtaactattagggatggggatttgtgtttaaaggtggggcaaaggagagagtgattcaaagtaatggattacttcagtgaacctataggttccttagtaggagagagagattattctgggcaagaggtcccgcccttggtctgccagcatttccccagaactaccggcttgtgttttggtgttagtttcttcctcctacagtgctgactttctcaagtaactttcagctattgttggacattcttgatcaggggatagttagtaaactgcagtcagtgggccagatctggcccactgcctgttgctaatagagttttattggaacacagttatacccattttttaatgtatttgtgtgtggctgttttgtgctagcgtgacagagttgagtaggtgtggtagagacttttggccacaaagcctaaaatatttactacctggcccttttaaagataagttactaaccctctagtaactgtcagcccatcgttttgtggtgattgtctgatgtggtcaagaggcggtgcatgcataaaaagttttaaaggcctgggtcgggaactttgggtaaatcatcaaggtactttgagatcttttcctcatctgtgagatgggcattaaaaacaacacctgtctcgcgggaggtcttgcgcactgctagtggacgtacattgcggatgccagagcaggccctagtttagccgct

SEQ ID NO: 431280 - DNA, 625 bp, Homo Sapiens
gagttgcgtggggcggagaggtagtatcatcggtcctattctcaagtgtcttaaagaatcccctgatttctgggagaaggtgcatttttcagggcagccccagcactttccctcagagtgccccgagattcctaactgggtgtaagtcagcaatgctaacagcctcccagaggtggccttgggagctagtgtgtgtgtgctgtgctacagggagttgtgccattgagcctgagcctacatgctgagtgggcccctcggctcagtggtgcagcgcagactcagagcagtgggagaaggttctagttgatttgctgagcagaactgggaggtttccaaacctggtggctagcatgtgtcagaggagcagctcgtttgcagtgtctcgtgattgtccggctgcttgaccgtcctgtggctcctgacctcttctgggagcccgggcaggtcaggatgggctccctgagtgctgcttccagctgcagcatctgggtgcagcacagggcatttataaactacggctcccactcagctccacggtagccccgaggaagtgagcaccaccttctgcaggcttgcttccatctcccactgcacacacaataccacatcgggagtggcacacatt

SEQ ID NO: 431281 - DNA, 919 bp, Homo Sapiens
atgcctagagccttgtattcagggatggaaggtccctggggcagagaaaatcctttagttgggcaggctcaagccaggcagggcatccctttgtgctttgtctaggagacagggaaggcagcacctctgtttctggggtcacagggagcaggagctacagggtgcagttggcaaggcaggaccaagaaatccaaggcagccaggcccttactggacctccacctcccttccaggcctctggaggagaggaaagaaagctgtgctgctttttcctgacccctgaggacagggctggtgcagggagaagccaatggagccagctgctctggggtaggaggcaaggggtgccacacacagccaaggctttgtgcaggactgggcagggagttgccagcatgacacccttggtattttaggttttcaaagggcagggacagaatgagccacaggaggaaaagtcagcaatgatagcaaaagctgggacagagctagggagtgacgccatgggagctgggtgtgctgctgcgcccatgggatcccagctctggaggactctttacaaggtaacgtgggggagggtcttcatgtccaagccaggttgtgttaggaagttgggtccctgggaaggactgggtaacgaggggaccccatcccccgccaggaccagcagcctaatggctagggctgggagctgatcctatctaggagagaaagaaaccctaagatagatctagtttagatgttcgaaagaactttccaaatgaaagttggcaggacccccggcctctgagctcctgtgggagttttgagaggaggaactggggagacctcagcctttggagccttggttctgagacctgatcctttggggactgcaaaggccagtgaaaagtgcctcgtgccgaattcgccacccagc

SEQ ID NO: 431282 - DNA, 2718 bp, Homo Sapiens
  misc_feature (2539)..(2547): n is a, c, g, or t
ttagatctcattagttttatttctataacctttcgatctgatgtcacgttagattttgtcacaactggatttagtggaagcaggggaatcaagttcactattttctgaaacacacaaaaaagggatgggaacaatgacttagaactaagattgctcataaaagaccatcagaaagatccctaaacaaaagctaaatagttacagttaatggtaactggcaagggatttaatgcatttgctggtattaagtttcttatggaatgaatgaatgaacccagcagcattttatgacacagctgccagaacatcccatagaaaaacaattttgtaggaacgtgatggcaacaatcagcagccaatattctcaagagttcctaattaccaaaagcatatacaattttagtctagaaaaataagtcaattttataaaattaagtttttagatcgaaaagcaccccctttaacaggtacagagatactgaaaaatagtccctaaaaatctcactaaatagtttacggagagaaaggcatgccatgttgagttacggagtgcagcgcgtgccctcagctgctggcgagggactggtggatgggcggctggaagcagcgcacatgctccactggcgtgccctccccgtcgcctgacttcaggtacttatccaggatggtgatgatctcatcattgagaatctggaacttgcgaattctctccaccatcttcttcaaaggcacatttttaataatctcatctttgccatcatgtttctggactttaagtagatggtagcagaaatccagcacagcaaaacgccgctgctgcccaagaagtacgatgatcatacagccagcccagtgtagcccatcaccaaagcactgctcgactgtgaactcgtgtgtccccacgggaatgcagtagacaaactgcatggcactccacagtctgtgaaactccacacactcgtccacatgcatgaccccattgctgggcagaggcccgcgccagatggggtcatccagaaagctccggatccgtgtcaggatgacctcaaacatggacaggccgcagcagaggcgctcctttgtcagcaggtccccctctcttgcgatggcaatttgctgaggggtccccagtctttcaatcagtgggacaagatgcagcggggcgtactttgattctagtcttttcattttggcatcaagtctctccccctctttcacatggactcgcggcaagatgttctggaaaggagccgcgtgcagcaggtcacacacttcttctaaagacaggctctgctcgatgagcaggcagaagaggatggcgttccccacctcccgcaggttctggaagcacaccgtcttcagctctgcgtactccacgatgtccttcagctggtggtggaagaactccaggataccaggagagccgtactcgtgccggggcaggcggcagatcttgggcatcacctccatcagcgtcttcacgtactgcaggattgtgccttgcagcaggctcttgacgaccttcagcagctcctccatgaccacggcgataccctggtagccgagaagccggcagatgacttgaaagtgtggaggtcccacgaagttccggtagctgccgtaaatgctggagtaggccaagttcaaagccttggatccatgcagatactgaggctgtgcattaggctgcttatctctttgaaattcctgagaaaatggtaacactgtccgaacaaaccggttggtagagccgttgtagcagtagttgggcaggaagtcatagttgagctcccagaagacgtgcagggtgatcctcccgtagggcgctgacacgttgtggttggcctcccggaacatggcgtcgaagccgtccagcgtcaggtaccggctcagcagcttgtgggtcatgcggttgatttccaacaggccatccagctcaactatggaggtcaaatcttcactttcaaatcgtccaatcgccagttctagggacttatacatggctgctgagacgcgctgggtgatcagacgattgaggtctattgatctgccgaggagctgcacatgcctctgcttcagcagcgtctcgtagcggttagacggcgggaggtggatcgtggctccctgattcttgcattctgatcgtaaccgtttatcaagaagcaaacttcctgccataaccttataataggcaaatatctggtctgctagcttgtaaacaaattggtcaaaacatagattcacctcggcctcaatttcgtcgtagaggaactgcttgttgaacctggtgagcgcgtagtgggcgctgtcattgtacaggtccagggagtagagcacgtactccatcatcgatgcctccttggtctccaggatgtggtccgtcaggatccagggcatcgacatctcaatggggaactggatcctcctgcccatggtcagctccaggaagaactctcggaaccacagctgcgaaaggtcacagcactgctgcagcgtttctgggagggttcaaacaactccatgttatctcccgcaagcnnnnnnnnncctttagcagagatgacacaagggctgtgtgccgggtgcctgctcctcctcgctcagccccaagccatgcagcatggacatgagtggggaggggtcaccggggccttgcactagggacaggaccagctgggcatagctgcaggtaaagccacctcatcaaccctgtatccc

SEQ ID NO: 431283 - DNA, 976 bp, Homo Sapiens
tgttattaggtacagcatgagtccctaattaggacatcacgtggaaggcaactgagacagtgcctcagtcataatgattattataaaagcttctggataagaaacacgaagatgttcctaatgccagtaatctgcaggtatcagtcctacatcgctatcttgtgcagatgaagccttctgatttgttaaagaaaatggtcttgaagaaaaaggctgaacaaccagatggcattattgatgacagtcttcatttagaacttgaaaagcaggcatattacctgacctacattcttcttcatttagtcggtgaacgttagttgttctcattctttttcttctggacaacggaaacactttgtgctactctgtggggctttggaaaagcatgttaaatgtgatattagggaagatgcaagacttttttacagaactaaggtgacacagacttggtcgccaggatacatggaacatggcaggaaataatccagaactgtcggcctactcaggggcagcttcatgacttctgggtaccagattcttaataggagttgcagcagcaaacaatatgaaccaagagaaattcaataagagcctttcatagaggagtagaaaggattattacagaatccaatgaatgccaagataatgtacagcaaatgtgccacttgaatatctagtatcgaagctggtaatgaagaacttggcatttctgaagcagatatgaacatatgatctgcttaattgttaaggcaactgacctttcaaaaagtgcagagtcttattaacagagggggagggggtagaagcagaataactagtcatatgtctaacctgccccagttaactcctcttgttcaaactcataagccaagttatcttttttagatagtattatgtcacttggataatccacaggaactctattcagacacgagcttggactaatttagaaattggccatggcacacgagaccaa

SEQ ID NO: 431284 - DNA, 934 bp, Homo Sapiens
ttggtaatccatgcttaaaagtgctgaggctatccaaatttcacttttccagtggccccgttgttcatcttctatctggttccctactttctgccctctatgaaaaagcaaaataaaagctcaccacttccgtcaaacatgtctgtaattctataagcaaaacaaaatacaaatttccactctttctcattgcaaaccaaactgaaaagttaataagtgacttaacttttcatttagtgcacttaattggaagtgtcaccatgattttgtatttaactcttacaacaattacatatgtaagtatatacaatatttctgtacattgccagagacattttagggcagtaattgtattaaaaccacatctactgtaaataatgttaggttcttttcatctcaaaccactttattcttgtctacttactcgttatttgcatgatagtttgtgaattatcaaaatacaacttaactctttttaaaatattaataatatttatgcagttgattgttaatctgttataaaaggtttcacgcaaaggaaaaaaataaggactataattctatatacatctctataaacctgttgtgctatggggttgtagacctaccagactgtgagccagtttattaaaagaatactgtactttttcctttaaaaactatttttgtgactttacaaggtaaaaatttacaaaatatgtgacagctttttatttttgatacagttacatcatatacaggcattctgtgctttgccagcaatccaatctgataggtctccactcagggctgaatataatttataattcatcccccaccccccaaatatacacaagaaccttaaaaaatttacaaatggatgaataaagtcaataaatagttttgctttaaaaaaacattgaagattcatagttgagttgtgttttgataattc

SEQ ID NO: 431285 - DNA, 1153 bp, Homo Sapiens
  misc_feature (1020)..(1020): n is a, c, g, or t
  misc_feature (1081)..(1081): n is a, c, g, or t
  misc_feature (1139)..(1139): n is a, c, g, or t
tgtatctcagcaatagggaagattttgaagtttaagcctaactgtgtaaatgtagatgaagttcttccacactggttatcatggcttccactgcatgaagataaagaggaagctattcagactttgagttttctctgtgacctaattgaaagtaaccacccagttgtaattggtccaaataattccaatcttcccaaaataatcagtataattgcagaaggaaaaattaatgagactattaactatgaggatccttgtgccaaacgcctagctaatgtcgtgcgtcaggtacagacttctgaagatttatggttggaatgtgtatcacaacttgatgatgaacagcaggaagccttacaggagttgctaaattttgcttgaagcactttaatataacttgaatattatctattataaaagtaactacaaataagtgttgtgaatagattttattataaatcagagaactgttttctccctgctaagcagtttatagttcttctccatgtttctccagaattaatcagtgttagtcctctgtttatctcgcatgttttatcttccaaacacagaccttggtgataacctgtgcttcaaactgtcttaaacaatgtttgtcacctttcccctagttgatgtaaagtatataaattgttgctatttgtttgaactattattgatgctagccaagcagtatacttgatgtgaagatgtcatgctatcacaatatgctaagagctcacaaaaataagatagaatttccaggacaaacatctttggaattgtgagtgaaggatatagtggcaggcttgtccctctttaattaatactcttggtatttgtggtgatgggaggatgctgttactaggagagttttgagatactgcagtggatgtgggatgtatatgaacttcttcataatgtactcctgggaactgggtaggacatatccatattgtagttcccaaggtgtctggttgagagttagagaacttttaaattctttagcccagaccaggntctctattttttaagttatccaggactccaagaaccatagttctgaaaagggagtctgatncactaatattggtagcatgtaccagtgttgcaaagagtagtaacagtatcctgggagncagtgttaagtgtt

SEQ ID NO: 431286 - DNA, 1115 bp, Homo Sapiens
  misc_feature (34)..(34): n is a, c, g, or t
caaaaaaacccctttcccttcccaagagttttancactgtttatgacttaactgaaactcagtattaaaataaatatttttatattgtagaattactctccatatttgtgtgaacatcttaagacagcagggttaatgacatttttatcattcaaatgatatctgcttatacacagtaaaaatcttcaactcaacaccagttaacatacgaaatacttcacattaggttccataggtcttttccctcaaaactgtcaaaaattcaaaattaacttaaggatgttaataagacacaaacggttaacacagccttctacctactgtgattttccaaggtgcatttgatggacatttttcctattcaagttacataccttagttattcaacatactgttctctaaaatgttaaaacacatacagcaaagtttttgaggattctgttttttaggttttagtccatagttttacaatgcagacatccttcagaaaaaactaagcattcataaaaggctaaaaggtgacaatggagaattaaatctctcatcactaaggctgcatttggcttggaaaaatttcttggttttaattcaggcacatgcagcacctccttttcactaaactgagacaacagacaagtttctaaacacatattctacactgatcttgctcaaatataaaagagccagcaggagagatgcaactcctaaaactgatgcagtgttataaaatagcatatttaaatattgggtttaagtctcctaataattcagagtatttccctcattttctttcagaaaggaataagctattttgagaaagacacttaaatcctacaatatttaaatacaaaagcatgtctttttttaaaagataatgctaatatagctacaatgggttagaaagtgcattgtaaagaaataaataattctctgctaaaactcaaaaggtgagtcagtgcccactgtttctgccgacagtcatttgaaaaaagaaaatcctatggtaccaccattatatataagctacttaaaaattatgaaaagtgaaataactcaaacctaaaggctgttatcttcaaagcacttttgaaaaacaaacaaacatagcccttgcc

SEQ ID NO: 431287 - DNA, 1584 bp, Homo Sapiens
  misc_feature (59)..(59): n is a, c, g, or t
attgccaaaaaaattccaaggctttgcacgttccatctgggcccatggtgggcttgganacgcccagtccttaaacgccccaaggaagggaagaagcacagcgagtgcccagcctgaatcccaagggccgaagcccttggggactgtgccccaacacctgcgcgtcctttgggcccttggtgcctggtgcttggggcgtgcctaaggtccccctgcacctgcaaaccaggtgggctaaggagctccttcgctccaccctgcctgctccgatgaagtcctggggcagggaggagagcggtgagtagggtggcagccgccgcccgaaccaaaccaagagggcactttgcagagggggatgtaagaaccaccaggatacatgccagaggtcacctcaagggcacaaggcacaaaaaaagaaagcggaaggaatcggttgaacagtggaaagccccgccaaaaagcgttcctgatcggtaccaccctccgatagcttatatcgttacatagagaagtggggggaaaatacagcagcaacacaaatggaatcctggcttccgagacagtgtgcagacactcctgagctgtcagccccgcctgcctccccaaggacagtcccttaaaggtttgagtgttttgcttcacagcagagttcttcagtgtctgagaagtgacgccgttctgggtcttcttggatttgcacttggtaaacttgaaacgttagtagttctgttcgcacccaagaggaatcgctggggcaaagttgctctagaattaattgctgatgtaccttccatggaacatggatcggaggctttaaagcatcgtctacatctcttcggagttttgttgagaggcctccagtttcatctttttagagggtggcactccttccagatcctgagagattgcagacgtctctgcggccagacccgagtctccagacggctgccgatctactttctctgagctgttcatcgaatgttccatcgaggactgtgaattctgctcatcagaagcatcttcagctcctgggtgctccttcccatcagcctgggcctcatccaccttggcctcggtgccgtcgctgggcacagccgagttgggctctggagcggggctggagttgctgctgttctcctgtttgatgggggaggcatctgcgatggagctctggttgctgttatcgtcatgcatgtccatcatccctggggaggaactgttctccggagtggtcacctctgagccacacttctcgtccttgccttttttcttattcttgtttttgtcatcaaccttgggctccgtcacagggacccatttgtagattcgtagggatgtgtcaccaacggtcacccatttcttctcccatttgcgcactttctcgatcgccgccatgaccctcttgatatcatctttggcccggctcctcgtctcggctcgaaccgacctgcccgacatggttccggcggggagacggaggctggggagcgcgcccgccgggtcctgctcgcgctccgcggcggccacactcgcgcccgcccgccgctcactcactcgcgcacagacactcgcactctcacacgc

SEQ ID NO: 431288 - DNA, 600 bp, Homo Sapiens
tttaatcacagatctatttcctttcttccatcaagattactcagacattacatgtccttctgctgagtgagttcttaaattaacaaactcacaataaaacttctcctgggaccagggaattgattcttacataatctaccctgaaagaggaaactccttgctctgtaggtaacagctgccatcttattatgcacaagcctcagatcataggtctcaagccacacaatggacctttactgcacctcccctgatgcagagcatggactctgctgcctcacagtgacacaaagtcaagggcctccctgcctgcctgttgggatccttggtgctgagacaggaatgcacccccacagtctagaacagcagttgaggtctccgtttccttgatggtactctttctggaaaaagccaaaatgcatttctttttcatgaatgcagaaaactcatatcaaaaccagcactgaaaactatttattatgccacaaatgcatcatcctctatacactgtatctgaagttcgttatatactcaatcatcttttttcttggcaagaacattatggagttcttcatatgacccttatcttttttttaaacctct

SEQ ID NO: 431289 - DNA, 610 bp, Homo Sapiens
tgtccctgactcattgtcatctgattctgtactggcatgctctgtgatgatggcacagaatggttgtaacctcccatggatccatggctacttgaaggcatattcatggaactgtttgtcatattgagttgattgggtccaggtccctgcataggcatatggttaggcccaggcatctggccgttcatctggttctgcatgtgcggtgcaggaggacccccacctaccattccatctgaaggcatgttgtgagagcgtggaggtgggggagggccgctctgattcatccctccaggacccataggcatattctgtgtgggtggtgctggtaaaagagactgcatattttgattagaatctgctattgtagcaaggtataccaagtttgtgtgcaacatctgctgatactgagaacactctgaggtctttcctttattctgagagtccattatacactgaataagatggttattgtcatccaacatcttctgaatcgcagcgggagtgatctcccccttgcctcgctgcctcggggccgcgaaagccacagacatgttgccgccgtcaccactatcggcaagtcccgagcgctccgggtgaacggcaaact

SEQ ID NO: 431290 - DNA, 999 bp, Homo Sapiens
  misc_feature (18)..(18): n is a, c, g, or t
  misc_feature (26)..(26): n is a, c, g, or t
  misc_feature (34)..(34): n is a, c, g, or t
  misc_feature (54)..(54): n is a, c, g, or t
  misc_feature (59)..(59): n is a, c, g, or t
  misc_feature (265)..(275): n is a, c, g, or t
  misc_feature (825)..(865): n is a, c, g, or t
aggaaagcaagactggcngttaaaanggcctacngtaatatattgtgacctacnggaangacaatttgggtttaaatccacacctgagtacatcctcaatatacacatccataaggttccattcggatctaaatagtgcagagaaaaaggctattcttcttcaaaaataaaaataaaagcagcaagccatactgatcctcatccaatatgccaacagctcagatgctgccattaataaggaaacaaacctgtaagttactaaatnnnnnnnnnnntcaacacaataccatttataatatttcaacactacctcaatctctgtacagacagtgccaaagagaacctatttttgaaatgctcttagtaaactcaagcgagtttcattgagagaaaagtcttcgagcagtgctttgcagatcctggcatccttgggccggatggccgttagtgttgcaaacccaggaagccttctctcctcctctcccttcgtctacggagcatgttgttaaacccctcaggatggcaactcggtagcatttggcttctgcctgagcctctcacggtagtgacattattgaacggaaatagcaggcaaaaatcagagcatggctatcataaaacatccaggatgcaacccaggggaagtgtctgttgggccgagctgtttttatagcatctcagccaccagtgttcttaaaccatacaaatagccaaagacgttatctacaggtttgtaaacaaattacattcttcttttaggacataaataagttaaaatagagcaatttaagcggaaacaaggcaacatgccggcaaagaaacttnnnnnnnnnnnnnnnnnnnnnnnnnnnnnnnnnnnnnnnnnctacctatctatatggacgtatacagtctcggaaaagtatacggttgatatagatacaaagaaatggatataaccttgtgagtgtctatgaaagttcttcggttccattggtgcaaatctactaggcgagttaa

SEQ ID NO: 431291 - DNA, 1039 bp, Homo Sapiens
  misc_feature (492)..(547): n is a, c, g, or t
ggcgcaggctccgacgggcacctggtaagtaagtggcacaggaggctgagcgaacgggaagcccatgcgtgctggtgagcacgtttatcagaaccacgtttgggagttgacagaggcttaggcatggtgcagagggtggcgtggtcggtgcaaggcagatacaggcttcagggcaaggcccagacggccgtcctgagcagccctggtgcctcacaagcacccccgcctgtgccgtggccaggtcagccgcgcctcccggggcaggctcaggacaggtgcgcacagatgcacaccacacacacctggggtgaaaaaccaggtaaaaatggaaagggacttggtatcattttaatgttgtataagttttgcttctaaaaatttaaatatttctctatgtacagatcctaaaacgccgggaaaactgcctggcagggccagcctcgaagcccctcctgtgggccccgggccagcagctttagcctttcctccccnnnnnnnnnnnnnnnnnnnnnnnnnnnnnnnnnnnnnnnnnnnnnnnnnnnnnnnncacagttttgggggcctggctgccctgtttcctgagcaaacaacacgcccacccctgccctgggcctccagagccgcccaggttcgcaccactgacggtcagaggcggagcaggaccaggttttcagcagccgcggatgctggcccgagggctcccttggagggtgctggtgcatccacactgccctcgtggcccacggagcaggcgccctcgggggtgccccgctcctcttctgggggtccctgccggcccaggccctgcagtctctgctgccgctcctgggcctggcgggcccggctggcaatggcacgcacgcggctgtggctgcgggaggaggagcgccgcacaaaaccagggccccctgccaccccctccccagccgggcccaggctggtgggtgacgtgatgtctcctgcctgctggaagacagtgagccagcgcagctgctctgtcagggtgtcccgtctcacccctggccccgacacccgccgt

SEQ ID NO: 431292 - DNA, 2695 bp, Homo Sapiens
ctgtcttcagcaatatttattggaaacagcgatgcttcctgtggtgagagtttatacattaagcagtaagatttgcctttcactccacatgatccactactgcaggtggcacatcggaagcagcacgttaaacctctgaaagagtctgtacagctagataaatagaactctggatacctaacaggactttcatgactgatacaaataaaaaaacacactgataagcttacacacagcactgtacacacaaaatgaagacgatggatagaaagggcagaagtaaaagtagcgactgaattgggaaagagttttgcatatgcagccatataccttaaactgctaagcacaaaaatcatctttatttggtcctcattgagggcagaatctgcacaaatgatgttcaaagaacacagggtaaaagtggaaaggaaaggtatttactgtttctcagtctatgaactagtggaaagatggttactagtgttttcttccttgtgtctctgtgccaaatggattcatgaaacatgtaattcacaaataaaactgaagtgaagatatttgttcccccttccctgtgcccttcagaaatagcctaaatacatacatagtttctgtatagcaagaaatttaagcttggataccagatttcttcccaattcctcataatggagaatttcttttcagtccctctcacaataatgctgattaactgtcttactgaaaaataatttggaattaccgctctggctttaatagcaaggagggaagaaaactggctatacgtcagaaatagccataagtgtgaggagctgagatgcctatttgcagagaatgctttgaacccacaattaacacttttctatggatgcattaagagacaaattcattcagatcaggagacaatttgctggtgagggaaggcttactttgacaattccatgactcacatatttgggaagggacagtgtgaaagcaaaagctttctcctctttgcatggagaaatgcaaagagaccttcagatggcccctggggtgatagacaatatcttcggtgggatggtttttctgtgaaatggctcatggtcatattctaagaaaccacagcctcctgagaactgtgtaaacagcagttctgtgactactggctggtctcagatgatgttttaaaaagcacatgccacgcccaccaggctaagaggatatcatccatcaccatgactcctgtgggagcccacaagtcaaccaaagtcacttggtggggctggatgacgtggaccactgcggcctgcacttgggatgtgttataagcagcattgccaaagcagtggttaaccgtaactatctgggtcaagaggaggcgagccagccagcataacatcctaatggggcagggcaaccagaatttccacataattgatggggaagaagcctgaatggccatgcagcatcccctcataccagttctcatcaatttggttagtgagtgtgatgatatcgccctctttaaatcccaactccccttcattttcaggttcaaagtcgtacagagctcggcagcagggctgatccatttggacacctgaaggtttgggagtgcctgtgtgggagagacccccattgggctgagtactgtctccagttggaaactccaggctcattcgtggtttaggttgatattcccttctaggctgagatgaagcctgtcttattctttcttccagtctgaccgtgacttgctgcaggatctggactgcctgcttgtggtactccagctgagcttgcacaagtgcagagagctggctcacttgttcaatatccatctccaagagattgaacatgcttgactcagcaatttccttagactcatcaaatttctctagagcttgacgaagctcttcatccggaatcttgccttgtcgtttcttcttataatcaaaatccaggcgtcgaccctccaacttctttagatgatgttgaatttccctaagatctttgtcatgaagattctgaagagggtcaatgaagttctgcttcacttctatgtccaaagagtctttgacctccgacagttcccgcatggcctccccgacctcaccaagtgctgggccaaagttgcaatcatctccaagctctcttccaaatttgagcatggcctctgccagcagcgcctctgcctgaggatagcctggccccttctcctggccacggatttttgacatggtgttgatcatgctgagcttagctctggaagctggattgggttgaaggtattcaattgttttagtcattatttccatcacagccctgctggtgacatccactttcctttccatctctttgaagtcatcatctagcttggttccttcagctcctccaaccttctcactcactttgtacaaccagagccgtatccagaagtatccagtttatactcagtaacagtcacaagaatactgttttttggaagactgagtggctttatggaactgcttcttgaggccggccaccgacatggtgcaggaggccgcgctggcggctgctgtgcgggagggaggcggcggagcgggactggagggccgagcggggcggcgcgctcccctggccgcctctggtcgtgccgccgccggggctatgggcgcgagggcgcggagcctagcgggacacgggctcttgcgatcccgggaattccggaccg

SEQ ID NO: 431293 - DNA, 1022 bp, Homo Sapiens
  misc_feature (87)..(87): n is a, c, g, or t
aaaatcccgggctcaatcgtggtttaggttggaaaatccccttcctaggctgaagatgaaagcctgtccttaatctttccttcccantctgaccgtgaacttgctgcaggatctggactgcctgcttgtggtactcccagctgaagcttgcacaagtgcagagagctggctcacttgttcaatatccatctccaagagattgaacatgcttgactcagcaatttccttagactcatcaaatttctctagagcttgacgaagctcttcatccggaatcttgccttgtcgtttcttcttataatcaaaatccaggcgtcgaccctccaacttctttagatgatgttgaatttccctaagatctttgtcatgaagattctgaagagggtcaatgaagttctgcttcacttctatgtccaaagagtctttgacctccgacagttcccgcatggcctccccgacctcaccaagtgctgggccaaagttgcaatcatctccaagctctcttccaaatttgagcatggcctctgccagcagcgcctctgcctgaggatagcctggccccttctcctggccacggatttttgacatggtgttgatcatgctgagcttagctctggaagctggattgggttgaaggtattcaattgttttagtcattatttccatcacagccctgctggtgacatccactttcctttccatctctttgaagtcatcatctagcttggttccttcagctcctccaaccttctcactcactttctgagtggctttatggaactgcttcttgaggccggccaccgacatggtgcaggaggccgcgctggcggctgctgtgcgggagggaggcggcggagcgggactggagggccgagcggggcggcgcgctcccctggccgcctctggtcgtgccgccgccggggctatgggcgcgagggcgccgagcctagcggacacgggctcttgctgagaaacactcgacccgctctcgacgaattcgagctcggccgatttggcctgat

SEQ ID NO: 431294 - DNA, 385 bp, Homo Sapiens
  misc_feature (327)..(327): n is a, c, g, or t
  misc_feature (349)..(349): n is a, c, g, or t
  misc_feature (357)..(357): n is a, c, g, or t
ctgtcttcagcaatatttattggaaacagcgatgcttcctgtggtgagagtttatacattaagcagtaagatttgcctttcactccacatgatccactactgcaggtggcacatcggaagcagcacgttaaacctctgaaagagtctgtacagctaggataaataggaactctgggatacctaacagggactttcatggactggatacaaataaaaaaacacactggataggcttacacacaggcactgttacacacaaaatgtaggacgatgggatgggaaagggggcggaaggtaaaggtaggccgacttgaattggggggaagngtttttggcatatggcgggccnttttaccnttaaacttgcttaggggcaccaaaaatc

SEQ ID NO: 431295 - DNA, 2270 bp, Homo Sapiens
  misc_feature (2066)..(2066): n is a, c, g, or t
  misc_feature (2102)..(2102): n is a, c, g, or t
  misc_feature (2140)..(2140): n is a, c, g, or t
  misc_feature (2165)..(2165): n is a, c, g, or t
gggcctgcgctgccgcctccgctgcactgcctggcgcagagcctccagcagctgctcctggttgttgcagacattgtaatgtgtcaggtgcagcagcttgtccacgtcctcctggctgtaggtcaccttcgtgtagtggtagggagagtccgatgaagacaggttcacctccccagctgccgcctcctcgggtgtccgccggaccccaggggccgagtactcccggaaggagtcgctgaccagaggaaagtgcagcaccgcaggggctccggggcaggtggggtcggagaaggtgtggcactcccgaggctggagctgctcttcggggctgggcgagatgggtgggaacgggatcccctgctcctgtcagaaccggcccaggagctgcaactgctggaaggctccgtggaggttgtagtccaatgacaggatgaggtccacgtcccgagtgggctgcaggaggggcaggcagctggtattgatgaggtagccaacatccagcaggcacaggtggggctccgagggtgtcagctggttggggagcccatccagagtggtagctttccatgtggagaagtgaggatgctgaaagtagtctttgtggaaatggaggccacgcaggaaattatgtgtggcctgggccagtggacgccacgtcagaagatcggtgaaaaactcagctattctgccggctgttgagggtggttcttctatcttcagaagggggacctgctccttgtccaggttggcctggttcctgacccagcggtcccagaactggctgggctctgaggcccagtataagctgtcctggaggttggctgcatacaggttgctccagataccttctaagaagcagatgcgggactcaggaagcctcttcatcagctgccccataaagaactcggagccaaagagctcagaggggatgaaggccccgtacttggggaagccgacctcgtagggagagaactcgcaccactccccaaattcaaaagtggtcaggctctgccctttggtgttgagggcacagtagatgggcagagggttctggccatgactcagggcctcccgttgatctgagagcttgtgatcatggggctcatcatgcagcagcgcctcgttgatgagggcccacaggttggtgaagcagcttgggtagcccaagcgggcacgctcggccagctcctgccggtaccgctgcagctggctgggggccagcacacccagcttgttcttggtcacctgggtcttcagcaactcagtgggccctgccaggtccttctgagaccactctgggtcctcataaaggttggccaaggcccaggtggagcccgaggccccggtgatgtaggagacgcaatccaagaggcccagctccttcaggccagccagctgcccatacagggaagtcattgccgggatcccaccaccagtggccataatagctaccactgggatctcatcctcctgcaggtctccgtccagctgcagggcctgcctcaaggccgcggccaccacctgcttcctcctgctcaggaaggcctgctcctctgcacagggcccgaagcccagtcgcacggccagctccctcagtcctgcttcttttttcagctccactctcatcaggggctcctgggatgtggggaagacaagcctcaccacttgaccagagggcagggcactcagtggcgcctttagttgctcctcgggggcatcctgcaggcgaatactcagctcctgctcccagcaggctgggcagtggaagcggaaggtgccagtgcccacagaggcctcctgcggaccctcacaggacccaggaaccacaagctgaactctgtgctctgaggacttctggtctcctgtctcctccagttgaacgtgcaagcaggagagctcccgggccaccagaacgccattgctgacgagccactcgccacggtcagccagactctgcaggcgaaattcaacttaccaggcgcccctcaccctgagggctcagtgagaagctctcgcgccggaactccccagcccgcagagtccccgcatcaaacagtactgacaanacagggtcatctccggtcaccaggtcctggtcaaanactttcagttccatgacattcttgagctgcctgtggancctgaagtgaaagctctggttccanacagggctactgctgttcttgaccgtgcgtgtctggagcctgtggctgcaggccgtgggcagccagagagtcacgtagcagtcagagggggtcactaggtcctta

SEQ ID NO: 431296 - DNA, 938 bp, Homo Sapiens
gaaaattccaaaaacaacctggcaacggtttcttttcttgaatgcgcttggctccatttgtaggcttctttggcccagggacccacaaacccccacggctgtagcttggtaggcgcaggggcaatccagggcttgggtttcgctttgtgcttttttgcccaaggcacaaaggactgggtcctccaagagcaccggggagttcgggtccacccatggttcttctcggtgggatcccagagcactataggcaaccagaacaatgtcttttgacttgcagaaatccagcagttttctctggttgaagtaaggatgacattccacctggttgcagacaggcttgtacttgagccctggcttgttgaggatcatctccagctgcctgcggttgaagttggacaccccgatggacttggccaatcctgcatctttacacttctccacggcctcccacgtggcacagagatccactgtgtcaaatagtatttttccattttcatcttttgggatcacttcctcacctggctttacagacactggaaaatgaataaggtagaggtcaacataatccaattgaagatttttcagtgacctttccaaggctggtcggaccaactctggtcgatgggaattgcaccaaagctttgaagtgtagaatatgtcttctctcttcacactgccatctgcaatcttgcttcggatggccagtccaacctgctcctcattattgtataaatgagcagaatcaatatggcggaagccagcttcaattgccaatttggtggcctctaaagctttacttttaggaacctctgcaggcgcataggtgccaaatcccaggacaggcatgaagtgaccatcattcagcttcacacactgatatttcgaatccatttctgtcactagcctggctggcaaatgtttctttcttcctccctcac

SEQ ID NO: 431297 - DNA, 839 bp, Homo Sapiens
ggggcccattgtttttgtaatctctgaggagaagcagcagcaaacatttgctagtcagacaagtgacagggaatggattccaaacagcagtgtgtaaagctaaatgatggccacttcatgcctgtattgggatttggcacctatgcacctccagaggttccgagaagtaaagctttggaggtcacaaaattagcaatagaagctgggttccgccatatagattctgctcatttatacaataatgaggagcaggttggactggccatccgaagcaagattgcagatggcagtgtgaagagagaagacatattctacacttcaaagctttggtccacttttcatcgaccagagttggtccgaccagccttggaaaactcactgaaaaaagctcaattggactatgttgacctctatcttattcattctccaatgtctctaaagccaggtgaggaactttcaccaacagatgaaaatggaaaagtaatatttgacatagtggatctctgtaccacctgggaggccatggagaagtgtaaggatgcaggattggccaagtccattggggtgtcaaacttcaaccgcaggcagctggagatgatccttcaacaagccaggactcaagtacaagcctgtctgcaaccaggtaaaatgtcatcccgtatttccacccggagtaaattgcttagatttctgcaaggtccgaaagaatattggttctggttgccaataagggctccggggatctccacgaagaacaaaacgatgggggggaacccccgaaactccccgggggctttcttgggaagggacccccggccccttttggggccccttggggc

SEQ ID NO: 431298 - DNA, 1293 bp, Homo Sapiens
  misc_feature (46)..(52): n is a, c, g, or t
  misc_feature (54)..(57): n is a, c, g, or t
  misc_feature (59)..(59): n is a, c, g, or t
  misc_feature (61)..(76): n is a, c, g, or t
tttaggaaaagcttcttggaggggccggaggccggcccgaccaagnnnnnnntnnnntntnnnnnnnnnnnnnnnnggggtgaagaatctttaggagagagcatttaattttttcaaaatgaaaaaacaaaattattgtctttcctttctggccaatgggctttgctgtagcttgctgaaatcaccaagcaggagagatttaaccagaggcgatgtgtccagtcaccagcatagagccatcctctgtgtcaccatccacacgcagggccttctggcagacctcatgcaatgccctccatgttaatattcatcagaaaatggataattaggggggccagcaaaaatatcaagggtcaaatatcgcacatttctgtttaggccatctatggctttcatctcctctgaagtcaactggaattcaaacacctgcacgttctgtctgatgcgctgctcattgtagctcttggccaggaccacaaccccacgctgtagctggtagcgcagggcaatcagggctggggttcgcttgtgcttttttgccaaggcacaaaggactgggtcctccaagagcaccggggagttcgggtccacccatggttcttctcggtgggatcccagagcactataggcaaccagaacaatgtcttttgacttgcagaaatccagcagttttctctggttgaagtaaggatgacattccacctggttgcagacaggcttgtacttgagccctggcttgttgaggatcatctccagctgcctgcggttgaagttggacaccccgatggacttggccaatcctgcatctttacacttctccacggcctcccacgtggcacagagatccactgtgtcaaatagtatttttccattttcatcttttgggatcacttcctcacctggctttacagacactggaaaatgaataaggtagaggtcaacataatccaattgaagatttttcagtgacctttccaaggctggtcggaccaactctggtcgatgggaattgcaccaaagctttgaagtgtagaatatgtcttctctcttcacactgccatctgcaatcttgcttcggatggccagtccaacctgctcctcattattgtataaatgagcagaatcaatatggcggaagccagcttcaattgccaatttggtggcctctaaagctttacttttaggaacctctgcaggcgcataggtgccaaatcccaggacaggcatgaagtgaccatcattcagcttcacacactgatatttcgatcctccggagaatccggaccggtccag

SEQ ID NO: 431299 - DNA, 1232 bp, Homo Sapiens
gggttaatttcaaaaatgataaaaatttattgtctttctggcctatggactcagctgtagttgactgaagtcgctaaacaggacggatttaagtagaggtgatatgtccagtcaccggcatagagacgtcctctgcgtcaccatccacacacagggcttctggtagacatcaggcaaagctctccatgttaatattcatctgaatatggataattagggtggctagcaaaactatcactgttaaaatagtggagatttctgtctaggccatctatggctttcatgtcctctgcagtcaactggaactcaaaaacctgcacgttctgtctgatgcgctgctcattgtagctcttggccaggaccacaaccccacgctgcagctggtagcgcagggcaatcagggctggggttcgcttgtgcttttttgccaaggcacaaaggactgggtcctccaagagcaccggggagttcgggtccacccatcgtttgtctcgttgagatcccagagcactataggcaaccagaacaatatctttcgacttgcagaaatctagcaatttactccggttgaaatacggatgacattctacctggttgcagacaggcttgtacttgagtcctggcttgttgaggatcatctccagctgcctgcggttgaagtttgacaccccaatggacttggccaatcctgcatccttacacttctccatggcctcccaggtggtacagagatccactatgtcaaatattacttttccattttcatctgttggtgaaagttcctcacctggctttagagacattggagaatgaataagatagaggtcaacatagtccaattgagcttttttcagtgagttttccaaggctggtcggaccaactctggtcgatgaaaagtggaccaaagctttgaagtgtagaatatgtcttctctcttcacactgccatctgcaatcttgcttcggatggccagtccaacctgctcctcattattgtataaatgagcagaatctatatggcggaacccagcttctattgctaattttgtgacctccaaagctttacttctcggaacctctggaggtgcataggtgccaaatcccaatacaggcatgaagtggccatcatttagctttacacactgctgtttggaatccattccctgtcacttgtctgactagcaaatgtttgctgctgcttctcctcagagattacaaaaacaatgggcccc

SEQ ID NO: 431300 - DNA, 955 bp, Homo Sapiens
  misc_feature (193)..(193): n is a, c, g, or t
tccaagcggggaatgtccaaaagcccccgggccaacgttacgtgttccaaagggcgatgggctccattgggaggttcgttggccccagggaccccccaaacccccaccggctgcaagttgggttagcgccagggcccatccaggggctggggggtcggcttggtgcttttttggcccaaggccacaaagggancttggttcctcccaaggagcaccgggggagttcggggtccaacccatggttctttttcggtgggattcccagagcactataggcaacccagaacaatgtcttttgacttgcagaaatcccagcagttttctctggttgaagtaaggatgacattccacctggttgcagacaggcttgtacttgagccctggcttgttgaggatcatctccagctgcctgcggttgaagttggacaccccgatggacttggccaatcctgcatctttacacttctccacggcctcccacgtggcacagagatccactgtgtcaaatagtatttttccattttcatcttttgggatcacttcctcacctggctttacagacactggaaaatgaataaggtagaggtcaacataatccaattgaagatttttcagtgacctttccaaggctggtcggaccaactctggtcgatgggaattgcaccaaagctttgaagtgtagaatatgtcttctctcttcacactgccatctgcaatcttgcttcggatggccagtccaacctgctcctcattattgtataaatgagcagaatcaatatggcggaagccagcttcaattgccaatttggtggcctctaaagctttacttttaggaacctctgcaggcgcataggtgccaaatcccaggacaggcatgaagtgaccatcattcagcttcacacactgatatttcgaatccatttctgtcacatcccggaaattccggaccggtcca

SEQ ID NO: 431301 - DNA, 786 bp, Homo Sapiens
gcaaaaggggaacttgggttcccttcccaaaggagccacccggggggaggtttcggggtcccaccccattggtttcttctcgagatggggatccccagaagcacctataggcaacccaagaaccaatgtctttttgacttgcagaaatccagccagttttttctggttgaagtaaggatgacattccacctggttgcagacaggcttgtacttgagcccctggcttgttgaggatcatctccagcagcctgtggttgaagttggacaccccgatggacttggccaatcctgcatctttacacttctccatggcctcccatgtggcacagagatccactgtgtcaaaatagtatttttccattttcatcttttgggatcacttcctcacctggctttacagacactggaaaatgaataagatagaggtcaacatagtccaattgaagatttttcagtgacctttccaaggctggtcggaccaactctggtcgatgggaattgctccaaagctttgaagtgtagaatatgtcttctctcttcacactgccatctgcaatcttgcttcggatggccagtccaacctgctcctcattattgtaaacatgtgcagaatcaatatggtggaacccggcttctattgccaatttgacggcctctagagctttacttttaggaacctctgcaggcgcataggtgccaaatcccaggacaggcatgaagtgaccatcattcagcttcacacactggtatttcgaatccatttctgtcactggcctggttagcccc

SEQ ID NO: 431302 - DNA, 1249 bp, Homo Sapiens
  misc_feature (22)..(22): n is a, c, g, or t
  misc_feature (32)..(32): n is a, c, g, or t
  misc_feature (91)..(91): n is a, c, g, or t
  misc_feature (119)..(119): n is a, c, g, or t
aactggttgccaaggaaatccnagcccaaaancaagccaaacgggttaggttcggcaggaagggaaggactccaagttttcccccaaaaantggcttgaagcacctatcacgagcaccnccccagccttgccctgcctccgggctcaccagcccctctcccccgcacattccagatgcaattgtgcgcagggcaaaagtctcgcctaagactcactggggacaggaggaggggaaaaggggtcttccctttccagcttcaaattctgtcttctggtcagggggcaggagtgggcagggaagaggcaagagggctttaaaaagtattttgtttttaaatgggagctttcaaactctgcctttttcaggcttctctcatctaccccagagccccaggagggttcaaaagggctcaaagggaagatgaaagcgtgtgacatctgcagtgtctctgtgtctctgcagctgagagcaaatcagaacatttacagaggccgttatcagaggagtggcttctgcctgctaggagaggccttgggatggctctttaaaacagtcccctaagttggtggtaaaagaacaaaaatattttacagaccctccaatgccaaagttccatactgcagtgttccaaaattgcagacctccaagcaggcattttgcccctcagataacttgtccctgctgaactattcggaagaaaaaacaatttgcaagtgctagagccacatttgcagcctggtagaagggggatttctgattccttataattctgtgttgcctctgtaagggagagcttgggtgagccagagaagccagtggaggaggctgcagagagcagctagctctgaggttaaaaaaacccctcactttcttttgttttgcaagtccttacaggtctgtccacagcaactctggggcaccttttcacggctggctttgttaatgactttcatgtcagatcgcttttgaagactggctatgcctcagtctctgctgcactcttagccagaagcagctgggtattgagggccaggggctgcagcggccccttcagtctgctcacacgccctgatgggcttgggaagggccacctcccaggatgagaaggcagctggcccccagggacccaccagtcactggacagtctcttattcattctctgaaaacccctgagctcaggcaccagaacagagtttaattcaggagccgggcaatgctctggccatccggagaattccggaccggtcc

SEQ ID NO: 431303 - DNA, 488 bp, Homo Sapiens
ttttttttcgttccagctaaattttatttgtcggatttttgacagacgtctaaattatacattgagttttccacatgaccaaacaccacatctcttcctttgattatcattttcaaaagggattataaaaaaagaaccttttgatggatcagactgaaccctgaaaccacatggagtgcagagctaaaaataaaaggaagtaagaactggtccccgagaaggaaaggaaagggaaatcaaagcaaactctgacgggaatggagagacgagtcctggtgagggtgacatggtgtcaccctccaggccaggccggataaggagcggccaacagtgagggtggggcgcagagtggcacaaaattagccactactttagtccagagggggaaataaagaaatttgtcaaaagcaaggagagagaagtggagactgatggagggaggaaggaagggggcatgaccatgtcctcccagcagccgtgggagctgc

SEQ ID NO: 431304 - DNA, 1008 bp, Homo Sapiens
ttcagccagaacttccttgggtgaggaggtccatttgccttgagaattttccgggaagggaatcatggtcatcaggggggttcactcgccaccggaaacaggtggggcgcagttttttcacacctttcatacaggacctgcaggggcttctggtcggggcggggcctcgcttggcctgcggtacatgctcagcatctcctgcagcaccttcacatggcttcgcacttcctccacggcactgaccctcttggacactttctccgatttttcttgttcctccttgaccaaattcttgattaaccggtttgcagcctgaaggtcctcggggtggttgctctttagaagccttgtcagaagcttggacttttcttcatcagcatcaaagatggagctcttgggccagggagatggtgggggtaagattttatccactggtagtttagggtcttgttttataattccttgtttcttcagcatctgataagcgtctcgaatcttgatgtcttccggaaaccagactgtccaactgaagagtatttcaatgactcttcctttaacttttcctgtggcccaggaccccaggtactttggggacaacactttgatcagttcgttcaggaaacgaaatttggccacctcgctgtggaacttctccccacagtggttcatgcacatctccagcaccgttaaggcataaagagcttccttctcttgcggagactggatcttgtgggccagtagccagggcgcatgtgtggggccattggggtcagtgttcacctgctcacagaaattctggatagctgaccaatcctgttccgacatgcttgggtctgtggctttgttgagccacagctccagcgacgctgccgggcccgggggaccctgggccgactcggttcccgccacagccgccgccaccgcggtcgccgccatcgctccagccccgacgctgcggccgcgggcgccctcgtgccgaattcgccacccaggcctcgctacctagga

SEQ ID NO: 431305 - DNA, 366 bp, Homo Sapiens
  misc_feature (340)..(340): n is a, c, g, or t
  misc_feature (350)..(350): n is a, c, g, or t
tctccaagtgaaaaggatctgtgtgggaaagcaaagcgcctctcggctctctatagcacaaggacaggaaaggttaggctacaaaggcaagccaaactcaccgttaaggcataaagagcttccttctcttgcggagactggatcttgtgggccagtagccagggcgcatgtgtggggcttacccattggggtcagtgttcacctgttcacagaaattctggatagctgaccaatcctgttccgacatgcttgggtctgtggctttgttgagccacagctccagcgacgctgccgggcccgggggaccctgggccgactcggttcccgccacagccgcccnacccggtcgncgccatcgctccagcc

SEQ ID NO: 431306 - DNA, 4116 bp, Homo Sapiens
  misc_feature (48)..(60): n is a, c, g, or t
gaagagaaaatctctaataatttattgaccttcagtttcacattgtgnnnnnnnnnnnnntaacagttttacaaaacctcaaaatgtagtcatagcaaacaagtacatatgaacatgaacattttccttcaacttatacagagttttgtacgtgaaccacatggtcaatagccaagagagggacattatgcagctctaatcactcttattcaagacaggtgtcaagcccaaagaaaaggggctacacaattataccagaagtggagggctgccctttgttatgtgtttctacagcaaccagcccacaaaataagaagaaccttctctgtcttatgccaaggtttttgtgtgtactgtgctgtgaattgtatttgcttcaaagtgtgggacgtttcacagggtgagaatggtcaagtagtgagaccaaatgcctatatcgattcaaagagtgggagtccagaaagttccctacaggctgggggcccaacccttaccacagctccctctggctcacacacagtaattaatagaggattcaagaacagaccccaactttgaaacagctgcagaaaattcatcctgctttcagaagccatgcagtgacacatacatctctcttggcagatttgcatcataaactacagagctgtaactgctacaatataaacgacactgactatgcccactgggggacaattagacatttgcattgcttagaacacatctaggaaccagggactgactgctggaaagtactgtgattcttttcttccaacagctcatttatttaggcccaactacagcccactcattcatggcatggacggacaaacacaattagtctaaagtactaaggtggagagaaatgttaaggatttatctgtcattagacaatgcaaacacagtcacaatgtaaaaggttgttatcagtcttaacccctattttctaaaatacagcaatgtgagaaacatggacgaaagcagttcgagttgcaaactttggtcttcccctgcacctcaggggaagcacctatttgagactagcactaatacctacgacggcacatgcttagtaaacaagcactccaactagcaaagaatgtattcacaactgatttccaactctaccggaaaacttctcaataggggccactgcctacaattctttggtgttttgtggccaaatgtgttacttgtgcaccaaagagttttttaaaaagagatttgcctacgggtgagcactgaagtatacattgtgccaatgtaattattgtcttggagaccttctagaacttgctaaatcatatagcaagaagagaatgagttcaggcccagtaaatctggtgagttaatttacatctgtgatactgccgtttttcccattaaatgtggttatggcaaagcattcttagggtaataaataaataaataaactttggacaatgcctttacttgtgccctatatacagaactattccatagaattttccaggatttcaagatactacacaaagaaaaaaactgtaaagcaatttggtcctttccaaatttcagcagctgagactgaattaagtaaatcagatgggagtggggagaagggcagaaagcagcctccccttaccctatcagcacaaccaaaccccatgaaatcccattaaaagttggtgagtctgagaaaagcgatctccacggtttctctacctctaggatgtcatttaaatttccattttgtcatccttccctgtcttgacattttaaaaatccacccctccccaacccaccctccagttatgctccaaattgtaactcaaaaattttcatgtttgtgcagcaaagcacatctcaacagccacaaaatgtgcaaaacgtacaaccattcacacacgtccatacatgtgaagacagctgtaggcattgtttcagcatgcaggcatcgaacaataaatagctaaatctataacaaacttcttaacagccaagggaaagtttaaagtcacttataaatagaaaagaacatctaccaaatggctaccaacaaagtccccattgttcagaaacgttcctggggagcagaccccttagagattaacggagagtccagtggtcttcattcttcagccagcccagccagcttccctctcggacccacagttgggctttgaatctccagcagcagctggtgtggaggcttcaagctctgtcctcagagagaggtgacaaccatttcaaattctacacataaatggtggggcccatggaaatcaaatgctgaatatggtacagcaagggaaaaggtccagcttttctctccctttgaggggctgattaacattgacattaatccacaattacaagacaaggactagatcacaggtttgttcattcatatttaaaccatgtgctacttgcaccaaaaatcccaccccctccctcgcccctttccttcatgtccagttagagcatttacaaggtgcagcagattttattcgagtcttgcaacttcttttcctttttttctcttcattagacttggcctctccgaagtagaaatctcatattatctcatcgagtgatggagtgagctcatgctcactctctttagaatgtactgcatttaagaaggcagatgtttccaggtgctgacaaatgcagtaggaatcagcgagtacgggacagtggtgatgctgttccacacgtctaatgttggatcgtagcagtccaaagtcttgcatcgctgaatgccaaagtatcctccaaccacgtagagtttgtttccagaggccacagcatggcagctcatgcgctttgctgtcacatctcccactttggtccactggtaagtctcactgttgaatttataagcagagcaggcagagaattctgtatcaccccccataataaaaatctggttccccagcacagctgctgctgtgtaacgccagggctggggacaggtggccggtacagtccacctgttttcacactgatcgtaacactgaactttggggagcttgtcatgactgacactggtacctccgaaagcaaataacttaagtttggcactcactactgcggcgttgctaacgccttctcggagtggggccaccatggtccatttgttgattgtggggtcataatgttctacctgctttagagagactgagggggagtgccgggaggcagccagttgcggccgtgtgccccccaatcacatatcaggcagtgcttcagttcaggcagagccatgggcctaaacctggccaccagctatgggggcagccttggaccactcctcgtgcagggtatcataaacccagacatcttttgagaccccattttcagacccccgccccccagtaatgtacactttgcagccaatcgcacatgcactaaactcttttcttgggctgggaatgtcagccttgggaatgatttctttggccttctggtctaccagatacaacttgtcacacatgaaagtctgtcctcccagaaggaagagggcatggccagttttccgaggtcgggcacagaggctggttaccacaccgtcattctgcaggattttcagtttgcacctgatggcctcttccacaatttccttactctttctctgcttggtgatgagttcctccatggccacattctccatgagatagatggctggcagaagtgccagccttactgtctgcaacagttctgggaggtagcaatagcgcttcttcaggtcatagctgatccagttaattgcagactcgtacacaagcctttcatcctctgtctccagctcttcactggacaagagttgcactaccatgtcctggggcagctggaggaaatcttcattcttcctgatggtttggaagttgctgagacacattctccaagatagttcgtacagcttggtgcactggtgtgcatcagacagcagcagcatgcccaggcagttggtgggatgcaggttcttttccaggaactctgcacatgcatcccggatgtcttgaaactccagcatgtcaccagcttccaggagcgattctgcattttcttcattgatgatgacccgggaggagtacgcatagtcaagcagcagctccaagacttctgggtggatcc

SEQ ID NO: 431307 - DNA, 342 bp, Homo Sapiens
gacgacttctaaacttgctaaatcatatgcagaagagaatgagttcaggcccagtaaatctggtgagttaatttacatctgtgatactgccgtttttcccattaaatgtggttatggcaaagcattcttagggtaataaataaataaataaactttggacaatgcctttacttgtgccctatatacagaactattccatagaattttccaggatttcaagatactacacaaagaaaaaaactgtaaagcaatttggtcctttccaaatttcagcagctgagactgaattaagtaaatcagatgggagtggggagaagggcagaaagcagcctccccttaccc

SEQ ID NO: 431308 - DNA, 499 bp, Homo Sapiens
  misc_feature (95)..(95): n is a, c, g, or t
  misc_feature (120)..(120): n is a, c, g, or t
tggtgttttgtggcccaaaggtggttaacttgtgccacccaaagagttttttttaaaaaagagattttgccctacgggtgaagccactggaagtnataacattgtgcccaatgtaaattnattgtccttggagaccttcctagaacttggctaaatcatatagcaagaagagaatgagttcaggcccagtaaatctggtgagttaatttacatctgtgatactgccgtttttcccattaaatgtggttatggcaaagcattcttagggtaataaataaataaataaactttggacaatgcctttacttgtgccctatatacagaactattccatagaattttccaggatttcaagatactacacaaagaaaaaaactgtaaagcaatttggtcctttccaaatttcagcagctgagactgaattaagtaaatcagatgggagtggggagaagggcagaaagcagcctccccttaccctcgtccaacctatatggtagcc

SEQ ID NO: 431309 - DNA, 944 bp, Homo Sapiens
  misc_feature (69)..(98): n is a, c, g, or t
  misc_feature (718)..(727): n is a, c, g, or t
ttaacaaggcctttactttagaacctttaagcaagcaatgtcatttttgaaactaacaggtttgtgtgnnnnnnnnnnnnnnnnnnnnnnnnnnnnnnattataaaaggtacacttctgtttatatttaaacaacaaagaaaaaagcatctacacacttaaaaaattaattcaatattcctaaatctattttaactcattttaaaatactacatacagaagccagaatgcagagttaagaatggaataaggtggggagaagaaggggaccacgaagaaaaacacttagacaattacttgtctgttgtgggtaaagcaacaggaatcctgggagatacaagaaatcagtaacaactttgctcataactgatattttcccctcatgtttgtttttaataacgtccatatgggtgctctctgtatgctcccttcactggcctagcaggaggggccttcagcgacggcctggtcccattccagtcgtcctggccataagcttcataagaatcttgaacctccccatgtccatagtcataatattctgagtccccttgactctggctgtaatagccttcgtagccttcgtaactttgttctgcgtatgtatcatcatatccatattcttcatatgtttctggtgcaggaggtggaggccaaggtatcctctggatgccccgctgtccgtgctcttggtgctggagcacccctcacagtaggtnnnnnnnnnncacgcctctgagtacacaggggcacctttgggagatggctccccttactggtggtaccacgtgacaaaggcccccggagggggtccaccaccactgggccctgggaacagggtggtggagggaggggcaatttcccgggttttttacttggccccccacgttctcagaaaggggttcagggttcttcttttcaagttgagacagcctctagaaattg

SEQ ID NO: 431310 - DNA, 1000 bp, Homo Sapiens
cacttgaccaaacctttattgaggtcctcaggggcagatatttgttggggagaaatatagtacagaggtggaacagaaaaagccctaccctttatgacctttttggacaaggtaagtaataaacaatgaagagaaaaacaggttcagatgttaaataacttgcccaaattaattgaatcttctcacttggctttcctcagccttttatggaagggcagtgatcaccctcccttgggagccctctggaagggttcaaggactcacaggctgacacccataacacaggtgtggtagtggggaaacagaaaacggtggtagggtgtttcagccaattctatgggaggctaaagggaagcacacatactgggaatggcacagtaggagttgccagttaattcccatctaggaggccatgctagggatacccattagtccccttcaactctttaaagtcttgaacagtttaattgttagcaccacagtcccctgcagccctgaggactccattctgggcctaaagactcttaagggatcctgactggctttctgtgggtaaatctgacagatcaagtagagtgaaagaaaactgctgatctcctctcctgggtttctctgtgttcagcaaatgccctcaggccagcctttatacagcaggtagctctccaggtttcaggagtcctctgatagctgacatgggtcttcactacccattctagtccaggaaatgccttaggagttttcagtcacttgtctgttgtgggtaaagcaacaggaatcctgggagatacaagtaatcagtaacaactttgctcataactgatcttttcccctcatgtttgtttttaacaacgtccatatgggtgctttctgatggctcccttcactggcctaacaggaggtgctttcgggacggcttggtcccattccaatggtcctgggcttaagcttataagaaccctggacccccccctgtcctaagcctaatatttttgaggtccct

SEQ ID NO: 431311 - DNA, 977 bp, Homo Sapiens
  misc_feature (80)..(90): n is a, c, g, or t
  misc_feature (427)..(456): n is a, c, g, or t
tatctctacattatgtctggtgctagatttcaaaacccacgttaatgaaaaagtcagtttacaagccgtaattttgttgnnnnnnnnnnnatatcaattaacgttaaaaattgcatcaactatttaattcatgaggatctttcatattaaaatttaaccttaagattcaaccgccagtgtgcttttataaaggaaactttttttcgagacgtctgagctcacttttacatggtggtgcctactgccgttgatgtttgtgattttaaatcttaaacagccctgaattttgaaatgtagcctagtttgggattctgcaactacaactttacgggatgcctcaaatcaaaactaagagaaacttaacaagcctttacttcagaacctttaagcaagcaatgtcatttttgaaactaacaggtttgtgtgnnnnnnnnnnnnnnnnnnnnnnnnnnnnnnattataaaaggtacacttctgtttatatttaaacaacaaagaaaaaagcatctacacacttaaaaaattaattcaatattcctaaatctattttaactcattttaaaatactacatacagaagccagaatgcagagttaagaatggaataaggtggggagaagaaggggaccacgaagaaaaacacttagacaattacttgtctgttgtgggtaaagcaacaggaatcctgggagatacaagaaatcagtaacaactttgctcataactgatattttcccctcatgtttgtttttaataacgtccatatgggtgctctctgtatgctcccttcactggcgacggcctggtcccattccagtcgtcctggccataagcttcataagaatcttgaacctccccatgtccatagtcataatattctgagtccccttgactctggctgtaatagccttcgtagccttcgtaactttgttctgcgtatgtatcatcatattcatattcttcatatgtttctggtgc

SEQ ID NO: 431312 - DNA, 2748 bp, Homo Sapiens
  misc_feature (935)..(964): n is a, c, g, or t
tttttttgattaaaaaaggactaaactttattgacaaactgctgcagacattttgacataagtttaagctacctatttaggcagacttacacatgtagcatttaatcttccgagaacaaaatgggaggacggtacaaatccaattaggactttaacttatgtacaaagtggattttgattcctttttcattcagctgcagtgtccctttttatatcatgctagtgttgagacatacttgactaacttgggaacagttcgatatattgacaaccgtcaacttaagaaaatcaacagcttttggccccagcgtccaagtgaacttttcatggagtgcagaatctcaaatggacaaaatactttgtctttttaaatactgaaaatttaattattagtactatgactgaaagattcttcatggctaaaaagctctgcatcaaactcaattcaggaggccttccctccccaccaccatcaacctcttcaaaacctactccctccctctaagtatctctcaacacagtatgtctggggctagatttcaaaacccacgtaatgaaaaagtcagttttacaagcctaattttgttggttttttttttatatcaattaacgttaaaaattgcatcaactatttaattcatgaggatctttcatattaaaatttaaccttaagattcaaccgccatgtgcttttataaaggaaacattttttagagacgtctgagctcacttttacatggtggtgcctactgccgttaatgtttgtgattttaaatcttaaacagccctgaattttgaaatgtagcctagtttgggattctgcaactacaactttacgggatgcctcaaatcaaaactaagagaaacttaacaagcctttacttcagaacctttaagcaagcaatgtcatttttgaaactaacaggtttgtgtgnnnnnnnnnnnnnnnnnnnnnnnnnnnnnnattataaaaggtacacttctgtttatatttaaacaacaaagaaaaaagcatctacacacttaaaaaattaattcaatattcctaaatctattttaactcattttaaaatactacatacagaagccagaatgcagagttaagaatggaataaggtggggagaagaaggggaccacgaagaaaaacacttagacaattacttgtctgttgtgggtaaagcaacaggaatcctgggagatacaagaaatcagtaacaactttgctcataactgatattttcccctcatgtttgtttttaataacgtccatatgggtgctctctgtatgctcccttcactggcctagcagggggggccttcagcgacggcctggtcccattccagtcgtcctggccataagcttcataagaatcttgaacctccccatgtccatagtcataatattctgagtccccttgactctggctgtaatagccttcgtagccttcgtaactttgttctgcgtatgtatcatcatatccatattcttcatatgtttctggtgcaggaggtggaggcaaaggtatcctctggatgcccgctgtccgtgctcttggtgctggagcacccctcacagtaggtgggggtggcacgcctcgagtcacagtggcacctctggtgatggctccccttactggtgtaccacgtaccaaagccccccgaggtggtccaacaccacggcccctgggaacaggtggtggaggaggtgcagctccccggcctctcactggcaccccacgtccacgagagggttcaggtactccattcaagtaggacagctctagaaattgctcctgacagatatcatccatcatatccggtactagaaatttcttgacttcctccatggcatgggccataagagcataagcctcacatgggggtccaaagacttcaatgaagacatgcagatccatattcaagtgggcatatttggggtctccacctttgcgcagctcttcctccttggctttgtctctcattgagccctttcccaatacagagatctttgcaccagtctcttcctgcagtcttttgattgtattcccttgtggtccaagaatcttccccacaaaattgaacttgggatactgcttgacaggtatcagcactcgctctttcagtttcatgttcttatgagaaaataaatccaagtaattctcctcatcatccttttttgagtctcctttctgaatcttctcaatttctgccgtcagcagctgcatggcgtgagtgaaggacgggtcgagcgagtccttctcggccatgagttcgggcaggtacttgttctctggctccatcttgaccgaggctgtggccgaggggggcagcagcggggtcggcgctggcccgcccactgtcgcgtcgggacccgtggccgagggcggcagcagcggtggcggctgcgtggcgggcgaggcccgggcgcccccgcgggatccccctccgcctccccgggaccggtgaggcagcggcggctgccgagacggcgtctgacgcaccgaggggtgggcaccggaggggtccatggagccgctacggcccgaagaccggctcatgcgcgcggcggggtcgtcccggcgctgcatctgggaggatgtgcgatccaaggagcgagaaagcgacgcggcagcgacggaggcccgagcggcggttggcgggggtggcagagcgggagcggtagcgaccgaagccgacccgagcgacccagcgagagagagcaccggaaatgaggcggcgcgcccgct

SEQ ID NO: 431313 - DNA, 1182 bp, Homo Sapiens
  misc_feature (19)..(19): n is a, c, g, or t
  misc_feature (160)..(160): n is a, c, g, or t
caccacagtcccctgcagnccctgagggactccattctgggcctaaagactcttaagggatccctggactgggctttctgtgggtaaatctgacagatccaagtagagtgaaagaaaactgctgatctcctctcctgggtttctctgtgttcagcaaatncctcaggccagcctttatacagcaggtagctctccaggtttcaggagtcctctgatagctgacatgggtcttcactacccattctagtccaggaaatgcctcaggagttttcagtcacttgtctgttgtgggtaaagcaacagggattcctgggagatccaagaaaatcagtaacaactttgctccataaactgatattttcgccctcatgtttgtttttaataacgtccatatgggtgctctctgtatgctcccttcactggcctagcaggaggggccttcagcgacggcctggtcccattccagtcgtcctggcctgtgggggaaaacaaagacagtttataaaccatgtggcgacagcacttagggataagcagggataggtcacatagtaaagatcaccaaaaacactgagtttcttctaatgtcttgacacttcccctggtgttccttgctctatacttggcttggccctcttgggcagcctgggcaatttttcagttttgagtggaaggacagaagggaacaaatctaaaaaggctgccattgactctggagtaatctcccacaacgaggttcttcatagacaaatgtgatctgtacgccagtccccaaacctggagatacccaacaccttgcttgagatagtgaggaactcattaatcttagtgagtctgcaatggcctttcctgttcccaaaacaatttggcaggcaccctcaggtaaggtgggaagacttctggaagtctttcagattggaagcaggcagccagccccacttccatgcaacagcaagtcacgtttccttacggagaagtgtcctctagctccctgggaaaaccaagcaagggccactttccatggggccctccaccagcagagctgatactgctctctctggtagagggatgtgcaatcaaatgttgcactgacagcactgtttaagataattccaaggctgcatgcggtggctcacgcccgtaatcccagcactttggatcccgggaattccggaccggtcc

SEQ ID NO: 431314 - DNA, 182 bp, Homo Sapiens
acgagccggtaccgtatctctaacattacggcagtaggcacacatgtaaaagtgagctcagacgtctctaaaaaatgtttcctttataaaagcacatggcggttgaatcttaaggttaaattttaatatgaaagatcctcatgaattaaatagttgatgcaatttttaacgttaattgatat

SEQ ID NO: 431315 - DNA, 2165 bp, Homo Sapiens
  misc_feature (6)..(6): n is a, c, g, or t
  misc_feature (51)..(61): n is a, c, g, or t
  misc_feature (2001)..(2053): n is a, c, g, or t
ccacanggagaatgaaaataagtggcatttagttattagagagatacttgnnnnnnnnnnngtggaagtattttcctgcttagaatgatttctgttcccctttgaatgtaagtggtttaagaggcattaagaacataatttattttatacttaatgttcacactacctaaatgaataaggaaagggccctacaaggaagagttatgtattttttggtaattgtttctgagtttagagattcaggggaagagtaatcctctatttgtgggctcttcttagcatccctaacccccaaggagatagtacatggttttgacttggttatttcactccctgcattctttttcccccaaattttaagttgggtcacattgtgctggctgcaaaaagaaatacagggtgcaactggttataatcattttgaagaataatttgctgtacaatagagctttggatctgatacaagaatttagaaatataaaacaaaataactataaaagttaggaggcatttgaatggcatttccttagaaaaacctgctaactctgtatcattctgatgtggattcctagtcatgtggggtgaaatgcatatttttccccctttgctggatcactggcctttcttcaaaagctataatgccatgaacacacatcctaggagtctctataatgttaacagaagctccaaataccaagccaatcaaagatgggagagggcaggggaaccataaaggcgaagggtccaaaggtggctgttactgagaacttgccctttccaaaatgtgaaagtcatagtgcttcttgcttgttctcagcttaaacttgttaactgagttaatttgtttcttcagtgcattctgtgcagctgaaatggaggggaatgtggctaagacggtgtaggtggaggccaagtcactgggtttagagcgttcagggttggcagtgttgtccccactgccacagcagagggggtgaggacgtggttgggcctgggggtcccggagccaccgggtcttggcgccaattttaaagagttccccaaaaagcttttcagcttccatgcgagttattccatctggtagttcagtaatttccaagaccttcgctacaactgtttctcctgctccaaggtctgtggatgcagcttttttagcttgtctccttcctcggtttccatgcctgctgccaggctgaccctgttggtttggaatgtgtccgtgcagaacagcaggaggattgtactgcagtggctggccaagtaatggatacctggaatctccttgcccggggtacaaaaggtctagaaaattgggggcatgatggaaagtggtggtccagagggacgtacagttttcagggtggacagctgagctggtgctgggcgactgagctggtgaaataatggggctactgagttgaggctgtgctggacaatattgtctacactgctaaattctacacacttctgtcctctctggtgatcacagtaatatttgttttgtttccaactgcgggggtgagtgggcacaagattgtggattgtttggtacactgagctgcatcatcaccatccccccaccaggtggcggtggtggtccagctgtacattggtggccttgaagctgctgggaactgcatggtgaagtggttcgaggaaattgtacttgttctgatcctggatgttgcaggtaacctactgaagagcttaaattgttttgttgaccaggtggaatgacactatagtaaacaggcattcctgttgtgggcatagatccttgattagactgattagggaacataacaggctgttgataagtctgatggggaattccttgagaaccttgaggcagtgaaacctgatatgttggcactgaagtataggggatgaccactccttgaatctgatttccaatgctgttgggttggccactgactaggctctgactctggggttgctgaactccaactattccttggtagttttgctgctggttggggnnnnnnnnnnnnnnnnnnnnnnnnnnnnnnnnnnnnnnnnnnnnnnnnnnnnngctggggagcaatttggcaggtagtctctgaggaatggctattacccgtgatgtcccatcaacatctttgcctgaattggtccaggtttacgtgatttccatccatcacaat

SEQ ID NO: 431316 - DNA, 481 bp, Homo Sapiens
  misc_feature (474)..(474): n is a, c, g, or t
  misc_feature (476)..(476): n is a, c, g, or t
ttcatttagaatttcatggagtgtattttcatccatttggacattgatactctctaatacacgctgaacatcaacaatggtaataaagcctttctggtctgcatcaaacttatgaaatctcttcttatacctgtcaatgtctgaaggcagtaggctaatttcagagcgatctgttaactgttctgatcgagatttatagcccatttcataatatagaagcttcctggctgtttcaagttgttcctgcttcttataatcatcccaattcagttccctgcccatcagttcaacaatcctgggtagggcttcctctgctgcctggacatttagaaaggccaggcgagtacgacgtgaaatcatatccacagcagtgcaggcatactccttaatcccatatttcacctctgcttcaatatatggaaattctgacacaagacgtactccaacaataggcccacccttttgccggtcagngnttgcc

SEQ ID NO: 431317 - DNA, 1236 bp, Homo Sapiens
agcccattccagctaaaaaccggttcctttaaccccaccaataggcgatttgactctgtattttatttcaatgagcacacttcgttcattgtctgcaggaaaactaggctaggtctcaatagacaacagtcacagttactgagcaagtaaatactccacacttgcatgccctcctttatttcttgatgtcttcagtctcatctggctctctctcttgatgctctctttcccacctcatttcttttaactcttgtctgtacttccgttcgatgaaccgcttctgatgggccatctggggaaaattatatttttcaagcgcatccattgctgctcccatttccgcttgctgaatacttggtcctttcccacagcctattctttctcccttgaaataaacagccacagtgtaggttcgggcatgggatgggcccactgtctgcagagtcttgtacagaggaatgtctggctcttttccttctgtcctaagtgtcaagcaacactgctgaagctgggatttggggtcattccaatcctgattcaaaatgaactctttcaatcgtggaaagaagcagacattcatgaaagtatgaacatattccaaatccttatcaatgtacagcgctgcaataaatgattccaaaaggtccgccaaggtcttggtgcgaagcgccacaggcctcttggtcttgtcgttggttatggcgtactcctgcatgcccagctcctccgctaccttggcctgagttctattattcaccaaagagcttcgcaacaaagttaagtgtccttcatgatgatctgggaaatgaatgaataagtactctgtggctaccagttgcattatggagtcacctaggaattccattctctgattgtggcctagggtcagatggttaaatcccacagttctcaatgtgaatgcccttgccagaagtcgaacatgagtaaaaattactccaattgcttcttcaaactcagtaagtttttgtagaactggagaagtttcaataagttgtcgatcagtatttggctcttgtagttggagtgggtggagaggataattgagccagacttcgcgcaggtccggatcattaaagagcaagcgtccaaataactgcttggcttcctccaggcttccctccaagtaaacagctcctattaacgcttcaaaacaattggccattgcatgtcgaaggtccgattctctacaaggtcaggcccgtgagcatacagcat

SEQ ID NO: 431318 - DNA, 1908 bp, Homo Sapiens
  misc_feature (216)..(225): n is a, c, g, or t
  misc_feature (464)..(531): n is a, c, g, or t
ccctgtgttaaaaattttgtttcgggtacaaagtgctactgtgtagcgcatacgatgttttcttagcgcggcccgccagaattatccgggtgtgtttgtgatcaccgcgacattataacacgccgcgaatgttgttagttttatccttctcctcttggtgggtgcgtttctgattctccttggtggggcgggggttttttccccatatttgttgtnnnnnnnnnngtgtagggggtgttctctgatcccaatgatttcctccctggcgcgcgtgtttgtctcccgcgcgcgcccgctgtgttttatacccgcgccgcgctcgctcgtcgctctcgctctttttatataaagcccctcccattggggcgccccccttgttcaaaaaaaggcggggtgcgcggctctagctttgtgggcccccccgcggggatagtatttgtggggcgcgcgcgcccctcctctcnnnnnnnnnnnnnnnnnnnnnnnnnnnnnnnnnnnnnnnnnnnnnnnnnnnnnnnnnnnnnnnnnnnngaacagaaaaggaaaaagtttattgaaaactatatacagttggtccagctcctaccatgggctgcaatctcagccagtccctcccacaccttaggcagtgtcttggcccctcatggggagggatggggctaggcctagggcccagactcccttgggtggcttggcagctggagcccaccgtggatctttgtaaatttacaactctaaatggcctgaaggtagtgggcaggggacagggaatggatccctgcctgatctagtcacagccttgataggggaacactattctgaaacttgggcccaagtagggcccagctaagttgtccggaagtcctgactgctcctctcacaggccttcctagacgtggaggcaaacagcctccctacgaccccaccccatgtagcaggccgcatgggcttcatgggcttgactggggacaccaggtacccttcctcccaacattgactcagggtccggagctcctggagaactccccaagcagaaggacttggggttgaggggtgagctttggggaggttcacagctcccagcccaggactggagccctcctggggtcagggcagccgtggggtcagggtgtcccgctgtaggaatagtctgctttattgtgcatcaccagccggtcatccacgaagtagaagctgtcagactgggtctcatacgggtggcggatcatctcgctgatcagctcctcggagagaggggggaagtcgtaaatgtgctcgcaggtgttcttgctgctggggatgcagaagccaaagtggaagtcgaagcttttgagtagctggttgcggaagtagtgcctctcgatcatgcggaagttgttgacaggcttgtctcccactgtgaactccaccgtggctcccacctgcctcaggcggaggaaggcaggcgtgaactggtagcggacaaagcgcccagcattggggtccaggtcccgccggttgatgggcaaccgttctgagactgggggcttcttgatttcaaagaggacagtgcctgagtccatgtcccgaatcttaaacctgacaaagtcgatcttgtagatattctcctcaggggagcagaggtagtcaccggtgatccgctgcagccccagcacgtcctccggcccgatcggctgcttcctctgcagcggccccggcctgggccctgggcctgcgtccggctccgactcggacccagattcggattccgcaggcggctgtggtatgggggccacgctctggcccgagggccccggagcggactccgtcgccgtcccggccccaccgccgcccttcttcaccttcatggccttgcggggccgaggctcgcctgctgctgccgccgctgcctgcgccggctagaccgct

SEQ ID NO: 431319 - DNA, 1517 bp, Homo Sapiens
tacagatctggttcttggctttgctccttgactcagttgacctcctacccctcacagcagggtaaagacttgcacatcactgacaggcggctcggagtcagccttggagtcggccttccatgcccagccctgaggccaccatgccacgttccagttggctcaagcagtgaggggcaaaaccagctccaggggcaggtggaagggctgcttctctcctgcctccatcaaatgctgaccttgcctctgaatgaccaagcaaaacaaaggaataaatgaatgaataaaaattttgacctgttaattccttaagaccttgatacgtattcgtgggtaagcaattttatactattttataaaactgttttcagctgttttagtcagggtcgggtgccaggcacctagacaccccccctccccattcccaggaaggttttggccaaacctgcatccaccaccttggcatgccaacgcattcgaggccctggcaggccccgactcaacagaaccgtctcgccctctacagccaccacagccacgtgggccaatacccagcacgtgccccactgccccaagcctctctgccggcgtggctctcccccaacctcactctcaatacaaaagggacagcaccgaaagaacaagggaggccggaatggtggcattattcaatcaaatatacagagtgcttcctttaatatgtacacatttacaaaaatgcactttcacgaggaggggcggccggggccggcaggtgggcagcgcctggtgccacggcacgcgtggacagttgcgaggggtctgtgtgaaggcacttgtcacgagcttcaatactgccgccgtcccaggatgggagaactgcgcagcaggaagggcacttctgaaagcacagtggagagatcgctggagcgggcgttctgggcaggaggaagcacagacggcaggcagggtggactggccagcaagcgcgaggttgacctgccggccttgggccacgccgatgacctcaggccccactaacaaccacaggtgcgtcaacagccacgggccgtgccggcagccagggccacatcaataaccagggtcccaccgaccaccgtaggtcccaccgacagccacaggtcccattgacagccacgagtcccaccgacagccacaggccacaccatcagccacgggtcccaccaacagccatgggccacaccaacacagccatgggtctcaccggcactttggcctggagccacagagaaacccgagtgaggaataaaaggaagattctgtaaacagtgcacaacctctggtaacaaacgctacgatttggtgacgacgcagacaccctttgctctctcctttcatacagcgagtgccacgcccggaaactttacaaaaatagcaactattccgagaatactccatttgttttcagcctgccagtttcctgattaatttatacaaggttaaagaaacgttgaaaatcaacacttgggcttctcgcttttgggggcttttctttatcc

SEQ ID NO: 431320 - DNA, 941 bp, Homo Sapiens
  misc_feature (663)..(663): n is a, c, g, or t
agctactgcttctggctgtaccgaggtcaggtggagacggttgttacgggcggctcttccacaggtctgctggtgcctgtgctgtgtggtgccttcagcgtgctgtggctggcgtgcgtggtcctgtgcgtgtggtggacacgcaagcgcaggaaagagcgggagaggagccggctgccgcgggaggagagcgccaacaaccagtgggccccgctcaaccccatccgcaaccccattgagcggccggggggccacaaggacgtgctctaccagtgcaagaacttcacgccgccgccgcgcagggcggacgaggcgctgcccgggccggccggccacgcggccgtcagggaggatgaggaggacgaggatctgggccgcggtgaggaggactccctggaggcggagaagttcctctcacacaaattcaccaaagatcctggccgctcgccggggaggccggcccactgggcctcaggccccaaagtggacaaccgcgcggtcaggagcatcaatgaggcccgctacgccggcaaggagtaggggcggctgccagctgggccgggacccagggccctcggtgggagccatgccgtctgccggacccggaggccgaggccatgtgcatagtttctttattttgtgtaaaaaaaccaccaaaaacanaaaccaaatgtttattttctacgtttctttaaccttgtataaattattcagtaactgtcaggctgaaaacaatggagtattctcggatagttgctatttttgtaaagttctcgtgcgttgcactcgctgtatgaaagagagagcaggggtgtctgggtcgttaccaatcgtagcgtttgttccagaggttgtgcactgtttacagaatcttccttttattctcactcggtttttctgggcctcaggccaatgccggggagaccttgttgtgttggggg

SEQ ID NO: 431321 - DNA, 1269 bp, Homo Sapiens
ctagcctgggagatacaggacgctggcgtgcatggcgttgaggtatcctaataatatataattataatattagattatgctattgtacaagttgtggctgagtgatgatctttggacagaggagaagtacggagtgtattatatatatcgtgtggatgttattgggcagtacggatgatgtgaagaggggtagtgtgagtgtatagggcagcgcaagtgaattttacataatcgcatggtgaacagaagttatgtacaccctgagagcccgcgggattcataggatgctgttgtgtctggggatgtatgtccgcctgtggccagtgtgcatgaaaaggtttgggaggagcccgctgtttaaagtggcagaatggggctctccccaagggtgtgggtctggtttatgcaagaggcgatactcccaagccagtgcggggtatcggtgtgccgatcagcccttttggtgggtttgggcagggtgatgctggatttcccgttagcaaaatgaggttgcccagttggggttggcttggggggcaccggggctcctggttttcagcattgcaaggttgagtacggcccatcagttatccgtctcatggaggcccggagttggggcagggcagcgggttcatcctgcgcagtccaaggtggcagcctcacatctcagtgatccacatggctggtcgcatggcactgtcgtgtggaccttgtgctaggcactttcgcccacagtgggcactgggcgctcagggcttcgggctggccggccagcagacaaggcttccatccgcaccacaccttgctgcagtcacggcggccatccaggcagcggcagctgttgcagtcttccacccaggagcttccgtgtgggaacggagtgccccgggaccagcaggatctcccgaacccgatcacttcctggcaccgggggccggctcggccgggtgggcagctacagcgatacccgttgatctcatccacacacgtggccccgtaggcacagggcgaggactggcactcgtcgatgttgatgcggcagtcaggccccgcgaagccaggtgcacactcgcagcggaaccagttgacgccgtcaacacagatgccaccattgtagcaaggcagagggttgcagtcgttggtattgtgagtgcaagtacgaccctcccagccgtcccggcagatgcaggagaaggaggccccgctgcccacgcaggtgccaccattcacacaggggttgcctcgtgccgaattcgccacccaggcctc

SEQ ID NO: 431322 - DNA, 506 bp, Homo Sapiens
  misc_feature (430)..(431): n is a, c, g, or t
  misc_feature (435)..(435): n is a, c, g, or t
  misc_feature (447)..(447): n is a, c, g, or t
agggggctgcaaagccaatcggtaggggcaccccacccttgcagcaccctgcgagcagttagcgcacctggatttagttccttttatttccctttcaggtaccagacaaagtaaaaaagacggacggatggagagaggaacgcagccggctggggtgggagcggaatggagctgggggaggggccctgctcacatcacatccacaaagaactcactggggtttcccatggccatgcggaaggactgtctgctggcggtcagttccgggggcactgaggccaggtcgcggcccggaggggctcctgggggccccatggccgcgggcggcgggggcatcatcagcatgggggggccgtagagagggggcactccgggaggaccgtagctcgggtgtgtgtggtggctgcgaaggctgctggccccagggggnnaaanaaatttgggggntttggttgggttccctgggtgctgtgctcgtggccgcggcctgacgctcgtgggcgccc

SEQ ID NO: 431323 - DNA, 2531 bp, Homo Sapiens
  misc_feature (92)..(92): n is a, c, g, or t
  misc_feature (273)..(334): n is a, c, g, or t
  misc_feature (2446)..(2482): n is a, c, g, or t
ccacaggggtttttcaccccctggcttcgtgtttctgggctttagttccttttatttccctttcgggtcccagacaaagtaaaaaagacggncggatggagagaggaacgcagccggctggggtgggagcggaatggagctgggggaggggccctgctcacatcacatccacaaagaactcactggggtttcccatggccatgcggaaggactgtctgctggcggtcagttccgggggcactgaggccaggtcgcggcccggaggggctcctnnnnnnnnnnnnnnnnnnnnnnnnnnnnnnnnnnnnnnnnnnnnnnnnnnnnnnnnnnnnnncactccgggaggaccgtagctcgggtgtgtgtggtggctgcgaaggctgctggccagggaatggtggctgcggtggctgtgctcgctggccgccggccctgagcgctcgctgggcgcccgctcccgcggcccccgcagggctgctgcgtgtggtgtggtccgattcgctgccgctgcccccggacttggagtccccggccttcgggtccttctccttcctccgatcgctgccgctacggttggagccactgctccgactgccttcgctgtgctgactgctggcgctgcccccgccgtagctgtagcccagctccgggaagcccgggtgcgggttgtatgggtgcgggggtggtgggtactggtacgggaaagccatgggccaaggggcggcccccgggtgcggcaaaggggccagtgtgtcctggtcagaggcgccactggagccatcgtgatcgtggagagacaggttggccgtgttgccgcagaggtcaccgaagatgtagtagcactgctcggagaaggtgatcttgttgacggtatggcggatgaagccagctttcagcagtttgctggcatacttgcgggcctccctccggtccgtgaagccttccacattgtggtacagccagtcccaccacatctgagccgatgaaagcattaggggatggtaatcttgagccacatgcggtcacggacctccaacccttgattcaggggaggccatggcttttacgatggcagccatgtcactgtggatggacaagtggaagtcgtctaggcgctctgtgtcagggatggaactggtgatggaggagctggtggaggtgatggtgctcagggaggggctcatgccgtatgcagggaaggtgccggtcatggctgcagtgtgggagacccaggccgcagggtcaatgggccggatgggctcgctcctgggcaatgtgaagcaaccacgtggacttgggtcccagcacttggctacagtcagggtgatgggccccggtttgtgcacaatctcccgcagtacccggactgcatcgtcattactcatgttctcaaagttgatctcgtttacctgtaacaacatatctcctggctcgatgcgtccatcagcagccacggccccacccttcatgatagagccaatgtagatgccgccgtcaccacgctcgttgctttggcccacaatggagatgcccaagaagttatatttttccatgttgagagtgaccgtgatgatgttgagtgacatggtggagtccgtgatgctgctgaaggacgaggaccgctccaatccgagaacctttctgcttccgccgccgccgcttgtgtcttctcatcaggcgtgaggcactgctctgtttctgtggagctgctgaacctgctggtggagtcatcctcatctgagtcaaagaagctggtggtctccagctcactgctcataagggtggatgagctatcataacccctggttctcgccgccgttcccccttcgcagttccatttagccgggttgcatgctctgggccatccctccggcgtggccgctctcgctgggcagacaccaaagagtccgtctctgtgtcattgtccaggttctcctggctgcccccaccagcatgagggtggaaggatgggggtcgggagtccccgatgcctcccgtgcgctccataggtggtggcagctccgatgggttatcagcacagaagggggctgggtctgggtgtgagccctcagctgacaccagccaggacaccacccggccattgaagcatggtagcttggcattgtcatccgagatctcctccttcaccactccgaaatcgtcgtccatagacttgaagaagaacttatagctgggtcgctgcaaaacgcccttaaagtccgccaaggtgacgcgctcggcgggcaggggcagcttcacaaggtacggcgtctcctgcccatccaagtggtagatgatcttggtctcgcccatggctctggcctcgggcccggcggcccgcgcgcggcctgctcgggcggccgggccgagcctcccagacggcggccgcttccgctccccactctccgctctcgacgaattcgagctcggccgatttggcctgatnnnnnnnnnnnnnnnnnnnnnnnnnnnnnnnnnnnnncgccgccaccgcgtaagctccagttcgccctatagtgagtctatacatc

SEQ ID NO: 431324 - DNA, 1442 bp, Homo Sapiens
  misc_feature (66)..(100): n is a, c, g, or t
  misc_feature (624)..(664): n is a, c, g, or t
  misc_feature (1416)..(1416): n is a, c, g, or t
aaagtcagttaatcatctacacagtaccccccatcctgccattatttatacatgcactagtttggnnnnnnnnnnnnnnnnnnnnnnnnnnnnnnnnnnntgattaccgggtgggagtgagcatgttttaccctttgtcaacgagcccagctggcatggcttttctggagtgcgaggggccagtgtcctctccccggggggagactccagacacaaacgcggggcctgaggcgctgggaggcccctgtgcgagccggatggcggccagagaggacgtgtcagctcctcgtgggactgaagagcgcgaccaggcagagggtgggcggggagcctagggtcctacacaccaagcacagcgacgatcgtggcggggaggggtctgcacacctactggccgaaatgactttgtacatcgtggacccttgggactgggagaacggatggcagcagagtcttcgaaagcagaaaccgaggtggccgggggcacgggtcagtagctgagggtggagtcatcccactccagctgctgctgccgggttgcgttctgggggtcgccctgctccccctcctcctcctcgctgctctccgactcggcgctggtgatgtcatcctcttcttcgccgnnnnnnnnnnnnnnnnnnnnnnnnnnnnnnnnnnnnnnnnnactgctgtgctggtcctcataggtctccatggggttgacggtgatggtcagggcagagtcgtcccagtccatctcgttctccttcccggtgtcctgatcccgcatggtccgccgatgtgcggcccggatccgaaatacccccaggataatcatgaacaccaggaagctgacgcacaccacgatcacaactgtcgcagtgctggggacgactgcgaacgggtgggggttggccaggttgtggcctgacaggtcaacaaaggagcggtgttccgggtgcacgaactgtggctgggcagccatgtggttggcgtgttccatggggttggccgtgtggattacattcacctccaccttaaattcgttgctgatgtagcggccattcagctctgagcagatgagcttaaacttccggtcaagcaaggacctggcatgccagttccgatagcgcagcaggtgcaaaacctcctcgtagctggccatggtgtccacgcctgtgaaggtcatgcccagttcagagctgctcacttcaatgcccttctgctgcaggcgggccatgtccacctccaggctctcctgctcgtggttcagctcctctccctccaccgtgacctcacaggtatccaggtcgtgcacgatctcctcggacaccagtgattcttgaactgtggggtcctcagccccgtccccttcaggctccacttctctcgtgatggtgctgatgatgcgaagctcagggaaaaggaacacccctntgagcttcaaatcagaagctgctcgg

SEQ ID NO: 431325 - DNA, 1544 bp, Homo Sapiens
  misc_feature (1061)..(1095): n is a, c, g, or t
ggagttagttagaaccagaactttattgtagcggatacactttctgacctatcatgagtatacacatctgcgaagggaaaccgcgcggcgacagcgtgaggacatcccctgggcgtgagcgtctgtccgctgtctaaacagagcagctacagggacgggacatggaggatggccacacatagcacagccaccagtgtcctcagaactagcagtcagggtcacagaacagtattcaaaatgattgcccacctgttttagaaatctaaaattttacatgtaactaagagcaaagtgctatgtgggttttagaccatgactgtttgtttgctctcctgccctaccaccaagcaaagcagcagggctcctgggggagagggatttcaacccccctgatggcagggggtgctctggggaggagagaggagagaacaggctgttttggaaaattccagcactttgacttcgggccatgcgtctctcctggacgttctgagtacggatcgctcaggcctcctgccgtctccaaaaggagtggtcagccggtctgcaggacacctctcagtttctccttttaccagcaggaaaatgtacatttaagcataaaccacaaggctgcacacggtgagaccaggccactgcccagggagctgctgtcggaggaggagtgtggaaaaggggccagggaccccgcaccccacaccaaattaggaacaggtagaatcccaaaggcaaggcccggccacttgtagctaccctgatccagtctcttgagcagcacagctagaagcctgtggcccccgactcccagccatactcagacctgagcaggggctggggcggggctgggcggggtgggcctctcctctggggtctggggagggaggacccggcgggaagagcccgtgctcagagctccgaacttcactttacattccagtcccgggttacactagcacaaaggacacaaggaatccgatttatttacaaaatattaaaaagtcagttaatcatctacacagtaccccccatcctgccattatttatacatgcactagtttggnnnnnnnnnnnnnnnnnnnnnnnnnnnnnnnnnnntgattaccgggtgggagtgagcatgttttaccctttgtcaacgagcccagctggcatggcttttctggagtgcgaggggccagtgtcctctccccggggggagactccagacacaaacgcggggcctgaggcgctgggaggcccctgtgcgagccggatggcggccagagaggacgtgtcagctcctcgtgggactgaagagcgcgaccaggcagagggtgggcggggagcctagggtcctacacaccaagcacagcgacgatcgtggcggggaggggtctgcacacctactgggggtggtgcgagtgagcctttctaggaggcagctagcagataaaggtgtggagcccaggggatgcttcctgcaccaggcgacaggtttggtggcattggcgcacggttggcgtggaagccaagtttctagagggagccgacaagaagctgagtgt

SEQ ID NO: 431326 - DNA, 2121 bp, Homo Sapiens
agcgggggggagagcgccgccgccatcttagttgctgccgctgccttcagttcagccagatttgcagctacgaaatcatcactccagacgtgccctttactgttgacaaagatggttatataaaaaacacagagaaattaaactacgggaaagaacatcaatataagctgaccgtcactgcctatgactgtgggaagaaaagagccacagaagatgttttggtgaagatcagcattaagcccacctgcacccctgggtggcaaggatggaacaacaggattgagtatgagccgggcaccggcgcgctggccgtctttccaaatatccacctggcagacatgtgaacgaagtcacaaggcttcccgggcccccttccaaggcctaaccagggggcccaaaccaagggcatgggccaaggcctagcaaaccagcccacatagggaaaggctgcgaccgagacacctactcagagaagtccctccaccggctctgtggtgcggccgcgggcactgccgagctgctgccatccccgagtggatccctcaactggaccatgggcctgcccaccgacaatggccacgacagcgaccaggtgtttgagttcaacggcacccaggcagtgaggatcccggatggcgtcgtgtcggtcagccccaaagagccgttcaccatctcggtgtggatgagacatgggccattcggcaggaagaaggagacaattctttgcagttctgataaaacagatatgaatcggcaccactactccctctatgtccacgggtgccggctgatcttcctcttccgtcaggatccttctgaggagaagaaatacagacctgcagagttccactggaagttgaatcaggtctgtgatgaggaatggcaccactacgtcctcaatgtagaattcccgagtgtgactctctatgtggatggcacgtcccacgagcccttctctgtgactgaggattacccgctccatccatccaagatagaaactcagctcgtggtgggggcttgctggcaagagttttcaggagttgaaaatgacaatgaaactgagcctgtgactgtggcctctgcaggtggcgacctgcacatgacccagtttttccgaggcaatctggctggcttaactctccgttccgggaaactcgcggataagaaggtgatcgactgtctgtatacctgcaaggaggggctggacctgcaggtcctcgaagacagtggcagaggcgtgcagatccaagcacaccccagccagttggtattgaccttggagggagaagacctcggggaattggataaggccatgcagcacatctcgtacctgaactcccggcagttccccacgcccggaattcgcagactcaaattcaccagcacaatcaagtgttttaacgaggccacctgcatttcggtccccccggtagatggctacgtgatggttttacagcccgaggagcccaagatcagcctgagtggcgtccaccattttgcccgagcagcttctgaatttgaaagctcagaaggggtgttccttttccctgagcttcgcatcatcagcaccatcacgagagaagtggagcctgaaggggacggggctgaggaccccacagttcaagaatcactggtgtccgaggagatcgtgcacgacctggatacctgtgaggtcacggtggagggagaggagctgaaccacgagcaggagagcctggaggtggacatggcccgcctgcagcagaagggcattgaagtgagcagctctgaactgggcatgaccttcacaggcgtggacaccatggccagctacgaggaggttttgcacctgctgcgctatcggaactggcatgccaggtccattgcttgaccggaagtttaagctacatctgctcagagctgaatggaccgctacatcagcaacgaatattaaggtggaggtgaatgtaatccacacggccaacccccaggataatcatgaacaccaggaagctgacgcacaccacgatcacaactgtcgcagtgctggggacgactgcgaacgggtgggggttggccaggttgggcctgacaggtcaacaaaggagcggtttccgatcccgggaattccggaccggtcca

SEQ ID NO: 431327 - DNA, 1249 bp, Homo Sapiens
  misc_feature (1141)..(1142): n is a, c, g, or t
tcgtagatgggatccactcggaaatggcagcagctcggcagtgccgcgtcccgcaccacagagccggtggagggacttctctgagtaggtgtctcggtcgcagcctttccctatgtggctggtttctagctccactgtggcctgtactgaggcgactggctcgtcacatgtctccaggtggatatttggaaagacggccaacgcgccggtgcccggctcatactcaatcctgttgttccatccttgccacccaggggtgcaggtgggcttaatgctgatcttcaccaaaacatcttctgtggctcttttcttcccacagtcataggcagtgacggtcagcttatattgatgttctttcccgtagtttaatttctctgtgttttttatataaccatctttgtcaacagtaaagggcacgtctggagtgatgatttcgtagctgcaaatctggctgaactgaggggagcagtcggcatccacggcctccaccctcaaaatgctgtcgtactgcttcccctcgatgaccgtggctttgtaggacttctccttgaacacgggcgcgtactcattcacgtcgttcacctgaatatgaacagttgctttatgagactttttcacgttggtgccatcaggtcccttcccacaatcataggcctggatggtgaatgaatagtctttctgcagctcacagtccagtttctctttggagcgaatgactccctcaccagtggatttatccactaccactgcatcaaaggggacattctgcccgtgaattttaaatccacaaatctcacctgcaaatcgcagaggcgcatctttatccagcgcgatcagtggggggtcgaggagcacggtgttgtcgttctctgtgactatgccgtggtaggtgggctccagccagggcttgtgcttgttaactcgcgcggcccagaccccgccgccgcacagcagcccggccagcagcagccgggcggccggggccagcgcgggagcggggcggcgcagcatcgccagcccggggcgggagcggcagggaggcgcgcgggacgccgagcggagctctcggagctctcggggctctaggggcctggggccagctgctccgcggcgcggggagctccgggggtccaaggagganngccccaccgccccgccgtgacgctgggccgcgcgctcaggacgcggcgccctccccgcctcagagcagcgtcttgctgaaggcagcggcagcaactaacgatccgct

SEQ ID NO: 431328 - DNA, 767 bp, Homo Sapiens
ccagagaggacgtgtcagctcctcgtgggactgaagagcgcgaccaggcagagggtgggcggggagcctagggtcctacacaccaagcacagcgacgatcgtggcggggaggggtctgcacacctactggccgaaatgactttgtacatcgtggacccttgggactgggagaacggatggcagcagagtcttcgaaagcagaaaccgaggtggccgggggcacgggtcagtagctgagggtggagtcatcccactccagctgctgctgccgggttgcgttctgggggtcgccctgctccccctcctcctcctcgctgctctccgactcggcgctggtgatgtcatcctcttcttcgccgtcctcgctttcctcttcctcttcctcttcctcctcctcctcactgctgtgctggtcctcataggtctccatggggttgacggtgatggtcagggcagagtcgtcccagtccatctcgttctccttcccggtgtcctgatcccgcatggtccgccgatgtgcggcccggatccgaaatacccccaggataatcatgaacaccaggaagctgacgcacaccacgatcacaactgtcgcagtgctggggacgactgcgaacgggtggggttggccaggttgtggcctgacaggtcaacaaaggagcggtgttccgggtgcacgaactgtggctgggcagccatgtggttggcgtgttccatggggttggccgtgtggattacattcacctccaccttaaattcgttgctgc

SEQ ID NO: 431329 - DNA, 440 bp, Homo Sapiens
  misc_feature (11)..(11): n is a, c, g, or t
  misc_feature (430)..(430): n is a, c, g, or t
ggagttagtantatccagaactttattgtagcggatacactttctgacctatcatgagtatacacatctgcgaagggaaaccgcgcggcgacaggtgaggacatcccctgggcgtgaggtctgtccgctgtctaaacagagcagctacagggacgggacatggaggatggccacacatagcacagccaccagtgtcctcagaactagacagtcagggtcacagaacagtattcaaaatgattgcccacctgttttagaaatctaaaattttacatgtaactaaggaggcaaagtgctatgtggggttttaggaccatggactgtttgtttgctctcctggccctaccaccaaggcaaagcaggcaggggctcctggggggagagggggttttcaacccccctgattgggaggggggtgcttttggggganggagagaggg

SEQ ID NO: 431330 - DNA, 414 bp, Homo Sapiens
  misc_feature (40)..(40): n is a, c, g, or t
aaccaaaaaatcggaaacgaaggccggggtaaaccctcantcaacagaaaaaggcctcgtgggaacttgcccatcccacatagagagtccacactcgggaaattcctacattgaggaccgtagtggtgcccattccctcatcaaagacctgattcaacttcccagtggaactctgcaggtctgtatttcttctcctcagaaggatctgacggaagaggaagatcagccggcacccgtggacatagagggagtagtggtgccgattcatatctgttttatcagaactgcaaagaattgtctccttcttcctgccgaatggcccatgtctcatccacaccgagatggtgaacggctctttggggctgaccgacacgacgccatccgggatcctcactgcctgggtgccgttgaact

SEQ ID NO: 431331 - DNA, 1190 bp, Homo Sapiens
agttctggtctccttgggggagaacctcgcctggggggaaaagcttggaatggagccccgaggctgggcagcctcctggagacacctgttttgtttcttcttttgcctcaaatatttgaccatttttaaatatcatgatttttttctttctgatcccacattttgacgtgtcaaagcttagagcaggaagtaggaatccacactttcacggagggggaccagcctgccatgtcgtccccaggctcacagcagcggcggctactctgctggtggtttggtggcaggtggagatggtgacggcgcattggaaaccgtaaggcatgacaacgggaggcccgcggggtgtttcaggcgcgttgacgcaggtgcatggctggcaggcggcctctacagaaggagggagcgcaattcacagcctcttgacgtagtttccggggaaagtaccaaagaatttggttcttcttgaggtccccacaaaccagccgtcatcacacttttccatgacatcaatgacatcactttctctgagctccagctcatcttcattcctgggagtatagttatacagagcctgaaaccggttccccccccaccttgaatattttcatgagtaaacacaggacgctgtggcttatttgagctcaagctgtgaatcctatcactagaatagctgtggggtattggagggtcagggtagtcctcagcaccttttgtgttcttcttgacgacctccacataggaaacagggaagatgccttgtctgttggttcctgggattttaccttcataccagttttgatcaactcttttaagaagaataactctatctccctttctcagtgacagctccacatttgtgtctgcgttgaagttgtatttggctatagcttctccgatttctccgggctgggctggcggaggtggtcttgcaggctgtgctttctcaggaggtgtgagtttctctacgtatgagatcgggaagatgcccactctcccgtggtgttctccctcataccaattttgatcaattttcctgaggatgtagacagtatctcctttcttaaatgacaactccttagatgtctgagccttaaaatcataaacagcttttgcaggcaatttctctttttctggagttcctcttctttcccttggtgcacttctccccatgtcagtcaaagtggatgagt

SEQ ID NO: 431332 - DNA, 510 bp, Homo Sapiens
atacttccaagcaaaatttattagatgtctattcaagaaaaacacaatgacctttgcttgtaagaattcaaagtcaattacctggaagccaggtatgaatagttttttcttttaaaatcagatacagagagtagaaacagtaatttttcttaaatatgacaggcaacagatattgaagtcttttctcataaatggcatcaaagagaattattcatttatcagcaaagctgcatgcagttgacttaatttcaaacctgaagcctttaaaatatgaagctggttatgaacttgacagaaatcaaggtaggctactcaacgatgtttctttaccttcttcctaatgaaattcccttgtcatcagtcagtagatatgtacatttcatttggcttctacgatcttttaacttcatagatttttgcataaatgctatctgacagaatcacactatctaggggtgcttgtgatctgtgagataaggagaggctactctgaaagtgggtccgagctga

SEQ ID NO: 431333 - DNA, 671 bp, Homo Sapiens
tggggtcttcaggcagagagaagagggggctattatgtcctgtgaacctttcccaacttccatgtaagtcataagacaagacattgatgaaatccaggagtcttcctagaaagcgcacatcataggatgtttggacgatgtgtgggaccccagaaacagcagcagacagcagcagcctcgggcgcatggtgagccgtgcctccttccggaaggcgaaccggagctcttccattaagaagagaaaagtcccccggtcatgcatggggctgcctcttagtcccggatataagaagaaaaggtccagaccatccaagtcatgtgtcctccgaagggatataactgaagccataaacttttcaccggttggccaatgtggacgacatagtggtgaatcttgaggtgcccaagttccacccgccgatggacagtagtgttttcagctctctgttcctctcctttagtttgttgaactctgggtagagaattttctcatcctggagatccttagcaacaatctgattgttgttcattgaggcaaaggcaaatatcaggtgggtgcagagaaaggggtccaggtcatggggcaagatcgaggcagggcctggccgactgtgtgcccagttggtgaaataacacacgagtttatgggcagcacctggtaagggagagca

SEQ ID NO: 431334 - DNA, 1395 bp, Homo Sapiens
gggataaaactttgatggtgtacagagggagcttggatcggtgcatcctgagtcaccgtgccgcctgcgtcctgaccaggacggtataactgcagagacgcaatctgcaaggggcctggaccctctacaaagtagtaaggctccatcagacgaggagtagccatgaggaaggcagagtagacgactctcctggcttgtggggatgatctggccccccgccccggtgcaggggctcctgggcaaccaccgcatccaggatcttaaacttgacattccgaatcaattcatcacagagggggccctccctggttccccactggaaaccttgaacgatgctgtccttcactgaaccaagaagagccttgtccacctcagagggccagagtatcatccacccagaatgttggggccagtcgcatcagggccaaaagcccagatggaacgggcagccagcagatcccaatcgtacttggtctggaagaactctcccagcttcttcctgttccacgtaatctggaccacctcattctctatgtcctctgccaggcccttctcaagaggctcagcaatcatggtgatcttgttcttcttattaggcgtttcagcaaagcacttgagggaggatgtttccaccaccgtctcacaaaacgtgacaactgggtcagccaccttgatgtctatctctgagtacatcttccgcaaatcatgcatcacacagtccaggtagagctccccagtgcccaggatcacatgctcgccagactcctccaccttggtggtgagggatggatagctcttgttgaccttgcgcaggccatcaagcatcttgggcagctctgaggggttgactggctccacagcaatcttgataacagatgtggtattgaacttcaagggtcggaaaatctgagcctcctcattgcctcggggttcggttatggttgctgtcttcacaattggttgatcaacaccttcaatcagaacccagttgccagcaggaacacggttcacctcgatgtggtacctggccacagagatccaaaggcggcccacggtgcatatctgggagtcttcctcatcctccagggtgtagttctcccccagtaccttcacaggctgctccagcatgaatggtgccactcagcacccggccaaaggcgtgaaactggactccatcatctgtgctgtacatcttagtagtgtggcacatcagggggccatcagggtcacagtcactcatagcctcgccgaggtcggagtccacaccaccggtgtaggtgtgctcaatcttgggcttggcgcccacctttggagaagggatatgctgcacacacatgtccacaaagcctgtgactcgcctcgtgccgattaacacccaggcctcgtacctagcca

SEQ ID NO: 431335 - DNA, 1669 bp, Homo Sapiens
  misc_feature (31)..(31): n is a, c, g, or t
  misc_feature (45)..(62): n is a, c, g, or t
tgggtggcgaattcggcacgagggagagagnaactagtctcgagnnnnnnnnnnnnnnnnnnggaagcagaggcagtgaagcctcttgggagatgacatatattcagaatgtaagcaccagacggggcaggggagacgaggatgaaaggagcagagcaagacagaggtcagaatgttctgttcacttgcaaaccatggctaaggtcaaacttgtagaaaataaaattccatgtaaatcccaaagatagggccccttggggtttcatccccttctctttctgtgagcccaagctcctctcttttccttgggaatggagcccggcagaggccacagaaggaagcaggaggccaaatgctcctctctcactggggctctgggttggaggttggtgagttgttcaagatggcaacagcagcttccagacactctctgacaacacgaaggccacgtcatatgaggtctcagcttcaagtacaggagttgcagcccactgtagggagcaggagctcccaggagtccacgcactcacatggggtaattgagcacaacatcctgtttggcaagttccagcaacataggatcatcgaagaatttgctgatgctcacatcttcactgaggcccttcctacggcgggttttgatcatgaattcccgggccaggtgaggagctggctgtggctccaaggggcggatgacaatgctcttgtccaggggatcaccaggcacaatctgccagtggtggaagacagacagagaaaaggcttgtccctgggtgtgagtccggagatcagtctcaaagccaaaagagtcgatggccgggataaaagctttgatggtgtacagaggggagcctgggatgggtgcatcctgagtcacgtgccccctgcgcctggccaggacggtataaactgcagagacgcaatctgcaggggcctggacctctacaaagtagtaaggctccatcagacgaggagtagccatgaggaaggcagagtagacgactctcctggctgtggggatgatctggcccccgccccggtgcaggggctcctgggcaaccaccgcatccaggatcttaaacttgacattccgaatcaattcatcacagagggggccctccctggttccccactggaaaccttgaacgatgctgtccttcactgaaccaagaagagccttgtccacctcagagggcagagtatcatccaccagaatgttggggccagtcgcatcagggccaaaagcccagatggaacgggcagccagcagatcccaatcgtacttggtctggaagaactctcccagcttcttcctgttccacgtaatctggaccacctcattctctatgtcctctgccaggcccttctcaagaggctcagcaatcatggtgatcttgttcttcttattaggcgtttcagcaaagcacttgagggaggatgtttccaccaccgtctcacaaaacgtgacaactgggtcagccaccttgatgtctatctctgagtacatcttccgcaaatcatgcatcacacagtccaggtagagctccccagtgcccaggatcacatgctcgccagactcctccaccttggtggtgagggatggatagccctcgtgccgaattcgccacccaggcctcgctacctataactccggggtactgccgtcgga

SEQ ID NO: 431336 - DNA, 1582 bp, Homo Sapiens
  misc_feature (233)..(233): n is a, c, g, or t
cgggaaactggactccatcattcggtggctgtccatctaggtagtgggggcactacaggggggcatcagggtcacagttcactcatagcctcgcccgaggtcggagtccacaccaccggtgtaggtgtgctcaatcttgggctttggcgccccacctttgagaaagggatatgctgcacacacatgtcccacaaagcctgtgaactcgccaaagaactttttgcagaccagcntgagcaaggggcggatgttcagcttcagctcctccttcgtcaggtggatgccaagctcgtctagggtccgtgggaggctggtgtccacgtcacctacaacctgggcgaggatcttataaagaggctccaagataaactccacgaaacttctctgggagctgctagttggggcctttttggtgaactttcgcgtcttagggttgaagtagatgtcaccccagagtcttttagcaaattcttggtaattaatgtcaccaaaggtgtcggcatagatcttggcaaaggagcccagcgtgaagcagatgctgtactgggagctggagaagcagacgttacccaggagtggggaaaggatcaggttctcatcagtggaatacatgcttattaatccattgacctcatccacaatgtggcgcagcttgtaataagcatcagttggaggcagcttcagctccaggatcagccggtcaatcttgttgatgcacacagtgactgccagcctctcctgcaccgcatgcttgatcagccgctctgtgttcagcatcaccccctcagcagcatcaatgaaaaggaccactccatctgagatgcgcaagccagctgtgacctcatcagagaaattcacatgtcctggagtgtccatgatattgaagagataagattttcctttggtgtctggcaagaccactgtcacaggagtgcttttgatgcctacacctctctcttgctctgtgaagaggatgtcagtatagcacagatcttggtcatagcgctttctgatttccgggtgagtctgttcaattaaacaatccacaaaacatgtcttgccatggtggagatgtccacaaagggtcacatttctgatgagctctgagttatccatcagatccgccaagaaatccatctcatacaccgtaacaggtaatgtctgctccatcagagtgaatttcttggttttcactggcttaataatgggttctgtgagaggctgagtgtcttcctcttgaactatggtctccacctcaggaccatacacctcctcggctgttgggtagtacttcttgtcctcatgcagcaccacctccatcccagggtggtcatcgtcatgatctcctacgtcatcgtcgtcgtcatcatcatccatctcatcaagatctttggtctctctacccaattcatcatcatcttcatcagaatcaagctctggtccaatataattcccaaactcatcatataagtcggtatccatgatgctctcgcctgctcagctaagagttcccaggccgctgccggagatcgtgcttccgccccacgccgaggcctcgtgccgaattcgccacccaggcttc

SEQ ID NO: 431337 - DNA, 1102 bp, Homo Sapiens
  misc_feature (51)..(80): n is a, c, g, or t
  misc_feature (141)..(141): n is a, c, g, or t
  misc_feature (171)..(171): n is a, c, g, or t
tttattccaggaaggaaatttctttagggtgttccaaatgttctgaagccnnnnnnnnnnnnnnnnnnnnnnnnnnnnnnaagcaagttcccccgtttgggtaaaaatgggggccagtcgaaaggaaagtctgttcatttntcctttccccatggccacggggcgcagganccccagggtgatctcggcaggaggagaaagcaaatgccgagggactggaatgcctttcccttgggttctggtccataaaagtggtcatcttcttcccacctgctgatctggtcggtagggtgccactctcaacccaattgtagagctttcgactacaggcctttatgacatattccttgggcttcagccagcagcttgttcttgagttctttggccatctgcacatagaggaactgctgtaaagcccgttcgatggccatggtgcgctgccggttccactcctgcacctggtggctgaactcatctcggtagtaaaactgttttgtctcctcaaaatatgtctggtcgttgccatagccttccactcccttcaaatctatgctgatgtcagtggtgaggagcccttcgtcttcagccaggcatatcttgagaaactggtcatctctcagttccttaacaggcttgttctttaaatacttgaaggaataggcatagtgggcctcatccacatcctttctacctttcttggtgggggttatatttaacttggctctctcttggaaggtttgcctcagcacctgccggacaaggggctcacgggcaatctgcagggctaccatgtagcgggcgccttctagcacagcttctggagtagggaactggctgcaaacgtaatccttggccagctccaagggctccgcgggaaactgctctgtctcgtgccgctggtagctatcccgcaggttctccccaaactgctcgggagtaagcccaaactttttggccaggccatctagcccagcactctggcagatggtgtacatgtctcggcgagaggcttgcttgagctcaggccccctctgctcctcatcttctgcctcgtcaccttcaccttcttcatctccctcgtgccgaattcgccacccaggcc

SEQ ID NO: 431338 - DNA, 2081 bp, Homo Sapiens
ctgcacagttctcatgctcgcccagcttcccgtgcaggatggcgctctccatgggcaggccagctccctgcagcctctcgagaagaaagtggactcggtataaatcagatttctggagcagccgccgcagcttggcctgcgtctcggtggcttctgcacccttgccactggcggaggccctctgcagcagcacttcttccaggtacagcacagcttaaggtggggtgtggatactctttcttttctgccagttctcttgtcctatcacaaggatgttcccagatacttccacaagggctttagggtattttttaaggcaattgataatgtcgtctggattaaaactgttcttctgctgttcatccaaaggtctcttggtgaaaacctgaactccgacctcttcacttttctgcaggacccaatcagcataggcccacactagttcctcgtctaagcagtaggtaagaaaatccacgatgtattcatacaggtctgagcgtgtggagtcctggacatcgccattcacaatgttcacccacaactgaactgcagcagcatcttggttattataatgatagagcagtccaagtgcaaaatactttttgtgcttctctagccaggcagcactgtccgtcagaagacagaagttctcagtgaccaggaggtccagcaggctgtcgtggtcagcctctgcatacagtttgagcaaggctgtgtcgatgtcctccttgtagccatttgctacctctgtgctgcggacctcattcaggtagctcatgaggaagcgtttgcacttggccatcttctcctggtccccctgggtcagctggttcaggtctgcgtactcatgaagaggagggtgggaccgggtgaaggaggaggaggtgggcaacaggaaggggtagagagagatcagctcccggacatcaagctggccgcttctgaagagctctttagcttccaggaactgaagttgtgcaaactgtataaatcccgcctgctgcagaatccttctgtacattacctgaaatttttcctttggaatgttcctccgggctccttttgctaaaaccaaagcctcttctactctgcggcttgctagaagatcctgtatttgtttttccaaaggtaatggaaccaagatgtaaactcctttacttgtggcaacgatcactcttccttcaaagtcctgtaggatatggccctccttaaagggcagcgtctgcttctgttgctgatccaacatgctgtggactgtgatgaattcgtcatcgagcgctatgacgtatggaaaggacacagccgccccaatcacattctccgaccagtgcacgggggcacgctgggatatccctgcgactgtggcaaacatgccccagccctccggggcccgccagcaggaactcctgtctccctatcctcttgacgatcggcggcctctcctcactgcagtagggaaacaggtcctgggagacgcctgtgctgtaattgtggatgatgtactgagtggtcagagccagacacaggaagtggccgtccacagccacagcgaggggctgctcggcagtcgacacctccttgacgatctgcacccggtcctcgtacaccaggaacatctggatggttctgcgtttgacagagatgatgcaaacttctacacagaaggggtccccactcacagggttctcgttcagtgcaaacgtggctgcccccttgatgcgggcccccgaaggcactggctcgaggttcagcatgttgaccaggctgatggagttgtcacacagcaccagcagcctgttgagtgctgaggccgcgcgcagctcgttcacgggcttcttgaagcccaagtgtctctgcagctgtttggtggcagtgaacgtggctggcccagcaggcactggcctctcctccaacaggaagtggtagacgaagcagtcgttggtgcccacgtagaggtccctgccgcagcactccacgcactctatgttgacgcgctccttgtcgcccatcagcagctcccgctccacagcagagacaagcgtaaaggctttgatgctcatcatgtctactggctgatctgc

SEQ ID NO: 431339 - DNA, 1097 bp, Homo Sapiens
gtagcgaggcctgggtggcgaattcggcacgagggcctcctggagttggtggagtactaccagtgccactcactgaaggagagcttcaagcagctggacaccacactcaagtacccctacaagtcccgggaacgttcggcctccagggcctccagccggtccccagtgttcacgccccgcgtcatcggcacagctgtggccaggtataactttgccgcccgagatatgagggagctttcgctgcgggagggtgacgtggtgaggatctacagccgcatcggcggagaccagggctggtggaagggcgagaccaacggacggattggctggtttccttcaacgtacgtagaagaggagggcatccagtgacggcaggaacgtggacaagactcgcagattttcttgggagagtcactccagccctgaagtctgtctctagctcctctgtgactcagaggggaaataccaacctcccagtcttccactgcccacagggatagggagggtgttgagaatcctaaactcgaaccgtttcactgtcagcctgccctcggcgacccatcactgggtatgctattgtacatagaggaaacctgggctagccccacccagagcgcagaggagggggcaccgacagcgctgcgagccaggctctgggtagtggctgaggccagaggcccatcgcctgcccctgtccaactgagatggccttcaggagcctaggtttgaacagcagatgctgtcccaggaagggctagggacatcggaggggacctgcccccgcaccctctgctcagcccctggactcagccttgcctgtcttttcctgctgctcccagggggaggtgtcagacctcgggaggcagacgggaccagagccaggctgttcactgtgggcccacttgccccactgtgctagggcgcgggaggagagagcactgtggtcgccctctgcagccactctggctcccaagacttccctgactcccccactcccctccttgccaggggcacacccggacccccacacggcagggccctctcttgggagggggctttggaatgatgaaattccaacccctgctgccggtcagggt

SEQ ID NO: 431340 - DNA, 1587 bp, Homo Sapiens
acacacaggccacgaggaggttgcctgctcctttaccttcctaggtttacatggtaccggagccagcagcctggtgagcccgcaggagcctgcagacctgaatcagggtttctggggagttgggcaggagatgacaggcagcttccagctgatcccagggctgcagcgggcatgtgcagtggcccataaatacctttacataaaatacggggtgggggacttccaggtcccagggcctagcaccaaaaagcctgcctggaggccagtggccctgtgcttgcacctgcgcctgcacccacactggcgcccacacctgtcctcagtccaactcagagccgcggggagagcgggacttcctcagcccaggcccagagcgtgcccctgggttctgcagagccaggccaggaggcgcctctcttccagcggccatgcgaggcttccctcctcaaggccacaccagcctccaagagcgacaggttgctgggctgtccacagccctccacggccctcaaaggaagggcagtaccaggagctctgggcccgtgaagtgtccttctcagtggtcaccaaaggccagggtcccctttggctgggactggagaggcgggttccacgggactgcctttactagtgcctcgctggtccaccgctccgggatgtgggtctgctggaggcgggcagtgtgcccgctgagccctgggctaaggacgggttctcggggagccggaggggccccccttcccggcacgtgggccccatgtagccatccacacagtgacactgcccactgacagggtcgcagtcagccccacccccgcagtcacagtgcagggtgcagctgggcccaaactggccccttctgcaatctgcaaggcggagggggcgggagacaaacctgagcatcatccttgccttccccgcgccaaggagcctggcctaggggcccgcggcagagcccaggtggagtgaagccttctgcctgggtgtgtgcgggagctaagtaccttgggcctcggtttcccctgaggagtaaacagtccctgccttgccttcttcagctacattctgcagccagtgagctcctgcatgagaaagcccaggccctcaggcacacgtccagagtcaccaccgagttcctgccccgccccaggatgggcaaacaggagccagtgttcagggatgccccctcagggcacaacaggcctgagagccacaaggccaggtaagcagccccagcaggtgagcccctcctatcctcaggtgggtccctcctatcctcaggtgagcccctgctatcctcaggtgagcccctcctatcctcaggtgggtccctcctatcctcaggtgagcccctcctatcctcaggtgagcccctcttatcctcaggtgagcccctcctatcctcaggtgggtccctcctatcctcaggtgagctccctgctatcctcaggtgagcccctcctatcctcaggtgggtccctcctatcctcaggtgagaccctcctatcctcaggtgggccctctgggctggaggggccacagcccccttgatgtccgcccagtccacagctggcatcccgggaattc

SEQ ID NO: 431341 - DNA, 1561 bp, Homo Sapiens
cagggcaggctgggcaggctactgtccctcaggatgtcgagctgttcctgacactcgtgaagaggcgctggaatcggagtttctgcccgatgactggtagcagctccttcagcagctccctcttccgcagaccctggagggtgaatgctctctgggggcttggaattggcagcttcagtgcaagtgctggtgcagacagacacatggcctccttctctgcggttagggcagctggagactggacagacagagacacaggcatgagacgagagtccttccgaggccgccctttcttcttcttctcctactgtctcctacctcaagctcaagttttcgcttggacagtgaggaagccttagccaaagggactttctcatcgctgtcactgctgctctccaggaggtctcggggcctcagctctttcacaaggttctgctcttttaacctttccacagctgtcggagtcatgctggtcagggcaggagcacctggtgtggctttggaccgctctgtgaaccgggagtcaaacgctttcatgggttcgatcttggacggggtcgttaacacagaaggtgacaatgcagcaggagtagaggtagcattcatactgtctttattgacagaatcgcctgcaggtctggcactggcagccaccacaggctctgtgcaaggcttcgaggcgccgaaggagttaggggtactggagtccagtggcagtagctgtggactgctatgagaagagagcatggtgcccgccaagggagcccgagagggggatgctgttaaagaatgccgtggagaagtccccagtgtccagctgtgctatgcagagaggcgtgattcttctccggccatctgctgtccgagtctcaacttgtttcttcaaaagattcttcctgatatcttcaagactctccccgttgacaacgcctgcgactgaggtggctgagcccatctccctggtcgcagcactcttctggtccagctgctgctgctgctgccttcgctggtacttgagcatctcagggttctcaatgacggctgtggagagctgggcctcggtcatgatggctaggctcttgccataggtggactggtgaatgcggctcttctcctcctcgctcaggggatcgccaagctcatcctgggagaagtcgaggaatgccacagagccgtccatagagcataccaagatgcccagcccattcagagtgcaggaaatatccatgatggatttgtcaaacagttcatggatgaccaccagcggccgtttcagacatgtgagccagacagaaagcgagcggtccttgctgccaacagcacagcagcagtacgggcagctaggcttcgcagaactcccattcttctgcttctttttgaagatttttgggttgaatttcacgacagtcacagctttccggtgcccaacaaagtccatgttggtcttccatccctcccgttcgatgcatctgggcagtggggcctgagttgttcatggcatgggcagacaccaggtaatgcccatcaggtgaccagctgagccgcaacacatgggtcgttc

SEQ ID NO: 431342 - DNA, 1497 bp, Homo Sapiens
ggagggggcgatatttttctctgggccgcagggtgttttccttccccccccttaacaaaccttgggttctaggttggagagggaggggttccctgaaaatgtccttcaacggggggggagaggtttgggcccccttcccccctgttctggaagtccaagggcccaggcttggggcccagggctatcttttttcccttccaggaagtttggaacggtttctctggaccatttcggggaaagaggggcctgggaattggggggggttttgccccggaggactgggtagcaggttcctttcagcaaggttccctttttcggcgaggccccacttctggttggatcccccatgggcttcccagtggagtagggaacccggaccccaggtaagttcctggcatatttctggaagttcggtaattccaaacccttcttttaggaggttcccggggttagacgaggagcccaatggcggtattggtgggtggactgcagggtgagtgctgctgccacctgtttttctaggtaggccagggtgggtctcttgctgcaccacatgaggcacggagaagagccgggcagcctgccttcccgagttggaggtgcggccctggattatggctaacggtcctgagcacagcatggcgtcctgggatggcaggctgctcctaaagtctgcacactgagccagtgagtcctgcttgtcagaaaccaggttccatgtggaaagtgacggattaaagcagtacgccttcccatcggacaggttcattactgggattcccatgctgcgtcagcaagatctgtgataccgtcatatcacttcctgccaggatggagtgtagagactcttctttcaccacaaccacctgtctgtgaacatcccagacagagagtgtggctgcagcggtgagcgccatgacgtaggagcctgtgcaatgcaaagtagagatcggggatggcaggaggatgggagagaggagacggcgaccacaggtggagaacactgacagcatccttttttcacaggcgacacacaccacgtcacaggtgcccgcagcagtgaggatccggctggtgagtaccgtctcccactccttcccttcccggttgcacttcaggcggctcagcttcacgccccccaccactgtcacttcattctccacctcaatgtacatggaaggatcggagctgacctggagggtgaatgctctctgggggcttggaattggcagcttcagtgcaagtgctggtgcagacagacacatggcctccttctctgcggttagggcagctggagactggacagacagagacacaggcatgagacgagagtccttccgaggccgccctttcttcttcttctctactgtctctacctcaagctcaagttttcgcttggacagtgaggaagccttagccaaagggactttctcatcgctgtcactgctgctctccaggaggtctcggggcctcagctctttcacaaggttctgctct

SEQ ID NO: 431343 - DNA, 399 bp, Homo Sapiens
  misc_feature (44)..(44): n is a, c, g, or t
agttttccccttcttgaagcaaatgtcagacccaggacacaggncacatctgcccagggagcttggctggcgctggtgcaggacagcacatctcctgccagtgtctcctccccctacagcctggtcaaggtgaagaggcgggtcctgcatgtcatcagcggcgagagtgtggccctgcccttgctgcagccagggcaggctggggcaggctacttgtccctcaggatgtcgaggtgtttccttgacactcggtgaagaggcgctggaatcggaggttctgcccgatgactggtagcagctccttcagcagctccctcttccgcagacccactactgttgactcccactggcttccagtggagtagtgaaccggacccagtaagtccttgcatatttccc

SEQ ID NO: 431344 - DNA, 804 bp, Homo Sapiens
  misc_feature (787)..(787): n is a, c, g, or t
ctggccccagtaacgcagcaacccaggacctgcctgcctggagaacagccctccacaataataataattacgacaactattattagtattctattgtggtgacaataataaccagtttggcatcgtggtcaggagaccagactctgtgccaggcagacctgattgcacctcccagccaccccttggctgtgggaccttaggccagtgccttgaccccccctacaccttagcttcctcctctgcagatgggaggaggttgctcaggtgcattgtttcctgcttgcctgggggcggggctgcacaggcagagttctggccaacccggcttgggatggcgcccaagccgaagccacaggaaggcaggccccgcagcaccgggtgctttcagagctgacctacctggcctcccaagggaacccatgatgaaaggttcctgcggctgcaccccttgccagtcatcagcccacgcgctgcttcacctcctgtaatgacagcgttgggccagtggcttacccacctcgctcggcaggcaccgtgcaattttcattaggtcacatagtcattatttctccagatgactctcagccagggagatgtgaatttgatgggctgcccactttacagacggggcgactgaggcgtgcatcaggcaagggcttgcttccggccttggagagggcaaaaggtcagcggttcaagtagggattctgaatttggcctctgtatggttgcctgaagtaggttcctgcattttaaaagcgccctgtagcctgggattggctaagcncgcgtcctccgggcgca

SEQ ID NO: 431345 - DNA, 782 bp, Homo Sapiens
tcggggttgccgcatgtacaggccaatgccgttgaccccggcagcactctttcttcgtccgttagagatggtattttgcatctcccgccaggtgcatgagcagccgctccgccacgtgccgctcccgggcctcgtagctggctcggtcccgcccaacccaagcctccagctgggccagctcctgctcccagggcgtcatgcccatgagccgcttggaacggaagtcctccagctgccggcccacggctacctgctggctttgcaccacctcctgcacgaaccgccgctggacatcctcggagatgaggtcagccctagtgcggtcaagttcaaaggcgacgttgggagggaccggcacccggagaaccgctgtcttctccaggaagctgtggtagaagtccaggaaggccttcttggcctccttggggcccagtgagcccagcatgtcggcatgcagacagcaaagcaggggtcctggctcaaactgcagggccacgtgctgcaggagggccatgaggtgggctgggcagccgcttcacctgctccaggctctggaactggctgttttgctcttctgagtttgtctccagctcgttctcaaaatcctcatcctcagccccgatgatgctgacgggaaccaggccaggccgggaggggcctggggaggccgcccctcagggcgaagtcttccatctcactgggctctgcagggctggtgtccgcgcggaggtgaccggcggggcgcccgaggtcgggctcggcgatcccgggcctgggtcccg

SEQ ID NO: 431346 - DNA, 2403 bp, Homo Sapiens
atgagaatcagtaatgatttcaaaaatactgccctctcaaataaatacatgcaaaaataatacacttgtgggctatgtaaggcatttttctttattatttttcagtttatcttagtaatgccagaaaaataacagccgttattttcactttaaatgcaaaccaaatactgctgcacacagagtacaaagattacctatgaacatggttaggtacaaaggccatattagatgtatagaccacactttgttcttacatcaaagaccgaccgacagagcaattttttgacaattattttagcaaataaccgtgctactaaacaaaggcaaatacacatatatacacaaacacgtctcaactaaaattatacatgtcactttgacaaacaaattctctggtggtttcaccagatatttgcaccccagagttccctgcccaaatcccgaccccaaatgctgacttgatctgaagaaaaaaattagagatgttcttaattaaaggcacatttggcagctactgaaagtggcatgcatctggcacaggtgcgctctccctaagccacaccacatgtaccttccatcatctgttatgcatcttgtttctttgagtggtagtccaatgtgacccactgttagctaatttgctttataattctgcagcaattggctacttaatgcactattttcattaaaggcaaaagggaaatttgctcacagtcgacagaaaatgcactttacggtgtcaaaaatggaaaataaggcatggaatttactaaacaagtttacaagtgcttttgttgtttaggtttataatatagacttcatgcttcttaagtagagctcaaaatatttcattggctcatgtataagggattatgaaataatcttaaaagttagtaatgagatgtttcaaagaagaaaaatattgaataaagtcatcatgttcccttataaataactttactgcataattctttcagccaaaccaatattaaccttgtgatgtttagttactggtaaagattaatgcaatacaacaggacctatacttgcgtagtcacacaatatatgttaaaagaataagtaaacctattcacagcagcagaataccaagaaataaatggttaaactgtttctttctaaatctgaaggaacaaaaaggttttcttcaatatgtacaacactaataaattgggacactcctcctattttactgagtcacttaaaaatctgaatttaagctgtcatattagaagacaaacaatgaaatacaagattaagctaaacttgagaattaagatcatgaccataaataccaactaatttttggtttacataaggtaatttttgatttatggagggaaaaaaacctttaagaatttagaatcataatatagcctccagctgacatagtaattgttctctgggctgttgttgactgtagtattagtgtggcatgctctttgtcaaattcagatccattaaagcatccttgagttgttagagaatagtaccctacttaaacataatttgatgcccaacaacctttaattaagcgaactctcaatgtatgtttcctgataatgtgtagtcttaaaatacatcagccttgaaatattttcatttctaaaagaaatgttccacattttggaatgtggttaacaaaaagtcatgctgcatttacccccttgtaatgtccaggattcaaaagcagaattttgtaatgatgcatttatctcctcagccatttctggtccctgattaaatagattttcatttctacaaggataaatttgtcaactagttaatgtttcatattgagaagaaggcaaggatgccattttctcacctccacctaagggcatccaattggcatttttctaatcagttaccactgcagaaaatatttttacctaaatgtaacagttcagaataaaaatatcctccatccacaatgcatgtaaaactgttgcacagtgaagtggtctcctagaaccatggggtagaagaatagttccctttgggagaaataggattagaactccaaatctgaatttttcctctttatagactagataggttgaaaaggggttatcaccttatattgaaggctaacacattagccgaagacatactgaagggggtccaatgtgacttttaccaggttctcatttggaatgtgcctggggcaattaaaaagagaagtaatccatgagacataaaaagagaaatcttagggacaatgaggctggcccagtataaagtccagggagattctggactgtctatcatgattagttgtagcggctctagtaagttggctcacataaatactgtgaaatccggaagaattccggaccggaccagctgtttttgtgttttgttgagcggagggagaggttgatt

SEQ ID NO: 431347 - DNA, 945 bp, Homo Sapiens
ggataccttgaatgaagacaggaaaacttgttcagctcaagataaatgtgctttgggtacccatgggtgtcagcacatttgtgtgaatgacagaacagggtcccatcattgtgaatgctatgagggctacactctgaatgcagataaaaaaacatgttcagtccgtgacaagtgtgccctaggctctcatggttgccagcacatttgtgtgagtgatggggccgcatcctaccactgtgattgctatcctggctacaccttaaatgaggacaagaaaacatgttcagccactgaggaagcacgaagacttgtttccactgaagatgcttgtggatgtgaagctacactggcattccaggacaaggtcagctcgtatcttcaaagactgaacactaaacttgatgacattttggagaagttgaaaataaatgaatatggacaaatacatcgttagattgctccaatttctcacctgaaaatgtggacagcttggtgtacttaatactcatgcattcttttgcacacctgttattgccaatgttcctgctaataatttgccattatctgtattaatgcttgaatattactggataaattgtatgaagatcttctgcagaatcagcatgatttttccaaggaaatacatatgcagatacttattaagagcaaactttagtgtctctaagttatgactgtgaaatgattgggtaggaaataggatgaaaagtttagtgtttcctttatctactaattggagccattttaatttttaaatgtttatattagataaccatattcacaatggaatctttaggtctagtttcttttgatagtatttataatataaatcaatcttattactgagagtgcaaattgtacaaggtatttacacatacaacttcatataactgagatgaatgtaattttgaactgtttaacactttt

SEQ ID NO: 431348 - DNA, 925 bp, Homo Sapiens
  misc_feature (3)..(3): n is a, c, g, or t
cgngttgtggtttctgcccagcctacacagcaggagctggggagactttattcgtttcggggaaagtgacaacaggaatgagatgaagtgtgaaagtgaaaggaaggggcaatactgagatgagaacagcctgaacaaagtctagtacaacactgcagccatccagagcttgagggagcggggaggtccatcaccaccaggccctgtgggcaaagcacacccatgtttcttctctcttgtcagatttgatgaaaaggaaacttgggactccggaggaccaagatggagcgagacggtcaatactgatggacttgcagctagcaccatggcagccctgcctggtctaaggaagctggcaggaggcgatggtacctggcgggggcagactgcccacctccccactccttcagaggactgtttcctgcccttcacaccatcatcatgttgggccctgcatgtatgttcctgcacttggagcgagcccagggacacagggcagacactgggcttacagatgttgctgcagctgagccagaaaacattccaggtaggaaaagcaggtgcccacattcacacaggcctttggtcactcgaccagccagaatgagacggactccttgacctgggaagtcaagttccagtgggaagggcttgaaattacacgtgggcaacttcttggctctctctttgctccctaaaccctgaccctaggcttgctttattattcacattccatagcctgaagggctgcttgttgttccctattttggaccctggcttaaaaagggtatatgggggtgctggcaatttaggcttaagggggaacctttgagaaacttgccttagttccttggtagggaataaggcacggcccctctttgataagagagagggttttttataaccacggtgcccccaaggtgtt

SEQ ID NO: 431349 - DNA, 2731 bp, Homo Sapiens
  misc_feature (1068)..(1068): n is a, c, g, or t
  misc_feature (1128)..(1143): n is a, c, g, or t
  misc_feature (2151)..(2168): n is a, c, g, or t
cctagtgagccccgggtttagtcggcacgaggcagaaacctcacagccaggcagccccagagcagagcctgtgtaaacatgcccaggaggggaggaggggttgctacatatgagaaacagttaaaaataaatttaaaaaagcaaccactaatgtcctgtgctggtctcccacagccccgaaagtctcagctcaaggaagggtgagtgctgggggattatcagctggggctcggctccctcccttgcagacagcaagcaggtaagggcttcattttgctgttttctccatggagggctctgggaaaggatcctgcaagttggaacctcctaagactccagaaccaggagcggctccctctcatatctactcccctcaaaccctgtcattcccgggaagctcccagaggcagctgaggccacgcccctgctcctgagcggcagcatccagacccggaaaggacctagtttcagcctggcacctcccaaggtgagccatctcttcttaggcatagtaggaacatggagaccacactacccccactccctgaaagctgggatgggatggtgagtcaagggtcaccatgcccctattagtctggctggagttaggttaggcatcctcccagggctcattgaccccagggggaacttggggaggcaagggactgaccagctggcttcccagggtgcctctggccaggccatgctggatctggctctgggtcaagcgctgctggtttgaagagctgccagcctgtggcgccttccctgacaggcactctcatccagcaaaggcatcccctggttctgccttcccttcctctttgcttcaaaggcaccatccgtctcccctggcaggccaagagctacactgtctgtactccatgcgccacccccgctggtgacccagcaactgcaaagggcctctggtttgtcccgctctgggaggagactcagtggcttttcctcctcctcagctgcaaggatcctaccccagcccagcccagctctgagaaacaggactttgctacagcccgcctcaaagcatcttggtggatttctccccangcacgagctctctctacttcagggattgcaaactggcatcctcttttgccagtattgggnnnnnnnnnnnnnnnnaagtgatcaccagcatttaaaaatcctatttcacataaaaagtcagaattctggcctctgacaaagcagacaatctgaatcctttctacctttctaccgcctcctgacaaacagccatctcgtctctgctgtaggtaacccattactcctcaagcagcctgatcctgaactctcccccacatccctttctccctttcatcccccagttcccagctgtccctcagtggctgcactgcaccctttacctgcacctccttgttgcttgggcctccagaacctacccctggctctgccaacctctcttcatcctctcacttttcccactgggtatctcatgctgacgggcaggctggggacaaccccaggtgcctaggttcttccctgccagggccctgatgccgtgccacaagtgactggcccagccatcattgcaaccccaagccaagatgggctgttaaagaatggaaggcaggcctggggcagaagcatcctagtctggtcttgatttccccagcaagggctcctggcactgctggcggagagacccaggcccaagcatcccgccccatcaccccatgtccagccacagctcctggactggcacccagggtttgctcaactcccacagccatgctggcctcagtgccattctgggtcctccgccaagcccagaccctccgcagggagcctgtgggctagagcaacaggcagagctgggactgagcaagtagacgcagttagggtctgggaactttttgcccagaggtccttccctgggctcgctctcatatcacccctcctctgcccacacagcactgcccatgggggcctcaagggcctgaaggctctcctgagccacgagctcatgctcttggggcagatgtggcctgtgccaagctcctggttaatgggctacacagacctgttctcagaaggactcctaccctgcttccctttccctgggtcaagattctgccagggcaggcagaactggagaaacatctccannnnnnnnnnnnnnnnnntcacaggcctggtaaggctgggagatttcccactgataagatgcacccaactcccagagagaagccaggggcagaggcaccagcagaaccagcagtttccctcacctggccccatgacacatggatttgttaagcactggccttcccaccatcagcagatccatttggactaagttttccccaaataccttaaacttcagttgtagagttaaaaactccaaataaaatagctaacggcctctaggcccaaagttagggggcttggctcagtgggagcgagagcagcttggggggctgagctggaacacactcttcctgcagcctcttgccctgccttgtcaccagccccgccttccccatgcataaggctggttaccagcaggtggatcctggcccccaagagtgggtggggcctggggtgctggcatccgcctcagacccggatctggtacccgttaaggtctggcatggctttgggctcggaagtcttcttgtcacccgagggccgtctttcactgcggctgttctgcggtgggggctggactgggcccgctgcggggacg

SEQ ID NO: 431350 - DNA, 1491 bp, Homo Sapiens
  misc_feature (17)..(17): n is a, c, g, or t
  misc_feature (1349)..(1436): n is a, c, g, or t
tggagactgagggtacnggtccggacgttcgggatatcgtcgaccacgcgtcggttctggagtcttaggaggttccaacttgcaggatcctttcccagagccctccatggagaaaacagcaaaatgaagcccttacctgcttgctgtctgcaagggagggagccgagccccagctgataatcccccagcactcacccttcctgagctgagacttcggggctgtggagaccagcacaggacatagtggtgctttttaaatttatttttaactgtttctcatatgtagcaacccctcctcccctcctgggcatgtttacacaggctctgctctgggggctggcctggctgtgaggtttctggggaggcagagaggcagggactttggggccttagtcaccatccatggtatcacctcatctcacttcctgtgagggacagggcctggctgatgtgatcccagctccccccagttcaggactgtctttcagctcctttgcccctggaggtgggggctgctggctgaggaggggtcaaggtgagttcaagaaagctacctgtggaaaatggaccaggttgggggggtgattgcaaagtctccccaaagcctggctcctcatgctcagtgccaggggcagaacactggggagccaggtatagagagccttcctgtcataactgccagtcctcttcctccaaggcctctgcatattctcatgttcccctcacccatcatgccagccacccctatccctcttctagcagggccaagatggggacagcagcagccctctggccttgggatgtgatgataaagccagcctagggccagggttttggggagcagagagagcccaagaagttgacccacggtgtgatttccagcccttcccactgggacttgacttcccaggtcaaggagtccgtctcattctggctggtcgagtgaccagaggcctgtgtgaatgtgtgcacctgcttttcctgcctggaatgttttctggctcagctgcagcaacatctgtgagcccagtgtctgccctgtgtccctgggctcgctccaagtgcaggaacatacatgcagggcccaacatgatgatggtgtgaagggcaggaaacagtcctctgaaggagtggggaggtgggcagtctgcccccgccaggtaccatcgcctcctgccagcttccttagaccaggcagggctgccatggtgctagctgcaagtccatcagtattgaccgtctcgctccatcttggtcctccggagtcccaagtttccttttcatcaaatctacagtcaccagctgaacaggccaagaggacaaatgatgtttctaattcctagctgagnnnnnnnnnnnnnnnnnnnnnnnnnnnnnnnnnnnnnnnnnnnnnnnnnnnnnnnnnnnnnnnnnnnnnnnnnnnnnnnnnnnnnnnnttcaacaaaaccttcggtttcgggggaaaaggaattttttccctaaagcccccaa

SEQ ID NO: 431351 - DNA, 561 bp, Homo Sapiens
  misc_feature (458)..(458): n is a, c, g, or t
  misc_feature (516)..(516): n is a, c, g, or t
  misc_feature (528)..(528): n is a, c, g, or t
  misc_feature (538)..(538): n is a, c, g, or t
agttcgacggagactctctctacttcaggatggcaagactggcatcccctttgccagtatggggttttaagtttttttctaaggtgatcgaccagcgattaaaaatcctatttcacataagaaagtcagaattctggcctctgacaaagcagacaatctggcaacacagggccggcactgtaagaacagctgagcagctgtggcccctttaacagggtgtgccctcttcaggtagccatagtccccacacagcccttcaggcctccttctcaccgttggctcgtcatttgagcttacaaccctagttctgctcttccttgtgtagccccccagcccttctgcagccttactgacagctgtccctggcagacttacagcctctcagtaaaacaaaaccttaatggtcatctcatccatttacccttccacaatctgaatcctttctacctttctaccgnctcctgacaaacagccatctcgtctctgctgtaggtaacccattactcctcaagcagnctgatcctgaantctcccccanattcctttctcacttgcattccc

SEQ ID NO: 431352 - DNA, 915 bp, Homo Sapiens
cactgcaattttcaggagacatattcaactcctctgctcttccaaacctggtgtctatccggcagagggaggaaggcagagcaagtggagcagggcttagcaggagcagtttctggccagaagcaccagcctgctgccagcggggcagcgcctcataggaggcccaggagggagccccaaggcttagaagccttgttgaagctgtgagcaggagaagcggtgcccaccagcttccaggtctccctgacctggcctgctctatgccccacaccctacgtgccgtggctctgtgcagtgtacgtagatagctctcgcctgggtctgtgctgtttgtcgtgaaaagcttaatgggctggccaggctgtgtcaccttctccaagcaaagccatatggagcatctacccagactcccactctgcacacactcactcccacctctcaagcctccaacctcttggccagattgggctcattaatgtcgttgcctgcccatctgcatgaatgacaggcagctccccatggtggtctgcctgtgagctcttcaagttctaatccttaactccaggattagctcccaagtgcgctgagacccagccagcacacttctggcccttctccctgcctcaatctaaaagcagtgccacaccctccaaagtggaatagaaagaagttcatgagtaagggctgcaaggaattcttatccttgccacatgtcctccgtgcacacacccaatggagttaaccttggaagttgactattttaatgtctgccaggagttctaatcctgcctctgttcccttttctctccttgaaagtccagcacaccattcttgtccttccccagtttcctcgccctccacccctccagcttcatgctcagtgttgtgcttaataaaatggacatatttttctct

SEQ ID NO: 431353 - DNA, 1230 bp, Homo Sapiens
cggggtgtggggggggtttttttaacagaccacagtgaaactctctttgtccaaatggttttttaagggggtggatatagagcctcccatggaccctagacctgctgagtgggcgcgtagggggccctcttgaaaatgaaaccccttgggtgggcttgtggatttttcacataaatcccaccccaacccatgttagggaattcccacctagttctccacgggggttactaaataatttcttcaacagaaatccgtaccctgcaagtaaaagccaagaattcttctcccaagcccaccccaatggccatgtgtgcaagggttgtgttttctacgccccccattgataacccgcctttggagaaatttctttatgcgttttccaccgctttaacaaccccttttgaaaattctgttgctggttaagggcccacccttctggtactccaattctcaagcgtcccaccccccatacgaggaaatttctaggggtgtccctttgcccccaaatgactccaccaaagttgttcccaggttttttcgcgcacgtacatggcacggttggtaaacactgtccgccccaagtgccgaatgccttataaatagagggctcgggggataggggaccctccttagaacgaacgaaaccctggggtaccgcgtaagcctcggggcacattggagggatactcgcagcagcgccccgcccccggtgagcctcatccctcagtcttcccattatcctgtattgtattttgctcagtaatgatccgaaaggaagaagatgcgcaaaaagggatttcctcctcaagttttccacagttccaagagtgcttaatcagttcttttggggttttgttcttttttttattccaacaggggctgcgatgtggcaaggggagggatgggggcccaactgaccccctccctgggggaggtctcatagaaattccgaggtttctccccccaaaaaagagaggaagagaagagtggaggggcaccaggggacacccatctgtccagaggccctccccacctccagaagcgtggggggctgcgtcaagtcttggggagcctgagcagtcccagaatggggtcctctccgctgactgctttccgcttcccagagccgcccccgaagtccccagcccctggagtcctcggttcctgcgcccttctcgcccgcggcaccctctcgcgagtccactggggggcgcagatcccgggaattcc

SEQ ID NO: 431354 - DNA, 1245 bp, Homo Sapiens
  misc_feature (321)..(384): n is a, c, g, or t
gtggaccggtccggaattcccgggatcccggccccaccccgaataccccggccacgctccccgtccttggccgcccctccaccccctccaactctgctcctctagggccgccgccacctcccctgggaccccgccccctcatcctgcctccatttcccggccacgccccccaggacccctgcccctccggggacaccggccccgccctcagcccactggtcccgggccgccgcggaccctgcgcactctctggtcatcgcctgggaggaagatgccaccgccgcagcaaggtccctgcggccaccacctcctcctcctccnnnnnnnnnnnnnnnnnnnnnnnnnnnnnnnnnnnnnnnnnnnnnnnnnnnnnnnnnnnnnnnncctgctccaggctctaggactgcgcgatgagccccagggtgcccccaggctccggccggttcccccggtcatgtggcgcctgtttcgacgccgggacccccaggagaccaggtctggctcgcggcggacgtccccaggggtcaccctgcaaccgtgccacgtggaggagctgggggtcgccggaaacatcgtgcgccacatcccggaccgcggtgcgcccacccgggcctcggagcctgtctcggccgcggggcattgccctgagtggacagtcgtcttcgacctgtcggctgtggaacccgctgagcgcccgagccgggcccgcctggagctgcgtttcgcggcggcggcggcggcagccccggagggcggctgggagctgagcgtggcgcaagcgggccagggcgcgggcgcggaccccgggccggtgctgctccgccagttggtgcccgccctggggccgccagtgcgcgcggagctgctgggcgccgcttgggctcgcaacgcctcatggccgcgcagcctccgcctggcgctggcgctacgcccccgggcccctgccgcctgcgcgcgcctggccgaggcctcgctgctgctggtgaccctcgacccgcgcctgtgccaccccctggcccggccgcggcgcgacgccgaacccgtgttgggcggcggccccgggggcgcttgtcgcgcgcggcggctgtacgtgagcttccgcgaggtgggctggcaccgctgggtcatcgcgccgcgcggcttcctggccaactactgccagggtcagtgcgcgctgcccgtcgcgctgtcggggtccggggggccgccggcgctcaaccacgctgtgctgcgcgcgctcatgca

SEQ ID NO: 431355 - DNA, 1183 bp, Homo Sapiens
  misc_feature (1007)..(1037): n is a, c, g, or t
  misc_feature (1090)..(1119): n is a, c, g, or t
atggtggatggtcgcattttaggtagccgtgccgccgggggataataaaagggtgttccaatgagttgggagcttcggcgtatggcgtgtgatcgtgttgtaggtagggccacgtaatttcgcagcctagggttatgacaccaggcgtaaggcctctcgttgccatgcgttggtgaagtagtctccgcttggggcgggttatgaacctcattgtgaggggtgagaccgagtgggcacactgattgtgtgtgctggcccgacctcggatgtgtgtgagtggtctctttcagcgcaccaggttggtttccccaactgggtcgacccgtgtttgtcctccgtttccaccgccgaatgttgagctaaaggcagtgcagcactatccatcctgagcgatcttcatgatcggcatgtctgctggtaaggggggaacgcctgtcttggacaccacagaattcggcgggagcggtggctgacactttctgggtgccctcttcctatggggaatatctatttggggccgccccgcaatttttgtttgtgctttttctttttcttggtcggagcaatgattcttctaaattcctgaaattaacaaccaccaccacccgaaagagaagcatccttaaattgttctgtttttgggagtgcagagtgaggagaggcttagggcttcggccatttctgaaagggtctggaatttgccaagagcaggacggaactgagggcgcagaggctctaagggcgcaacacagagagctggctgggccaaggccagggctgttctgccattcacctgttctcagaaatggggctgagaggaacaccccggggctatcctcaaaaggagggactcccaaaccaagctcccatctggacatgtgtgagtgtgtgtacacacacacacgtgcatgctcacgtgccgtcccaggaaaacctccatgagctatgggatggtggtcagttctgtccgcagctctttctagtacaaactaaaaagattttttaannnnnnnnnnnnnnnnnnnnnnnnnnnnnnnaggttttgttatgcctctttaaagtttatttaccaacttgcatttgttagtgnnnnnnnnnnnnnnnnnnnnnnnnnnnnnnatgcgcgcgcacgcaagctgttctgtgggtgctggaatcattaccaaataggttgctatacagg

SEQ ID NO: 431356 - DNA, 2310 bp, Homo Sapiens
  misc_feature (1840)..(1840): n is a, c, g, or t
  misc_feature (1843)..(1843): n is a, c, g, or t
  misc_feature (1859)..(1859): n is a, c, g, or t
  misc_feature (1861)..(1861): n is a, c, g, or t
  misc_feature (1863)..(1869): n is a, c, g, or t
  misc_feature (1871)..(1871): n is a, c, g, or t
  misc_feature (1874)..(1874): n is a, c, g, or t
  misc_feature (1876)..(1876): n is a, c, g, or t
  misc_feature (1880)..(1880): n is a, c, g, or t
  misc_feature (2141)..(2188): n is a, c, g, or t
  misc_feature (2280)..(2280): n is a, c, g, or t
ggacgggggcaggccgtcggtgccagatgggtatgtttgttttgccaagaaaaagaaatatggatgaaatggtgagttttcctttttttaagctacaaagcacatgagaaatgttctgtttttcctttcaaattctaaatgtgaagactcaactaaaaccggattctacagcattctacagaaatacacagccgtcagtcactctggggtcgtaggttagacaggggcttgatacagaaaggctgtgtgtcttacaaaggccaaaaggtcatgctaccaggagatcaacgtcaacagcaaagagtccgtgaagcagtcaaataggttgctatacaggacaagaggtcagtacaagccgcagccccggaggttgttggcaatgatgatgtcggtgacggcgtcgaacaccacctggatgttattcgtgtctgtggcacaagtcatgtgacaatatatttctttgttgggtgagcggtttttgctttcaaattgtgcttggatgtaggcggctgcgtcttcataggtattggggcctgtgtattcaggaaagcagatggtcaaaggtgacttcttgatcttctcgccaaagagatctttcttgttgaggaagagaatgatggaggtatcgatgaagaacttgttgttacagatggagtcgaagagcatgagagactcgtgcatgcggttcgtggtttcgtcttcgtggagcacctggtcatagccgctgagcgcgacacagaaaatgatggccgtgacgtcctcgaagcaatggatccacttcttgcgttcagatcgctggcctccgacgtcaaacagcctgaagtggaggttcttgaatgtgaagtgggtttctacgatgccagtggttttgaccctggttcggaggatgtcctgctcggtgggctggtagtcggcggccccaatccgatccaggctgtccaggtagtatttggcagagtcgttgagctgatactcccgggaccggttgaagcactcttggattcctgagtcgccccagagccgcatcatggcagaaagcagctctgcagagaagggctcggtgtcttccatccgactcaccacatcacacaccatcttggcgtcagcctttctctccttatcaccatattcgatgcccaaagtgtccatggcccggacgatggctgccagggactggatagtgttgctgtagacaacaggcttgtactgtttcacgtcttctccggagaagccatcttcatggatgatcttcatctgcttcacaatggtgctttttcctgattctccagccccgagcaggagtaatttcacgtctttggcggcgctgatgccatcctctttgaggtttttctcaatcgccttgctccgctcgagggcggctctctcctctgcgctcagagtacatcccatggtggccccttccctgccacagcccgcacgactcggctggcacggctccccggcttggagcgccgcacccctccccagagagcagagcctgggctcaaggggggaaaatcacgatatcctctcctgggctggaaacaaaaatgtcgggaaaccagaaccctccaaaaagacagccgctaacaagattccagcagcggagactcgcggcagctggcaggggtctggggttgtcgaatcgagggtggccggggtctggggctccggagccaagggaggaggcgcccgcgggccgaggaggcgcggactgcaggcactgaggcttgtgcacgacccaaaataaataaaataatagtcgaggctggagccgcagccggagccgacagagggtggggtggggggcagggtgggtcctgctgccgcggctgccggnggnggaggaggcggcggcngngnnnnnnnanttngntgangctgctgcggcggcgcgggatgtggagggagtgagttagggggtgctgctagtgcatgtgcatcgccgctcttcagccgtcggtgcgtccgcggcgccttcgccgacccccgcgcgctgggcagggttgggcagggggccgggccgaggggcaggtctctagcgggaggcggcgtcgctgtctcccagagctcgcatcgctcggtgagcctaccggagagagagggagagcgccagggagccgcagccagccgggagctcnnnnnnnnnnnnnnnnnnnnnnnnnnnnnnnnnnnnnnnnnnnnnnnntgggagagcgaacaagcgcgcgcgcgcctgggcccggggcggggaggaggccagcgcagcgcgcgagtgcgccagcggctctgcgcacccgntccgcgggccgccagctgacgtcagcaggg

SEQ ID NO: 431357 - DNA, 2741 bp, Homo Sapiens
  misc_feature (31)..(31): n is a, c, g, or t
  misc_feature (175)..(184): n is a, c, g, or t
  misc_feature (241)..(253): n is a, c, g, or t
  misc_feature (485)..(485): n is a, c, g, or t
  misc_feature (493)..(493): n is a, c, g, or t
  misc_feature (516)..(516): n is a, c, g, or t
  misc_feature (583)..(583): n is a, c, g, or t
  misc_feature (812)..(848): n is a, c, g, or t
  misc_feature (1001)..(1062): n is a, c, g, or t
  misc_feature (1231)..(1256): n is a, c, g, or t
  misc_feature (1265)..(1265): n is a, c, g, or t
  misc_feature (1268)..(1268): n is a, c, g, or t
  misc_feature (1275)..(1276): n is a, c, g, or t
  misc_feature (1278)..(1286): n is a, c, g, or t
  misc_feature (1506)..(1506): n is a, c, g, or t
atgtctggtttggtatataaacagttgatcnaaccatttaaaaaaaggggaggtcccctctcgagttgcgcgtcttttgtcctggtgaggttacagtgggtcacggtggggggacccaggggtggttgtgaatcgctcccgttcttataatctaagtattatttttgtcttggtnnnnnnnnnntctcccatttgttgcggagaagaggcccccgggagaaagactggggcggccgccagnnnnnnnnnnnnngacggcccgtatttgataagctggcaccccaaatatattcctaataattggggtcctggccgggccgccctccccgttagggggggtggcgttatcgggtgctgtaacatcctcgccggggtgggggcacaaaacaaaaacaaatagtgggggcgcctccacagatgtaagtgtattatgctcagagggtagggtgatttttttcaccatccaaaaactatcactggaatgntaggggangtcttcgggttgtggagatagcnaggtattggccaaggggacctaggcggctcccataaattgggtttgcgattagaaaatggtttatanaataataatatttggtggggttgcggggcgggcaacaatttagagaggaaccgtccgttttgttttttgtgtataaaaataaagggagcggggggggaaatacaggtagaaggcgttgtgtgaggccgcctattaggcgggatgtaaatatggagagaaaagcgcagcccccccgttggttatttgctttttgttagtgtatttgttgaaatgtggtgggagtgattannnnnnnnnnnnnnnnnnnnnnnnnnnnnnnnnnnnnttgttgggcaaggcagacatttcttatagtgtggaggctacgcagggaatttttcccaataggcagaagaagtagggcttttcattttttaagatttcacagaaaaccctcgcagattgggaatagaaaggggttacaaaggcccggggggannnnnnnnnnnnnnnnnnnnnnnnnnnnnnnnnnnnnnnnnnnnnnnnnnnnnnnnnnnnnnatttgcctcctctttatttgaaatggctgtgactggtcttcttcagcaaagattaagtcttaaaagtgaaaccgtgaagaggtttagggtttgggtattagtcaaagtagaaatgacataggattggtcatgaaaacggcggctttaatgtaaacactacattccatcnnnnnnnnnnnnnnnnnnnnnnnnnnccatcttgnggnatttaannannnnnnnnngttctttttgtctgcagcacaaacatccccacatgagagagcggacacagggcaccgaaacaaaggcaggggtggggaggggcgcacacacgaagggaggtgtcagccgggaccggaaatccaacacggcaaaggaaaaaaaacacaacccgtttcccaaagactaggaaaactgatctgtggggtggggggctggtaatacatagtactcggcgggacncaaagttaaacacccaaactgcaaaaaacaaaaggaaccaaaaacccctacaaaggctatccttagaaagggggtcggtgggcagattgttttctatggggctggatttccttatacgatgggtgttctttttggcagctactggccagtgagagctgtgctttttctatacgaacctggagtgagcgtgtggcgggagtggcttagggccgccaggtggcgtctgtggtgtctgggcggccggcaggcagcagggtttgcagtggcctgtggccttctggaaagcccggcctgagcacactcctcggaccagtgcaccgcaccggagccccaggcggcagatgggccctgccccccagcaggagctccaggggctgcgccgcgaggtgggacgggggcaggcgtcggtgcagatgggtatgtttgttttgcaagaaaaagaaatatggatgaaatggtgagttttcctttttttaagctacaaagcacatgagaaatgttctgtttttcctttcaaattctaaatgtgaagactcaactaaaaccggattctacagcattctacagaaatacacagccgtcagtcactctggggtcgtaggttagacaggggcttgatacagaaaggctgtgtgtcttacaaaggccaaaaggtcatgctaccaggagatcaacgtcaacagcaaagagtccgtgaagcagtctgtagagagagagataaggggtccagtctgaccattttctttgattttaaaagccaaccaaccatccaaaaaaccctagaacattttgactactgctggggttgggcgagatggggcagcagcacgaggggtcaggaaccccattgaagcccatcccgggcacctggggaagcctggccccccccatgagaccctgactcagggtcaggcccacaagtccggccctccccgccacgcctgttcccctcgctccccaccttcccacatgccctcttggagcggggctggtttcaactctgcaggtgaacttgagtcccctcctgtcagctgcttttagaaagcagaccaagtctccctgttctctgattcttgccatcttaacatgaataaagaaaactcaggagacagtggattggtcggagcaatgattcttctaaattcctgaaattaacaaccaccaccacccgaaagagaagcatccttaaattgttctgtttttgggagtgcagagtgaggagaggcttagggctt

SEQ ID NO: 431358 - DNA, 480 bp, Homo Sapiens
  misc_feature (275)..(275): n is a, c, g, or t
  misc_feature (398)..(428): n is a, c, g, or t
tgttcctgtttttgggaaatgccaaaatgaaggaaaagccttagggcttcggccccattcctgaaaagggtcctggaatttgccccaagaccaggacggaactgagggcgcagaggctcctaagggcgcaaacacagaagaagcctggcctgggccaaggccagggctgttctgcccattcacctgttcctcagaaatggggctgagaggaacaccccggggctatcctcaaaaggagggactcccaaaccaagctcccatctggacatgtgtgnaggtgtgtacacacacacacgtgcatgctcacgtgccgtcccaggaaaacctccatgagctatgggatggtggtcagttctgtccgcagctctttctagtacaaactaaaaagattttttaannnnnnnnnnnnnnnnnnnnnnnnnnnnnnnaggttttgttatgcctctttaaagtttatttaccaacttgcatttgttagtg

SEQ ID NO: 431359 - DNA, 442 bp, Homo Sapiens
  misc_feature (414)..(414): n is a, c, g, or t
ttttttttaagctacaaagcacatgagaaatgttctgtttttcctttcaaattctaaatgtgaagactcaactaaaaccggattctacagcattctacagaaatacacagccgtcagtcactctggggtcgtaggttagacaggggcttgatacagaaaggctgtgtgtcttacaaaggccaaaaggtcatgctaccagggagatcaacgtcaacagcaaagagtccgtgaagcagtctgtagagagagagataaggggtccagtctgaccattttctttgattttaaaaaccaaccaaccaaccaaaaaaccctaggaacattttgactactgctgggggttggggcgagatggggggcaggcagcaccgagggggttcagggaaccccatttgaaggcccttcccgggcacnggggggaaggctgggggccccccctttg

SEQ ID NO: 431360 - DNA, 498 bp, Homo Sapiens
  misc_feature (132)..(197): n is a, c, g, or t
  misc_feature (362)..(386): n is a, c, g, or t
  misc_feature (390)..(390): n is a, c, g, or t
  misc_feature (413)..(413): n is a, c, g, or t
acagacaaacattctcttttattgagctacacaggaattttccattagtcagagaagtagactggcagtgtgtaagatatcacagaaacctcaccgattgggaatagaaaggcttacaaagacccgtgggcnnnnnnnnnnnnnnnnnnnnnnnnnnnnnnnnnnnnnnnnnnnnnnnnnnnnnnnnnnnnnnnnnngcctcctctttatttgaaatggctgtgactggtcttcttcagcaaagattaagtcttaaaagtgaaaccgtgaagaggtttagggtttgggtattagtcaaagtagaaatgacataggattggtcatgaaaacggcggctttaatgtaaacactacattccatcnnnnnnnnnnnnnnnnnnnnnnnnnccancttgtggtatttaaaaatttttntttgttccttttgtctgcagcacaaacatccccacatgagagagcggacacagggcaccgaaacaaaggcacggggtggggaagg

SEQ ID NO: 431361 - DNA, 1268 bp, Homo Sapiens
  misc_feature (291)..(360): n is a, c, g, or t
agtgtgtgcaggaggtggaggagaagaagcgggagcaggaactcaaagcagccgctgatggcgtactatctgaagtgaggaaaaaacaagcagataccaaaagaatggtggacattctacgggctttggagaaattgaggaaactgaggaaagaggctgcagcgaggaaaggggtctgtcctccagcctcagcagatgagacttttacgcatcatcttcagcgactgagaaaactcattaaaaagcgctctgaactgtatgaagctgaagagagagccctcagagttatgnnnnnnnnnnnnnnnnnnnnnnnnnnnnnnnnnnnnnnnnnnnnnnnnnnnnnnnnnnnnnnnnnnnnnnttttacttcagaaacgtgaaattgagtccaagttgtttggggatccagatgagttcccacttgctcacctcttggagcctttccgacagtattatctccaagccgagcactccctgccagcgctcatccagatcaggcatgattgggatcagtacctggtgccatccgatcatcccaaaggcaacttcgttccccaaggatgggtccttcccccgctccccagcaacgacatctgggcaactgctgttaagctgcattagtaaagatgctccaggagtgtggtccagccagcgctctttccagctgtaaatattagcgatggtgccatcttttgctgtagactaaactgcaacttctaaattccatgtggcattcccctaccctgaagttatgctttccttctgtgctctgtgctggccagaggtgcctcttgaatcagattaatgtggtttttcaggaaaggacttaggtgaactgaggtttttaccacaggcagtgaatgaccttggttcaccaaatttgcctctgttttgaggggcttggtccagagtgacttgttaatttactctaacttccttgtgtgttgatgggtaagtacactcaaacactgaatacaggtgtgtgatgggtagatttcacagcccttctactaatagtgagtgtgaaggcaagcttgatgcaaaacctcctgacctttcctacctgaagagccctttgacttctaggaagaaaggtcaaaaatgttatcttcagttgtgttaatcccagttttagtgcagcttaggaggctgctagttaggaagatggcagtggctgtaggctgggttgccagaaaagatggtggcctagtcttattattcagatggagaacttagaaaacctgaagagtacctcggccgcgaccacgc

SEQ ID NO: 431362 - DNA, 378 bp, Homo Sapiens
gcttcttttctaattctcttttcctctcttcctcttgttctccttctagcataactctgagggctctctcttcagcttcatacagttcagagcgctttttaatgagttttctcagtcgctgaagatgatgcgtaaaagtctcatctgctgaggctggaggacagacccctttcctcgctgcagcctctttcctcagtttcctcaatttctccaaagcccgtagaatgtccaccattcttttggtatctgcttgttttttcctcacttcagatagtacgccatcagcggctgctttgagttcctgctcccgcttcttctcctccacctcctgcacacacttcaccctccagcggtcaatctcctgctcgcgttccactg

SEQ ID NO: 431363 - DNA, 2041 bp, Homo Sapiens
ttttttttgagtcgtctttgcattcttttatttgtgttttatctacacccaaggcgaatctgatgggttctcccttccaaacagggtggggggtctgacgctcctctgcctggctacagccccggatgtgttaaatgtctgcatctcgcacctcccgttccaaaaaacgtcacggagctctgagccactgcttccctgaaaccatcgttcccacgtcaccgatggcccccaccggccaaatcagagggcctggctggtcggcaccttccagggccttccacaacctcctgccccggctcctgctcaaacactcctcacgttgcctatgagacactgcacacccgactctgcttgttacccagtttggcctccgttcatccctggcccagacaccccctgcctgccccaggcctggggcttcggacaccatctggctgtcacccagggctggtgaggctcgtgggctatctccttccccaggactcccacctgggctggactgagtctgagctcccagccccagctcctgtttggccgggcagtgggctcccctgtcagactcagaggccaggatgtctcggcccagatggagcctgggttctctctgtggcccttggcgttccttcctccccagccccactgccaccagctccagtggcgacatgggtcagaggtcgtcatccaggctggccagcaactactcctcaccacccacagggccctggctcgccactcccgccacgccagccactaggcctggccctcagtgtccctaccgctgagaccctgcctgtcgccctgcctgcccctccccagcctctccctccccttcctcactgtcctgtccttcagggtactggccacatcgtccacgcctttattgcagtctctgttttggagtaggcttggggggcagcatccgcgtcggcctcatctgctgctgggtcttgggggcctgcccacgaacacgcttggacgggtgacactaaaggagggaacgcggggtgcgggcccctccacactcactcggctttgctgggcttcaggctctgggcctcggctgtgtcatactcccgcaggtccttcagctcgtgcacctggcctgtcaacaccttggctgcaaacgccacgatgtacaggaaccagtagaggttcataagggtgagcagcagcaggagcgcattgaagaagaagtagaaggggatgtcaggcaccgtgcgcagactgcagtgactggtggcatacaggaccttgagcgggaaccagtagaggcggaaccagaaccagctgaagccgaagctgaggcagcccaagtctgctgccaaggcatgcagccgatggtaggagccgccgcgggacttgaagtaaatgttgagcttggtgaactcaagctgcacgtcactgatatcgtgcaggaagagcacaaggatgcccacattgtggtaccggaaggcgtaggaggagacgatgaggatgagagtgaccacgtggtggagcagcatgaccaccgagtccttgcgccaggtgtccatgtatagcgtagcgtagatggagtggccatagaagcttccctggagcaggtaggcggctgcaatgtcccgtggcactgccatgcccggcgtccagtcgtagaagacagatggtgggtcatggaagaaggggtagtcggtgccaaacagcaggtaggcactgtagctccagctgcccaggtagaagagaaacttccaagcgctctcgggcatcttggcggcatctctgggctggaggcagcaccgcttcgccaggggccgaaagaggcgcgcagtggccgcggagcgcagggcggtccagcccagcgcgccgagcgccagcagcagcagctcgggcggcgccaggtgcgcgtgctcagccaggccgcgacgcgccagcccccagccgcagtccgtgcagccccgcgccgccgccagcgcgctgccccagccgcgctgcactagctgcgcgtagctcggcatgggctcgggccccgtcggccccgccgcgggccccgccgccgccataccgc

SEQ ID NO: 431364 - DNA, 1596 bp, Homo Sapiens
  misc_feature (806)..(858): n is a, c, g, or t
  misc_feature (1028)..(1118): n is a, c, g, or t
  misc_feature (1232)..(1240): n is a, c, g, or t
  misc_feature (1353)..(1395): n is a, c, g, or t
  misc_feature (1470)..(1489): n is a, c, g, or t
  misc_feature (1558)..(1558): n is a, c, g, or t
tcacatcccgctggtaccggtccggaatttccgaattgggcatccttgtgctcttcttgcacgatatcagtgacgtgctgcttgagttcaccaagctcaacatttacttcaagtcccgcggcggctcctaccatcggctgcatgccttggcagcagacttgggctgcctcagcttcggcttcagctggttctggttccgcctctactggttcccgctcaaggtcctgtatgccaccagtcactgcagtctgcgcacggtgcctgacatccccttctacttcttcttcaatgcgctcctgctgctgctcacccttatgaacctctactggttcctgtacatcgtggcgtttgcagccaaggtgttgacaggccaggtgcacgagctgaaggacctgcgggagtatgacacagccgaggcccagagcctgaagcccagcaaagccgagaagccactgaggaacggcctggtgaaggacaagcgcttctgaacccttcggccccgcccccgtggacccggccccacccctcatactccggccaccttccccgacctcggtcgcctcctcaccccatacaactccgattcccctagcccctccgcgaacccccactgggtaccgcgaacccctcacttctgccttccattcgcacggacaaatcccccccaggcacccacgcatcccctagagaaaacccgagacccccgcatcttacccgcccccatgtcgcctcgggatataccgcccatccctccccccgcatccgcattttaggcccatatcgtgatagccgccccgcgccttatnnnnnnnnnnnnnnnnnnnnnnnnnnnnnnnnnnnnnnnnnnnnnnnnnnnnntatctcatactatactcgccgccttaactcccggtcaccgccggccctaattattcccatcagcgcgcacacaccgcgtccataatcgccgcgcccctatttatattccccccgcccatggtaatcccgcggacacctcgtgccccgcgtaagacgaggataaatccgcnnnnnnnnnnnnnnnnnnnnnnnnnnnnnnnnnnnnnnnnnnnnnnnnnnnnnnnnnnnnnnnnnnnnnnnnnnnnnnnnnnnnnnnnnnnaccggttgtttgcgagtttgcccaccgcgctttatcccccgcccactacggggtacgatacaccacatccccgccgccaaaatgaaggagtgaccccatctgaccaaatcacgnnnnnnnnntgttacggccagtaaaaacaccacccccactgcatgtgggtaggccgcaacatcgcagccccgcctttttgatcccgcacccgtattttagaggggcgcagacgacctccgannnnnnnnnnnnnnnnnnnnnnnnnnnnnnnnnnnnnnnnnnngcgggtattctattactatacccccccgtgcccgttgcccttgccattactcccccgcattaaattcatggtaannnnnnnnnnnnnnnnnnnntctctcttttttttttttgacccttagcggccccccgaccgtatgatgacccgtctttagcccccacgngccgcgagatgttttacccagccccgctccttcctttg

SEQ ID NO: 431365 - DNA, 1086 bp, Homo Sapiens
  misc_feature (258)..(276): n is a, c, g, or t
  misc_feature (295)..(525): n is a, c, g, or t
  misc_feature (797)..(797): n is a, c, g, or t
  misc_feature (927)..(927): n is a, c, g, or t
ctaattctttatttttgatgttgtgggaattaacacatcaatggtggttatgggaactaccaatgggttcctacaatttttatcagtagtatgtggcatatacaccttcctagtggcagttgccaatgttaatgattattctttttattgcaagtatttcctatgatccttccacactttatttccttaataataataaactttttcagaaagaattgagtagagcaaaaatgacaaagatgtgtagctgtgttcaannnnnnnnnnnnnnnnnnngaggcagagtcttgctctnnnnnnnnnnnnnnnnnnnnnnnnnnnnnnnnnnnnnnnnnnnnnnnnnnnnnnnnnnnnnnnnnnnnnnnnnnnnnnnnnnnnnnnnnnnnnnnnnnnnnnnnnnnnnnnnnnnnnnnnnnnnnnnnnnnnnnnnnnnnnnnnnnnnnnnnnnnnnnnnnnnnnnnnnnnnnnnnnnnnnnnnnnnnnnnnnnnnnnnnnnnnnnnnnnnnnnnnnnnnnnnnnnnnnnngtgtgagccactgcacccggcctgaaatttttttaaggtgaaaatgttttgacaagttcctttttcagaataggtttttgagcagaactctttcagcttgttagacccaactttgcttttgtttagcttcacagcatagctgaaagttgccaaactggacattgtgcaataaagtagaattctatattgataagcaaactatttccaaactaaaaatgtgatagataaaagtgtgattaatcaaatgatatgatcagagtaaagaattttgnccattttgatccttttactttgttttagccaccctatagtgttaccaaccatctttatccttgtctgcagggataataatgaactaatgtagtgttttaagataatttaatgatactatctttccaaacntttgttagattttaaatgtattattgacctgagaccttaatgacaaatcactgctattagacaattgaagtgttcatttactttgtaattccaataatcatagttatggaattatggtaaggttttgcttttctgtcctaataatatatatattttgag

SEQ ID NO: 431366 - DNA, 498 bp, Homo Sapiens
  misc_feature (297)..(387): n is a, c, g, or t
tttttttcagtatatgaaaattcatttatttagtgaaaccctgacattaaagcgtcccaacacaaagcagattcgaacataacaactggtgattggctcatctcacaggctcacatcatcagtgtgttaacatacaataggactgtacccttttacaggattgagtgttttggatcccactcacacactaaaaccctgccataaagttgtatcaattagggctgttcaaatgtgaaactgtattggaaaatgggaaactttatctccttatatatgtatattttttgagatggcgtnnnnnnnnnnnnnnnnnnnnnnnnnnnnnnnnnnnnnnnnnnnnnnnnnnnnnnnnnnnnnnnnnnnnnnnnnnnnnnnnnnnnnnnnnnngtcaataatacatttaaaatctaacaaagtttggaaagatagtatcattaaattatcttaaaacactacattagttcattattatccctgcagacaaggataaagatgggt

SEQ ID NO: 431367 - DNA, 649 bp, Homo Sapiens
ttttgcttttgcttttttgcaaaactaattctttcactttcctgtcataaaatcacctctgaaaacacaacttctttacaaaaaagtcacgaatgacacgaactctcaggaaaacacatttctatggtctctggaaacacctgtaactggcacccaggtggtcactcacctgggggagggggtcagggggaaatcacctccaaggacagaggagaaataccagcccttatttgggcgaaaagccaattggcacttggacggccacaaagccaacacacagggcagggtagggaggggccgaggagtatcagcccccgccccaaccctgcgagggtccccgttctacatcccggggaggggagggctagggccacgctgtgggccctggcagggagattgggaaggaaggcagcctcccattcttaggaccaaaggcgctagggttctgatcggcctcctgccaacgtgcttctgagggaggggcccatggcagcacagccaggaagccagctccagccacgcctggaacacgccacccacgcacaatggagacccgggaagtggcccagggctggccagcggggccccggtcccaattctgggaccaacaccctcattctcctggagaacacagaccctctggtctccc

SEQ ID NO: 431368 - DNA, 1800 bp, Homo Sapiens
tttttttcatccgggctacaaaggtcatctgtgcaaaaataaaattaaatgcaatatgattagagcatcgtccaaggtaatagctttcccatggaaagaactaatttcttatgtacaggatgtattacatgctcaacaaggtacagctgatacacacaaacaagcacaaacaccttcgctttaattgggctcattctatacgtctttaaaacagagatactgaactcctctgcacttctatggtaagggggaaaagccccaaactgcacaatttagttggtaacactggacaaaatgaaaaaatacatcaagtctcagatttatggacatttggaacaatttttaatagcacatgcagcattccttgatagtgggtctttttgcaaaaccaaaatagcaaagaagtcatttatttattttgtttattaaaaagctaaaatatatatttaaaaataattttaaaactattgaaagcacctgtgcaaaggtgggggaaagtcaatttgagtaactaggaaagccacaaaaggactttcaagcctgagggggggatggacaacatatgattcattgctggcttgggtccatgtctgtggtcagcttcacataattggatgggaagagccccacttgtccattgacttctcctttccaccagtcagggtcctccttgttgaggacgttgatgatctggccccttgttgaaggccagctcatcgtcattctgcgcggtgtagtcgtacatcccaatcacctggcacactgccgctaatgctgttgacttaggtggctctgttggagtgattttgctcgtcccagggcttagaagctttacataattagctgggaaccagcctatctggcgctttttcccacgtgcttgcagctctccttcccaccatccacctgggttcttttttcggatcaaaatcagctgaccaggggcgagagtgagctgctcggggccggtggcggtgtatgaggcaataacctgggcaatttcaggtttttttcctaaactccctgttttcccagcagttccagagccctctgaatctttaagcctcacatagttagaagggaagactccggccttgtcgcccactgttcctgtccaccagtcaccatctttcttggtaaccaaaatcacatccccttgctgaaaggttaaatctccttgctcagaactctcgtaagtgtacatggcaataaattcttctcccgaaacgaccggcttggctgctggagaggctactcgctttagactagcaggactctctgaagaaccagaatccatgcttgtagacttccttatgggccctgaaatgagtttcacgtaagacttggggaaccaacccttctgaccttgaacttctccaaaccaccacatgtcttgctgttccaggacggtgatgacatcatttttgttaaaatttaagtggttgtcttttttggctctccaaggatatagggcttgagcttgtagcccctccaccttttcaccctggcctagcacaggagacggggaggagccagtggccgtggctggagtaaaggcggacctctgccttaactggccggcacttggaacggtgagagagggctgggctgcccatgcatcccagttatccgtttctggtttctcattcgtgctggtgggccacgtggagctgaagtcggcccagttattaggggtcgtggagggctctgaagaggttactgccaaaggggcgggggtctcacgcaaggccagtttgggggcaggggcagatgttgaatcagtcactggtttcactggag

SEQ ID NO: 431369 - DNA, 646 bp, Homo Sapiens
gacatttggaacaatttttaatagcacatgcagcattccttgatagtgggtctttttgcaaaaccaaaatagcaaagaagtcatttatttattttgtttattaaaaagctaaaatatatatttaaaaataattttaaaactattgaaagcacctgtgcaaaggtgggggaaagtcaatttgagtaactaggaaagccacaaaaggacccactaccctgtgtgtttttgtaatttttgctcctatctctgcaagtaataactcaaacattgcgatcacatgcaactaaggtaaaatgaggtaaactgctctgcagtgagttcttctactcagaaggcagtaggtgatcatgctggaagtcacatgatcaaggctgcatctcccatcatccctctgggcagtgatatgggatagtgggtctctttgaggactttcaagcctgagggggggatggacaacatatgattcattgctggcttgggtccatgtctgtggtcagcttcacataattggatgggaagagccccacttgtccattgacttctcctttccaccagtcagggtcctccttgttgaggacgttgatgatctggcccttgttgaaggccagctcatcgtcattctgcgcggtgtagtcgtacatccccc

SEQ ID NO: 431370 - DNA, 1342 bp, Homo Sapiens
  misc_feature (161)..(215): n is a, c, g, or t
tcattttaccttagttgcatgtgatcgcaatgtttgagttattacttgcagagataggagcaaaaattacaaaaacacacagggtagtgggtccttttgtggctttcctagttactcaaattgactttcccccacctttgcacaggtgctttcaatagttnnnnnnnnnnnnnnnnnnnnnnnnnnnnnnnnnnnnnnnnnnnnnnnnnnnnnnngacttctttgctattttggttttgcaaaaagacccactatcaaggaatgctgcatgtgctattaaaaattgttccaaatgtccataaatctgagacttgatgtattttttcattttgtccagtgttaccaactaaattgtgcagtttggggcttttcccccttaccatagaagtgcagaggagttcagtatctctgttttaaagacgtatagaatgagcccaattaaagcgaaggtgtttgtgcttgtttgtgtgtatcagctgtaccttgttgagcatgtaatacatcctgtacataagaaattagttctttccatggcaaagctattaccttgtacgatgctctaatcatattgcatttaattttattttgcacagtgaccttgtagccacatgagaaagcactctgtgtttttgttcggtctcagatttatctggttgagttggtgttttgtttggggtttttaattttgcgtgtttgcatagcataaaatcagtagacaacaccactgaggtcgttacgatcaacgatatccacagtctctttttagtctctgttacatgaagttttattccagttacttttcatggaatgacctattttgaacaagtaattttcttgacaagaaagaatgtatagaagtctccctgcaattaatttccaatgtttacattttttaactagactgtggaatttctacagattaatatgaaatggagctcatggtccgtttgtgtgttagatatgctgtagctgaagccctgtttgtcttttaaacactagttggaagctctcaataaaaatgcctgctgctcacagcacagaaaatggggcagggggagcctcaagcacaatctagctgtcctcctaaagactctgtaatgctcactcccctcgcgttctcccggcgctgtcgggaggctgtgctggtggtcgtgtagaggtccttctcctttcacatggtgcagagagcgaggacctctcctcctcgttcagttgcacttcagtattttcacggatatgaatgtaaaatatataaatatataaacctgcggctttaacaactgtaatacaaccttttgaattagttccgtgtatagataattaaattcttcatacaaaagtt

SEQ ID NO: 431371 - DNA, 300 bp, Homo Sapiens
ataattaagctgggaaccagcctatctggcgctttttcccacgtgcttgcagctctccttcccaccatccacctgggttcttttttcggattaaaatcagctgaccaggggcgagagtgagctgctcggggccggtggcggtgtatgaggcaataacctgggcaatttcttctcccgaaacgaccggcttggctgctggagaggctactcgctttagactagcaggactctcttaagaaccagaatccatgcttgtagacttccttatgggcccttaaattgagtttacgtaatacttgg

SEQ ID NO: 431372 - DNA, 613 bp, Homo Sapiens
acccatcccagcaattggaatttgagttctggctagccccaccactgaggcctaaagcactctggggtcctaaataaacttgaaaggcagtctaggctacaaggactgcaagtcttgatcaagttctggtgctgtgctgggcttggagccagtggatttggggtgcacatgacacaatgagacaactgccagggtggccaaaggaatgcttgcatcactactcccccaatcccaggcagtgcagctcccagctctaggagggaatccctcttttggcttgaggagaggagagggaagagtaaagaggatattgtcttataacttggatatcagctcagccacagtagagtagggcaccagggagagtccttaggcccccattccaggccctagctcctggatgacattgttagatacaccctgggccagaaggaaactcatttccttgaagagaaggacctggtcctgacaggattaatcatttactgactaaacagtccttatgccttgagtaaacatcagtggtacccaggaaatacttaccatgggcttcaggccttgggtgaaacccagggccttgttcacttcagatgtgaccagtgcattcccagat

SEQ ID NO: 431373 - DNA, 1646 bp, Homo Sapiens
  misc_feature (891)..(919): n is a, c, g, or t
  misc_feature (1600)..(1600): n is a, c, g, or t
ggctgatgagggtgcacgttcggagaagtctgtatgtgtttcatggcatattctgccacagcaacaaaacaaccaaatcagcagtagatttgactgtacccttcgatttcaaagaagtctgcgcccctcgcccactcgccacctacacttcatgcaggaaagatagatcactatcatcctatttgaatacagggcctcagaagaggtgggctggtatgggtacaaacagcgtattttataacaaaacactttttgaaaagatttatataactttaagtattaaaatgaatgctttacctctacatatgtatcactgtacagtcttgcacccacacgattatggtcatatttgaaagcgaactcaagcacaaacactgaatccaaaaggcagttttaagggagatccaaccttacccacagcgccaaccattccactctgagcctctctccttgagtcaataatctgaatgtcaagttgaaaggaacagaaagaatcaaatattcagaccaaattaatcaggcaccacacactatttagcgcacagggtatcaattaaatgatactagaaaaaaaatgtctactgcctgaggtattcattttttaaaagtcaataaactgaaaatttcaaaggagaaagtggtatgaagacgttccttcccaatccctcttcaaataaatcattaaatacactgggcaacattatactgtcatttttatcataacaatataaacaatttttatcatcatcctgaatattactttataaagatatatattttaaaaggctttcaaaacatttttcaacccagcatttgagaataaagcattaagagttttgtatacagtaacacattcatgtgataagtgtatgaatttacaaccatacatannnnnnnnnnnnnnnnnnnnnnnnnnnnnaaaaacaaacttggccagaagttaaggctacctacgaagttgtccaagtaaattatgcttgtcaaaacaattataaaattcaaatcacacatgcatttttaaatcatctaaatcactgacaaacaaggttcagcatccaaagttttcaaattaactgcaagaaagtgctacagacatttacattttctaaatatgaatcagtgttcccacaaagttacatttaaatttttcaccagcctcaaaagtaatataactgaaaacaaactttcacaatttggtacctagcactcttaagagagaataggttgaaaatggcaggcagcaagcatcattcacaaatgtgctgtctcagacagcaaagtacagtttataatactgtctgacctgacacgtggttgaaattctaagcctcataagggactaggagtgaacatttcattaataattacacacaccagcaaccacatgataaaggcttcaggcttttcccactcaaatcaaagtgaatgatttaaacatggaacaaaataaaaccaagacataagtagcctcatttcaaaataaggaaaagtaatttctgacgtgcctaaatatttaatttaaacttttaaaaaagtattctgaactaatgcctcttttaagattaatttctgaagatatatttataaatataactcacanctgcaggcctctgacagagttttaaacagaattagctaagatggcc

SEQ ID NO: 431374 - DNA, 1514 bp, Homo Sapiens
  misc_feature (676)..(685): n is a, c, g, or t
  misc_feature (742)..(742): n is a, c, g, or t
  misc_feature (1295)..(1295): n is a, c, g, or t
  misc_feature (1496)..(1496): n is a, c, g, or t
tttaggtttaaagacatttattcaactgacacttgtctttagtagccagcccatctcttctttgggtggtgtctctagccgagaatggcacctcagtctccagactgcccagggttctcccctcaccgcacagccatttaatcaccaaatagattgggcagtccatttaatgcaaagattctctgacatgtgtgtccagatgttcagacggaagcagagattccagctgccactccccagccctttctctatcactgtttaggacctgtgatgtcccacagcacagagctgggaccactgctttcaggtgtgatcctatctttttaaaatttttaatcagcgaattttaagaaacatagaacttgtaagccccagaagacagaacctctaatgatgacatttcagccctgcgccagataggggtagaagggatacttttgtgaatgagaaaacattcagattctcaaaaatccacactctgtgagttattatttgctttacctactcatggtggttaagaaagcagcaacaggtaataccttcagattcataaagtcacaggcagtctggttcatttaaacttgacatgtagaatggattagaaaccactttgatctggtcagcctgaggccacatggttgtatattaaatcttttgtctcaaggaccaagggcannnnnnnnnnccgttgagaaaagtacagtccactcagaggtgctaaaataaatcccacatttttttntcattattttctggaatagtgtttgaatgatgggcaaaccctcaagtggagaatttgctttcacacacgtagcagcttcaactgctgagatcatgttgttcagcacccattctaatccacatggaaaggggcacgggggtgttgtgggtggggaggggtggtgcagctctgggccccaggggtcttgggagtgatccatttctggatgtctgcattgtgtggggtcccgtcattcactctgtcacttgctctgacttgagttcgctctccagatcgatttcattttttttacaggtgggaatcttgttactccacgtcccatccttcagacactcaatctggaatgtgtccatctccacattatccttcagcactttgtagcctgtgtcacagctgacgagcacttggtctttgaagaaatacttggcttgggagggctcgattttcccatggacaggaggctgtagctctgggcactcatttcctgcagccctgtatgagagcctccagccccggttctctcccgagttgtcactatggaacaggatcaggnacactgtggctctgggtgctgatgggttctggggctttctctccacataaatgccccaaaacttttggaccaactttgatcttgatgtagtcataggggcagggcacctcaggatggtcctcaatgtcaaatatgtcctcaaactgcaggttgaccatgaaaccctcctccagctcgatggtatacaggcattcagagctnctggggtaagggtttggg

SEQ ID NO: 431375 - DNA, 1335 bp, Homo Sapiens
  misc_feature (1191)..(1239): n is a, c, g, or t
cccgccagagacctttctaaaatgcagattcacgactctcctcctcaagccaccctagtggccagtggggtcatttcggatcagagattcctggaatagatctaactaagatggtagatattattttaaataatgcctttttgaggaactagctgctaggctctctatcctgggagaagaaggtgaaggttccgcaatatcaattttcccaactcagccaagattttcccagcatctccaggacaagtgttcattgcaggctcaccttgatgtagtcataggggcagggcacctcaggatggtcctcaatgtcaaatatgtcctcaaactgcaggttgaccatgaaaccctcctccagctcgatggtatacaggcattcagagctcttggggtaagggtttgggaagtcagggctgtgatcaccccagtcctttgagtgaagaggttgtcactgcactccactcggcaggtcctgttgtcttgtgtggaggatgtagccgaagcggcaggagcagtagtagccgccaatgtagttgtggcagtagtggtcacaggacagctcctcgtcctcccgtctccttgcactcgtccacatccacagccatgtagtgggcatcaaagcctgtgaaacgctcctcattggagaaatctgaccggaaagtgatggacatgaaggagccaggggagaggaccacctcctggccgggagtctgctctgtgtctgtggtctccctgccacagaaggttgccagcacctggtcctcagtttctaccttcacatagtcatattcacaaaggtaggaggattccaagttgaagtgcatgaagtaaagcttgatccgaaacccatctgggacagtgatattccaagtcacctctgaatcactgggataggagtctggataaccaggcgactggatctggccaaacatattgtttagctccacggtgtgggctgaagcctttgacagggagaagcacagagcataatagagaagcagccacctcattttcctgccttgggtgctcccggctgcccggccttggtcctcccagcttgacttgcctgtgagctcgtgcccggtgtggtgtccgtgatgccttatctttgttctgaggtccctgtgtgtctctggaattggctggcattctccattcaggtcacgccttcccctgcctgcaacagatccnnnnnnnnnnnnnnnnnnnnnnnnnnnnnnnnnnnnnnnnnnnnnnnnnttgacttgctcttgcactcccaggaacctgacaacaaaatctgtcttcctaccgaaaagatctgctccttcccttccctcctttatcccgtgcggc

SEQ ID NO: 431376 - DNA, 875 bp, Homo Sapiens
  misc_feature (16)..(16): n is a, c, g, or t
  misc_feature (31)..(31): n is a, c, g, or t
  misc_feature (36)..(36): n is a, c, g, or t
  misc_feature (84)..(84): n is a, c, g, or t
  misc_feature (142)..(142): n is a, c, g, or t
  misc_feature (718)..(770): n is a, c, g, or t
accaactttgaacttnatgtaatcaataggncaggncacctcaggatggtccctcaatgttcaaaatatgtccctcaaaactgncaggttgacccatgaaaaccctccctcccagctcgatggtaatacaggcattcaaaanctccttggggttaagggtttgggaaagtccagggctggtgatcaccccagtcctttgagtgaagaggttgtcactgcactccactcggcaggtcctgttgtctgtgtggaggatgttaccgaagcggcaggagcagtagtagccgccaatgtagttgtggcagtagtggtcacaggacagctcctcgtcctccctctccttgcactcgtccacatccacagccatgtagtgggcatcaaagcctgtgaaacgctcctcattggagaaatctgaccggaaagtgatggacatgaaggagccaggggagaggaccacctcctggccgggagtctgctctgtgtctgtggtctccctgccacagaaggttgccagcacctggtcctcagtttctacctcattttcctgccttgggtgctcccggctgcccggccttggtcctcccagcttgacttgcctgtgagctcgtgcccggtgtggtgtccgtgatgccttatctttgttctgaggtccctgtgtgtctctggaattggctggcattctccattcaggtcacgccttcccctgcctgcaacagannnnnnnnnnnnnnnnnnnnnnnnnnnnnnnnnnnnnnnnnnnnnnnnnnnnntgacttgctcttgcactcccaggaacctgacaacaaaatctgtcttcctaccgaaaagatctgctccttcccttccctcctttatcctgtgtggctgacttcagc

SEQ ID NO: 431377 - DNA, 1786 bp, Homo Sapiens
  misc_feature (53)..(62): n is a, c, g, or t
  misc_feature (199)..(255): n is a, c, g, or t
  misc_feature (259)..(342): n is a, c, g, or t
  misc_feature (1774)..(1774): n is a, c, g, or t
ctcccttgagggcttaataatttcttggggggaatgtttccccaaatttttgnnnnnnnnnngagaaaaagggttttctccccaaaaatttccccaagggggggtgttttcccacccccggggtttttaaaaaaggggggccggggccagtttttaaaaaagggccccccatagggggccccttttttaaaaaaaaatnnnnnnnnnnnnnnnnnnnnnnnnnnnnnnnnnnnnnnnnnnnnnnnnnnnnnnnnntttnnnnnnnnnnnnnnnnnnnnnnnnnnnnnnnnnnnnnnnnnnnnnnnnnnnnnnnnnnnnnnnnnnnnnnnnnnnnnnnnnnnnttcccactaaataagaaaactttaataagatgattacaaagaaattaataaagaaatagaaaatgatagcagcttcaaaaataccagtctccctgttttaaaacaaaatcaataaaatcagtgaatcacaattcattgaactcattcttggctacaaggaagcagctggatagatccactggcaggcagccctgcaggattaaaatgaggcccactgccaaaaagccccaaatgagatgccgtcctcctcatcctcacaccatcctcatcaggcagggaaggaataggattagactccctattatggagaataggttgaggcacagagcaggaagggccccttcttaatatcatagagcccctctgttgggtcagaccagaactgggggcagaggctaaaggtgagacccactgctgtccaggagcaaggggctgggggtaggggctaccctggcagccgggagttctggagccagtgatctagagccccccagcaaaacaggtttcccattgcaccatttggcactatcctggagagagctgaaataacaaatcaaagttaggcagcaccttgcagggcaccgagcaaatagtaggcgcagttgtgtgtctgctgcgtaaactgtgcatcatgaatgaagggagctacttccctcagctagtgcctcccctccagggaaatccaggagctgcctttgccattccgaagactctggatttctccaaggcaggcaaagaagacaagggaggtaatggtgagttccctccgtgaataaacacatggatttcccagctctaagggaacatcatcgattctgtcagactcacggacacagaggaagggattccagaacctcacagaaacagagagcccggaggggctgtgtttgcattgagcttgggctaggacctgagagctagagcaagtcctatacccagtagtccaagcccctagctttccttctgtttggtgcctataggaattccctagcatccttatacccaaaggacttggcacagaaagtcgatgtcaacatgagaaagaaagaggctctttgttctcaccggcatgtgtggctatttctgtcctggccctgcagcacgcagaccgtcttggccctggcccgacaagcccccaaggcaacagtgtagtctttattttggcttgctctgggagccaaggtccagagaagcctgaccctctctgctctgggggactctgacagggagaaggcattggctcagccagaatgtctcaaaggtactacaattggcattgaatggaccaattctttgctgtcagagactgttctgcacattgtgggatgcccactagatgcccagggtgcccccacagtcactgtgaccccctcaacacacacacatttccaatgctgcctggagggacaacctgcccctggtttaaagccanctggctggtggc

SEQ ID NO: 431378 - DNA, 1185 bp, Homo Sapiens
tttttgaagaccagtttattttacatgcttgctttcacattctttactgggaatttaaggccttttttcagccttaacttgtataccaacctcaaggattttgtttgatacagaaaaggatagggctgggcccttctgccaaggactgataacctgcctgccaaaaggaagagggaatgaaagccttttgtccttctaggccccttacagtacctcaaaatctaaaggccttaaaggggaaaaaaaccgtatctgttctttctccttatctcctacccttctctttaagcatattgaagatggacttttttccaaatgtttatttgtaggaagaggtgatgagtgcaggccagcagctgagaacttacagctttgatgcaccaggaactgtattcaagctgagggcaaaagcctcctagggagggagccaggtccaccaaggccagagacagacaggcgagactgtggaaggccagggagatgctgcctggtaagtgctcagctggcctactgggcaagtcctctggggttctagagctgataggaagaaggagtccattttgatagtcctgcctggagacttggacctagctgatactaaggtattttataaagctacagtggatgtttttcttaagagaactgaaagttggaaaaggcacaagtatatataagaatttagtaaaatgataatggtggtctttcaaatcaaagagtgatctttaaattgttcttgggaaccacagggttcctggccatgtctggcggctgagaggaggccaggatggggacttcaacccaagcagctgtggttttgcctttgataaggttcctggtaaaaatcatcttgaataaatgttgctgagaaactggtaaagcattcgggggagaaaggattttgctctttgctctgccatgtttttccgggctctttcttcggggagaaagagggctctaacctttggtcctcattcagataggctaattaggggtctcgggtgtccccaaagggcagcaactttgacccctccccttgtgggtaaaagggcttttcacagtttcccagcagttggtttttggtttccacataaggctaaaggtgttaaagtttggtctgcacctcgttggttttaatccagggaggagctcctggatttctttttctcccccacagagggaaacctt

SEQ ID NO: 431379 - DNA, 448 bp, Homo Sapiens
  misc_feature (24)..(24): n is a, c, g, or t
  misc_feature (94)..(94): n is a, c, g, or t
  misc_feature (128)..(128): n is a, c, g, or t
  misc_feature (241)..(241): n is a, c, g, or t
gataatcctccctggaaaactggnacctaactgaatactaaggtaattttaataaagctaacatggaatgtttttccttaaagagaactgaaanttggaaaaggccacaagtatatataagaatttantaaaatgataatggtggtctttcaaatcaaagagtgatctttaaattgttcttgggaaccacagggttccctggccatgtctggcggctgagaggaggcccaggatggggacntcaacccaagcagctgtggttttgcctggccgtcccaccctctggtcccagaaggaagtctcgctggagccaggcagcctccagtccccctcctttcagccttgtcattctctgatcctgcccaggccacaaaggagttatctgggctgaacccctctccttccagcagcagaggaccaggggtctcctccctctgaccagcctccc

SEQ ID NO: 431380 - DNA, 883 bp, Homo Sapiens
  misc_feature (363)..(454): n is a, c, g, or t
aaaagtcacaagaggtcccatccatgaagccccaattgccctacatagcccaaaaaattcaaaaacccctgaaatttagcaaaaaatgaattaacccatctgtatacaaaaatttacttgaaaaaagaagcgcacaccgtggtatgtgccttgaggcttcaatgggacccaatttaactttcaatcccttaaaaggcccagaaaccaagcaaggtttaaattccttcatcaacatcaaagtcaactcccaacttctgacaactgaatcccattgtcacaatatcacttttctggcttcttaaagcctatcttcacatcttgtaaaaaaccttttgtgattaacactgggtccaaggtgaatannnnnnnnnnnnnnnnnnnnnnnnnnnnnnnnnnnnnnnnnnnnnnnnnnnnnnnnnnnnnnnnnnnnnnnnnnnnnnnnnnnnnnnnnnnnaacatttggtggggttggggcagtaggcaactattctgcctgatgagttgtttcaggttgaagtaatgatccaagagttcagagaaggagattgatggtggtggtgtagtcagaagaagtggaatataacctcagtctcaaagaagcagaaatttccaatgaactggagttagatggatggactctctcaaggttatttttcaatctctgcacatacatacttatggaagtaagaaagaagagggagaaaaggcagatcccccataacagcggttaaacacctgaacttgctccactatgacagggtttatcatccacctctcagtcctcaagtggctggaaatatggaaattggagtccaggtagacaggtgagtgtacaacctcttaagtgtggagccctcggaattcacaacactccccaaatcgc

SEQ ID NO: 431381 - DNA, 2337 bp, Homo Sapiens
agcggtctcggagccactgctgcgttgggtttgccttctgccagaggtgtggttaagggcagtgatagctgcgccccagcaagggagggtcatgggccctgagctggcccaggagaccctggccccctgccctgtgccctgggatgcctaacctgcccacctccggaggtggaaccgggctgcccctgggggcctggacttgtcccattcccctgtccctggaaaggccttcacgggggctttttgcctgaggctgcactcttggaaggcgtggggagagttctgcctggagggggactggacccagtgccctctgcagacccctcccagccgcagcaccaagggcttgctgccttgtttcctgccaggagcgccctgacatcccaaaaccatattcccacatgtgggttgttggaatcccacccactcccccggaccctgcccctccaagttggggacggagatggggacgcaggtcaggccctccctaggcctgtttgtgtgtgatccttctcctggccccaggtcgacctggaaaggcgtttctgagtcttgtactgggaccttcccagggaaggtgccttggggtgcagaatcctgggaatgttaggaaagggctgcgtgaaaaacccagctgggcctggggtggaggtgcacacgggctggggctcagctccttggagagggcctgcctgggactgagggggccagggctgggtcaggattcaccagcttgtgttgcagacactggagcaattgcctggccctccctaaggccctatatgcctcactcataatgaggctgtctctgaaccccggagggcgggacctacaagtccttcctcttggcgcattcccacactccagtctggatccaggtctgcaaggccagcccgaccctgacactgcacgtgggcgtagtggggagcaccctggagtggagatgattgtcagcgggctcacatgttatggttcatccacatgcgtgttgtgtgctctgcggtgcctcctggcaaagggtcctggctcgggtcagaagctcactcccgtgccctcgtccccaaacaagcagtggcaagcactggggttggccctcgttgggagcagtgcccaccttccttggcccacagcagataggtcccgagcagcaggactggaggcctgtggcggtcagggcaggggtctgtgtctccaccccaagggctgatggtccctcccctgtgcgccttcctctcaggcaggcttgctctgtcccttcctctctgcttccctcccaggcctcgccagggctcccttctcctctgcctggttagactcgggcacccaggaaagcctggccagggctcctttgggcctgggccccctgcactgcctggtccagaaggggtggtgctgtccgtggccagcaccccggggcccgggaggggtgggctactagagtcagagcgggtttggggctgaccagtttgggagaggagaaaagatctgagaatgtccttcttggtttgtcagtcatctctgccaaaagtggtgatggtggtgtccgtatgtttggcgtctttgggctgggtttggtttttgctgctggtagaatcagggtcctcgggcatgaacgcgagcccaaagtgccagtctgcgattggaaatttccagccactttaagccagtgctgagtagggcttctgcagagccatgtttgagccaaggtcttggaaggcattgccccatgggttcaggtgactcggggtggagtgagcacgtctgcagggccctctcatacacgcctgaggcagaagcagcgtcccccgtgaaagccaccttccgaagctcctgcgttttttgcaaacttggcttcccccaggggcaggctggactttccctgccccctatgattgaagtcctcctgcttttgggggctgccttcccagagtcccccgggtgctcccctgccgaggtcaggagctgaccaagccttggcccggtgacacctgcagccctcactcctgtcatcccaggacacttgaggcccaaggaggtggagtggagagtgggctcgggtacatgggagccagaagccagatggacttggtcaagtgtcggtcacttggagcctccagtgtgcgtcagggtctgtgggcaggggacagggcgtgggtgggggccgaggctggcacgcccctctgccctcaccgtcttggtgacctggcctcggcccctcccccaagtctcttctgtgcaagggccgcctcggccttcggcagctggttcctgtcctgttttctgtgtctgaaagtttacaggttgtggtgcatcagcccaaactcactgggcgttgtg

SEQ ID NO: 431382 - DNA, 1800 bp, Homo Sapiens
  misc_feature (631)..(631): n is a, c, g, or t
tgtgtcttttaattttctcctgtgggcaggctggtccccactgactcaacactcaccatgactttgtacttaagctattcgcccagcctggtaagcccctgtatttcttcaaattccagttcaccttctctttagaaaatcaggaaactaaatcaggatttatgaaaattacatgaaagggcaataagctgagagccagatgtcactacggaaagggtcagggtgggagcagactgcctgctacattgggctgaatgggttgtcagtatgtattaccaacaatattaaaggccttttcaaatgatgatatcattaggacagttcttttgctttcaaaaatgttacaatctagacattgataggaatgtctagattttcttaaagtaattaggaatgatcaggccggatcttgctcgtgccaccaacctgtcccgttgggctttgtgtttgagagctcctactgggagccccaggctcgggtggggtttctgtgacagaactctgtagcttcccatgatctccacaactcccaaaggaaagacctcactagcatcctatgcaagggcaaaaaggctcatggggtgagggagaagaacacatacctttcagccccttcttggaattgccatanagtgcctcgtaaatttgtagctctgactggagggactcaaagagctgctgtttctcttcacactgttgctgcaggagaaccagcttgtgctgcagtctggagtcgttttcctggagggaaagacgttcctccctgaaatgcaagacctcttgctgcttctccctcaagtcttccaaaagctgctgcctttccaccttctggtgctccagctccttttccagctcttgaaggtgggatcgagaggacagcagagcctccctcaggctttctgtttcctgggagtgctctctggaaacatgactcagttgagcctgaagtcttcgattgtcttccctgaggactctgttctcattgcagagctgaggtatggactccaggccctgactgtagaagttagaagtggatccccttccacgagcagtagaggtcagccggtgttccagttgctcccgtaggcggtcattgatgcagatggattcctccaggcgctggcgcaggttccggatttcaccaagatgctcttccagcaggtcagcccctgtgggtttggagttaagctggtacacagaggagcctgaggataggtccccagatacactccctttctgaggcctcatcacatcccacttgccactgctgcccaggtacccaggctctaggattcttcccagttctatggtgccccttggaggagagtgaggctgggcagagttgaggtagtaggaagagtcggcttccaagtcgttgctcagcaatgtagctgtggaagcaggaggaacagtgctggcacctgagtgactgggagaagctttcttctcttcatagtgtgtgtactcgctgactatgtccatgtcagagcaggcttccagttcatcagacaggaaagaggtgctgctgggagagcggtgggagtcagacaaggcatggctgctggagggtgtgagggaccgagcatccagcttggcctgcaggacttcaatcactttctccttctcctgcagctccctgctgagcctgagggccagtggctcaagtccagcttgatctttctcacttttatgatccttggtgctgagtttgctggtgagcctctctgtcagctggcttccctgggcgagttgctcccggaagctctgtcccaggtagtagtcaatgtcattgctccttag

SEQ ID NO: 431383 - DNA, 1510 bp, Homo Sapiens
  misc_feature (25)..(25): n is a, c, g, or t
  misc_feature (36)..(37): n is a, c, g, or t
  misc_feature (46)..(46): n is a, c, g, or t
  misc_feature (148)..(148): n is a, c, g, or t
  misc_feature (151)..(151): n is a, c, g, or t
aagaaaaacaatgtgcaccacctgnaatgacacagnngcggcaccntgaaaccacaggggctgccgagagctggcctttcacagcagaacactgttttccagatgagaatggtgggccattccaaaacaaagctaaagggttccaaanatncagaatggaagctgcttcccccaactccattacctatactacaggatggattgctttttggtgagacccctttcttcccactgtgcaatttttgcattatttaccctccccccgatcttaaaagctatatggcgtccaggagagtgcggctgatgcagcttggccatcactgtgatgcagctggagcagaaggcggcccgttcacttcagccagatccacttgtctcccacctcggtgttgtacccagggctgtacttgcggcccggcagctctctgaactgatgtaagacacggtcagtctgatgagctccaatggtgacttccgggagaaagataggaatgcttgtgtaattcagcacctcaaacttatcctgaaccagtaatcgcaggtggtataaagtgcgattgtcctgcttgagccacggccctttatcgaacttcaggtattcaatgtcctctaccaccttttttgaatcttgagcttcccttgcagaatactgtaaaacctcacatttttcactcatctcagggagaaaggttttcttataggcattctcaatgtcctgtagataggcagaggtgatcttcatttcatgtggatctcctttcttctgaatccgcctctggacctctggaacgggcacatcgatgtaaatcaccaggtgggggggcaggtaatcgcagatggtgacgctcttcacctcgttgtagtggtccacacactgctttcggatgaatccctggttgtacatcgcctccaggaacacaaagtcactgaagatggagcgctccaacacaacaccttgtcctgtggtcagcaagtgctccaaggcatctgagtactgcagcaggcgactgctgtacaaccaggactgcaggcggtaactgttgccatcattgcttctcggatcatcgtaaaatttctccaaactacagttgccattatagtcggtggcgaggggcttcccatctcctgtggtactgtctggataatgaatccccgcttcaggaaagtgcttgaagcctagtttctctgctatttcttttgcaagtttgccttttccagtacatatattgccatctacagttatcactctgctgcgttctgtcagtcttttgcttgctttatccccaagtaggaaatgccacattccatagcgcagcttgcactgcacactgctatgaattcctctcacgcgctgggcgcccgccgccacgacccgggcggacgcggacgtcgctgccagcttcaggagccgcaaggccatggctacccggtcagctcaggatcaaggacccaaggggacgcggtcgcgacggggccctctctcgcggccggcgcgctgccgtgacccgct

SEQ ID NO: 431384 - DNA, 788 bp, Homo Sapiens
ctaggctaggtacgaggctgggtggtctgtgtcctggaggcgatgtacacccaggattcatccgaaagcagtgtgtggaccactacaacgaggtgaagaagcgtcaccatctgcgattacctgcccccccacctggtgatttacatcgatgtgcccgttccagaggtccagaggcggattcagaagaaaggagatccacatgaaatgaagatcacctctgcctatctacaggacattgagaatgcctataagaaaacctttctccctgagatgagtgaaaaatgtgaggttttacaatattctgcaaggggaagctcaagattcaaaaaaggtggtagaggacattgaatacctgaagttcgataaagggccgtggctcaagcaggacaatcgcactttataccacctgcgattactggttcaggataagtttgaggtgctgaattacacaagcattcctatctttctcccggaagtcaccattggagctcatcagactgaccgtgtcttacatcagttcagagagctgccgggccgcaagtacagccctgggtacaacaaccgaggtgggacgacacagtggatctggcttgaagtgaacgggccgccttctgctccagcttgcatcacagtgatggccaaagctgcatcaggctgcacttctccctggacgccatatagctttaagatcgggggagggaaataatgcaaaattgcacagggaagaagggttcacaaaagaatcctcctgtagttagtcaggagtgggaagacaatccatctggagc

SEQ ID NO: 431385 - DNA, 893 bp, Homo Sapiens
  misc_feature (814)..(846): n is a, c, g, or t
cctttcttccactggcaatttttgcatattttaccgtcccccggatcttaaagctatatggcgtccaggagagttcggctgatgcagcttggccatcactgtgatgcagctggagcagaagcggcccgttcacttcagccagatccacttgtctcccacctcggtgttgtacccagggctgtacttgcggcccggcagctctctgaactgatgtaagacacggtcagtctgatgagctccaatggtgacttccgggagaaagataggaatgcttgtgtaattcagcacctcaaacttatcctgaaccagtaatcgcaggtggtataaagtgcgattgtcctgcttgagccacggccctttatcgaacttcaggtattcaatgtcctctaccaccttttttgaatcttgagcttcccttgcagaatattgtaaaacctcacatttttcactcatctcagggagaaaggttttcttataggcattcttaatgtcctgtagataggcagaggtgatcttcatttcatgtggatctcctttcttctgaatccgcctctggacctctggaacgggcacatcgatgtaaatcaccaggtgggggggcaggtaatcgcagatggtccacattccatagcgcagtttgcactgcacactgctatgaattcctctcacgcgctgggcgcccgccgccacgacccgggcggacgcggacgtcgctgccagcttcaggagccgcaaggccatggctacccggtcagctcaggatcaaggaccccccgctctcgacgaattcgagctcggccgatttggcctgatnnnnnnnnnnnnnnnnnnnnnnnnnnnnnnnnnatgcgccgccaccgcggagagtccgagtcccctatagtgagtgatca

SEQ ID NO: 431386 - DNA, 477 bp, Homo Sapiens
cacagggcttttagtgctgatctacattcaaaatagagatgcttggcctttgattgtagactgcattacatctcctttcttctgaatccgcctctggacctctggaacgggcacatcgatgtaaatcaccaggtgggggtgcagttaatcgcagatggtgacgctcttcacctcgttgtagtggtccacacgctgttttcggatgaattcctgtttgtacatcgcttccaggaacacaaagtcagtgaagatggagcgttccaacactacaccttgtcttgtggtcagcaagtgctcccaggcatctgagtactgcagcaggcgactgctgtacaaccaggactgcagtcggtaactgttgccatcattgcttctcggatcatcgtaaatatttctccataactacagttgccattatagtcggtggcgaggggcttcccatctcctcgtggataaagtacatcgccgcgaccacct

SEQ ID NO: 431387 - DNA, 1730 bp, Homo Sapiens
ttttttttcccatggaaacacttttatttctggaagtcagaagaaaaacaatgtgcacaacctgaatgacacagagcggcagcgctgaaaccacaggggctgccgagagctggcctttcacagcagaccactgttttccagtgagaatggtgggccattccaaaacaaagctaaagggttccaaacatccagaatggaagctgcttcccccaactccattacctatactacaggatggattgctttttgtgagaccccttcttccactgtgcaatttttgcattatttaccctcccccgatcttaaagctatatggcgtccaggagagtgcggctgatgcagcttggccatcactgtgatgcagctggagcagaaggcggcccgttcacttcagccagatccacttgtctcccacctcggtgttgtacccagggctgtacttgcggcccggcagctctctgaactgatgtaagacacggtcagtctgatgagctccaatggtgacttccgggagaaagataggaatgcttgtgtaattcagcacctcaaacttatcctgaaccagtaatcgcaggtggtataaagtgcgattgtcctgcttgagccacggccctttatcgaacttcaggtattcaatgtcctctaccaccttttttgaatcttgagcttcccttgcagaatattgtaaaacctcacatttttcactcatctcagggagaaaggttttcttataggcattctcaatgtcctgtagataggcagaggtgatcttcatttcatgtggctaaacagaagcagaaaaatcaaactgggaaacatttagagttcattctctttgacctgtgcgtatataaaatgcgaagacaatcactgaccaccattttcttacaactcacaccgggcactgtggggactgcggggtgacagcaaagggtcccaacatcagctagagtcattctccttctactacagtgaacacctgagcctgcccaagtgctcccatagcgtgactttctccacacattctaagatgtatacttagggcaagaaagatgcctgttacgaagcagcactgcctgtctttcctgtctgcctcgtgcctgagtgcaggaatgaaagagcaccaaaaattgggggcagcggcctgtctgtccgccatctgtcctcagcacactctcttcttgtcacctgactctccctgcatctctccaacttgctcgccacctccatcgctcacccatctccccgcaaccacttctcccactttctacggctgtcacctctctcatcatctgaaatgcactatgcgaatttcagaaacttgaatatctaattatgagtagcaagttttaaaatttaaaactccttacagtctcacactatcttctcagcccgttttgttttcttcacatcatttacctctatttgatgtatttatttatctccttgcttgctgtaggtctcccccatcagcatatgagctcacgggtgaggacctcatccaccctgctcactggtatgtccctagcaccaagcagggtctaggacagggtggatgctcaatcaacacttacaggagagagaggaaggaagaaagaaatgaataggcctgcggtttcaacctacaaaatgatgaaaacattctaaaactggattatggcaagagtggcaataacttggtaaatttacccaaaatcattcagtcgtacccttaaaatgggtgaatttta

SEQ ID NO: 431388 - DNA, 467 bp, Homo Sapiens
  misc_feature (86)..(86): n is a, c, g, or t
ttttttttcccatggaaacacttttatttctggaagtcagaagaaaaacaatgtgcacaacctgaatgacacagagcggcagctgnaaaccacaggggctgccgagagctggcctttcacagcagaccactgttttccagtgagaatggtgggccattccaaaacaaagctaaagggttccaaacatccagaatggaaggctgcttcccccaactccattacctatactacaggatggattgctttttgtgagaccccttcttccactgtgcaatttttgcattatttaccctcccccgatcttaaagctatatgggcgtccgggagagtgcggtctgatgcagcttggccatcactgtggatgcagctgggagcaggaaggcgggcccgtttcatttcaggccagtttccatttgttttcccacctcggtttttgttacccgggggttgtaatttgcgggcccggc

SEQ ID NO: 431389 - DNA, 1218 bp, Homo Sapiens
ataagccaccacacccagcctgtgggaactatttattggatttcaaaacaccctctgcctcattaatccactaagctttctcagcaaaaagctgtttaaataaataatgggaacatctaatttaaaacagtttttctaattatagaccagtacacgaagaagagcttaacttatccaagtatagtctagtttgggtccataatggagctgaaggctcagaggacattcagggccattacactgcaggaaaacaaggaataagggatgtagaaatgacctaagaaaagcacgaagtggaatgtatactggaggcaagttaatgaaagctaataaatacaaagtgctgggaaaaatctaaaagcaaaatagctattgtaacttgcaatgcattaaaaacaactttaaaaccaaaaagtcttgataaggaaactctatagtggggtctcagttaaatgctgatgatttttaatgctcagataacattaagtggaatattaacttctgcatccgacaccatctgaattttctcacacactactacacttgttcacttttcaatcaagttccactttctgaacttgttcaaaacctcatttgaaatatatccagctactgcttttcccctttcacctagcacagggcagttacctggcaaagctctattctggccaagtcactgggactgagtagaacccacgttagcagctctggacctgaacaggagctggcccaacatcacagtgaccacccacaaagagacaagccctcctggatttttttcagcatttcttatactgactacagtagtgatgattaaagttatctgccctacagactccactgaatttgaagctgtatttattgtacagatgggggaaatgtgttttattgtgtcagttatattaatttttatcaatgtgattagatacatattttggcctattaatcttattcattatattcttagtctgagatgggttttaattctgactaacagcagctacttaagagtccaatcatacaaaatcaggagagtattaccctttctacagctaagcgagtcagtaatacagcagcaactaatactggccattaataacgtccagagagcacattagcaaaccttgtactcccagtgactgtcaggagacttgaaaataactactattctcttccaaagtagaatagcgtttttctagatagtgaaggaaatgatcc

SEQ ID NO: 431390 - DNA, 973 bp, Homo Sapiens
  misc_feature (9)..(9): n is a, c, g, or t
  misc_feature (13)..(14): n is a, c, g, or t
  misc_feature (61)..(61): n is a, c, g, or t
  misc_feature (66)..(66): n is a, c, g, or t
  misc_feature (72)..(72): n is a, c, g, or t
  misc_feature (76)..(76): n is a, c, g, or t
  misc_feature (81)..(81): n is a, c, g, or t
  misc_feature (83)..(83): n is a, c, g, or t
  misc_feature (120)..(120): n is a, c, g, or t
  misc_feature (127)..(127): n is a, c, g, or t
  misc_feature (140)..(140): n is a, c, g, or t
  misc_feature (145)..(145): n is a, c, g, or t
  misc_feature (158)..(158): n is a, c, g, or t
  misc_feature (174)..(174): n is a, c, g, or t
  misc_feature (179)..(180): n is a, c, g, or t
  misc_feature (197)..(197): n is a, c, g, or t
  misc_feature (202)..(202): n is a, c, g, or t
  misc_feature (204)..(204): n is a, c, g, or t
  misc_feature (210)..(210): n is a, c, g, or t
  misc_feature (216)..(216): n is a, c, g, or t
  misc_feature (232)..(232): n is a, c, g, or t
  misc_feature (237)..(237): n is a, c, g, or t
  misc_feature (239)..(239): n is a, c, g, or t
  misc_feature (267)..(267): n is a, c, g, or t
  misc_feature (296)..(296): n is a, c, g, or t
  misc_feature (301)..(301): n is a, c, g, or t
  misc_feature (318)..(318): n is a, c, g, or t
  misc_feature (321)..(322): n is a, c, g, or t
  misc_feature (328)..(328): n is a, c, g, or t
  misc_feature (346)..(346): n is a, c, g, or t
  misc_feature (349)..(349): n is a, c, g, or t
  misc_feature (355)..(355): n is a, c, g, or t
  misc_feature (359)..(359): n is a, c, g, or t
gcatcttgntcanntggcccctcctcctctctagaaaccgggggtctggggttctggaatnagatnagtgtntgcnctgcntnaggcctccctgcctcctcatgggccctgactgcaaanaaataanagttgctggaganatatnttgatttggggtnagcgtaagaactttcnagaanncagaatccagcaaaggnatgancncctttnaggtanaggtctggttcctgtnctgcnanatttcacgtggaactgtggtaacttgtnagggacattgaacaagggacatgggtacnaagcngacctgaggactcagcnaannaaagtnccacatttcttccctccntcncttgtntacntcttttccgtcaaacgtaagtggtcctctaggggttggctctctcatggtctttctcttctgatctgctctgccccgtcgtgggcatcttggaaccacctcagaagcaaggccacagctgtggactggtcctcgtgagagtctgcctggatcctctgtacctgtaataggtacacagttacgttattatccaacctccaatccccaaaaagcctccttaatttgaaagagaaaaggtatatgtgccttgcattttgttatcggtccagattttgcatctggtggtggctggggtgccattgggattttggaatgggagcagtttgattcctccctcggaaggaactcatggctctcacaaaccagtgtctgtggcagtgacaagtcacagaatttgtgtttcaaggcttattccttcttccctttaagactttttcaacttcctgtcacttcgggctgagtctcaatttcagtcatgttttgtggcttcctttgagcacagaaacctctccttttcttccgttactggaactaagatcccagcgtaaactcgtgagagtcatttttccacgtcatcattcgttggagctattaagcccgaacacagaatgacat

SEQ ID NO: 431391 - DNA, 463 bp, Homo Sapiens
tatcagggcagggactgtaccttgttcactatagtgttcttagcatctaagataggacttggctcagggtatgcacttactagatatttgttcaatgcatgaattaatcaatgaatgaactgtaagtgtatggactatgactctgttccacccaaatttattttaaaatggtgccctcatactcaatgaatgaggctcagagcctaggtgactattgcttacatgtttgaacatgtaatggattgcaagtgaaaagaatcacacctctttctagggtgctgatgaagatttttgtggaggaggtggcatttttagagtttagttatatttatctacatgtttacttcagcacctcatatcatcatgcttatgtgcttttccaaacacgctaattgaagattaaacaatctaaataggtagaaagaacatctttttgtcttaaatatcattctctccatatata

SEQ ID NO: 431392 - DNA, 753 bp, Homo Sapiens
  misc_feature (732)..(732): n is a, c, g, or t
gaaacaatgtcactattaggcacagaagtctatttacacaagagcttgtttcatttgacatttattgcaataacttgagaacaattatttgcaactaaatctaacagtatttgtacgagtactttcaagctaaagtactgctaaaaaatttcaacatgcatgcaattcgtttacataataacataatttattataaaacctgtgactctgagcactttatggaatatgtgcttatggaataccctctactgtaacatggccacatctgagaaaagagatgctgctgagcagaagagtcctgtgttcaattttgttgaaatgggttggctgctcagactgttcaggactgctactgtgctatgatagcattgcttgatagctcaattcacatcagacttcagaagactttcaagcacaagccgttacgccacctgcaaactggtagcacaagcagccttggcataacacagttactatgcaggtgggctctgttttaagcaaagtcgatattgaaaatccaaacatacaaaagagataaatcagagaatggttatttgtattataaaatggttttctgctttatgaaagaattcacaagtttcctctaaatggcagctcccctaatgcatttaaaatacaatttgatttacaaaagttcaatttacacgtgactttttgcacaatcattgtgagaagcaaagtacacctatatacagtacttaattttctctntcaggattaaggtgtcttatc

SEQ ID NO: 431393 - DNA, 1056 bp, Homo Sapiens
ctccttcttcttcctccacctctgggggttgcacgtcatcctgtgggtcacaggcactactgggagcattcagacagcaatggttgaacccgctatctcgaggcagagtaaaacttcgaggcttgcccccatttccatttagcacttgcatcctctcactctcagctaaggggtatgggcccatagtgatcctggcaggtgggcatttctgagttgggcagggtaggactgccgcctgtgcttctgggggagatgggccgcggagtcaggaggaaggacaggaatcctccagggggcagagtctgaagatagtgtaagcctgaacttgttcagtggccttctcaattaaatcctgccaggagcggcgctgactggctgtcttgcgaatgggagacactgcactgctcccagttacttcctggcgaaactcctcatgagaagactgagactgagaagtctccgtggaggaaagtcggctatgttttgcttccacataaggactggcgcaactcatcgagggaggtcgtgggtatgtatcatatgggggtggagggctatcttgttttggtgttgatggagtatctgcttcttccttgtcactctcactccagtaatcttgttcctgcttaatcctctctctttctgcatatcctgcagtcagcatattaattctgttaaagcccacctgttccatatcatcaagatgttcagcagcaaaataaaagcttttgattttaggatgacaggctttgaatgcatattttttgcggcattcactggctctatcaattttaaattcaggcaggctaatgaatccttctgctttttcatcctcctcattaatataccaataaagggatgcatcctttaggacaaaccaatattttttccatttctgtgaaaagtaactcttcgcatctttctttttccaaagccagccctcacagtcaccacggccaagatctttgcaagaaattcgtcttttgctcttgcctgctataggacctttgtttttcttctttgatttgtgctgcagtgaggactgctgaaatgtat

SEQ ID NO: 431394 - DNA, 873 bp, Homo Sapiens
  misc_feature (808)..(808): n is a, c, g, or t
gtggggaccgggtttctctttctggcctaaggactttcagtaatcagagttcatggccctcaaaggtaaattgcagttgtagacaccgaggatggttgacaacccatggttgagatgggcaccgttttgcaggaaacaccatattaatagacatcctcaccatctccatccgctctcacgcctcctgcaggatctgggagtgagggtggagagtctttcctcacgctccagcacagtggccaggaaaagaaatactgaatttgccccagccaacaggacgttcttgcacaacttcaagaaaagcagctcagctcaggatgagtcttcctgcctgaaactcattgctccaggatgcttgtggtcaggtgagagccctctccagatcttcttttgcttttcctcgttttcactttattttccttgagcaatagtttttgcatctgttctcctgttgtcctgaggcctgggcagtcaggagaaggtagagctctcatccatggactcacctgagggaagtctacaccagaggccagagtcaccagccagagcctcagccagctccagccagctgctaatggagcatttattcttctggaggctgcgtctgtatcctgggtctgaaggtagctgaggggcagtttatggacaaggtgtggaggaagcccaggatgtgcacagctgtgggcacaaggctcttcacagtgtgggctggagaccaagaggccgttcttgcactgcaccggcccctcggcgcagtcagccggctccgcgctcttgaccttgacgtagaccggggaggggcccgttngcaggcggcggcggcggtgcagggcgccagggccacgtcctcggggccgccgcaggggggaggcg

SEQ ID NO: 431395 - DNA, 1915 bp, Homo Sapiens
  misc_feature (5)..(5): n is a, c, g, or t
  misc_feature (13)..(14): n is a, c, g, or t
  misc_feature (40)..(41): n is a, c, g, or t
  misc_feature (121)..(121): n is a, c, g, or t
  misc_feature (123)..(123): n is a, c, g, or t
  misc_feature (172)..(172): n is a, c, g, or t
  misc_feature (265)..(265): n is a, c, g, or t
  misc_feature (321)..(321): n is a, c, g, or t
  misc_feature (400)..(400): n is a, c, g, or t
  misc_feature (424)..(424): n is a, c, g, or t
  misc_feature (440)..(440): n is a, c, g, or t
  misc_feature (445)..(445): n is a, c, g, or t
  misc_feature (449)..(449): n is a, c, g, or t
  misc_feature (455)..(455): n is a, c, g, or t
  misc_feature (539)..(539): n is a, c, g, or t
  misc_feature (595)..(595): n is a, c, g, or t
  misc_feature (597)..(597): n is a, c, g, or t
  misc_feature (614)..(614): n is a, c, g, or t
  misc_feature (678)..(678): n is a, c, g, or t
ttganattaattnntatatcatacaattcactatttaaanncatacaattcgatgccttttagtgtattcgcagagttgggcatccaccttcacaaccaattttaaaacatttctattacntnccccaaaaccccataaccccttagccatcacctcccaaatcccccattnctcccacagcactagtctgctttctgcctctatgcttttgtctttcctggacatttcatataaatagaactatacactatgtggccctttggncaggcttttttcacttagtgtcatgtcctcaaggctcataaaatagcatctttggncactgagaagggacccaacaacctgggatagtagaaagctccatgcagggagtccagaagctggttctggctctgcctnatggcttctgtccagtgatttaantgggtccaccacagtnctaantttncatacnttctacaattaaatgtatggcatagttgcaggccaaggttagatactaggaagaatttcctattcttgaagagcctccctttcnagggtgttggaagaccaggagaaatgttcctttacctaaggtgaccttgggctaananactgaggattcagaggnctgcaggcaggccaaggattccaagactccaaacactggaggggtaactttctttctgatgtgnttaccagggaaaaagaaaaaggatgtccatgctgacagagtgggtccagagacagagaacccccttgtgcaggatctgccataaaggacaatatgaactgatgcctggactatcagtaaccccactgcacaggcacacgatgctctgggacataactggtgcctggaaatcaccatggtcctcatatctcccatgggaatcctgtcctgcctcgaaggagcagcctgggcagccatcacaccatgaggacaggaagcaccagcacgtttcacacctccccttccctctcccatcttctcatatcctggctcttctctgggcaagatgagccaagcagaacattccatccaggacactggaagttctccaggatccagattcatggggacattaatagtccaaggcattcccttcccgtaccactattcataaagtattaaccaactggcaccaaggaattgcctccagcctgagtcctaggctctaaaagatattacatatttgaactaatagaggaactctgagtcacccatgccagcatcagcttcagccccagaccctgcagtttgagatctgatgcttcctgagggccaaggcattgctgtaagaaaaggtctagaaataggtgaaagtgagaggtgggggacaggggtttctctttctggcctaaggactttcaggtaatcagagttcatgggccctcaaaggtaaattgcagttgtagacaccgaggatggttgacaacccatggttgagatgggcaccgttttgcaggaaacaccatattaatagacatcctcaccatctccatccgctctcacgcctcctgcaggatctgggagtgagggtggagagtctttcctcacgctccagcacagtggccaggaaaagaaatactgaatttgccccagccaacaggacgttcttgcacaacttcaagaaaagcagctcagctcaggatgagtcttcctgcctgaaactcattgctccaggatgcttgtggtcaggtgagagccctctccagatcttcttttgcttttcctcgttttcactttattttccttgagcaatagtttttgcatctgttctcaccaagaggccgttcttgcactgcaccggcccctcggcgcagtcagccggctccgcgctcttgaccttgacgtagaccggggaggggcccgcttcgcaggcggcggcggcggtgcagggcgccagggccacgtcctcggggccgccg

SEQ ID NO: 431396 - DNA, 774 bp, Homo Sapiens
  misc_feature (150)..(173): n is a, c, g, or t
gttcttaaatgccactttattcttgttcttaaatgccaattatcaaaaattccaacttagctgagcacatctataacagaagcttggtaaggctcagtgaacgcagtacaaagcagcacagcacaaagcatgagcttgccagcagtgacnnnnnnnnnnnnnnnnnnnnnnnnttctagccagcaagagtcagttagcaaactaaagcaagaggagagccctgcagtggtagtggtcatctcctagaccctctgcttgttgcataaagtgtttagtcatcccacagaggagaggttgaaccccttacccaaaacttggtttaggtgttaggactgatgttacattaggaccaaatagatatgaaaaggtttatcactcacacgaggcttttacagagagcagcgagttctcaagcaggtccagaaatggcttgagcagggaaagtagaggagcctggcttttcctagtggcttggaggtagggctgcagtgaggattcttaggtggtttgaacttccaccaggcacaaaggtggaagcatttgagctttcttactggcatgtccagatatggggcggaagggggaataataggttttaaaaactcagccagtcagacatcaacaaatgagtctgactgtactacaaagttgtactaagattacagcacttatttggcgtaggcttctgaggggagaaaaatttgatattatttcagaatttttaaaggacagaaaatgtatttctgagacaatgtcaatcagtattccccagct

SEQ ID NO: 431397 - DNA, 471 bp, Homo Sapiens
cgtttggtcttgggcatttttattccttcctttccacatctgctgtgcttggtcccccgatgtttagactttgatttttcttggtttgccttgcttgacatattttcctggcctggtgttaatcttcttggacgaatcaaatgagccttatgtttgtcattatgcttattaaaaatgtgtcggaggagattcgaccgggttgcatatatacggtcacagccttcacaatcacatttgtatacaccatcttcttctgttttacttgcccttagtccaatcccgtggtctgcctctagatgaacaacatagttcaaatatgtagtaaatgaagatttacactctaactggtctcatggaaacttcccaacatccactgaagcagtcatactttcaatttcttcaggagtcatttcatgaagtttcatgtagtgttgtattaggccagtaattgcttggaaaattcgagaacag

SEQ ID NO: 431398 - DNA, 614 bp, Homo Sapiens
tgatggagtgaaactccatctcaaaaaaagaaaacttaaaatgacatatgtggcttgcatttcgtttctactggacagtgctgccctgcagccctcccattccatcacgtggctgacatgcctgattgcagggcttagacactaatatgatggggtaaagatatggatgaatattcttccccaaagctgaaagagctttcatgaaaatgcctggagccattcagtatagaactaagtgctcttccccatggtagctatctcaactttgaagggacaaattttgtcagcagtgggagtccaagctggagatgatggtaccatcccttgtctgcccttggatcagttacctttgtcttcagcttttaagggagacaggatctcaaaactaaggttcttatccagctcttttatttcacagatgggaaaataaggcactgtccaagtaacacacagtgacagtggcaaagtcgtgcttgcttcccaggtccctgacctcagacaagggtgttctctcccattaaatgcttttttctcctcatcttgctccattttcctatcttgtggcaagagattaacaatctaaattccaatcctagttctgacactgaccaatg

SEQ ID NO: 431399 - DNA, 1679 bp, Homo Sapiens
gctgacttcagggagcagattttaagagtaaaagaagatgagaatgttccatttctactggttggtaacaaatcagatttagaagataaaagacaggtttctgtagaagaggcaaaaaacagagctgagcagtggaatgttaactacgtggaaacatctgctaaaacacgagctaatgttgacaaggtattttttgatttaatgagagaaattcgagcgagaaagatggaagacagcaaagaaaagaatggaaaaaagaagaggaaaagtttagccaagagaatcagagaaagatgctgcattttataatcaaagcccaaactcctttcttatcttgaccatactaataaatataatttataagcattgccattgaaggcttaattgactgaaattactttaacattttggaaattgttgtatatcactaaaagcatgaattggaactgcaatgaaagtcaaatttactttaaaaagaaattaatatggcttcaccaagaagcaaagttcaacttatttcataattgcctacatttatcatggtcctgaatgtagcgtgtaagcttgtgtttcttgggcagtctttcttgaaattgaagaggtgaaatgggggtggggagtgggaggaaaggtgacttcctctggtgtttattataaagcttaaattttatatcattttaaaatgtcttggtcttctactgccttgaaaaatgacaattgtgaacatgatagttaaactaccactttttttaaccattattatgcaaaatttagaagaaaagttattggcatggttgttgcatatagttaaactgagagtaattcatctgtgaatctgctttaattacctggtgagtaacttagaaaagtggtgtaaacttgtacatggaattttttgaatatgccttaatttagaaactgaaaaatatccggttatatcattctgggtgtgttcttactgacaccaggggtccgctgccccatgtgtcctgggtgagaaaatatatgcctgggcacagcttttgtataggaaaattcttgagaagtaactgtccgctagaagtctgtcccaaatttaaaatgtgtgccatattctgggttcttggaaaataaggttccagagctctttgatcgcttttaataaactgcaagttcattttaaaggaagggccagcatatatacttgcaagataattttcagctgcaaggattcagcaccagttatgtttgaatgaaccctccttttctctgagattctggtccctggaaatccctttctgctagtggtgagcatgtaagtgttaagtttttaatctgggagcagggcataggaagaaaatgtcagtagtgctaatgcattttgcactagaacgcttcgggaaaatattcatgcttgccatctgttcatttctaaatttatattcataaagttacagtttgatacaggaattattaggagtaattcttttctgtttctgtttataatgaagaacactgtagctacattttcagaagttaacatcaagccatcaaacctgggtatagtgcagaaaacgtggcacacactgaccacacatttagctgtgtcaccatttgtgtggtgtacctggctggaagaaattctagcatggctacttgggggaacaatattttcacgtgggaaaatatgcccaactgaa

SEQ ID NO: 431400 - DNA, 1170 bp, Homo Sapiens
  misc_feature (189)..(189): n is a, c, g, or t
  misc_feature (265)..(314): n is a, c, g, or t
  misc_feature (1037)..(1075): n is a, c, g, or t
aataaagtttgaacttttgctttcttgggtgaaagcccataattaattttcttttttaaaagtaaaatttgactttcattgcagttcccaatttcatgcttttagtgatatacaacaatttccaaaaatgttaaagtaatttcagtcaattaagcctccaatgccaatgcttataaattatattattangtatggtcaagataagaaaggagtttgggctttgattataaaatgcagcatctttctctgattctcttggctaaannnnnnnnnnnnnnnnnnnnnnnnnnnnnnnnnnnnnnnnnnnnnnnnnncgctcgaatttctctcattaaatcaaaaaataccttgtcaacattagctcgtgttttagcagatgtttccacgtagttaacattccactgctcagctctgttttttgcctcttctacagaaacctgtcttttatcttctaaatctgatttgttaccaaccagtagaaatggaacattctcatcttcttttactcttaaaatctgctccctgaagtcagctgtagctgcaaaggattccatttctgtaatagagaaaacacagaggaacccctccccacttcggaagtagttgtctctaattgcagcgtagtcctcctgcccagctgtatctaagatatcgatctggacttcctccccatctagcactaccttcttccgatagctgtctgctttggtaggctcatagtcctccacaaactcatcgtacatgaactgtagagtcagagctgacttgcccacgccaccactgcccaccatgatgactttgtgtaaagccaaagaattctgacccttgggcttatttgcagccattttgtgtctcagttttcaccaaaggattaagaagaatctgcaccgcgagccagtccgccgccccgagggctccggaagccgcggctgcgtggctccggccggagggtactcggtccttgtcgcctggaaggccccgcgccgggagcggtcgaaggaggagtctgacgggtggcgggggagcctgggcggctnnnnnnnnnnnnnnnnnnnnnnnnnnnnnnnnnnnnnnnctccgacgctttgctctggggagatccaccctcctcctggcggctctgcagcagccgccacagatcacttccggggcgctggggagcggggcccc

SEQ ID NO: 431401 - DNA, 649 bp, Homo Sapiens
  misc_feature (457)..(470): n is a, c, g, or t
  misc_feature (512)..(523): n is a, c, g, or t
aacattttaaaaaaggaagtttattggtctttaaatggctcaaattgcaaataaacaaatcgggtagtggcatcagcctaagacacgtgatgcatctttgtcagttggcttcatagcacctcagtacccaggagaggaaaggtctcaaagcaaagtcacaatgttagtggttaggacccctggttaaataagactgtaataagtacacatggagattgctgggcccgctggccagtgttacattggtaacttgaattccgcacatggcatagcctatgagaaatacgaaatgaaagatgtacatctcaaaccctttaaggacaaatatttaacatgagaagctggatgtaaatatctaaagagtgagttcctaaaaagcctatttttaactttacatacacacctgttacctggaatgcctgaacacatctttgacctgttcaaattaggactgagnnnnnnnnnnnnnntactttgttgaatcaactgtcctagccccactgcaaagaggnnnnnnnnnnnntcggtcagtggcatatttcccactgaaattatgtccccaagtagcatgctagaattcttccagcaggtacaccacacaatggtgacacagcctaatgtgtgatcccgggaattccggaccggtcca

SEQ ID NO: 431402 - DNA, 441 bp, Homo Sapiens
  misc_feature (69)..(69): n is a, c, g, or t
aaaaaaggaagtttattggtctttaaatggctcaaattgcaaataaacaaatcgggtagtggcatcagnctaagacacgtgatgcatctttgtcagttggcttcatagcacctcagtacccaggagaggaaaggtctcaaagcaaagtcacaatgttagtggttaggacccctggttaaataaggcctgtaataagtacacatgggagattgctgggcccgctggccaggtgttacattggtaacttgaattccgcacatgggcatagcctatgaggaaatacggaaatgaaagatgtacatcttcaaaccctttaagggacaaatatttaacatggggaaggcttggctgttaaatattctaaagggtgagtttccttaaaaggcctattttttaacttttacatttcacacctgttacccggggttgcccggaacactt

SEQ ID NO: 431403 - DNA, 1163 bp, Homo Sapiens
  misc_feature (47)..(47): n is a, c, g, or t
  misc_feature (75)..(75): n is a, c, g, or t
  misc_feature (451)..(544): n is a, c, g, or t
atagatttcttattactcagggtaaacaagtgcacctgcccaccttngcactcgtccatatcccccagagcaacntgataagaactcatgggattttggctatgtaagtggccaaatactgcataggcaagggacagggaaaattaattttccctacttataaagatgaaagaggcagccgtcctcttcccttcctgaaagagtctgcttttactctattcttgtggtagacaaagtctctccaaaagccagatagccaaccccatgtgtctccaagagctgtctcctacatcccagggaatacctaggaagatagcatattagaaatgaggaaaggtctcagcacaataacctaagttcccaccacaagaaacaagaaaaagaatagcaaaataagcccgaagcaggcaaaagaaaggaaataaccaaaagcagaaatcaatgaaactgnnnnnnnnnnnnnnnnnnnnnnnnnnnnnnnnnnnnnnnnnnnnnnnnnnnnnnnnnnnnnnnnnnnnnnnnnnnnnnnnnnnnnnnnnnnnnncaaatcattattatcaagaatgaaatgaagagtatcactataaatcaggcagtcattaaaaagataatgaggaaatactgtaactttcggcttatacacatgacaacttagaagaaataatctgattcttgaaaaccacaaactattaaaactcaaccaagatgaaataatctgaatatcctataaccattaaagaattaaattcataatttaaaatctcctgataaaagaaatctccagacccagatgccctggcttctttgaggttcttccatgttgttttatgtatcaatcattcattattttttatcgctgagtagtgctgcatggtatagaatataacagtttgtttataccattcacctgttgatggacatttgttggttccagttttgggctattatgtaaagctgctatgagcattcatttacaagtctttatgtggacataagctttcatttctcttgggcaaatacctaggactgggatggctaaatcatatgataagtgtatatttaaatttttaaggaactgctaaaagtctttttcaagttaattgtaccttttgacattcccgccagcagtttatgtgtacaaaatgtataattacatttatgta

SEQ ID NO: 431404 - DNA, 1018 bp, Homo Sapiens
  misc_feature (56)..(96): n is a, c, g, or t
  misc_feature (173)..(210): n is a, c, g, or t
  misc_feature (930)..(953): n is a, c, g, or t
aattctctttgacacagttaactgtgacaaaactaaaattcacactttcttcacannnnnnnnnnnnnnnnnnnnnnnnnnnnnnnnnnnnnnnnnaaacaacattctcattccattttaagactttaacagatttcctgtgtcagtcatcccatcaaacataccatgataannnnnnnnnnnnnnnnnnnnnnnnnnnnnnnnnnnnnnctattaaattccttttgtgtgtgtgtcacagcagctttattcatttatttgtttttaaaaaagatgggtgaagagagaagtgagcaaatggaaggacagagttatccataaatgtcaggctacaaaattaaaccactatgaaaaccattgtcacattcggggcggggaaagaactatgtgttttgtactctggcatgacatggttggcttgtgtgaccttttgtggttccatcacgagttgaactcccctactgtctggtttgataacagactttaatattgtcttttttatttgcatgcatttcaatcagtcacagatccagcccacctccccttcctcttccctaggaaaggctgttttagtttgtggggctttcctctttaacacaatttggctgggtgaatggacaggaacaatattgttacgtaaagccaatagctctgataacaccagccctaaacccatctgttccgggtttgggtggtaaattctgaaattagatcctgggggaccagcttttcgaatcaatttatcatccgtcacatgaattttgctatgtgttcagcaaagcatcttataggaaacaaacaacagattctagagacaccataacctgatatgtagagtgaacaccatgatagcttttgagttcatatggcaatagtctctctcgcttttgttttgagtttttttcctcttctgatgtccagtcattatcnnnnnnnnnnnnnnnnnnnnnnnngccatttttcccctcagatcataaagttacacgcacactggtcagaaccagataagggttgtggg

SEQ ID NO: 431405 - DNA, 1161 bp, Homo Sapiens
  misc_feature (59)..(76): n is a, c, g, or t
  misc_feature (888)..(898): n is a, c, g, or t
  misc_feature (1077)..(1101): n is a, c, g, or t
gggaagaacattttattgctaagcatatccttgaacgaaaatgcaaatatgaactaagnnnnnnnnnnnnnnnnnncagtaatgtcacaacatcattaaataaattcctttaggttctgctaataaaacaggaatatgatagaagctcacatagagaatgcacatgttcccataaaattgtccaaatagaaacttacactgaaaggaatataacaaatgtattattacttaaattgaaaaaaatgaaagaaagcaggaaatcaattcacaagacctcaagactccaagaacagcaatcttttacagacatcgagatataatcaacttcgtataggctgggccgtttaggttatctaaaatcgtgctttgatatctctttataatcctgtcttttttaatgataacaaaaaaattaaactcttaacacattgaaatattagataatgaggaacacctctttccacacacattagtaaaggctaccatttagattgcactttttgccccatgtcgttaagatattttttcaaagtcaaatattcatgcaacttacaaagaccagcaagagtagatttctaaatctaagcagctgattgattttcatctgtacaaaagaaattgtatatatgaccctccagaggacacacttcatttttgtgtgaatatttgtcttgctttgtctcttgcttttcggatagctatggccatacaaccagtttattgtttttctgtacattgtttcctctttacaaaaagaaaaagacaaccagaatataaaccaaacagaaataaacaggaaaaaaacatttcttaaagcagtatgtacataggtggctaaggaattataccagcaaaaatgtagtaaaatatgtgaacaaaatctgaagnnnnnnnnnnnaattctctttgacacagttaactgtgacaaaactaaaattcacactttcttcacattttaaggtttgcttttttgttgttttgctattttcttttaaaacaacattctcattccattttaagactttacagatttcctgtgtcagtcatccatcaaacatacatgataaaaaaatctgnnnnnnnnnnnnnnnnnnnnnnnnnaaccattaaatccctttgtgggtttttaaagcagcataatcatttattggtttaaaaaga

SEQ ID NO: 431406 - DNA, 464 bp, Homo Sapiens
tgtagggttcgtgagtaggggactgtagggttctgccgggggtcatggttaggagactgtaggggttgtgagtaggggactgtagggttctgccaggggtcatgggtaggagagtgtaggggtcgtgagtaggggactgtagggttccgccaggggtcatgggtaggagactgtaggggtcgtgagtaggggactgtagggttccgccaggggtcatgggtaggagagtgtaggggtcgtgagtaggggcctgtagggttccgccaggggtcatgggtaggagagtgtagggttacactaggggttgtgagtaggggagtgtagggttccgccagaggtcatggatagggagctgtatggttagttacactaggtgtagtgactaggggactgtagggttactccagggaacatgggtaggggactgtaggtttatgctaggtgtggtgagtaggggattgtag

SEQ ID NO: 431407 - DNA, 1452 bp, Homo Sapiens
  misc_feature (177)..(251): n is a, c, g, or t
  misc_feature (1017)..(1257): n is a, c, g, or t
  misc_feature (1278)..(1336): n is a, c, g, or t
caaatcgattgttttattgactgcatacagacgcgtttagaaaagggcacgggctccggggggctactccgtcccaggcccgcgcttgtgctgcgcttcgcggagagggctgatcccgaggactgaaactccccccaccccaaccccgacgctttctttcaaaatggaaaaaagaannnnnnnnnnnnnnnnnnnnnnnnnnnnnnnnnnnnnnnnnnnnnnnnnnnnnnnnnnnnnnnnnnnnnnnnnnntacactacacggtcacacttcacaggacacagacttttctcctacagggcacgcttgtcagggactacacgccgggcaaacacgattcccgccgaagcaggggcgggtggggcggggcgacgcgaggaccgagacgcgaggacggaggggctcggctccatccggatcccgtcgcacagtcgcacagtcacgagcaggctttgtgcgaactagggcgcgagccctccagagagccgcggcccgggaggccacagtcagcttcctccgcctccggcgctttccagctagggtctgggtcgggtggagccgcgggagcggcgctgttgggcgcacagacctccggaaagcccaacacacggacaacgaaattggcccgcgaccaagtccacaggctcagccgccaaggggcgcgcggtcctgcggcgctttaagttaggagagagacgacagaaaacgcattccctccctaccccccgacacacacactcgattttcccagaggctgggaagggggtgttagcaccagacccgaaatgtcgctgtctttgaaaacaacgaaaacaggaaaatctgagcgcggagctgaaaggcgccccaggcaccgggctggactccaactggccagaagtggggtgggggtgggaggacagaaggatttggttcctgccggcaggaggctttggaactaaaaactaggggttgccacgaatcccggcttctgggagtagggattgaaagggaggaggggccgggcgcggtgcctcannnnnnnnnnnnnnnnnnnnnnnnnnnnnnnnnnnnnnnnnnnnnnnnnnnnnnnnnnnnnnnnnnnnnnnnnnnnnnnnnnnnnnnnnnnnnnnnnnnnnnnnnnnnnnnnnnnnnnnnnnnnnnnnnnnnnnnnnnnnnnnnnnnnnnnnnnnnnnnnnnnnnnnnnnnnnnnnnnnnnnnnnnnnnnnnnnnnnnnnnnnnnnnnnnnnnnnnnnnnnnnnnnnnnnnnnnnnnnnnncgacagaccaagactccgtcnnnnnnnnnnnnnnnnnnnnnnnnnnnnnnnnnnnnnnnnnnnnnnnnnnnnnnnnnnnggaggaggaggggtcgaggtgggaccccacagcactccactggccttggctggcccccgaaaccaccgcgttaccgcgaggtttccaaagtcttcgctcgtttccggacgcgtggg

SEQ ID NO: 431408 - DNA, 600 bp, Homo Sapiens
tatggactccaaattgggtgagacattgtgtctggtgctctatgaagtacaaatcgatgcttcatttcaaaacactcttccacaatcttcattggagttgaaaataaacaagtttagtcaagagtaaagaataaaaacatttattttaaaaataccatttagcatcaattgccccaagtttggcaggcatgaagagtgggcagttcatgttttattagtatataaaattggctttacaggaagcattatggcaaaaaaaatgaatacttattatgaaaactgaaaaagagaagtgagtagtaagctactatcagaacgttaaggctaagaaaatgtcactatgcaatgaaaaccatctcctcctctaataagtactaacagaataggaggcttgacttacttgcatgctcctcatagaacgttttggttcatggctatgaagaggtaactgcaaaaagatgtgtgcagatcccggtactggtaggggatatacaagtggggaataagaaaaaagaaattaagcaaaatgtctttactcaaggatctctataaaaatttatttttaagaaagcctgagtaagcatgtatatttttttcctg

SEQ ID NO: 431409 - DNA, 919 bp, Homo Sapiens
  misc_feature (822)..(871): n is a, c, g, or t
tttctattcctgtgttttggtgactatgtggtatgctgagatcaaatgaaagtagcaattcccttcatagcagataaaacctgtgaattgtagcacgggacttttaaaaatattttttgtaaagcatttttagatctggtaccttgaaaagtactagaaaaatcaatatcattgccagtgcttatttccacctcagtccatagtttctcatatgtatgattttcagctattttttccatgggtaagttaagttgcattcagtataggttagcaatggtaatatattttacaaaatactaagtactttctagagacctagtattagttcacatttttaagtaataaaaagtttaattaactagaaaaagagcattctctttaaaattagggtataatttatatacagggaaatgtacagattaattattcagttcgatcagtgttgacaaacgtatacaaaagtgtaacccatattttggtctgatgtagaacatttctgtcaccccagaaggtaagtcccttcatgccctttctcagttattccctctgtcttcaccagaagcaatcactgctgagttctattactatagatttgttttgcctactcctagaacttcagataagtggaatcatacagtatgcactctttcgtgtttggcaatctttgctcagcataatatttttgagtttcttctagttattgtatgtatttgtttttccatttattgctgagtagtaatccactgtatgcatgtaacaaattcacttctgattaaagagtcagggctgggtgctgcagctcatggctgcgtggattacagnnnnnnnnnnnnnnnnnnnnnnnnnnnnnnnnnnnnnnnnnnnnnnnnnncttcaatgccagccctgggccaacatagcaaaaactctggtatctacc

SEQ ID NO: 431410 - DNA, 1262 bp, Homo Sapiens
  misc_feature (14)..(14): n is a, c, g, or t
  misc_feature (21)..(21): n is a, c, g, or t
  misc_feature (35)..(35): n is a, c, g, or t
  misc_feature (74)..(75): n is a, c, g, or t
  misc_feature (102)..(102): n is a, c, g, or t
ccaatataatagtnttatatnagtaacaaatagtngttaccagtgagacctacacacattttgcagaatatatnntaaattcatatagaatatttacatttntaagttatatttttgaaattagaagacgaagtacagctgaagtttgataccaaagaaatatatataggccaaaaatagccaagagttaacaataaaaacacaactatctgttgatataacatatggaaactttttgtcagaaagctacatcttcttaatctgattgtccaaatcattaaaatatggatgattcagtgccattttgccagaaattcgtttggctggatcatagattaacattttcgagagcaaatccaagccattttcatccaagtttttgacatgggatgctaggcttcctggtttccatttgggaaatgtattcttatagtcctgtaaagattccacttctggccacacttcattattgggagtgcccaaagctctggaaatcctgaagagttgatcaatttctgaatcccccatggaaaagtggtttcttagttgctagttcagcaaatatggtgcctatactccaaatgtcaactggagttgagtaacgagctgaccccagcaatacttctggagatctgtaccagagtgttactacctcatgtgtatatactctgataggtattccaaaagctctggcaaggccaaaatcagccagtttaattgttcctttgtcatcaatcaagagattttgaggttttaagtctctgtgaagaactcttctagagtgacaaaacacaatcccctgtaggatttggtataaataactcttaacaagtgaagaatccatgtactgaccaggagggatagaatccaagtatttcttcagatccatggaaagaaactcaaagatgagatataacctggaatcctgcataagcacatcctgaagactgactatatttggatgacgaagttcctttaatagagaaatttcccgaattgcagtactaggaaccccttcctcttcactttctagtctgatttttttcatggctaccacttgacctgtagttttgtgtctacccttatacacaactccataggtaccttctccaattttctctattttggtataatcttccatagttagtcaatgggtatggtagatcccggcttattattccgcggcggccgcagcggcagctacaacaaccgcgtcgctctccgctcaatttccaagagccagctttgaagccaagtgcccc

SEQ ID NO: 431411 - DNA, 586 bp, Homo Sapiens
ctggaaccaccagagcaaaacccagcctggggaatctctttagttcctcttgctaccacatccatgaatatgtctgctatgcttatgcatttcttcaggtcttgcatgttcttcattaaatgagttgactgtgctgcaacctcaaatttttgaaaatgctcatgtcactttggtgtttgggatgattatttctcctacttgtttgagtctctgcagataaccagactctgcctgtctcctcctcctttcccttctatgacaccacagatgataaaggtgctaagcaaatagatgttaagtaaaacaccaatgtgggttcagtttaataccgtgctctatcaacccgctctattgcctagcaaccatggtggctcaccccgagttcattttcatttaaatgtgccacacagaaaagcagcctaaatatatatcgtcagttctgaagcatataatctgtaaactacaggaacaggcagatcatttccattagttttttatgtagcaaaaaccacaattttcacccaaagagtgtaattatattcaaattctgaacgactgcctcggaaatagttgaaattcatagttg

SEQ ID NO: 431412 - DNA, 764 bp, Homo Sapiens
attcaattgtcttacggtttattttttcaggcagaaaatctatttcaggaacttcaggaacattttcaagctctgacggcaacattaaacctcagaaatatccttttctacctttaacaaatgctgtgattctttcggactggtagattatcatggagtatctttttgttgtctggtagtagtaggtaatagtttacttaggatttcccagtatttacttctgtgcttttatgtggcttcctgatgtgttaattacccctcacctatagcaaaagctgcacctccggccgggtgcagtggcccataaggaaattttctaactatatgaactgaagggccatggcttctacagaaaatatgtttacatcaaatacaatcttgggaagaataaaaaatagctctcctattccttacagggaaggctataaacaatattttattgtactgtttttataaccagagtaaacctttggattctgtcatggattgaattgtgtaaccgcaaaatttatatattgaagtcctaacccccagcacctcagactgtgacttttgtggacataagatccttgcaaatgtaattagttaagattaggccatgctggagcagggtgggccccaatccaacacagctggtgtcactacgaaaaggggaaattttggacaccagcacccacacagggaggacacaggtgaaggcagagatggggcgaagtatccacacaccaaggaactgaaaataccaccagcagcccccagaagcc

SEQ ID NO: 431413 - DNA, 1274 bp, Homo Sapiens
  misc_feature (757)..(757): n is a, c, g, or t
gctcaatgcccctggacttcagtgctgatgtagtagatgataaagttgacttgatgtctgagatgctgctgcccctgcccagaccttctcctctaataacaaggattttctgagggaaatcacatcagggcattcggggatggttccccaaatgccctgcgtggcagttatctgactgtattcaaatttaattttgttcctcatatgaatcccatgaacaaatgattttcatttggcttatgctatgcaacacacagatgtgcatgacacacacgacagaaacacgtgttcacacatgtaatgcaggcacacacatggatttgaattaagcacagcctctagtggagtatctattttttaaggtagtgaaacagacttcatatggaacagaatagattaaattttcagggaaatttaaaaatacaaatatatgcattatttcacaatggcatgttgtttagggaagtctagccccaaaatgtgtggcaactgaaatggaatctggtgtttatggaatggaccacgcaggtgacagatatcctcacatcctagtacaggatctgctttcactaagtgtatgaacaaacagaaggataaggcaggaagcccctagaatactttccagtgcgtgtcccagggctcctctaggtgagcggagggctccaagctccccaccgtgtctgtctggggctgtgctcatggccacttggccctgcgcaggaggaatgtctatgtgcaggaagcagctgccctggcntgggctctgccccctgctgctggcccccagcccactctgtctgcctccagagacccctctgccttcacagccctgggagccctgcatccagcagcccatgcccgtgtcctctctcaaggccggggcctgtccttcagctccctgctgtcagttcacacagaatcacagacactgcagcttacagacaaaccccgtgtggcattcattccccaacggcagggcctgaccacactcagatcacccaaatccatctgtgaaaaaccacaactatgagaagagccttccttctgctgagcccactgagccttcctcaaagtctaccctgggctccatcctggcctgccctccatgcagggggagcagtcctcaggccctgcccctgctcctgatgcccccacccaggggggctccttggctccagcccctccccccaggctcagtccagctgggatgctggtctcagcccacccagctctgcttgacttggtgggtgcagtgagggccgggactgagctcg

SEQ ID NO: 431414 - DNA, 841 bp, Homo Sapiens
  misc_feature (457)..(457): n is a, c, g, or t
tgcatggctcccagggctgtgaaggcagaggggtctctggaggcagacagggtgggctgggggccagcagcagggggcagagccccagccagggcagctgcttcctgcacatagacattcctcctgcgcagggccaagtgcccatgagcacagccccagacagacacggtggggagcttggagccctccgctcacctagaggagccctgggacacgcactggaaaaatgaagacaagccccacacccacctcagcccttgcttggccatgctgtggccctttggaaatgaccctgtgtgctcccctcgcgacccttgcatgcctttcatgcctgatgccgtagagtagaacacagccccggaatgcttccagttgcttgcaagggaccatgccggcccgggtggtccatgcctgcggggtgtctgtatcctgcaagaggacgcccctacagacccancaacccaagttgccaacccgtgtttcccaaactttaaagccacccagggcttctggaacacctgtcatagaagcaataactctaactctatactgtagagatgagtctggtccgaagcagattagtaatttagagataagccatgcatacaaattttgccccattctcctggcttggggtggtgggaggcggggagctgccactcccaaagcctccaccccttcctgaagacccagctatgaaaccgcagttcctgtgggttgggctgcccaggctggtcagagctcagcaccccaggtctggtgagcagacagagccggcgttaaaccccgatcaggtcattgtcaccacacccttgcttggataaggaaggaaggaggcaaa

SEQ ID NO: 431415 - DNA, 896 bp, Homo Sapiens
  misc_feature (83)..(96): n is a, c, g, or t
  misc_feature (119)..(349): n is a, c, g, or t
  misc_feature (849)..(849): n is a, c, g, or t
tccaaaggaaacaaacaactacttttattgttaaactttcaattcacagattaactttcaaaggttcatatttcccacgttcnnnnnnnnnnnnnngagacagggtctcgctctgtctnnnnnnnnnnnnnnnnnnnnnnnnnnnnnnnnnnnnnnnnnnnnnnnnnnnnnnnnnnnnnnnnnnnnnnnnnnnnnnnnnnnnnnnnnnnnnnnnnnnnnnnnnnnnnnnnnnnnnnnnnnnnnnnnnnnnnnnnnnnnnnnnnnnnnnnnnnnnnnnnnnnnnnnnnnnnnnnnnnnnnnnnnnnnnnnnnnnnnnnnnnnnnnnnnnnnnnnnnnnnnnnnnnnnnnngtgtgagccaccgcactcggcccctatttcccacattcttaatgagaccccatccacagtggtccaatcaactttcaaattagctctggggaaaaaaatacatttaatgaaagctagaaaacctagagaaggtcttgctcttcatctttcactgcagctatggacagctcggcaccacatttgcaccaatcagcatgtttgcccatgtcctgccaaggagagaagtttacatcatcactgacaaggtgtgttcacctattctcatcacgtaacactgatggattccatacctaatttatcaatctaagacattactggaccacgtaaccttacatataactacctgaccatattttcacatgaagttgctgctgcttattatacatcaaagttcacgtcaatgtggcatgaagtcaagagggatttccaaggcaaactccaatcaaaaccttggggggcttcacaggcattcttcccagtgtgtaggatttttcacattntaaggtttctggaaggacatggttctaaggcgtggggaaggagcttt

SEQ ID NO: 431416 - DNA, 1139 bp, Homo Sapiens
  misc_feature (118)..(126): n is a, c, g, or t
aaggaagttccacacacactccaaagccgatttcaaattcagaacctgaatgccatgatgtaccatgtagtttggggaatgcaaattgttctctccctgttttcatttcgggaccagnnnnnnnnncaactctgcataaaaatctataaagtactgaatccgcattactgctgaaaatccttttgccagctaattgtgagagtttacacaagtctctgatttcagaagagactgttaaaaccaaaacaatgatgggcagctcttttaagtgtaggtgtgaaggtcccattttcaatggaatttccaactgttatcactgggattgactttactttttaaacacataatgtgtactgtgtggcattgtaatttagatataacacacttaagttttgctttttaaatctctctgtggagaaaggttgttgttaatcctttccagaatgatctattctgagctttcctggagttaggcccttctagggagagaatttttttattgtcatcaggaaacgaaacctttgtgctctgcagcctttttcttctgaaaggctaagtggggctaaaattatccttttagttttctgctttaacaagaagagaaggacttggtgtgaaagaatttcttctctcagtccaatggtataatttttagcactccgcttcctctgtagggtttagccctacagtttgaacaattattttaatccagctaagatgtggccaacactgtgaaatacaggagatgttaaggttttgctgacttttagattaaaatcttaaaatttcacattatattttaattacttgaaaagtttaattacctagtaaagattgtttctaatagatgagaacataaatttaatagttttcatccttttttaaagtgtgtgcaacaattaatatgcctgccttatttgaggacatgataaaatgtacccaaaatgacttcgaactgtctaatgcctcagaaaagtaacttaaaatcaaccacttcgtgcttaaatgtttttatattatgaaccgatttcaacaagttttaaagctgttaatatctcattgctgtgtttgacatacaagtacattcattggttctatagtgttaatgatgacaaattaaaggtgttttttcagtgctc

SEQ ID NO: 431417 - DNA, 848 bp, Homo Sapiens
  misc_feature (83)..(115): n is a, c, g, or t
  misc_feature (161)..(212): n is a, c, g, or t
gattagggaccttccgtttagctgcatatgtacatatacatgtacaatttattatatatttgcgttaaaatagcctatctgcnnnnnnnnnnnnnnnnnnnnnnnnnnnnnnnnncactcacacgcataaatacacagtctatttagttacctttaatgtnnnnnnnnnnnnnnnnnnnnnnnnnnnnnnnnnnnnnnnnnnnnnnnnnnnngtggcaatttagttggaaggaggcggtcccagcatgttgacaggcagggtgttcagagtgcccaggcacactggtggggggtggttacaggctcacgtagctcaggggcttctgcaggtctcaggggagtgggaacaaagtgtcccaccccttccccttttcctcaaacctcaagccactggtctctatggatagatcctttgcatcccaccggattgaggaatgagtcacaacagctgcaaggctcttaaagcaacatttaaaccttttggcggctgtcatttctgtgaggagggtgcctctcaccagccgcatggccggaggatccctgcagcgctttggagaccaacacccagatcctttgcccaggagtgcgattaattcctcactggatgctgggggagggcccctcaggtgagcagcccaccactgacttcagcgttgctggctcggttatcagactctcatccaacacaagctcacaaggaaagccgttccttgctccttgtggagggagctaccgtcactgccctgagaccaccagccaagaaagtaggtatgtccaggtagggaattcagagggacccagtgcatccaattatacaattatacccagaaggcccagtgtggagagag

SEQ ID NO: 431418 - DNA, 2939 bp, Homo Sapiens
  misc_feature (2357)..(2415): n is a, c, g, or t
  misc_feature (2830)..(2830): n is a, c, g, or t
ggaattcctgcggatgatagattcaaagagccacctgcatttggacaatgtgtgacttgttatggtccgatccttctgaagattttggaaatgaaaaatcacaggaacattttagtcacaatacagttcgaggatgttcttatttttataactatccagcagtgtgtgaatttttgcaaaacaataatttgttatcgattattagagctcatgaagctcaagatgcaggctatagaatgtacagaaaaagtcaaactacagggttcccttcattaataacaattttttcggcacctaattacttagatgtctacaataataaagctgctgtattaaagtatgaaaataatgtgatgaatattcgacagtttaactgttctccacatccttactggttgcctaattttatggatgtcttcacgtggtctttaccgtttgttggagaaaaagtgacagaaatgttggtaaatgttctgagtatttgctctgatgatgaactaatgactgaaggtgaagaccagtttgatgtaggttcagctgcagcccggaaagaaatcataagaaacaaaattcgagcaattggcaagatggcaagagtcttctctgttctcagggaggagagtgaaagtgtgctgacactcaagggcctgactcccacagggatgttgcctagtggagtgttagctggaggacggcagaccctgcaaagtgccacagttgaggctattgaggctgaaaaagcaatacgaggattctctccaccacatagaatctgcagttttgaagaggcaaagggtttggataggatcaatgagagaatgccacctcggaaagatgctgtacagcaagatggtttcaattctctgaacaccgcacatgccactgagaaccacgggacgggcaaccatactgcccagtgacccactacttcccagggactctcacatctcgggccccaaatggacagatcacccgaggagctggaggggtcggccaagctgactgtaaatttcacagtctctctgaagaaaccattgtgcttctgagaccctagcccccttcctggatggaggcttgagggccctgggacatgtgctatctgataagattgggtcatcgctgccaaggtggagagcagtgagcaaggggcttggggcaatttccagtggagggcatccacacctccattttatgcttgtggttcacacatttaagtttacaaatcagatttcttttccccttcagtagaattagattttgtttttcaatcatgatttcaaatgcaatcctaagagctaatgtggacttttctttttccatgaaatgtctttaaaggatgaattagcatggtcttaaaatacatttctgaggttactagctgtattttgaattgtgagcaaaatgccgagaaacccagttggcatttatacaaaatgttgacctcaggtctatagttcttaaatgtggctaattctgtaacatagtcttggtattttttaattatgaatgcatatcctatttccaggcaggctctcttacttgaacacaaatccaaaaactaatttagagtcttttttgcccagatcttttaagacttacaccccagagatttaagaagaaaacctctaaatttcaaaattatgaagaattacagaattactcatttaaggtactttaaaagaagtttgtacattgtcaaagtaaattttaattcaaatcatgtctgtaaaacttgacgtattttgtgtatgcatgttttcattttgcaaatatttaatatatagacctatgatgtacaggtacgacatgtataggttacctagatgttatgagaaattttagtttattgtgagtactcaagttgcttagagagccaccagggtgatttgctgctggctttctatcatttttatgttttaatgcaaaggaaattttaaaatgttctggaagtgtttttgattaagcaatgcagcctagaagcaatggttctgttcaatcattcagatgttagtggaagcataaaagtcaagactgcatgttgaaacctttcttttgatagttactgaactgcttggttaaactaaatggaaccatgtgctaatttttcacaattattgacctgtattgattgccactgtagtttggtatttccctttactttggtggcctgcttccctcatgccctggaatacaactcagagctccaggcagcggaaccatctattgttttgtttgccagaaagtgcaccctgtatggtctcctgtctaagttggaaatattatgcatgtgcaggactattcgagtattttataaacagtagcacacaataaattccatgcatgggccgctgctcctnnnnnnnnnnnnnnnnnnnnnnnnnnnnnnnnnnnnnnnnnnnnnnnnnnnnnnnnnnngggggggcggcgcgacaaaaaaattaccccccggaggggccccacaagatatgatgcccgaacccccgttttgtggtaaacagggcggccccataggagaggcgataataaaaaggcaggcagcacggccggagggactttaaacaacggccctggtgcgggacacacgttggcccgaggaagccactttgggaaaagaaccccaccctccggggtgggctgggacaggctgtcgggaaccaccacctccccaaacgagagatgtataagcggccctgagggcgaacaattcaaaaccatgagcgatgtactaaggtggtgacccacacgaggcaaataatgtcggtgggggaaaaaaatttggccacgggagtgatttgtgatacttttttcccggcgtctgctcatttaacanagtcatacacacgtacgcagacaaaacgaaagcacacgaagctagaacagagatatagatcagagatacatagaataacagagtgagcaacgacatcgtagaccaagta

SEQ ID NO: 431419 - DNA, 2337 bp, Homo Sapiens
  misc_feature (309)..(309): n is a, c, g, or t
  misc_feature (2260)..(2296): n is a, c, g, or t
ttgcgtataattctttttattttcatgcaaaataaaggcacacttaataacaccctttcaattttgacttacaggatttaaattcaaccccttataacaatgacttaatatctaatgttacattcatgttcagaatgcacaaagtgcagcaacaaatgcagcaaacctcaaaacaaggtgctacaaagctgcttctacattgcaagacagacaagtgtctgatggagttatttaattgaacatacttttacagacatacagctaacctaaagaaagacagacagatttaggaaagcagctacatctgcngaggaaggaaacagcatgttacagacagttaattatacataggacatttgacaaacaccacaggagaacaaactttggcatcatttaccagggtacaaaaccttgcacaaatcttttggtaactgaagggcataagtcatgttctggggcctaagcaggtagttaactctaaattaagtagttttaaatataagcatagtccaatacaatgacataaatttaaaaaattaaaaaagaaacttggaattacatttccattttagtaacaggaatatccctgattcacattctgaaactggggcttttaaaagaaaagggtgaattagacagatgaataaataaatatttcagacattatgatatgagctgctcccatatcatttcatgaaaagctgaggaactgaccattattttcaattgaaaggaatacccattctatcagttttctgccctgatcaggtattaatgagacactagctaatacagtaccctgtctaggtcagctgctgagacaggaactaaaaaacagaaggaattccctgcatgcattatgtgaattgttagcaaaagagtgaggtgtgccccagtccatctgaggcacagcaagttgcataacatcattaccactttgcagggtctgccgtcctccagctaacactccactaggcaacatccctgtgggagtcaggcccttgagtgtcagcacactttcactctcctccctgagaacagagaagactcttgccatcttgccaattgctcgaattttgtttcttatgatttctttccgggctgcagctgaacctacatcaaactggtcttcaccttcagtcattagttcatcatcagagcaaatactcagaacatttaccaacatttctgtcactttttctccaacaaacggtaaagaccacgtgaagacatccataaaattaggcaaccagtaaggatgtggagaacagttaaactgtcgaatattcatcacattattttcatactttaatacagcagctttattattgtagacatctaagtaattaggtgccgaaaaaattgttattaatgaagggaaccctgtagtttgactttttctgtacattctatagcctgcatcttgagcttcatgagctctaataatcgataacaaattattgttttgcaaaaattcacacactgctggatagttataaaaataagaacatcctcgaactgtattgtgactaaaatgttcctgtgatttttcatttccaaaatcttcagaaggatcggaccataacaagtcacacattggtccaaatgcaggtggctctttgaatctatctaatctcctaatatcatccagtgtgtgtatttctggtgaaagtccaccatgaacacaaagaaactgttggtttaaaagtgcagcaagaggcaaactatcaaaagcttccatacaagcttcatagactctttccgaatacttaattttacattcctgcttaaaggtaaaatattcagtaaggtgtctgcattcatggttgcctctcagaagaaataatgtgcttgggtatagaatcttcagaacccataaatataagacacactctatactaaaataacctctgtccacataatcgccaagaaaaaggtatcgtgtattagcaggtgatcctcctacttcaaaaagtttcatcagatcaaaaaattggccatggatgtcaccacacactgtgattggagcttctacttctatcatggttttctctctccgaaggatggcagcaccctcattgataattctaagcgcaatttcttcatctactcgaccttctttcaccaagtggttcttcagaacatcaaccctgggtatcccatccaaatcaaatacttcttcagatgtcaagcgatgtgttggggggaaagggacagctccgctctcgacgaattcgagctcggccgatttggcctgatnnnnnnnnnnnnnnnnnnnnnnnnnnnnnnnnnnnnncgccgccaccgcgtaaagtccattccccaattattgtctgc

SEQ ID NO: 431420 - DNA, 619 bp, Homo Sapiens
aaaagataagtagaaaccaagggaaaaaaatttaaaaacataggtttaagacttatttgtagattagccaaacaccctgacttgtatgcattttaataaatgtcaggcaaattgaagtaatttctgtcccagtagctgccagagtaaatccagtcctgtgctccattgtagggattaggaccttgatggaaccacctcgtcttccagtcctcttctgacttggacctgtttttgcgggctgctctttgtttttcctcaagtcgttttttttcttcactagcttgatctatctctccattttccatggctctgatgtcaggccgtaacctgcagtctgtcttgggaatcacactctccatgtctttgtctacttcattcaaaaccattgcaaaactagtaaaattatacatctgggcagaatttggaggccgtggggctattcgccatagaagaacgcttccagggataatgaatacactttcagaatccggcactggcatttcatccaactcctacagaggtgctcatctgtttgctgttcttcttctcttctgtatttttcttatcattttttttgtaagcgtcaaacgtggcagggtcaacactgtataaacattca

SEQ ID NO: 431421 - DNA, 2626 bp, Homo Sapiens
  misc_feature (511)..(523): n is a, c, g, or t
gagatttaatagccatttcaagaaatcccataaagaacctctctatgtccctttttttaatttaaaaaaaatgactcttgtctaatattcgtctataagggattaattttcagaccctttaataagtgagtgccataagaaagtcaatatatattgtttaaaagatatttcagtctaggaaagattttccttctcttggaatgtgaagatctgtcgattcatctccaatcatatgcattgacatacacagcaaagaagatataggcagtaatatcaacactgctatatcatgtgtaggacatttcttatccattttttctcttttacttgcatagttgctatgtgtttctcattgtaaaaggctgccgctgggtggcagaagccaagagaccttattaactaggctatatttttcttaacttgatctgaaatccacaattagaccacaatgcacctttggttgtatccataaaggatgctagcctgccttgtactaatgttttatatattnnnnnnnnnnnnntctatcaaccatttcatatatatcccactactcaaggtatccatggaacatgaaagaataacatttatgcagaggaaaaacaaaaacatccctgaaaatatacacactcatacacacacacgcacaggggaataaaataagaaaaccattttcctcaccatagacttgatcccatccttacaacccatccttctaacttgatgtgtataaaatatgcaaacatttcacaaatgttctttgtcatttcaaaatactttagtatatcaatatcagtagataccagtgggtgggaaagggtcattacatgaaaatatgaagaaatagccatattagttttttaacctgcaatttgcctcagcaacaaagaaaaagtgaatttttaatgctgaagataaagtaagctaaagtaccagcagaagccttggctatttatagcagttctgacaatagttttataagaacatgaagagaacagaatcacttgaaaatggatgccagtcatctcttgttcccactactgaattcttataaagtggtggcaagatagggaagggataatctgagaatttttaaaagatgatttaatgagaagaagcacaattttgattgtgatgagtcactttctgtaaacaatcttggtctatctttacccttataccttatctgtaatttaccatttattgtatttgcaaagctagtatggtttttaatcacagtaaatcctttgtattccagactttagggcagagccctgagggagtattattttacataacccgtcctagagtaacattttaggcaacattcttcattgcaagtaaaagatccataagtggcattttacacggctgcgagtattgttatatctaatcctattttaaaagatttttggtaatatgaagcttgaatactggtaacagtgatgcaatatacgcaagctgcacaacctgtatattgtatgcattgctgcgtggaggctgtttatttcaacctttttaaaaattgtgttttttagtaaaatggcttattttttcccaaaggtggaatttagcattttgtaatgatgaatataaaaatacctgtcatccccagatcatttaaaagttaactaaagtgagaatgaaaaaacaaaattccaagacactttttaaaagaatgtctgccctcacacacttttatggatttgtttttcttacatacccatcttttaacttagagatagcattttttgccctctttattttgttgtttgtttctccagagagtaaacgctttgtagttctttctttaaaaaacattttttttaaagaagaagaagccacttgaaccctcaataaaggctgttgcctaagcatggcatacttcatctgttctcatttgtgccatctgccgtgatgtcgtcacttttatggcgttaatttcctgccactacagatcttttgaagattgctggaatactggtgtctgttagaatgcttcagactacagatgtaattaaaggcttttcttaatatgttttaaccaaagatgtggagcaatccaagccacatatcttctacatcaaatttttccattttggttattttcataatctggtattgcattttgccttccctgttcatacctcaaattgattcatacctcagtttaattcagagaggtcagttaagtgacggattctgttgtggtttgaatgcagtaccagtgttctcttcgagcaaagtagacctgggtcactgtaggcataggacttggattgcttcagatggtttgctgtatcatttttcttctttttcttttcctggggacttgtttccattaaatgagagtaattaaaatcgcttgtaaatgagggcatacaagcatttgcaacaaatattcaaatagaggctcacagcggcataagctggactttgtcgccactagatgacaagatgttataactaagttaaaccacatctgtgtatctcaagggacttaattcagctgtctgtagtgaataaaagtgggaaattttcaaaagtttctcctgctggaaataaggtataatttgtattttgcagacaattcagtaaagttactggctttcttagtgaaaaaaaa

SEQ ID NO: 431422 - DNA, 629 bp, Homo Sapiens
tcggagggccggacgcactctccgtggcacagatgttctaggttcagtcgggcactcatcagtctctgcgggcatggccaggtcaagcggcagagcagggagcgctcaccttctgccatatccccagggcagacctcaacaccccagtcacaccatgacctcaggttcctgtacgcccatactccaactccaggatgtcctatttctctcttttagataaccccaatatcaagaccccagaaagctccaaactaggactccaggcccctgacagccgtatcaccccacacccaggcccggatacttccattcccggttcactccaagaccctgaccccactcacctcaaaccaaaccacatcccctcagggcccctcagtcgtcccagtactcccacccaagggactaaaactcctttctccccagtcgcctcaataccttaaactctatagcctcggtcacaccagtgtcctctagcccagtgactccataagcccttgccccagggacccgaccccctattccagaagggttgattaccccctcccaagactagcaggagctggtttcctgggaatcctaactagtgccaaagctgtgcacaggcagtcagatccaggaaccacccc

SEQ ID NO: 431423 - DNA, 1976 bp, Homo Sapiens
  misc_feature (186)..(258): n is a, c, g, or t
  misc_feature (260)..(278): n is a, c, g, or t
accagcctctttggtaggtcaacgcggctggggttcatagagttcagtagttcaagatcaagcctggactaacatggtgaaaaccctgtctcatctaaaaaaacccccaattagctgggcgtagtggcgggcgcccgtaatcctagctactcgggaggctgatgcagtagaatcgcttgaatcccnnnnnnnnnnnnnnnnnnnnnnnnnnnnnnnnnnnnnnnnnnnnnnnnnnnnnnnnnnnnnnnnnnnnnnnnncnnnnnnnnnnnnnnnnnnncacagaaaacaggaatgcataggataaaactatgtacgtagctggttgaggaggaggttctctaggacagcattcctgtctacaaacagtaaaaatttgagttttatttaaagttatcaccacttggactatcatgctgtaaacttctgcttattctgttacaaccaggtggcttctctagtctgtttttctttagattatgtctaagaaataatgatagacctatggtcttttaaagatagttcatcaaacacaagtgaatacaactttagtctttggtggaacctcttactaatgatgtagagttccgcctcttagattcatgaactgtgataactcagataaggatggttactgcagaaataatatatataaagagaaatccctcctgggtgatgtcattttccatgtagcccagtatgcccatgttgaaaagttttgttttcaaagcagtgtcctgatgtgataatggggaataacatttttttatgagggaaccctttaaaatggatgcacacagtggcattttctcctaggctcaaagctgagtacactcccgtaattttaataatattttaggcaagtcctatgacaattataccaacaagtttcttcaaccccaccaccaccccaccatctctatgctttgcttgcccagactcccttcaccctttcctctgctattaccgcttatggttgaaagtaaaaagcatctccagattacagcaaattcagtggccctgctccatagcctggcctctgctgaaggaagaaaaggggtgaaacatgaacagccatcatgggttgtgatgaggcactaccagaagcccagcttgtgtttcaaaaacaggctcttggacactttcccagcagataactcttcactggcttggagaacaggaaggactatttcacaaacaccactgtgtttgaatttctagaggctacccaggccaagaatacatccctgcagtgcttcaccacacactcattgctgcagtattcattgtcccagtccttactcacaatgggagggttctcacaaccagacctcacacatcgaggctggggtgagagtgccacaggagacccactcaccaattcaacatccatctgagaaggagactcaacctcaggaactacatctgtgatcatctcacagatagtctcaggagaaggtgcctccactgtatgggcctcagggctgttgttcataggccgctcaggactactttccacagttggtgggactaaggtagtctgcattttcaaagtgggtagaggcacactcttgatctgcagaggaggaggctgttgctgtaaattgattcgaactttctgaggtggaggctgttgcatggcctggagtggaggaggctgctgcagaatggtaacttgctgctgagtcgggggctgtggcatctgttgtaatggagggggctgtagtcggggtggaggcagttgcatagaagcagcagcagcagcagctgctgctgcctgcaacactgaccgagtgacaatctgggcttgttgactgggctggatagtagctgtactggtttggcctagttggagcccccgggaggtcaccactgtggctgggataacagtaaccatccctccttgagacatagtaatagaagagggcaacatttgtttggtaataatcaacttggtgatattgggctgacccccacc

SEQ ID NO: 431424 - DNA, 1506 bp, Homo Sapiens
ttcacacaaaaaaacgccccatgtgtgagtttggaaaaattctctgagaagggtgtttgcccccgggggcccagggacattaccttcccccttgacaaggtggcttttatacccaaacacaattttacattgggcgggcaaggtaatttccattggttcccccccactccctctaactttcaccacaatggaggagggggttttcttacgccaaccccagggccctttcaaccactattcgaagggctttggggtattaagaaagcttccccaacacaggaagaacccccactttcaaccaaaatttccgagccgttcccctttctgggggaaagaggaaggaactccaaacccttccaggaaacttaccattcctggtgattcattctcaccagaatagttctccagggagaaagggtgccttccaatgtatggggcctccagggcctgttgttcataggccggctcaagaatacttttccccagttggtgggactaaggtagtctgcattttcaaagtgggtagaggcacactcttgatctgcagaggaggaggctgttgctgtaaattgattcgaactttcttggcagcctcagttttcctcttatatacctgtttttgctcctctccaagactatcccacatggaggccacaatttttggaaaccttcaccaaaagtggcattaggattctgtcccttgatggcagcctgtgtatcacgaaaggataaagcatatgctgaaactggtttctgaggttcattaggatctttcttttttctcttctttggggccttctgctttttccctgcttccaccacgactgtcttctggctgggaagttgcctccggaaatcctcaacaccatcctcgtgaagtgaactagtaggtgaaggggtggttgaaagacgatcttcaggtgactgggcaggtggcaggatggtgccaccccctaggctcaaacccagctgggaactcagttctgactgatcaatggtggtcaactggctatgccccatcaagccagatgtcatgtctgtcattggtacatcaattgtaacaggtgggttggcactatactgagttcctatagagtggtccaagtccatggtcaagcccccactcaggagccccccgccctgctccatcaagccatgggtcatgcccacaggcatgtccaatgtctggaccccatactgggctgaaaaactgccatcctgtgaagaggaagggtctgccaggtcatcaaagtggccaaccacatctgagacagccaatgagggatcagaatccaaggagataggtgggatttcaaattcctcatcacccaagcttggtgtatggaatgtctcggcccctgacaggaaggggtgcgaaggccctgtgatcgtcaggtaattgtcatttcctccgggaaactccatcttcacacaaccgctcccaccgcctcagaccctcatcgctcccaccgcccccactggactcggaactgccgtcactccgct

SEQ ID NO: 431425 - DNA, 880 bp, Homo Sapiens
ccttgttttcctccttggaagcagcctcacaggtggcctggataggacatgcagggagagcgttgaattcctccctgaagagcttattgtcgtctgccattctccggttaatttcctcttccagcttgtccacgggcaggggtgggtatttcctgttggtgcttggggatctggccagaagtggcacactctggggctccacatcctcagtgcggccgttggataagcggaaagaattggaatggctcccagcttgcttgtatttcttaaaccttaacatgtacaaaactatgataataaacacgatcactagcagagaggacagggccaccatcaccgcaataattggtgtctcatctgaaggagggaaagtttctggagtggttgctgcggtgctggaattcccctcccagggttctgttctggcatccgtgaactggttatctggaagccacgttccatttggtgaaattgtaatgcctatagaattggtgcttgctgttcttgtggtcccattgtcagagtctgaagaattgacagtggttaaataggtgggtcccagagttatatttgggctgaatgttggtgccacagaaagagaagttagtgaagaagttgtatttgaagttttggcctcttctttacctggttctgccgttgatgagttaattaatcttgtaattcctacagaaggtgcaactgtggtagcattgttggcactgacacatatcagaccactgccgagcagaccaagaatgatccaggaatccatgcttattagcttcttttaaaaagttaattatgctctttgaacatgtgtccttagttatttgaactgcatcatccattaccactcagtggaattccataaatacctttg

SEQ ID NO: 431426 - DNA, 1281 bp, Homo Sapiens
  misc_feature (1140)..(1160): n is a, c, g, or t
  misc_feature (1206)..(1238): n is a, c, g, or t
tcctccttggaagcagcctcacaggtggcctggataggacatgcagggagagcgttgaattcctccctgaagagcttattgtcgtctgccattctccggttaatttcctcttccagcttgtccacgggcaggggtgggtatttcctgttggtgcttggggatctggccagaagtggcacactctggggctccacatcctcagtgcggccgttggataagcggaaagaattggaatggctcccagcttgcttgtatttctgtaaaccttaacatgtacaaaactatgataatagacacgatcactagcagagaggacagggccaccatcaccgcaataattggtgtctcatctcttctgtccttcgagtcagaattacctgaaggagggaaagtttctggagtggttgctgcggtgctggaattcccctcccagggttctgttctggcatccgtgaactggttatctggaagccacgttccatttggtgaaattgtaatgcctatagaattggtgcttgctgttcttgtggtcccattgtcagagtctgaagaattgacagtggttaaataggtgggtcccagagttatatttgggctgaatgttggtgccacagaaagagaagttagtgaagaagttggatttgaagttttggcctcttctttaactggttctgccgttgatgagttaattaatcttgtaattcctacagaaggtgcaactgtggtagcattgttggcactgacacatatcagaccactgccgagcagaacaagaatgaaccaggaatccatgcttattagcttcttttaaaaagttaattatgctctttgaacatgtgtccttagttatttgaactgcatcatccattaccactcagtggaattccataaatacctttggttttttttagttgtgtcacagagtcgggcgttgggcgggaccgctggggacgaggacagcggctccgcctcggctccgcggcggcgtttcgggccagccactagccctcagggccgccgcccggcccgcaggctccgagccccgcggcggcggcggcggcctcgcctccatggcgaggggaagcggctgaggggcgactgggcgggcgacagtgatggcggcagcggccggggtccgannnnnnnnnnnnnnnnnnnnntcactccgctctcgacgaattcgagctcggccgatttggcctgatnnnnnnnnnnnnnnnnnnnnnnnnnnnnnnnnnatgccgccgcaccgcgtaacgcagtccccaagtttaacccccc

SEQ ID NO: 431427 - DNA, 2174 bp, Homo Sapiens
  misc_feature (1174)..(1231): n is a, c, g, or t
ccaagcaataccgctataattaatataagaccctccaaactgggggtgtggggcccatgcgtgtgaacacagttgcccccataacctatttgggggagtgaaatttttacagggcatttcttattttctcaaccattattgttagcaaagtcctggtgggaattccacaaagttctaattgcctgtcctttaaagtgaaacattacgctttataaataaagggtggcagggaaaacaaaaagactgattagtcaaagtcagttgcatttcctgcacagggtggtaagctagttaggcgcaatagaaaaaggcaggcccgtggcatcgccgcaggttcggtaaggcacacacagtgtccttgaaggaagctgcgtgccccgaggaccggctgcaccctgcccagaccctggctgcaggggagtcagcagcttggaggaagcagggagtcagcccgcccagccccgcagtggagcagcgggggtcttgggccctggccagtccggtagacagggaggcagagacaggcttaggtgctctgctcttttgtgttctgtttttcattggaacaggggccctgcagggaggcggcggcaaggcaaggcagctgcagctgtcagggtctagggggcgacggtgggctcggcgccctcccagtgaggtggtggcggcatgcgagtctcctcggcgcggcggcagcagttttcagattgaggccaagagacctgtgacgtgattgtatctctaagtcaggagactgaagactgggcgagtgacattcaaggctagccctttgtgagtactatgaggacgtccagcaatgttcgagatcctttctaagtacactggggactggggtaccttctgggagtcaaagagctcaaggagaaaggtctttctaactgcattaggaataaagaaactcatggataacctagcccgacgcacattcctgcaacaaaggggtcaacaagagactccctaattcacttgtagagtgtaaaaaagaaataccattaatgacatattaataaacaaacagtacttatcaacaaaagacctggtcctgctatattttgagccaaagctcgtcagtaatacccaaccccttgaaacgcgtccctcaagttccctaaacagcagcagtgaggtaccacacatgtgtagggtgcacgannnnnnnnnnnnnnnnnnnnnnnnnnnnnnnnnnnnnnnnnnnnnnnnnnnnnnnnnngtcagcaccctggctttactgttcctatgcactatggggccttcattttcagcccatgtttccaaatcaacatcagtctttcccagcttcctgcatccaatgcagagggtcagggcagaggggtctgtggaaatgatgttaagaatcacgtgctctggcacccagcctctgctttcagtcctagcagttgcagtgggctctgcactgcaatagcaaatacgttattagaattaatctcaaaagaagcattttccttatggaaaaatcagttcaatttataggatctaatacaacagtaagagacaatagaagtcctcatgattgcattaagaatttccatttggcttaagaattttactcagaatttatttaaccagactccaaacctctagttacttttattggagtaattaggctctaaaggtgtttttaaaaagggggcctagtggttcgctgaggaggaagagagactctaaatgtgtgttctttttaagtgtgtttctaatcctgtttttctgacaatctgctacacctcataattacttttttccttaaacagtgactatttcatcaacagacattcaaggaactacttcagtttataaaattaaaaaaaattgtgatatccagtctctctaggcttttcttggctcttaatcccacattaaactgagaagtcagaactaagatggtaaagatgccatttaccagattaactgagaccatgttagaactgaacggcttaggcagaactttgaggggaggaaacaagttggtgctcaatctgaatcaccgtgtagcccagagatgagggtcttggcagagcccccatgacaacagtgttcccaaggatctcagcagtaaagatgaaagacttcttctttatcttctgtgcttcatgaactgccatctcaggcatccctaaatgatgccatacatttat

SEQ ID NO: 431428 - DNA, 858 bp, Homo Sapiens
  misc_feature (103)..(141): n is a, c, g, or t
  misc_feature (241)..(241): n is a, c, g, or t
agcaaatcctagcacattattaacaaaaaaatctgtacatttgccatgatacacttgaaagtgaaacaaataagatataaatacagatatggatgtaacatgnnnnnnnnnnnnnnnnnnnnnnnnnnnnnnnnnnnnnnncccacccaacctgggggtgtggggaccatgcgtgtgaacacagtgccaacataactattttggtggctgaatattttttcagagcatttctttatttccnaaacattattgttagccaagtccctggtgggaattctacaaagttcttaatttgctgtcctttaaattgtaacattacgcttgataaataaagggtggcagggaaagaaaaagactgatgagacaaagtcagttgcattacctgcacagggtggtaagctagtgaggcgcatagaaaaggcaggcccgtggcatcgccgcaggtccgggaagcacacacagtgtacttgaaggaagctgcgtgccccgaggaccggctgcaccctgcccagaccctggctgcaggggaggcagcagcttggaggaagcagggagtcagcccgcccagccccgcagtggagcagcgggggtcttggccctggccagtccggtagacagggaggcagagacaggcttaggtgctctgctcttttgtgttctggttttcattggaacaggggccctgcatgtaggctgcggcaaggcaaggcatactgcagctgtcaaggtttaaggggctaacgggggcctctgcgccctcccagtgagggggaggcggcattccaaattttctttggtgccggaggcaggaagttttaagaattgaggccacaagaaccggttccgggaattgtttct

SEQ ID NO: 431429 - DNA, 743 bp, Homo Sapiens
  misc_feature (165)..(204): n is a, c, g, or t
  misc_feature (688)..(688): n is a, c, g, or t
  misc_feature (706)..(706): n is a, c, g, or t
tgaattaagtctcatttattctagggcaaactcaaaagggtttccttttcgttttcttttttagcaaatcctagcacattattaacaaaaaaatctgtacatttgccatgatacacttgaaagtgaaacaaataagatataaatacagatatggatgtaacatgnnnnnnnnnnnnnnnnnnnnnnnnnnnnnnnnnnnnnnnncccacccaacctgggggtgtggggaccatgcgtgtgaacacagtgccaacataactattttggtggctgatattttttcagagcacttctttatttccaaacattattgttagcaaagtcctggtgggattctacaaagttcttatttgctgtcctttaaagtgtaacattacgcttgataaataaagggtggcagggaaagaaaaagactgatgagacaaagtcagttgcattacctgcacagggtggtaagctagtgaggcgcatagaaaaggcaggcccgtggcattcgcgcaggtccgggaagcacacacagtgtacttgaaggaagctgcgtgccccgaggaccggctgcaccctgcccagaccctggctgcaggggaggcagcagcttggaggaagcagggagtcagccgcccagccccgcgtggagcagcgggggtcttgggcctgccagtccgtagacaggagcagagacagcttngtgctcgcctttgtgtcngttttcatggacagggcctcaggagcgcgcaagaagc

SEQ ID NO: 431430 - DNA, 762 bp, Homo Sapiens
  misc_feature (717)..(717): n is a, c, g, or t
  misc_feature (726)..(726): n is a, c, g, or t
  misc_feature (731)..(731): n is a, c, g, or t
cagggttcacagttttttattagtcacatgggcctcccttgggagccagggcacacccaatttccaacagagggaagggcttggaagcaagtcctggagttgacactcatgttcagaaggtcaactcgacggccacctcccctccctcgccccccgacacaggggctccaggatcccccgcctcgccctcccacacaggggctccaggctcccccgcctcgccctcccacacaggggctccaggctcccccaccttgccccccaacacaggggttccaggtttggcagggcatgggttggtccttccccagatccctaaagtcctagacccccggacacctgcaacagagcttccaaagcccctgaaaacccagccagatactaggggtattgagggattcacatgacagcaaggccttcccccacatgctctcaggggggtactctcctctgcctgctgcagcctgctaaacccaccccaggggcgcctacagtcaacactgagtccttacagacactccctcgtccaccccgttcccaggcaggcagaatgctcccgagttggcatgtctagtgttctcctctccatcaggcccagaagcagcagagatggggtcacctaggacagtccaggccggcaacgggcaggccagtggagctggtggcccagatgacaggtaattacactccaaggctcctccccggaaagctcagggnaagaagganggctnagagctacacctcgtggctgtttgaggccag

SEQ ID NO: 431431 - DNA, 455 bp, Homo Sapiens
  misc_feature (203)..(203): n is a, c, g, or t
  misc_feature (210)..(210): n is a, c, g, or t
cagggttcacagttttttattagtcacatgggcctcccttgggagccagggcacacccaatttccaacagagggaagggcttggaagcaagtcctggagttgacactcatgttcagaaggtcaactcgacggccacctcccctccctcgccccccgacacaggggctccagggatcccccgcctcgccctcccacacaggggntccaggntcccccgcctcgccctcccacacaggggttccaggtttcccccaccttgccccccaacacaggggttccagggtttggcagggcatgggttgggtccttccccagatccctaaagtcctaggacccccgggacacctgcaacagagttttccaaagcccctgaaaaacccagccagataattagggggtatttgagggatttcacattgacagcaaggtttttcccccatattgtttttaggggg

SEQ ID NO: 431432 - DNA, 618 bp, Homo Sapiens
cattaatcacctaaaattccgtacgagaaaaccacttccacgtgaaggaccgcactggacctgcctgggcagagatgatgaccccacaccgacccagggctggagtgggtgtgacaagggcgccccggcttaccgagcaggcccccgtaggaagacgtctgcttgggcgggacgccgaagaacagctgtcctatgtggtcgaggtactgcaaggcacaggcagcgggctcagagggggtggacccagaccgtggggtcccctcctccctccccagccccaagctctcacctcgttgtacatggggtcccgccggagggatggctggtactgctcacacagcacagtgaacaccgtcagcttcccactgggacagagacacacagggatgtgctgggtgagcagaacaggaccacactcacctgcacaaaccaccgcgcctgcgcccaacactcacctgcacacaccaccacgcccgcgcccaacactcacctgcacacaccaccgcgcccttgcccaacactcacctgcaaccaccacgcctacgcccaacactcacctgcacacaccaccacgcctacacccaacactcacctgcaaccaccatgcccgcacccaac

SEQ ID NO: 431433 - DNA, 1662 bp, Homo Sapiens
atgttcctagaagcgactttgtgcgctataatgaaaacatgcgtcatttcttcttgacggcggggagaaccgcggtgcggccatagccaaccgaactatgctctgtgtgtgttggggagcaagggcgttgccccagtggcagagctgagggtggacgctgggtggggtcttccgggtctgggggcgcagcggcttcattgggtgaccgcagctgtgcgcggccgcccgccaatcagggttatgtgcgcaacccccccgaggacgggcctcctgtgctgcccatcagccctcccgaaaggacccagaacaaaggagtgggagagggtgacgccgcggtaaggcctgtgctttattgtgggtcaatctcgggggacgcggcggccagcaggggcgacgccccactcttgggtcccagcagcacagtgagcagcagccgcgccaccctgagccgccgcacagaaacagacacgcgccggcatgcggccaccgccagcctcagggccaggagcccccaaggcgaggagccacccaggactcgcctctgaaacgtccctccagccgtcgtcgaccgtggtgtctccacgtggcctggccagttcagtccagctcgatggggctgccgtcgctggggctctcctccccatcctcctgctctgaggagcccatgaggctggtcagaaggttcccgagcaggcccccgtaggaagacgtctgcttgggcgggacgccgaagaacagctgtcctatgcggtcgaggtactcgttgtacatggggtcccgccggagggatggctggtactgctcacacagcacagtgaacaccgtcagcttcccaccgtccacagccagcagcaggaaccagatgaagttaagcagcggctccacaaacggaggcccgtcctcgatggacgggtgcttctgggtgtacgtcgtgaagaccaccgatgcgctacttttgttttttaaacagagaaactgtagcacggcctgggccacgaacatgtccacctcgctgcggaagccgcgggacgtggaatactccaccagcatgttggcacagccctccccgtccgctgagtgcagaaaatgatacctcgactcacaatagttttgttctttccacagggtgagggccagcagctggtgcagccgggggtggcccagcttcccggagcccccactggaccacttcagggctctggacacaaaggtcacgcgctcaggagagttggggtccatcaggctgaacactttagccagattttccagcagctcgtcagccacctccacttccgccttctccagggactccaggaccagcatggacaagtctgctgcactgttttgctggccatggctgaagaagagcagggctcccgagtacatgagctcccgggcctccgtgtgcttgctctgggacatgtacctgaagaacagggtccggtacatctggtgcgcctcgtagtagtcgcccttctcgacgctggcgcgcagcttgccctccacacgctggacgccgccgcggttgcggccgccgttccgggcgctctcctgctcggccatcgccgccgccgccgccatcgggccggcgctccgcgcagggctgacgctgtcgcaggcgcccgctctcgacgaattcgagctcggccgatttggcctgat

SEQ ID NO: 431434 - DNA, 978 bp, Homo Sapiens
  misc_feature (35)..(35): n is a, c, g, or t
  misc_feature (66)..(66): n is a, c, g, or t
cctctgagggtctcgatctgtgctctgtcctggtntgcacgtcctcctctcctctccaagctgaantctcgagctcctgaaaatctcatccatgaagtcctgggagttctgtttgtaagacacagctaatcgaattgcatcattgaagagcttcacaacattggtaccatcagcagccgagacgaaatacaggggcagggagaacttctttggcaaaagttgaaagctcttttttgggtcacgtttatgtctgcatcaattttattggccaccacgatgcatgggatctctggcctgaactcccgaagctctgtataccaggtgctcaggttcctataggtgactttcctctgtacatcaaacaccatgatgcaggcgtgggccttgtggtagtaggaggcatgcatgctctggaaccgctcctggcctgccgtgtcccaaaagtccacaaggatggtccttccatctaccgtggctgtgtgcttgtacagggtcagggcgtacgtggacagctgctgtggctgaaagccatccatgagaaatctctccatgagtttggatttgcccactgcgctgtctcccaggcagatgatcttcacgttgtcatcagcatcatacttcccttggtccaactcactcggtttggttttgtcttctgccattggctcctagctgtagagaggggtccagcccaagggaggggagggtattgtcactgtcaacagggcccccgagttttcctgactgtgccaccacacagctactgcttctgcacagccagggacttcgccttgtttatccagggagacaattcctgggaagtggcagatgcctggaaagcatgatgaggggtctgccccctttcacctgtaccgtgcggttccgagtgagggctggagagaccagggacgctgcgggtcggcccctcgggccctgccgccagtctggactctgcgcgctctcgaaccacgcccgccg

SEQ ID NO: 431435 - DNA, 2035 bp, Homo Sapiens
  misc_feature (11)..(11): n is a, c, g, or t
  misc_feature (14)..(14): n is a, c, g, or t
  misc_feature (16)..(16): n is a, c, g, or t
  misc_feature (42)..(42): n is a, c, g, or t
  misc_feature (50)..(51): n is a, c, g, or t
  misc_feature (85)..(85): n is a, c, g, or t
  misc_feature (136)..(136): n is a, c, g, or t
  misc_feature (173)..(181): n is a, c, g, or t
  misc_feature (288)..(288): n is a, c, g, or t
  misc_feature (382)..(382): n is a, c, g, or t
  misc_feature (393)..(393): n is a, c, g, or t
  misc_feature (431)..(704): n is a, c, g, or t
  misc_feature (707)..(707): n is a, c, g, or t
  misc_feature (753)..(753): n is a, c, g, or t
  misc_feature (765)..(765): n is a, c, g, or t
  misc_feature (877)..(877): n is a, c, g, or t
  misc_feature (879)..(899): n is a, c, g, or t
  misc_feature (965)..(981): n is a, c, g, or t
aacaataaaancananccctattaataaacacaatgcaaacnatgcccgnnattatcataaaatcatactagcaagccacaagtnccagagaggggtgaacaggcatatctgctagctctcctcttgcagtcctcnccctcccacaggaggcacaaggtccaaactattcctnnnnnnnnnggccagcctctttatgctgaaataggaactttaaaggaagctcttcttgtagtccaaatggacgtaccttgtggtatggctgtaaggactcgattttaccgcttgtntattcctaactatagctaggcctgtcacctgctgttcctgtgatctcagctttacctagaagagctcctgaaacagagtgggtacacgggaaanctggaatgaanagctatctgctcaaaaacaattgtttaaaaacagatgnnnnnnnnnnnnnnnnnnnnnnnnnnnnnnnnnnnnnnnnnnnnnnnnnnnnnnnnnnnnnnnnnnnnnnnnnnnnnnnnnnnnnnnnnnnnnnnnnnnnnnnnnnnnnnnnnnnnnnnnnnnnnnnnnnnnnnnnnnnnnnnnnnnnnnnnnnnnnnnnnnnnnnnnnnnnnnnnnnnnnnnnnnnnnnnnnnnnnnnnnnnnnnnnnnnnnnnnnnnnnnnnnnnnnnnnnnnnnnnnnnnnnnnnnnnnnnnnnnnnnnnnnnnnnnnnnnggncgaacaaagaaacaaacaaaccagatgactgggagactgaagaggnaaaaagatgggngaaaacgtagggtaaggatggggcctcacagactcagctgtgggtgggggggtaatcattacctcaggagaagcccaaggaattgtccccgaggtgagctttggaaagaaancnnnnnnnnnnnnnnnnnnnnncacctaaatttcctgtattaaagtgacacataatcatgttttctgattctcttcactgtctgcctnnnnnnnnnnnnnnnnnaaggtgttaatgatgctgatccctaattctgcttcaaggagatctggtggggaattcttccaccagtccagagtttgctggtgctgacctcatccctgtatcacgggccttgaatgtgggaggctaataggatgggtgggttgcaggaggtagaagaggggatggcctagagagtttctccattcagagctggagagttgttgaagggaagggtattttaaaagggctccacccacccctagccccagcccctcagctgtggggagaggccacctcctctgatggggtctcgatgctgctgctctgttcctggtctggcacgtcctcctcttcctgctccaagctgaagttctcgagctcctgaaaaatctcatccatgaagtcctgggagttctgtttgtaagacacagctaatcgaattgcatcattgaagagcttgctagctacctctgcagtcaaccacaccttcacaacattggtaccatcagcagccgagacgaaatacaggggcagggagaacttcttggcaaaattgaagcttttttgggtcacgtttatgtctgcatgatgcaggcatgggccttgtggtagtaggaggcatgcatgctctggaaccgctcctggcctgccgtgtcccaaaagtccacaaggatggtcttgccatctaccgtggctgtgtgcttgtacagggtcagggcgtacgtggacagctgctgtggctgaaagccatccatgagaaatctctccatgagtttggatttgcccactgcgctgtctcccaggcagatgatcttcacgttgtcatcagcatcatacttcccttggtccaactcactcggtttggttttgtcttctgccattggctcctagccgtagagaggggtccagcccaagggaggggagggtattgtcactgtgtgtggttccgagtgagggctggagagaccagggacgctgcgggtcggcccctcgggccctgccgccagtctggactctgcgcgctctcgaaccacgcccgccggcccagctcgcgccgcagcgcactccatcccgg

SEQ ID NO: 431436 - DNA, 1347 bp, Homo Sapiens
  misc_feature (13)..(13): n is a, c, g, or t
  misc_feature (416)..(451): n is a, c, g, or t
  misc_feature (618)..(883): n is a, c, g, or t
  misc_feature (897)..(897): n is a, c, g, or t
cttgaacaggaantaaggcgtgccaaccagggaaaaccacaacatggaagcccctcaaaagaagcggcctccccccccagtgaggggctgggtaaagagtggggggagcccttttaaatgaccttcccttcagaacttctccagctgtgaaagaagaaactctataggccatcccctcttttactgcctgcgacccacccatcctattagcctcccacattctaggcccgtgatacagggatgaggtcagcaccagcaaactctggactggtggaagaattccccaccagatctccttgaagcagaagtagggatcagcatcattaacaccttccccaccccctccccgcaggcagacagtgaagagaatcagaaaacatgattatgtgtcactttaatacaggaaatttaggtgnnnnnnnnnnnnnnnnnnnnnnnnnnnnnnnnnnnnccaaagctcacctcggggacaattccttgggcttctcctgaggtaatgattacccccccacccacagctgagtctgtgaggccccatcctttccctacgttttctcccatcttttttcctcttcagtctcccagtcatctggtttgtttgtttctttgttcgttccnnnnnnnnnnnnnnnnnnnnnnnnnnnnnnnnnnnnnnnnnnnnnnnnnnnnnnnnnnnnnnnnnnnnnnnnnnnnnnnnnnnnnnnnnnnnnnnnnnnnnnnnnnnnnnnnnnnnnnnnnnnnnnnnnnnnnnnnnnnnnnnnnnnnnnnnnnnnnnnnnnnnnnnnnnnnnnnnnnnnnnnnnnnnnnnnnnnnnnnnnnnnnnnnnnnnnnnnnnnnnnnnnnnnnnnnnnnnnnnnnnnnnnnnnnnnnnnnnnnnnnnnnnccaatcatctgttnttaaacaattgtttttgagcagatagctattcattccagatttccgtgtacccactctgtttcaggagctcttctaggtaaagctgagatcacaggaacagcaggtgacaggcctagctatagttaggaatacacaagcggtaaaatcgagtccttacagccataccacaaggtacgtccatttggactacaagaagagcttcctttaaagttcctatttcagcataaagaggctgtccttttttttgaggaatagtttggaccttgtgcctcctgtgggaggctgaggactgcaagaggagagctagcagatatgcctgttcacccctctctggtacttgtggcttgctagtatgtttttatgataatctcgggcattgtttgcattgtgtttattaatagggttttgtttttattgtttccttttttacagtagaggctgaatgacat

SEQ ID NO: 431437 - DNA, 1202 bp, Homo Sapiens
acgctgcggcaagtgaaaggttataagagtgctcccatggaagtcgtttgcccacccatacccggaaaattggtgggtaaaagaccatcatgtccgtgttttagaggggccttgaaatggggggggtctaatgacgatagggttggttcccaagaggcttgataagaggggttgggcctaaggcaggtttcccccattccacaccggagaggaattgttccaggggaagggtacttctcaaaggggggtccgtcccaccccttaggccccagccccttcaagctgtggggagagggccgcctcctttgaatggggtctcgatgctgctgctttgtttcctggtctggcacgtcctcctcttcctgctccaagctgaagttctcgagctcctgaaaaatctcatccatgaagtcctgggagttctgtttgtaagacacagctaatcgaattgcatcattgaagagcttcacaacattggtaccatcagcagccgagacgaaatacaggggcagggagaacttcttggcaaaattgaagcttttttgggtcacgtttatgtctgcatcaattttattggccaccacgatgcatgggatctctggcctgaactcccgaagctctgtataccaggtgctcaggttcctataggtgactttcctctgtacatcaaacaccatgatgcaggcgtgggccttgtggtagtaggaggcatgcatgctctggaaccgctcctggcctgccgtgtcccaaaagtccacaaggatggtccttccatctaccgtggctgtgtgcttgtacagggtcagggcgtacgtggacagctgctgtggctgaaagccatccatgagaaatctctccatgagtttggatttgcccactgcgctgtctcccaggcagatgatcttcacgttgtcatcagcatcatacttcccttggtccaactcactcggtttggttttgtcttctgccattggctcctagctgtagagaggggtccagcccaagggaggggagggtattgtcagtgcggttccgagtgagggctggagagaccagggacgctgcgggtcggcccctcgggccctgccgccagtctggactctgcgcgctctcgaaccacgcccgccggcccagctcgcgccgcagcgcactccacttccggctcggcccgcgtcctcgcagctgctacgcaaccgcccgct

SEQ ID NO: 431438 - DNA, 882 bp, Homo Sapiens
tggtaggctaataggatgttcggtttgcaggaagtagaagaggggttggcctagagagtttcgtccattcagagctggagacttgttgaagggaaggtatttttaaaaggggctccaccccacccctagccccagcccctcagctgtggggagaggcccacctcctctgatggggtctcgatgctgctgctctgttcctggtctggcacgtcctcctcttcctgttccaagctgaagttctcgagctcctgaaaaatctcatccatgaagtcctgggagttctgtttgtaagacacagctaatcgaattgcatcattgaagagcttcacaacactggtaccatcagcagccgagacgaaatacaggggcagggagaacttcttggcaaaattgaagcttttttgggtcacgtttatgtctgccacaaggatggtcttgccatctaccgtggctgtgtgcttgtacagggtcagggcgtacgtggacagctgctgtggctgaaagccatccatgagaaatctctccatgagtttggatttgcccactgcgctgtctcccgggcagatgatcttcacgttgtcatcagcatcatacttcccttggtccaactcactcggtttggttttgtcttctgccattggctcctagccgtagagaggggtccagcccaagggaggggagggtattgtcgctgtgtgcggttccgagtgagggctggagagaccagggacgctgcgggtcggcccctcgggccctgccgccagtctggactctgcgcgctctcgaaccacgcccgccggcccagctcgcgccgcagcgcactccacttccggctcgccccgcgtcctcgcagctgctagaccgggaattccggaccggtcc

SEQ ID NO: 431439 - DNA, 692 bp, Homo Sapiens
  misc_feature (194)..(324): n is a, c, g, or t
tcagacgtcccgtgttccagctcactcggtttggtttgtgtcttgtgccattggctccgagctgtagagagggctccagcccaagggagggtagggtattgtcactgtctgtaccctgtagagagagcgacagaaagccaaatccagcttcatggctccatgcttgaagacgttcgtgtctgtttgttgtagannnnnnnnnnnnnnnnnnnnnnnnnnnnnnnnnnnnnnnnnnnnnnnnnnnnnnnnnnnnnnnnnnnnnnnnnnnnnnnnnnnnnnnnnnnnnnnnnnnnnnnnnnnnnnnnnnnnnnnnnnnnnnnnnnnttacgggcgaagacttgcttgtccgtgtccttgccatctaagtgggtaagctatctttcgataaatgtttttggccaccaaccatgtccaggcatcgccaggctgcccgtcccgccccccacaacagcctcgcgaagccacctttccgtgcttcccccgacccggacgccctctcgcccacaccgctagggaggcctcggaggggctgtccccgcgtgctaagccagccaaccggggcggatttgccctcacgtgcggttccgagtgagggctggagagaccagggacgctgcgggtcggcccctcgggccctgccgccagtctggactctgcgcgctctcgaaccacgcccgccggcccagctcgcg

SEQ ID NO: 431440 - DNA, 722 bp, Homo Sapiens
  misc_feature (604)..(604): n is a, c, g, or t
gcgctctcctattttatcaccaagatgggggaaaagttacacatcctgtagctcacaaagggagtaaataactaaagcaccaacctggggcattcaattgtcaaccacccttaagggctctgtggttggctgtgagatggggcttgaggcctagtccccgccctcagatgactagaggcataaaggcaaagatgtcactggtctgatgccctggacatgactctgctgcctctcccaaatcaagggtaaccatagaggactggcagttctccaagagcattgtcatacacataaccacttcaacgcgagtcactttcagttcctccctggtttctgggcccaacactttcctcacctcaagttgttttttggttttggcaggtgagaagtatagaattttaaacttggtggccagatgatccccctcttcacttcacagataagaaaattgatactcagaaaattaactctaccaaagatcatatagcaagttagtaggagaccccaggtctccagattgtagccccctcaaccccttttgtgttggtggttctttttactctacaaagtcctggaccaggaggtcttggctttcacaggagcncagcctcacctcggttcacgcagcctaaggctgtgcagatggatgtggctctcactaggtgaaatttcctcaggatgacttattaaaatcctttctatcatcccctgacaatccaccc

SEQ ID NO: 431441 - DNA, 1054 bp, Homo Sapiens
  misc_feature (192)..(192): n is a, c, g, or t
  misc_feature (270)..(323): n is a, c, g, or t
  misc_feature (940)..(940): n is a, c, g, or t
tagtggcatatggaccggaaagggttaatttaaagggggggaacctcaaaagtttttttaaaaaagaaacttgtctgccacagtatgttaccagtgttaacccttctgccagttagcaaacttttgccttaagcctttttcctctaggatactccccatgtttcggtaatcttgggcatacattttttaagnatggacctctttgccttgttttgttttcatgctgctgtatgtccaagtattgttaatttcataataagacaagagttnnnnnnnnnnnnnnnnnnnnnnnnnnnnnnnnnnnnnnnnnnnnnnnnnnnnnnttgctttgttcactgcttattaaaatggaaatcctggagaatagtagttctggaatattgccgggtgaaagtccaattgtcatcacaatgttatatattgacaccccagtgtcatcagtcaggcaggagccaaacaatgaatgcccctcttaggtattccgcctgggattttgttttgtctgttccctaagaaaatatattttcattcctgcaaacacagtgctcagccttcagttcccttccacttgagttctctcttctcctgctggaagccgcccctctctgcgatggacgtgaggacgtgtccagctctgctctgtgggaaggagttggaatgttcgacagcagtgttttctctccttttctgggcctcctcgcaaaatgcccaggccctgcattttcacgctgtgctaaagcagcctttggtctgcatgggggggatggtgtgctcccaagcctgcagtcttttggagcaaggctgcttgcccgtggccttgggtgctggaatttggagggaaggctgtttctcagccccttttccctttttctgaaaacttgttccctgggcccgggcattcccaagggaaagaaaaggagggggaactggcctggtaatntccctccaacctttctcccattttcattcccccattcccaagccctgggggaaaaccccaaaaccccttggggaaagggaatgaagggcacccccttcctttggctcaaacccc

SEQ ID NO: 431442 - DNA, 644 bp, Homo Sapiens
ggccattgcgaggaggcccagaaaaggagagaaacaccgcgtcgaacattccaactccttcccacagaggcagagccggacacgtcctcacgtccatcgcagagaggggcggcttccagcaggagaagagaggactcaagctggaagggaactgaaggctgagcactagaggaatcaaaaaaactcatccactcagcaatagtggccctttcaaattaacagaggggtggggtaaggttgagggggaaggaaacagacagggggagaggaagggcctggtagaggaggggatctttcttgtcattcaagttagggcagccacgaatgtcccaaatctgttggagatgtcagaatgcagggaccgccaggtgggcacggaggctcgagccttggcgtcacccacgtcgtctgtgcagtggacaagacaggcactgcaagtggctgccaggctgggatgctgaggccttgtttgcagggaggtcgtgggcttctttgctgttggggttctggggtttggccttctcccagggcgccaacgtcttgtcgtcgtccgcgctgtccaccagggccttgtcagcgggcatgtaccaggccagcgctgtgctctgccatcagcgatcctaacctgtcggaccggtacagct

SEQ ID NO: 431443 - DNA, 445 bp, Homo Sapiens
cacgtggcttctgaatggcctgagtgagggcagggcccaggcatggaggctcctgcacccccaaggctttttggctgtgctttatggcctctggcttatactcaacccaattttacaagcatgaacttagacttctctttagtatttatatatttaaaaaccaagtttaaattaactcaaacttgacagcaactaacctctgacagaaactttaaagaaaattgaaatcttgagccacaaacatgttctttcctcactagctcctcccaggttttatcctgcacccagcttggatgagagacccactgtttcttgtgcctacttaacattagggtttcccgtggcagcttcatcctgagcactgcctgtgagccctggttctgggacttggcagtcgccttcctggagcatctttccagagccagcattagaacctgagaccccc

SEQ ID NO: 431444 - DNA, 1722 bp, Homo Sapiens
  misc_feature (30)..(30): n is a, c, g, or t
  misc_feature (45)..(45): n is a, c, g, or t
tcccttgccctttgctcccattacattggnggttgagtgctgatncctcattaccaagcccatccattccaatatttaattcaccaagcttttgaatggacctattaaggaactgttcagtaagattctgctgctgatcaggaccatcctcctgattcacgcctccttcaagcaacatctgttggtatatctgccgctgttgctccttctgttctaaatgctgttgatagcgtaatctttgcctataatattcttgaaattgttctgttgaatctcgaagctcatttttttcttgtttagctggtcctggattctgtgctccatttgcaggctctttttctgaaactgaactctggcccaagatttcactgccgataggcctctgtgcatcaacaggtgtatcacgctcaggggattcttcgtaaatactgtgacattctgtattctcaagcatgagacttctactgaggttttgtacccctggataatggaagttagcaaaggagtgtgacattggagaagttttgtttccaaggtctgaaattctcttatcatgactggttagtccacaggtgaggccatctaaagcaggattcagagagcgggtcatataggcatcagctgattgaggtcttctcattggggatgatggatagggagagagtttgctgataagaggagtcaaaagatcagcatatgcagcttttgtaggtttcagaagtttgtcaacatgaatattaagcattttctgttcaaaagcacaagagaagacagaagatggaagattctgaagccatgacagtaaactcagatccaaatcatcacaaccattaccacataagaggtcgatgccaagaagcacttcgctttctgtaatttcttctccagttgctttactctgacaaaattctacacagcattcataaagcaggcctttcattacaagctggaaataaacgattgttactagccttaaaaccagcttcacttagcttcctatcagcagggatgaattctgcaacccatgacacaagcctcttcaaaacagtgaactcgtgcggtgctgggattccagtccttaaactcggcatgattggtcagacgaggcaaagtcaaaagcttacagagcttactatagtcatctttagaaggacagtattcttctagagcatgtaaacgttgcacagcttcttgcatggtaaatttccagatgctggggctcatcttctgctgacatcgcgttgttaacacataaagcttctaaaacttctgcttcaggataatataacgtaacctcaggaaaagcatatcatctgaaaacaggccatttatgactccactttccttctccagggccagcatactaatgtgaagcttctttgaattcaggaagtccaaaattagcttaatgagtttcaacctcttgttacattcactgtttcttcagccgtcatattgatagcctgagggctccaggggcaagcccaggaggagcggctggaggagaacagcaggctgggaggccaggcaggcacagggccccgaagcggccaggctccagggctgcaggcaggagcacgacaggcggcaggtctgggtttggcagtggtcctccctcctaccgcccgcgcgtcaatccatcagttcgtcatccgtccttctcacgtccgcccctcccggcccagcgactcctcagctcagcctcttgcagactgccacgct

SEQ ID NO: 431445 - DNA, 1389 bp, Homo Sapiens
taaatgctgttgatagcgtaatctttgcctataatattcttgaaattgttctgttgaatctcgaagctcatttttttcttgtttagctggtcctggattctgtgctcttcagatttgtaattttcacaactcagtagtcttaagtctctgtgcttttgctgcatagactgacatgcggtgtgctctacccattgtaagtccagagggtgacagttctatctgcagaggatgacaggaaggaaagatcctgggtgtgccatctgcactgaatcactttgtccttgtgctcccccaccaccatgataggaagctgcttggtgaggtccccttgtaggtctgtcacctttattttcatatcataagagcctgttagcaagtagtgagctccaggggagaatcgaacagagcgaacatcactggaatgaggatgataactttgtaccattcttcctcctcttatgtcatacaacatgcagctagaatcttcttgacctgtggctaagagacgaccactgggatctacagctacagatgccactgcactgccagttccatgaaatgttgtgccaacaacacgaacacaacttggtactcgaagatcccaaaatctaacagtcttatcttgggaaccagatgcaatcatccagccactccaggtataaagtgctaaaatatgcccagtatgtccactcaaagcatggaggccctgtcctctttgacaatcggttgtataaatgttacaatcccctgctccagcacttattaaaatagctcctccgctttctgggccttccataaatgccaagtctctaattgttccatcatgcatactaaattccagatctggtcctgttgcgttacaagtctctgcattgaagggcagcactttgacgtatttgtcatttgatcctgttgctaataactgcccacaaggactccaggccacacagtaaatggatcctttatgatgtttattccttttaaaacgtaccaccggctgcttaggagtctcatgtgcacttggatcaattacatctggataggcacatactctcagagtttttgaatttgaaccaacagcatataaacctccagctggatgaaaagccactgctctaacagcttgtgtgtcttctaggatattaatacaaacaaactgcttttttgatttgtcatcctcttcccctttcgaccttgaaagactccctggagaatctccaagaggtggcttaatgaccgaatgttctgaagagatttggcttccacaaggtgattcctccagaaaaggtatgtgatttgttgatccaggattacgaggagtgcttgtatgaatatttgaagcatcatgtgttaatctctgactagagtcttggggtggtgtagtaaaac

SEQ ID NO: 431446 - DNA, 1709 bp, Homo Sapiens
  misc_feature (134)..(138): n is a, c, g, or t
  misc_feature (140)..(162): n is a, c, g, or t
ggggggattccagccctatccaaggcccgggttttcttagaaacaagtaaggcccaggtccctttccttccgggccccgggcgccaaaggaaggttttgaaaagcttttgagggccggggcggccgaccaggtnnnnntnnnnnnnnnnnnnnnnnnnnnnntaaatgtcaagaggtctttattgaaataatagcacagttacacttctaataccctttccacttgtatacaacagatgaaaaatgcttgctacatacagtgcacagacagttcaataatgagaactaatacaactgcatttgaaataaataaaatagcctatttaaataatttaaagtaaaattactgtacaatatgaaaataaagatacataaatgttagaatctacaaagctgtagaaataaaatcattattctgcattacacaaaacagtgcaagaaaaaaatccaaataagcttttggagtgcaaagtttaaatcttccattttaaattatcatgcagacatagcatttcaagccatgctatggtctatgtcaaggattttaatttttaaggagaaaaatgccagtaaatttactgtaccatcaagtgttgcatcacataactgctgctgctctgcttctacagttcagtttggaagggaggtatcctgttgcattcaaaaaactgaagttaaacaagtttctgaaagcaaacaacatttacctttttagcttgaaacaaaattatatgacaaaataattcatatccttgggtttaagaaaaaaggggcctataccatgtagtaaactaagaagcagtttttcattcatctttaaactccataatgatccttaagtgaaagcaaccatgtaacttttgagtgacatatattatggaattctgacctctagaagacaagtgataatacaatatgggatcgtgagaagagcaaaagtaattctgaacacctgggaagtttaatctgggaggaacttggttgcattacatttaataatatagttgaagtataattccatttcaatgtgcatataaaactgttatttaggcaaagaccaaggaatgcattgaatactaaaccgtaaacacattgtccatcctgacttggagtgcacaccaacaactgaagagctcttctgcagactttggcaacgagactacatatagcaggtcacagcagcacgagctcacatggaagactgaaagcactgcggaataacaccacccaacacctcctatcagtgggatacatggtaataaggggcctcttcgtgctaaaccactttcctggacactatgttcttcagatttgtaattttcacaactcagtagtcttaagtctctgtgcttttgctgcatagactgacatgcggtgtgctctacccattgtaagtccagagggtgacagttctatctgcagaggatgacaggaaggaaagatcctgggtgtgccatctgcactgaatcactttgtccttgtgctcccccaccaccatgataggaagctgcttggtgaggtccccttgtaggtctgtcacctttattttcatatcataagagcctgttagcaagtagtgagctccaggggagaatcgaacagagcgaacatcactggaatgaggatgataactttgtaccattcttcctcctcttatgtcatacaacatgcagctagaatcttcttgacctgtggctaagagacgacca

SEQ ID NO: 431447 - DNA, 1856 bp, Homo Sapiens
ttttttttaccgccatgaaaatatttatttgtggatatcatacaagtcaacaggaccagcacgaaacagatgcagcctacacagtgctgtaggaccgaggctcacaaacatccacatggcacaagcagggccggccactccaggcaaacgaagccacccccgaaccttgcagaggccgcactccctcggcagggggaccacggaggcgacaggtgctttgatgcctccgaagagctgagctccattccacggagggagcgggctgcgccgccgtcctcccattggtccagttttgcaatcactagatgaagctccggttaaagttctaaatcaggaatgacgcagccatgaagttaaaggcatccagaaggtcaccacacacctgggcaccctccaagggcccacgcggagccagctgaggactcacgtccatgctccagaacgtcagcacctctgcctcccatcaccaagaaggggcttcagacacctcatggggacctatgacggctcgagcttgacacaggttctcccagctgctcgacacgctgtgggatgtactggaagggtcttccaggcctgctgaggcctcttgtttgtcccaccagccctgcacccaccctcctcctgccaggggctgggtcttgggttagaaagtcactcgagggcttcagagccgctgacccagcttgcagctcaaaatgaggacaaaggcgcttccatccaccttcacggagatgctggctttgcaggccggtgggcgaggcgaggtccatagttttacttaggacaggtttcccaggcagtacccaggtcgtgtgggggatccccaagcagaagcttaggacggcattcgtcccctctctcgttcccacccacctatccgccagacactgggcttgcccttgctgtccgtcccagcactgacgggcaggacagagatgcatggggtgagtggccctgtggcactggaaggcatatcccaccagaaatgggtttcctgttggacaaagaccagaaatggccccgcagtatactggtggatgggaagaaaggagaggctggcatttgggggtgctgttcccaccacagccttgaagctggggccccccatcaaagcttgtcccaggcaagggtcagagatggaaggggacatctcttgctcctgggacagggtcctgcttggctcagacagtgggaaaactaaaaacacctgtttattctgccagaatcgaaagaaaaattccaggaagaacttcttactaatatacatttttaagatattgaccagtcatctaaacttactcattaaactgttttaaacaaatgaacacaccgtgttgcaatgaaaggcaggaacgtggttttagacgccgattgaaaaccagtgtctttgtgcactgagaacaggaaacattctgctctgagaacaaactgcagagtcgacaggagacacacatgcgacagaaagcccccagcaggagagaccgtgcaccctggtgggtgatgggatgcccgggcagtggcttggacacagctgtcacgccacgatgcctgctgggtcctgcagggacaggggacacaggccacacacagagcccagccacgcactgtggagcgtggcacaggccacacaaactggctcctaccacctaacagagacgagtcgcacactgaaaaaagtcccctagaaggatggctcacgtccatcctaccgggggggatggacgcagggacctggccctggctctggtctggcggcaacccctgctggtagaggcaggaggtgtgcggctggagtcagaaactgaggtgctgtctataaaaattccaagattccgccgggtgcactggctcat

SEQ ID NO: 431448 - DNA, 454 bp, Homo Sapiens
  misc_feature (441)..(441): n is a, c, g, or t
gtcgattctggcagaataaacaggtgtttttagttttcccactgtctgagccaagcaggaccctgtcccagagcaagagatgtccccttccatctctgacccttgcctgggacaagctttgatggggggccccagcttcaaggctgtggtgggaacagcacccccaaatgccagcctctcctttcttcccatccaccagtatactgcggggccatttctggtctttgtccaacaggaaacccatttctggtgggatatgccttccagtgccacagggccactcaccccatgcatctctgtcctgcccgtcagtgctgggacggacagcaagggcaagcccagtgtctgggcggataggtgggttgggaacagagagggggagaattgccgtccttaagttttttgttttggggattcccccacaagaactggggtattggnctggggaaaactg

SEQ ID NO: 431449 - DNA, 1407 bp, Homo Sapiens
  misc_feature (1329)..(1352): n is a, c, g, or t
tttaaaaattttaaatcaaacactttatttccacataacaagcgcaaaaaactcccaaacactttaacaatacaattaacgcagttatgaattatatactactcaaagccccaaggtcagaaggtcaatcagcttaacgctccaaacatttccagacatggtttttcaaagctacctttggtttttggaaaaaccagtatggaagtcaatatacattgaacgcactgaataacatttgcttatagtaaggtgtccgacaacattagctcacacctggcaagttggagcatgatctgaagtcatacactgaaatccatacacaggtttcgcccccgagctcctgcagggagaagcgagggccgtgaagggggaagaaaagggccagtccgggtgtggcgtttctcgctttgtaacagaggtatgagagtttaacactagtacactgtcaagtcattaagcttcatgttccacatggtttcttgctgaggcttgagatgggcacaaatggtggggaagatgaagtcacagaagagttttgagcaacaagatcccaaagatgctcagagagggtgggaaggagcaagctacagtttcccattgttctcacattatttcagggtgaaattgtgatgagttcagataaaatgttcaaatatttgcttagatttttaatcggttgctctatgagaaccctcatacatagcaactttgaaactttcattataaaaaagagcctacaaataaattcacaaaaaggagacaattaatgttgagcagccaaaaagtcatggtttattatatctgaagaaatttcataattcaaacacaaccaaactgtacattttacaatcacattctatttgtaaacagttaaaagccactgacttcttttgcatcttaggacacaaacagttagaatcaaggcaatgatatgatggcaaattctgtactgttaaaatttttacccttgtttagtctctcttctttgactaagcaagcattataataccatttgtgggcaaaaaaaggggggaggaaagaaagtttaaaatggtgtaactcgttagtttgcaacaacatttaaaattttctttatacaacaaacaactctgtaagcccaataccttggttacagtatgcatagttactgatttcggctttaaggtacaacagttaaacattaacacagtcacgagagagcagaaacatatggagccacttgatgggattacaaaaaattattacctattgattattagcaaaccatcatcactcactaataaaaagacagcatctgaaagcagaatgtcaaactccagctttaagcgnnnnnnnnnnnnnnnnnnnnnnnnggcagagaaaattctttaacagagcaatatgtagtatcagtgctaaaagttgggg

SEQ ID NO: 431450 - DNA, 1352 bp, Homo Sapiens
cgcaattcaaggtttggcttggactgccagtgggcttggaaacacccggggcggaaagacggccattgaagagggcgatgggagaccgaagggccagcacatcagggggagggtggcagaggttggcagaggaggcccatggaaacagaaaagttctgagaaggtggaaaaggaaaacttctgaactcggagggcagtgatgtaagttctgtttcttgggactccccctttgtgctgctggtgatgcttctgagctgcatctttaaaacgcttttgcattgggagctagaggagtcgccgccgctgtgcaggggtgaggatggcgccccactttcctcacacagtgacggtcttgttgctggttactgggggtcaagggcatctgcaccggcagtttggggggtgcagggcggaggtcggcgtctcttctttgtccgtgaggaccgccgccctgtgctgtttgctgcattgagaccctcatcgcatacgggcggtttggcttttgcccactgtgtcagtggcagaaacggatgacccaaccgtctccaccaacaggtgtcgatcctggacaccaccaggctgctgagaagctgtgtgcagagcgccgtgggcatgctcagagaccagaacgagagctgcacgcgcaatatgcggagggtggtgctcctcctgggcctcttgaatgaggatgacgcgtgccacggtatgagcctccccacccctcttgccccctgcccccacgtgggctcttcctgaggagtgggcatcatttcactgtgtgttgggggacaccctctcaggtttccatggctcagcagaagcagtgacacagtgggaatctaagagcatctctcagattttgctctagaattggcctggccaacggacttcccttcctgggggaggtgggacagaagcactccggagccaacagctcagccacggccatgctgaacgtctgtttctgcctttgtacagcctctttcttgcgggtatccaagatgcgcctcagtgtctttttaaagaagcaagaagagagccagtttcaccctctggagtggttggcaagggaagcctgcaaccaggacgctctccaggaggcgggcacattcaggtactgtgactaaaggaagcaaggagtggctccaatctggtggcagcatggggacctgcctgcagggatcctctctccatccgggccatggggactgagctgtttctttccaaacctctcagccattcaaagctgtaaagtttttccccaagaagcacacagtaggtctggacagtggccaaatggcaggtgctggactcttcctctaatttcgtgtttacagttttcggacgcgtgg

SEQ ID NO: 431451 - DNA, 680 bp, Homo Sapiens
ggtcttgaaaatttagttcttgcaccaatcaaatcctttatgtctaaaatttagactaaacactgattaagacgcaaactccagtcacatgcaccctatgtagtctgagacgattcactcacctatggatttgacaagcgctcacggctgtgtctccacctctcaccacatctgggatgtttttgtcattcgaatgcccttctgcttcctctaggaggctgcttttggaaaggaagggttcaggttccccagcacaggcttctctctgatctgtttcaatctgaatcaaaggcacttccctcgagcaaagtgatcgccttttgtggtttattggtacagggtcctggcacgaggaagtttcttttttagaatctaaagggctgtggtttgtaagagaagcagttttgctcaaagatgacactgggggctgtttacattcggtaacagagtctttcctcgggcaatcgagagactcctgaacaagcagagttggcccactgcacatcctgctcgcagctaatctatttgcacacttctctgcttgcgaggggagagccaccagaaacaggctcagtgtcagcttcctctgcatcatccacaatgattttgttcttgcgcatgagagcctcaatggagctagcccacgtttcatgaattaacatgttggtgatgtggtcagt

SEQ ID NO: 431452 - DNA, 1052 bp, Homo Sapiens
gcaggcaaagtttttaaagctaaccacaagaagaggcttggcgacccagaacggattccgctttaaagccctgggaaaaatacaagggcctgccagtaaagcccaatgattcattgcccattgccattcccaggcctgtggaagaacaagaggcaaagggtcttgtttttggggggggaaaagaaaaattaggccgggggcccccactggaagcccccagactattaaaagtgtgtgccagtgtaaagggctgtggatgggcaaatgaatttcaaaaaggaaatcagcccagccagctacagggttaacaacttagtggtggcagggagtgtacgggctccttcatcggcaggtccttctcaggatgaggcttgagagcaagtctggacaggcaaaccatctctaagtccacccaggacttaaaacacttcattgttttcccaaaagggaaaaatagcaaagccctttctgtacagtttctcctgcttagagttgggtggcagctctatacagcaaatgctgactttgctgtttgagatctttgatacagtgtgacctctgagctctgaaccaggctgcccctgacaaaaaaagtgtttcctcccacaggtaaacaaggaagaaggcactgcaaggagctctgggcctggctcagtggaggctctgccacctttccaggatcaaaggccaagggaggtgacatggcaaggaaaagatctacaggggtcagacaaggaattttagaaccacaaggtcaaaaaaccatgggctctcaggagtcacagattattaaaactgcagcatttgagaccaaaacactcatgacttagagcaccttaagcctcatggtgttggcagagattacattggaagggaagagtcaaaaggtgcttctccactgataattctgatggcttctgggccctgggcatcttctgtgaggtcagagccttggcaaacgttccctcgtgagaatacggcctgaaggctccagctgcaggaggacggctgggagaacaggctttggatatcaaccgaatgccaacattcta

SEQ ID NO: 431453 - DNA, 659 bp, Homo Sapiens
aaaactgagagcttagtcttaaaagacgaattcttcagcttaccctgcaggttgcccacactccttctgggaggactgctccacgctagctgtatcctgctgctcagcctctgctcctggagtccctgtgcctgaggtcagggatgtcgtttcttggtctggaatgtgtgcttcagaagaactggtccgcaaatgggaaactttgtgcttcttgccattccctttgtctagaggcagctgaaaccgtttggtttttggtttgggtttagtgggacccggcactgaagggcttgctgaccgctgtccagaagatggagaggatggagaacccccaggagaggtggggctggcttgcacagctgaggataaagccttgttctgctccagtcccatgctattaggagcgtctaccgtctgggtaaagttggatacctggggccctgaagcagaatcaagatcacgctgggaagaatgaatcccagttttgctggcaaggagctggttcacatgctgaagctgatagtgttcgtctgcttccccagaaggtgaagcggctgttatgcccgtagtctgagtggaggggagcacacagatgctagatgccgctgttattgcagcagtagagggggtctgtgatgtccccagttgtggaaacattc

SEQ ID NO: 431454 - DNA, 1837 bp, Homo Sapiens
  misc_feature (172)..(172): n is a, c, g, or t
taggtgacctgggccccaggacgttcccacgctgagctctgtaccacaatctggccttcggaccccaatgccaggtggaaaataggtccagggaatgtggcacccagaggccgtagtgccgctacaaactgtccgcggcgtacagtggtgtatgatccacagttcccatccntcagatcccagacacagccatgtcaagtttcagtgctgatggccacacagctcagtgcagccccatgcccatacaggacctgcacaggctttggtgccaggcctactgacagaccaccctgatgcaggagccgccacaccatgcacgtggtgtcccgggagcctgagatgaggtagatgccacaggtgtccagtgcaaggcaggttactacatcaaggtggcagctgaggtggctcaacaggtttccgcggggtagtgcagtcaccctcaggctgccatcccagtggccaccgttgaatagcagctttccatccggggccactgccagtgcttgtccactcacaccactgcctggcacccacgggccactcagcagtcgctgcgtcttgtggctgcccatggtggggtctttgctgaagctgaagtagttgcttatgttgcggtcatagggcaaccagctgtgggtgcccagcagcccactggcactcacagtcaccaacaggtctggggaaccctgggtgatgaaggagtggggctgccggtgggggaccagggctagcaccaggggtacaccatcactgacaacctgtgcgaagaatgccttgagttcgtccaggtgctggaagatgctaggtgagttagtgtccaggcgtgcaaggcgatgggctgcttcctcagctgagagccgagttggatgtggcttccttcagccagctgacagggagtctgcccaaagttgctgataatgccctccagagccttccgttcccgctcatctgtcacatggtccaggtctacagccccctcataggtgcagtaatagaagacattgagggcctcctcggcggctggcccccgctgcttgtagccaaagatgaggtcgatccactcgtgtaggtgtgcagacacatactccgactccagagcctggcggtgctgctggatgaagtcctcaggagagctggcccacgggggtagcaccacatcgcctaccttctcgttggtcagctggagacagcccaggtcaaaaccgttctggttctccaggaagtcaggaaagtagaagaattccgggatgagctccttcacatcggcagggctctccaggcgtgcctgccaggctgccgccaccgagtggaactgccggtcggagcagtcaaagcggccactttgcagctggacgtgcagggaggtgaagggctccacgcggatgaggtagtgcatcacgcctgctgcattggagtagtgggtgccatagtggaacttgtcaatggtccctgctgggtcctcaaagctttcataccacagggtactgagacaggtcattgtaggtccgccccgcaatggtgttgagttgcatcaagtactcgaagttggatatctcacgctgtacccatttctgggtaaggcctgaggcacgcagcatctcctggggggagcggctgcttaggtagccttgagaggggggccgtaggcgcaggagccacgagtacacctggttccgtacctgggtatggggtgggatggggccaggctggggtctgggagtctggctaggagatgagactggggtcgtgcccaccttgcatgggaagttgaggaagtagttggcctgatcgatcggacgcgtgggtcgacccgggaattccggaccgtacctgcagg

SEQ ID NO: 431455 - DNA, 591 bp, Homo Sapiens
gctctgtatctcaaaaaactggcgttcttccttctgtttctctgtccaggccgaaagctcctcaaatctccctttcatggcttgattatttagcttcatggcttctttcagctggtggttctcggtcaggagctctttcatctgctgcagcagctcctccggggtaaacgtgtccaggtttgggtgggccaggtgggggggtccatttcctgtgctttcactggggctgtcctccttttcagtgaggcagctgagaggttgatgggacattgccggagttgtatgtgcggactcagcacaccaggcctgtcactgactaatcttcattaatgctgaaccaggcagctgtttcaaaggtgaggaagttgggtttacagaggcgtacggctcatccaaggccaggaagtggcaccaccagctatcaaagccacacctgccgcccggcttggcttcgctcagggtcactgtttcctcggcatcgtgctgcctggagagaactcccgaccgggatgggacgctgacgggggaacctgccggcgggcggcggcggtggcggagggggcagccgggactggggtgcctagggctgat

SEQ ID NO: 431456 - DNA, 908 bp, Homo Sapiens
  misc_feature (871)..(871): n is a, c, g, or t
atcagccctaggcaccccagtcccggctgccccctccgccaccgccgccgcccgccggcaggttccctggtcagcgtcccatcccggtcgggagttctctccaggcggcacgatgccgaggaaacagtgaccctgagcgaagccaagccgggcggcaggaacttctgcaatgtcccatcaacctctcagctgcctcactgaaaaggaggacagccccagtgaaagcacaggaaatggacccccccacctggcccacccaaacctggacacatttaccccggaggagctgctgcagcagatgaaagagctcctgaccgagaaccaccagctgaaagaagccatgaagctaaataatcaagccatgaaagggagatttgaggagctttcggcctggacagagaaacagaaggaagaacgccagttttttgagatacagagcaaagaagcaaaagagcgtctaatggccttgagtcatgagaatgagaaattgaaggaagagcttggaaaactaaaagggaaatcagaaaggtcatctgaggaccccactgatgactccaggcttcccagggccgaagcggagcaggaaaaggaccagctcaggacccaggtggtgaggctacaagcagagaaggcagacctgttgggcatcgtgtctgaactgcagctcaagctgaactccagcggctcctcagaagattccttttttgaaattaggatggctgaaggagaagcagaagggtcagtaaaagaaatcaagcatagtcctgggcccacgagaacagtctccactggcacgagcagatctgcagatggggccaagaattacttcgaacatgaggagttaactgtgagccagctcctgctgtgcctnagggaagggaatcagaaggtggagagacttgaagttg

SEQ ID NO: 431457 - DNA, 402 bp, Homo Sapiens
atgagccactgtgcccggcctgttttctttcttttaaaacaagaataatgaggcaaaatatttgagtgaaaacaaataacacaaaagcacaactcttggaggaaaaaatctgacatttaccaacagttttggggaggtgatacatcaacacttaaatgatgcaatccatcacgtgaatctgtaacgtgtctatgtcaggcagaacctctccacacttggggcaggaatgaatcggaatattccgctgttgccgccagtccctgtcctcagctcctctttgaacaaggtaagcctgctggtcagagtcacttgttctcgccccatgacgactctgcatctccatcaaggactgcctggcttcgtctcgaaagcatcattctctttcagcagaactgccagctg

SEQ ID NO: 431458 - DNA, 2228 bp, Homo Sapiens
  misc_feature (60)..(60): n is a, c, g, or t
  misc_feature (71)..(71): n is a, c, g, or t
  misc_feature (81)..(81): n is a, c, g, or t
ggtctaaaaacccctgaacccccaaagtggacccaccccaacctcgaacctcccccaaantgcctggggantaacaggcangaagcccactgtgccccggccctgttttcctttcttttaaaacaagaataatgaggcaaaatatttgagtgaaaacaaataacacaaaagcacaactcttggaggaaaaaatctgacatttaccaacagttttggggaggtgatacatcaacacttaaatgatgcaatccatcacgtgaatctgtaacgtgtctatgtcaggcagaacctctccacacttggggcaggaatgaatcggaatattccgctgttgccgccagtccctgtcctcagctcctctttgaacaaggtaagcctgctggtcagagtcacttgttctcgccccatgacgactctgcatctccatcaaggactgcctgcctccgtcttcgaaagcatcattctctttcagcagaactgccagctgcaatgccagttgctccttttcctcatgaattttctctctcgctgctctttcagcatgaaaatcagaacagtaaacttccatctgagccctgaggatggtcatggtttccaggtcctcttcctgcttggcaatggtttgcttcatttcatccatttgcagctgtttggaagccagagccttctctgccagttccagtttttcactcagttccttcagcactgccctgtccactttttctgactcttttcttgttagttcctcaattgttttcaatgcattattatgttcttgaagaagcttgttgtgtgtcatctgtagcacagttaatttggacttttcatcctctgttttagcctgttccattttgatttctgatagcatgctttccacttgtagctctaactttttgttagtataaacaagctcttgcttttcattcaactctgatggaattgcagaatttttcctttcaagggcctgacacttttcttgaagtctcttcttcattagctcagcttcgctgagttttgtatgagcctcttgaagctccttaaacagagatgtcacctggaggttcagtgcttccacttcgcttccaacagtctccgggcctttctcttcatcattctctttctctgtgctcccctctgtctgggtttcaatctcagaacgattacttgttttcttttcaaaatctgaaactctttctttggcctccttgagtgcaacttcaagtctctccaccttctgattcccttcccttaggcacagcaggagctggctcacagttaactcctcatgttcgaagtaattcttggccccatctgcagatctgctcctatatttagacaatgccgtgccagtggagactgttctcgtgggcccaggactatgcttgatttcttttactgacccttctgcttctccttcagccatcctaatttcaacaaaggaatcttctgaggagccgctggagttcagcttgagctgcagttcagacacgatgcccaacaggtctgccttctctgcttgtagcctcaccacctgggtcctgagctggtccttttcctgctccgcttcggccctgggaagcctggagtcatcagtggggtcctcagatgacctttctgatttcccttttagttttccaagctcttccttcaatttctcattctcatgactcaaggccattagacgctcttttgcttctttgctctgtatctcaaaaaactggcgttcttccttctgtttctctgtccaggccgaaagctcctcaaatctccctttcatggcttgattatttagcttcatggcttctttcagctggtggttctcggtcaggagctctttcatctgctgcagcagctcctccggggtaaatgtgtccaggtttgggtgggccaggtgggggggtccatttcctgtgctttcactggggctgtcctccttttcagtgaggcagctgagaggttgatgggacattgcagaagttcctgccgcccggcttggcttcgctcagggtcactgtttcctcggcatcgtgccgcctggagagaactcccgaccgggatgggacgctgaccagggaacctgccggcgggcggcggcggtggcggagggggcagccgggactggggtgcctagggctgatgcgcggcctggcgaccccgcccagcgcggctcagctgacagccagccgctccctgcccgcgccggggaatttccccgccccgcccccgct

SEQ ID NO: 431459 - DNA, 1345 bp, Homo Sapiens
  misc_feature (53)..(61): n is a, c, g, or t
aaaaaccgtttatagtctttatgttggttggaaatcacagaaattaggcaggnnnnnnnnncccaagggaacaaatacaaacagcacagcgttccccacagttctctgctctgctctcctgcgagccggggaaggagaggggcagcctgagctcgggcgggggctgggcctggctgcccgcggctcagctctcctcgtccagggcctccgagtccccccgtgccctctcgcgctcctgccggtcgctcccaggcctgtccaggtcgggaccctcccgtacgctgtcgtgcaggtcttcagaggagccacaccttggcccctcctccgagtcccgaccctcctcgtgctccttgtcctctgcgctctcccccttctgtgatgtggcctcgccattcactggggctgagagatcggtgctgggcttgtcctccgccttctcctggggggcctcctccccggccagctcctccccggccagcttctcctcggccttctccttctccatcccagccttgttcactttctgcaccgcctcgatctttgggccgaggacccgcgacttgagccgggtatagacttctgctgccttctccattacgtccttgttcgctttgtaacggcgaatcttcttcaaggtggccaccacgtctgtgttcttctggaggatctgagaggtcacctgcagggttcccagctcctctagggcattcaggcacctcttcacgtccgggctgtcgacctttagggcaaacttgatctcactgtgcagcttctgcagcttctcctccacggagggctctttcttcttctctaccttcctgtccatcgagaagccctcggaccgcttccgggtccgctccaccttcacgggcttggcttgttgcttctcctcgggccgcactctcttctccttctggccaggtttcctggcgggctctgtgcttgaggactgcggcttcttcgctgatttcttggcctctctctccagctcggcctcgggctcggagtcagaggaggacgggggaccccggccccggcccttgcgtccccgcttcttgacgggctcatcgtcctccctgagctcgtccccgctgctgccgccgctgccccgctcagcctccccgcggtcggcccgctcgcgcctccgctccttctcctccttctcctgctcccgcaggcgccgcagctcctcctcctgctctcgccgccgccgggcctccagctcgcgcctccgcgcctcgtcccgccgcttccactcactgatgcggtccacctcgtcgctgtcactgtcactgctggagctggacggaggccgttcaggctcctcgtgccgaattcgccaccc

SEQ ID NO: 431460 - DNA, 664 bp, Homo Sapiens
  misc_feature (72)..(80): n is a, c, g, or t
tttttcttttttcattaaaaaaccatttatagtcatttcatgttggttggaaatcacagaaattaggcaggnnnnnnnnncccaagggaacaaatacaaacagcacagcgttccccacagttctctgctctgctctcctgcgagccggggaaggagaggggcagcctgagctcgggcgggggctgggcctggctgcccgcggctcagctctcctcgtccagggcctccgagtccccccgtgccctctcgcgctcctgccggtcgctcccaggcctgtccaggtcgggaccctcccgtacgctgctggtgggaacagcaaaggcggtgtgaggatgccctcccgcccctgccctgcctgtagggcggttgggtgggatgggcaccgaggagtgtacccccgttgtggcacctgaggctcgagtgccgccctcctatctgcctgtcttctgccactagagaccacaaccatctccagggtccccacgctggcgccagccaggcatagcacaaggcagctgctgggtaagtgagtgactccactgagccttgtaccagacagcagcccacagtgatgggcacaggcaccgtcagatagccgggtgcctgtgctcggggcctacctacctgggccacctggaggctcggcaagaagccaccttcccag

SEQ ID NO: 431461 - DNA, 911 bp, Homo Sapiens
tggaagactttacctgctaactttttaatccgcgtaagtagctttgtgcccataatgttcacacccgcacagatgtaacggtgtccttcgccaaaagttctccatcctaacacgtttgtcccacatgcatcaacgtttgcttcatcgtaccgcagtggcctaagctttattaagtcgatctctccctatagggaccacttgtgtcaagaagtctgggtaccgctaatccttgacccctccaaggaaactctagattcctgcccccctttgtgttgtcgttgcttcattatcataaccatgttatagtcatttcatgttggttggaaatcacagaaattaggcaggaaaattatacccaagggaacaaatacaaacagcacagcgttccccacagttctctgctctgctctcctgcgagccggggaaggagaggggcagcctgagctcgggcgggggctgggcctggctgcccgcggctcagctctcctcgtccagggcctccgagtccccccgtgccctctcgcgctcctgccggtcgctcccaggcctgtccaggtcgggaccctcccgtacgctgtcgtgcaggtcttcagaggagccacaccttggcccctcctccgagtcccgaccctcctcgtgctccttgtcctctgcgctctcccccttctgtgatgtggcctcgccattcactggggctgagagatcggtgctgggcttgtcctccgccttctcctggggggcctcctccccggccagctcctccccggccagcttctcctcggccttctccttctccatcccagccttgttcactttctgcaccgcctcgatctttgggccgagacccgcgacttgagccgggtatagacttctgctgccttttgctttacgtacttggtcgctttgtaccg

SEQ ID NO: 431462 - DNA, 1386 bp, Homo Sapiens
  misc_feature (1239)..(1274): n is a, c, g, or t
accccctttttaacagtatgattccacctataaataccctgatgaaataaatgtacaattacaaatgcctgaacagagcccaatgtgtttcctaagacctgccagaggattactgcaaagatttgatggtgagaaaaagatttcccccacccaccaaaaatatcaagcaccatcaactaaatgtttctttgcttggtcagcactctcagttatagtagcagtcctcgtaaactttatgtcagcctgaggattgtgtatctggtgaaatctgggccctaacacatgccagtttctaaagggtaaagacagaggcaaaaaagagaagaaggtagatgaaggaaagaaaaagagagctaaagaatccaattggcttagaggtgggcattctagcatatggttaattattgcatctaaatatatcattttagaaccttttcatgtaatctcattttaccctaatctgttatttggccacttaagaattaaaataaatgtatcaaagacaatggtggtcattgttgttatgttttttacctgtgagactattttagacaaactaaattcaatgaagagtatgtcaaatggtaaaattgtgttaattttcttaatctgattctattagattaccagcaaggaattaaagcggtacttcatggggctgttaccatcttgaaatgtattccaattgtggtcaaagagaacagactgatgcactgtatatgcagaactgagtaaagaagctgaaatgtcttttaaaaaaacattgccatgaatttatttaataaaagggcatatttatttatgtttacaaacaagtttcaaaaacaaaaggaaaacatgtatgcttctacttattaacctttttcaaaatgccaacagccctcatgctgtgtgaaggtctctaaagattagaaaaatcaatacagttcactcacagttcaccaagacatcactaaactaacatgtttagacaaaaacaaaaaagactaaggttctcttgtagtttgatagtctgatttaatttgatttgcctgaaataacaaaagcatttcaagcatctttcattatgtagttgatgtcctgcattaaacaatctactaaattctgaacaaaaggttattagcaagttttcaaaaattttaaaaattaaacagttgcttcaaaaccattaagtagtaaatgtatttaagaaactaattaggacagatgtcataacttcattagaacaccactgctcannnnnnnnnnnnnnnnnnnnnnnnnnnnnnnnnnnnaaacaaagcattagtgttatctatttggctattagtattagcaatttatctacaatatttaacaaggtaaattgtaggcaaaaatttagtacagtttcaatagaaacacccc

SEQ ID NO: 431463 - DNA, 585 bp, Homo Sapiens
  misc_feature (575)..(575): n is a, c, g, or t
  misc_feature (577)..(577): n is a, c, g, or t
gagattctattcatagaatcattcttcgaatgccacattcacagcaaaatttggcccattctacagggtatttagtcccacactcatggcagaattttggtaagtttccaggtgaatgtccttcaatgcctttaatatttccaccattaagggaagatgcacagtccccatctggcctggctatgtagctctcagtatatgtttttcttttgtttgtaagcacacctggggcaggatttcttgccaaactaggtggtgtggaatttcggggtttgacattagctctataaaaaagaggaaaaataatggaaaagtattgaacagtgagcatgtatttctcaaattacctattcacatgactagaaagaatacttagaagcttcagagaagttcaaaagattaaagtcccaataattattttaaatctgaaagcaaatagtagttaatattaaagataaaccaaataattttgcatttactaatactattctgatagtaaataaaatcaactaaaatatgtatatatgctttacatgaaatttataaggtaatcattctgaaggtacattttttananacagttta

SEQ ID NO: 431464 - DNA, 1268 bp, Homo Sapiens
  misc_feature (78)..(87): n is a, c, g, or t
  misc_feature (113)..(348): n is a, c, g, or t
  misc_feature (1132)..(1176): n is a, c, g, or t
aagctcctgacctcaagtgacctacccacccttggcctcccacagtgctggaagccactgcacctggctcagaatacnnnnnnnnnngagatgcagtcttgctctcatcacgnnnnnnnnnnnnnnnnnnnnnnnnnnnnnnnnnnnnnnnnnnnnnnnnnnnnnnnnnnnnnnnnnnnnnnnnnnnnnnnnnnnnnnnnnnnnnnnnnnnnnnnnnnnnnnnnnnnnnnnnnnnnnnnnnnnnnnnnnnnnnnnnnnnnnnnnnnnnnnnnnnnnnnnnnnnnnnnnnnnnnnnnnnnnnnnnnnnnnnnnnnnnnnnnnnnnnnnnnnnnnnnnnnnnnnnnnnnngtgtgagccaccatgcccggcccagaatactttttaaaagaagagcaggttagaggaaagaaaaaaattgatgctgaatgtggtgatgaaagcatgtttctaaaatgggaagcagatgcttaaagaggaaagactaatctgggattttgccccatttctctggtttttcactcctatatttaattctcacaatcgtgtcgtcacatagtgcaaaaaacaaaattcttgtaaagtccccaggagttttatgcttgggtgaaagttttagcctgagtattttcttcctcttaaaaaaggtgggaaatgagacattgaggaattaacatataaatgtctgctatgggtttaagagaactggcgtatttggaatgcttcttacactaacactgtctcattgtaaaatataaaaccccttactctaactacatttttattcctctggtagtgtggtatccaggcaacatatcacttctgctatgtaattctaagaattctcatttctagagtacctgagccaaacaaatacacaacggaagctgcagctgtatcatcactagcaatttgctcatcattatttactacctttgaacctaaggtttcctgcctatgcttttgaaagcaaaaatcagtctcctttgcatgaaaaaaagcctttagatttttaaaacatgttacttacccagaatgctaaaaataccagtttgattaccccaaattattttggaaaatctattccataagggaaagtcttacaccaaacccctttaaaccagattaccccttnnnnnnnnnnnnnnnnnnnnnnnnnnnnnnnnnnnnnnnnnnnnngaaaaactggttccaattcttaagcaaaggaaaccggcactttcttctttgaaaaagggtccgggggcctaaagtttaaagggcccctaccg

SEQ ID NO: 431465 - DNA, 988 bp, Homo Sapiens
ttttttttgattaagaaataactttatttttcatgtgtcaatcccatgattgaaaagacatgttgctctcaagtagataagaggcataatcttaaacaaaattctttctgaaaatttagcttatgaactcattacactgcaaaccagagaaggagcacaaaaagctgcagcccacattgaaacctggcaaacactctccgccaaaattagtagcaggaatgttaaagctttatcaaaaacatgtcagcaacggaatagcaacaatacagccattaactgttgtgccttcaacttaagaaaagcatttaaagaatcaccccatttcttataaaaatcatttctcagaaaagaattgttaatcaaaagactattagaactggaactctcttctttcacttcagttctagattttctttaatcaacaatatctctagttaatacttggacagaatttggcttctcagaagagtctttgtcatttaagcacagtgtggaatgggaaaaagtgtatagttacaaggaaactagaagagtacaaaaaaatagtcacttctgaaactcgctgatgctcaagaaatcagagacccttcattaaggtgggtctcatatgcctgagagctttgtgcttgaggaagtatgacttagaggtagctctggttctggtaatttatatttaattataatttgctgtatcctgtcacaagagagttctaatattttcagcaaagtaaaagcattcaacattttttccttacccaccctatagcttccccatagaaaaagataagaaaaagcttaatgtgactccacatagaatagcagctaattcagcaattcgcactgtatggttgttgacaggactaggaaaggcagcctagtgccccaagctgtaggagctggatctgcagaagtgtgcaggtctgctgtgttcacagcactcagggaaagaggggaggaggtggctgatgagggtgcacgttcggagaag

SEQ ID NO: 431466 - DNA, 584 bp, Homo Sapiens
  misc_feature (495)..(511): n is a, c, g, or t
aaatgaaaaagcaatacattccttgatgcatttgcatgaaggttgttcaactttgtttgaggtagttgtccgtttgagtcatgggcaaatgaaggactttggtcattttggacacttaagtaatgtttggtgtctgtttcttaggagtgactgggggagggaagattattttagctatttatttgtaatattttaaccctttatctgtttgtttttatacagtgtttcgttctaaatctatgaggtttagggttcaaaatgatggaaggccgaagagcaaggcttatatggtggtagggagcttatagcttgtgctaatactgtagcatcaagcccaagcaaattagtcagagcccgcctttagagttaaatataatagaaaaaccaaaatgatatttttattttaggagggtttaaatagggttcagagatcataggaatattaggagttacctctctgtggaggtattgacttgtaatctcattttcctttcnnnnnnnnnnnnnnnnngctaaggtggcttgttgggatgtaaacatgttttcagatgcagtaaggtttagtgtaggacagccttcctgac

SEQ ID NO: 431467 - DNA, 447 bp, Homo Sapiens
  misc_feature (52)..(52): n is a, c, g, or t
  misc_feature (62)..(62): n is a, c, g, or t
  misc_feature (91)..(210): n is a, c, g, or t
atggattcgggtggcttaaaaccttgtaaatcccaagcacttgggaaggcanaaggtggggnaagatcatttacacctcaagaagttccannnnnnnnnnnnnnnnnnnnnnnnnnnnnnnnnnnnnnnnnnnnnnnnnnnnnnnnnnnnnnnnnnnnnnnnnnnnnnnnnnnnnnnnnnnnnnnnnnnnnnnnnnnnnnnnnnnnnnnncttgaacccgagatgtggaggctgccattctccttccttttggggagcacttttggtggcaccaaggctggtgtggggtagtggagagagcactgagcttagagtcacaaccagatgaaactgctctggtcttcactagctgtgtgacttgggcaagcagcttgcagtctctgagcctctgagatccctgatggacgaggagaacaatgaccccctccccaggctgtgctgagagag

SEQ ID NO: 431468 - DNA, 1598 bp, Homo Sapiens
gcttctatggaagatttttaatacaggttgtttctattttactttttctggctgaaaggattttacatttattcaaagtcaaaagggaaaagaaatccaagaactacagaagagcagttgaagtgatttatgcttgatttctaaatgcaacttatgtttatacataatttaaaactcaaagaaagcatgcttatacaatcatgtgcaactttaaactttaagaactctggatgaatacatggtggcaacagtccatgacacctgaaaacatcatttgtggagtggcgtagagttcagtgttcgcagtcgcatattacaaccatgtttcacacagccctgctcggtttgattttctccacgtggttgataattgtcttcagttgctgctaagtgattttgcaaatttcatttataatcctcgccctacaattacctaagtactgtttctgcaggttaacctgtatgctacgctcagtcatatacctttcaaagttactaatgcaactgccaaagagggacagtgtcaatatcattgtcttcattagaaggacggctgccccacactgtgagaacactgctgttcctaacagtagtttacttttagagggatgtgagaattagtttgaccttaattccagatgtgcatgcctcaaaagaaaaatcccattctccttccttttggggagcacttttggtggcaccaaggctggtgtggggtagtggagagagcactgagcttagagtcacaaccagatgaaactgctctggtcttcactagctgtgtgacttgggcaagcagcttgcagtctctgagcctctgagatccctgatggacgaggagaacaatgaccccctccccaggctgtgctgagagagggaattgatcttggatatgaaaatgctgccctggcacagaggtaggagctgagcaacactgctggatgaataaacacatgtaatgcagggtgaacagaacatttcatctgcaacagctgaaggcacagcttacctatgcccatggaaagaactgcgtggaaaattcatttgttgcatttttgccaggttgatgtttgcaaagcagggcactcttctccacatttccccaaaaccaatcagagggagactccacattgtttccatctcctcccctcaaacaattatcaaagccatgtagaacaaacggctgtctgccaactggtagaggcaaagcagccaataatctggacaggggtggcaaactgctcctgcagtttaaccctgcctgactctcccaagcaccagactgtgaagcctggagaacagcctgggggagctgaacaaatgcacaacacctcatgctgtcaagccagaggggaaacttactgggaagaagatgtaggaagaagcctggtcagcccacgcctaaagcacacacctggggaaataaattagctatttctattgcacatctacccacagcctggtccagatctaaatctcttcccctcccagcagtgcagcggcggcagccgcaggctccctcagcgccatctcttcagtcaggctcctctccaggtcctccagctcctggcgcacctcctccatgaagctgccaactt

SEQ ID NO: 431469 - DNA, 396 bp, Homo Sapiens
  misc_feature (371)..(371): n is a, c, g, or t
agcagttgaagtgatttatgcttgatttctaaatgcaacttatgtttatacataatttaaaactcaaagaaagcatgcttatacaatcatgtgcaactttaaactttaagaactctggatgaatacatggtggcaacagtccatgacacctgaaaacatcatttgtggagtggcgtagagttcagtgttcgcagtcgcatattacaaccatgtttcacacagccctgctcggtttgattttctccacgtggttgataattgtcttcagttgctgctaagtgattttggcaaatttcatttataatcctcgccctacaattacctaggtactgttttctggcagggttaacctgtatggctacggttcagtncatattacctttccaaagttactaa

SEQ ID NO: 431470 - DNA, 540 bp, Homo Sapiens
  misc_feature (17)..(17): n is a, c, g, or t
  misc_feature (36)..(36): n is a, c, g, or t
  misc_feature (89)..(89): n is a, c, g, or t
  misc_feature (94)..(94): n is a, c, g, or t
  misc_feature (530)..(530): n is a, c, g, or t
aaacctggtaatggcanggttgaaccagaacaattncttctggcaaaacagcttgaagggcaacagcttaccttatgcccaagggaaangaaantgcgtggaaaaattcatttggttgcatttttgcccaggttgatgtttgcaaaagcagggcactcttctcccacatttccccaaaaccaatcagagggagactcccacattgtttccatctcctcccctcaaacaattatcaaagccatgtagaacaaacggctgtctgccaactggtagaggcaaagcagccaataatctggacaggggtggcaaactgctcctgcagtttaaccctgcctgactctcccaagcaccagactgtgaagcctggagaacagcctgggggagctgaacaaatgcacaacacctcatgctgtcaagccagaggggaaacttactgggaagaagatgtaggaagaagcctggtcagcccacgcctaaagcacacacctggggaaataaattagctatttctattgcacatctacccacanccggtccaga

SEQ ID NO: 431471 - DNA, 606 bp, Homo Sapiens
atacaatgggatatataatgggatattttgttgccatttaaaattacttacaagaatttgataatctggaaaaatacttctgatgttaaacaaatgaaagcaggtattaaataatttctacagaatgatctcaatagatgggtagaaaaaagactgaaaggaaattggactaattattaacagtgattgcctctggatgggtaggattttttctgttttcattttctcagttgtctacaataagcatatattactttaatggtcaagaaaacaggaaggaaaaaaactggaatgagagggaatataaactggaaatcccctatgagctgtgtacagaagtggatgccattaataaatgtaaggagggcatctgtctctaagtagtggcatgccatgcaccttgatatgtcattcaggaccagtagctgcttaggtgtatggatcggagcctccaaacctcgctcactttgaatgccagcgttcgctttattgcatctctctctctcagatctgagacctaaggatgtgttcctggagaggagagcacacatcaagtgaggggagtcttggctctgctcccctttattgcccagagcgtccaggcag

SEQ ID NO: 431472 - DNA, 309 bp, Homo Sapiens
atgttaagactttttattttcaggccctttcagaggaatcaattcctttaaacctttgtaaaatgccacaggagccaaggttaagcgatgcttttaacttaggaactgaccctctccaggcagagtctccaaagtagattacctcgaagtttcaaagaggcagttctacaagaggagcctttgaagaagccaatcctgttttccattgttttgctttcacacacgggttgaacttgaactcttacctttctccatttataacaaccaaaatccaccttaaaaaatcaaaggctgggagcggtggctcat

SEQ ID NO: 431473 - DNA, 343 bp, Homo Sapiens
gtgtgacccaccaggcccagcccacttctgaaatgttaatgtgcataggaatcacttcagggttttgtatcaaattcagtttcttagatcctacccacagagtttctgattcaatcaatagggtggtgggggtgtcccagatcctgtgttgttaacaggactccctgtgtttcagaagctggtgctatgaaaactacaccttgaaaactattgtcagagtgtggtccacctctagaaaatattggcctgtctttgccagagtttcacccattccttagggagaacgggtgtagctgtctcttcctttccagtctgtgtaggaaagcagaaccaagctcataga

SEQ ID NO: 431474 - DNA, 691 bp, Homo Sapiens
  misc_feature (446)..(446): n is a, c, g, or t
gatactattccaggcattggactttaactgcactgcctaaaagagcccaaagataaacttcacaataggctgatatgtggaatgggaggaggagataaagaacggggtttctgttttattcataagctcagtcttagcttcagtcttttctgagcatttgtttatttgtaagatggaagtcaaagtaagtgggaagtctgtaggtcagctctattttccatgcctgcccttgacttctcctcagctgttctctgcctgtgcaggtgaggcaggggaggtggttggtccagagagaactaaaagaagttgttttcttggactataggtccagctgcaaggcagggtgcctttcctatgtgttcctcttttcactaaaagactcaaaatgctttagcagctagatctggaactaactcttctggatggggtaggaacttccctgcccncttcccttagggaagctcatgtttccaagtcagacagcagggggcattgggtgcctttcggacagaaggaagctgcctaagctagaaggcctgcctgctgtagtttatttcttttgccttgttcagtgaatttaccagagggtggctgagattgaggctttgggagccccaagaagctgcttggttttaatgtgctgccttatagctgagcctgttgtgctcagggcaagtagtaggatgttccc

SEQ ID NO: 431475 - DNA, 3288 bp, Homo Sapiens
  misc_feature (1839)..(1839): n is a, c, g, or t
  misc_feature (1841)..(1841): n is a, c, g, or t
tttttttatgttggtgagattcgtgtgacttttaatttattatgttactaatgtcttacagtaagtgtgaggagtaaagacagggatggggtaaaggtaaggaaaagtatttttcaagttccttgaactattgaagcatgtgctaggataagaaagttcagtaaaagcatcatgtccttatcaccagagctcttaaaggagacatggaacagagacggggcaactcttcagctctggccgaagtgactgctggacagagaacaaatcctgcatcagccttggcacacatgaaagactgggcaatgcagatgctacacagttgggcagatgaagagctgactgtccagaatctacttctagcaagcgagtaggcgcatgcacaccccttctctggtctgagtgtctcttcctctccggcaggaccccaccaactgtgcagccatggggtaagtgttagggaagtcttttagaaaagagaaagatgtctttcttatatatacgctggtagtgttgattgaccagaagtggtttcttttactttggggcggtagcattgtgttctggtgacaaaatatcctacacttagcactcgtaaaaggcataggagagtgaaagcaacgcctctttatgacctaggctagtgggaaggggaatacgtggattctaagggtaaggggatgaaaaagctaattctatatcaccacaaatgaactgacacataaatgacaccttggctttttccactcatagaaacactcacttcttctagcttacactactaaatctaaggtcggcttcatcacagtttgggatatttactgtgcttctaaagtaaaggtgaaaagctacatccttaatagtttttttcctaattaaatagatttgtgtaagctgaaagcctaaagtctagggattctttgcattattttatatgttgggggaaacccttaaaattcatcactgccatttttttaacctacagaattgaaagaatatgaaatgggcaggcataagtaattacacgaatcatagacatggtcaacatgcatctaattttacccactgagcagagcgcgaatgggggtaagttcttttgagaagaaccaaaatgtgtttaaaagggaagaatactacactagactatttttttcctacatagaagaaaaggatatatggaattgaaggaggtgaaaagtgtccattaaacaaacacctattatttgtgaaataattctatcagagtggaattgggtgtggaccattagtttatctctggcagtgatcttatgttttaggtatctagagtaagattatttagctgggtaatggctgggtagcatgaatagttttaatttcagttcacagcaaatgacgatgatcgcagatttagcaccttagtttgtacttcctctgcacctgaatcatcgatcactgtgaagcgtgagctgaaggtcagaaagctgtattcttagataactcatctgtgattgctccaggactgcagtttacttcaatctaaggggtggttttcttattagagaatgtaagtattcaatactaaatatgagactgaagccttgaagacattttatagtggtggcaggtgttatagttcaggaataggctgtttaacaagtcaaatgcatatcattccctcttaagcattaactttttcaaagcaatggaattatattttttggcttgaaatggtggtttcttctatatttgatttctcggttttcttagtagatattactgtctcctctaatatttcttcaaaactttcccctatctgggaggttttcttagaggctaccttagatgcctcctcctcctccncntctttcttaagtgatagcccagtggatgagactttggaggttgtagcactgaggattctaggtgggagcaggtaacttggattgggaagtggattcagccccgaaatgcttaacccactggtgctaaaacgtgtctcctcgccttccagcagtttcctgtaagctgctatctcaatgtcaagagccattttgacattgagcaagtcctggtattcccgaaggtggcgtgccatctcactcttggtgttcctcagatcattctccagctgcccaatgctatcctggtagccagctacctcggcactgtgccgctcctccagctccaggatctgcctctccaaggactcgttggccccgcgcaggccctcgatctcgatggtgcgcgcctgccggtggcgccgatactcgtggatctcctcgcggctggcccggatggcctcggtctgcgcgccgcctgctcgttcaggttggcaaacttggacttgtaccattcttccgcggactgcaggttcttagcggccagggactcatactgggcgcggatctccctcagagccgaggtcaggtctggtttagccacagtcacgtccaccctcggccgcggcctgcgacgacgcctgcagcgtggccagcagctcggctacctcctcgtcgtgcacctggcgtacgaaggccagctcgtccagcagcgactccaccttcttctccaggtccaggcgggccagcgtggcgccgtccacgtcgcgctgtgcgccttcagggcgcgctcggcgccttcgcgtccgcggctctcctcctcgcagcgcgcccgcagccgctgcacctcctccgccagcccgtcgcgctccagcagggcctgcgagcgagccgagctggcctcctccactgcgcgcgcaggtcgcgcagctcgcgctggaagagctcgccgacgcgcgacggctcagcgtggcgctgtcgcagcgcggccagctcggcctccaacgcgcggttctgcgtctccagctgatgcaccttctcgatgaacacggcgaagcggtcgttgaggccctgcagctgctccttctcgttggtgcggatgatcttgtactcgttggtgcgcgccgccgcctggctcaggtccagcccgtcggacgccggcggccggcgataggccaggccgaggccgagcgacgaggccgaggagcaggcggccgaggaggccacattgctgcgggacagcgactgcgagcggaagccgcccgcgccgccggccccagagaggcgggcggacaggcgagagccatccccgaacaccttgcggtaggaggaggaggagcacaggtagtgctccgagccgaagctcatggtgccgggatcggggccggacgtgcggcttcaacgcgagctacagaagaaaggagaggtgcggcagatcccgggaattccggaccggtaccagcctgctttt

SEQ ID NO: 431476 - DNA, 1315 bp, Homo Sapiens
  misc_feature (43)..(87): n is a, c, g, or t
gataaccttgaaacattacgcagccaggtttggggctaacacnnnnnnnnnnnnnnnnnnnnnnnnnnnnnnnnnnnnnnnnnnnnngaacccaggagacggaggttccattgaccgagattggtgccactgcactcaagcctctgccacttgtgggcatcccagctcttcccattttcagaagaagccagaaatccaatttctttacaggtgaaatctcctggtttaaaaatgctcctttcgaaatattttaaaatataatgctctatacacaaaagtctgcagccccctttccagcagcttgtggtcctggcctgtgccatgctttagtgccctaacgatgagccccagcaattcccagcgcctcctgcttctccaagtctggcctcttttcccctctgtaccgccgcttctccccactctccgcagctcggggtcactttctttactgatctcccctctcttctgggagaggcacttgctgaacatctttccgcccggagcctccccaggagctgcagaggggcagctggagagatgctttctgacgtagcatctcccacctttctccttggggaccctgaggaaggggacaagggctcgctctgcaggtcctcactgtaactggaaaaacacgacctcgccctcgggaaggctttctgtgcgcctcacctcaggatgagggtgggtgtaggggacacctcccagaaacccctaacctcccagtcggttaaagaagaggggatagggtcaagggatgcgacagagctgtgtggtttccggatgggaaacctcagtcgtttaggcacccctccgctcgagtcacttccgaagcagtcgattcttggggagaagcgctgcggaaaggggcgactccgatgcagatggccctgtcccggcgccccaggtcgtcgcgcgcgcagctgcggtagtcactgcgcctccccgcccccactcctggatgccccccttccctctcccggccagactctgagcaggagctccgcccccagcgcgccgccccagccccggcgccttaaaagccgggcgcaccgccccgccgcgccctgcctgccgcacctctcctttcttctgtagctcgcgttgaagccgcacgtccggccccgatcccggcaccatgagcttcggctcggagcactacctgtgctcctcctcctcctaccgcaaggtgttcggggatggctctcgcctgtccgcccgcctctctggggccggcggcgcgggcggcttccgctcgcagtcgctgtcccgcagcaatgtggcctcccctcgtgccgaattcgccacccaggcc

SEQ ID NO: 431477 - DNA, 415 bp, Homo Sapiens
  misc_feature (13)..(13): n is a, c, g, or t
aaatagttttaantttccagttccacagcaaaatgacgatggaccgccagatttagcacccttagtttgtaccttccctctgcaccctgaatcatcgatcactgtgaaagcgtgaagcctgaaggtccagaaagcctgtattccttagataacctcatcctgtgattgctcccaggactgccagtttacttcaatcctaaggggtggttttcttattagagaatgtaagtattcaatactaaatatgagactgaagccttgaagacattttatagtggtggcaggtgttatagttcaggaataggctgtttaacaagtcaaatgcatatcattccctcttaagcattaactttttcaaagcaatggaattatattttttggcttgaaatggtggtttcttctatatttgatttct

SEQ ID NO: 431478 - DNA, 433 bp, Homo Sapiens
  misc_feature (251)..(251): n is a, c, g, or t
  misc_feature (314)..(314): n is a, c, g, or t
  misc_feature (344)..(344): n is a, c, g, or t
  misc_feature (357)..(357): n is a, c, g, or t
  misc_feature (387)..(387): n is a, c, g, or t
  misc_feature (410)..(410): n is a, c, g, or t
ggtgagattcgtgtgacttttaatttattatgttactaatgtcttacagtaagtgtgaggagtaaagacagggatggggtaaaggtaaggaaaagtatttttcaagttccttgaactattgaagcatgtgctaggataagaaagttcagtaaaagcatcatgtccttatcaccagagctcttaaaggagacatgggaacagagacgggggcaactccttcagctctgggccgaagtgactgctgggacagnaggaacaaatcctggcatcagccttggcaacacatggaaaggactgggggcaatgcaggatgncttacacagttgggggcaggatggaggagnctggactgttccnggaatctactttcttggccaaggcgagttngggcgcttgccaccacccctttntctgggttcttgagtgttctctt

SEQ ID NO: 431479 - DNA, 763 bp, Homo Sapiens
gttttgggtctaaatgccagctgtcagaaaaattttttaaagcagcctctaattgtggcattgtagaaagtatcctgaactgggtgaaatttaaggctcagactcagctgaataagaagtgttcatcagtaaaatacagtaaaatcaaaggtattcccaaactggatgatgctaatgatgctggtggtaaacattccctggagtgtacactgatattaacagagggagactctgccaaatcactggctgtgtctggattaggtgtgattggacgagacagatacggagtttttccactcaggggcaaaattcttaatgtacgggaagcttctcataaacagatcatggaaaatgctgaaataaataatattattaaaatagttggtctacaatataagaaaagttacgatgatgcagaatctctgaaaaccttacgctatggaaagattatgattatgaccgatcaggatcaagatggttctcacataaaaggcctgcttattaatttcatccatcacaattggccatcacttttgaagcatggttttcttgaagagttcattactcctattgtaaaggcaagcaaaaataagcaggaactttccttctacagtattcctgaatttgacgaatggaaaaaacatatagaaaaccagaaagcctggaaaataaagtactataaaggattggggtactagtacagctaaagaagcaaaggaatattttgcttgatatggaaaggcctcgcatcttggttaagtat

SEQ ID NO: 431480 - DNA, 1584 bp, Homo Sapiens
  misc_feature (995)..(1015): n is a, c, g, or t
acgggctgctgacccaacacctaccctgttccagcccctctacctgagtaaacactttcagctgccctcgataaatggctggattggctatgtgctgagcctagtggcactgcagctcacggaggcagcaccggcttgaggccgctgcggccttgggggtccctttgatggcacggaggtggataaatgcctgcatcagctgacactgagtttgtggacaccagggacctctgcagctagctgggaaatctttcccaggaggtctcccaccccttccctctggaacaccccctgacgaggccaggggaggaacccctactctatgttctactctggtacctagtgctcacggagagcaggctggctcggggcagccctcctcagagctggagcgcctttcaggtgccctctgaacagatactgttcagaatacagataaacagatgccaccaaggtcccctagctgtgcagcggaggggcaggtttcaaaatcagatctgtctccaaagttcctgctcttaaacaaagctgtcccatcttcccacccctctccatgggcctgtcctctcctctaagtaccatatcccaactctcccaggactggcatcatcttaagagtcagtgccttctctgttcccagggtccccactgactccaacctgcccacgtactccactacatgaacccagaactgttgtacatgatggaaccacctccatgcccatgggtatctgtgtctgccaccagccccagtgggaggcacctctgcctgtccctgttcaaccccagtaccccttcttgaccaaggccatgccctgacctgcctccaagaacagaccagcagctcaccccctggacaaaatcacttcctctttaattgctgttgaagaagattcacaccactgcctccaaggagatgggggggcatttcccccttgcccccacctctctcccctccccaattacctggtcctttgcaaactattttagccagnnnnnnnnnnnnnnnnnnnnngaccggaaaccactgacacagacagcccaagggctgggttggctgagggaggcagggctgggccaggtaagtccgccctatcacccagtttgtggggaaggggcagggggcctggaaaccctcccagccacctcgaatcctctcagccctggctgggagaggtcacgggggtgaggaatggctctggagctgctccagtgggagggaggggctggacagaaagaataatgggggaggggtcccactgtaggggtgccccctaccccagatcaccacgggcgctgcacagtcacaggtacgcagtcacggtcacagacacaacccgagagcacccccaccccaacccaccccctgtccaccctgggttttcccttaccccaaaacggcttttacattcccctgctctcatatatcccacagtgtgtgcttcataccatttcattacctgtttcctttcataactccttagtctccaattgtggtccttccttattccttccccttcaacaaatagaccgctaccccgcctctcttttcttccccttctactttattatttcacacccttg

SEQ ID NO: 431481 - DNA, 1154 bp, Homo Sapiens
  misc_feature (296)..(297): n is a, c, g, or t
  misc_feature (300)..(300): n is a, c, g, or t
  misc_feature (308)..(308): n is a, c, g, or t
  misc_feature (317)..(317): n is a, c, g, or t
  misc_feature (322)..(322): n is a, c, g, or t
  misc_feature (326)..(326): n is a, c, g, or t
  misc_feature (340)..(340): n is a, c, g, or t
  misc_feature (352)..(353): n is a, c, g, or t
  misc_feature (369)..(369): n is a, c, g, or t
  misc_feature (379)..(380): n is a, c, g, or t
  misc_feature (416)..(416): n is a, c, g, or t
  misc_feature (430)..(430): n is a, c, g, or t
  misc_feature (445)..(445): n is a, c, g, or t
  misc_feature (456)..(456): n is a, c, g, or t
  misc_feature (468)..(468): n is a, c, g, or t
  misc_feature (492)..(492): n is a, c, g, or t
  misc_feature (508)..(508): n is a, c, g, or t
  misc_feature (515)..(515): n is a, c, g, or t
  misc_feature (521)..(521): n is a, c, g, or t
  misc_feature (528)..(528): n is a, c, g, or t
  misc_feature (533)..(533): n is a, c, g, or t
  misc_feature (572)..(572): n is a, c, g, or t
  misc_feature (576)..(576): n is a, c, g, or t
  misc_feature (651)..(651): n is a, c, g, or t
  misc_feature (655)..(655): n is a, c, g, or t
  misc_feature (657)..(657): n is a, c, g, or t
  misc_feature (661)..(661): n is a, c, g, or t
  misc_feature (706)..(706): n is a, c, g, or t
  misc_feature (708)..(708): n is a, c, g, or t
  misc_feature (713)..(713): n is a, c, g, or t
  misc_feature (726)..(726): n is a, c, g, or t
  misc_feature (740)..(740): n is a, c, g, or t
  misc_feature (747)..(747): n is a, c, g, or t
  misc_feature (762)..(762): n is a, c, g, or t
  misc_feature (766)..(766): n is a, c, g, or t
  misc_feature (802)..(804): n is a, c, g, or t
  misc_feature (838)..(838): n is a, c, g, or t
  misc_feature (844)..(844): n is a, c, g, or t
  misc_feature (852)..(852): n is a, c, g, or t
  misc_feature (855)..(855): n is a, c, g, or t
  misc_feature (907)..(907): n is a, c, g, or t
  misc_feature (909)..(909): n is a, c, g, or t
  misc_feature (924)..(924): n is a, c, g, or t
  misc_feature (933)..(934): n is a, c, g, or t
  misc_feature (949)..(949): n is a, c, g, or t
  misc_feature (956)..(956): n is a, c, g, or t
  misc_feature (960)..(960): n is a, c, g, or t
  misc_feature (980)..(980): n is a, c, g, or t
  misc_feature (982)..(982): n is a, c, g, or t
  misc_feature (987)..(987): n is a, c, g, or t
  misc_feature (992)..(992): n is a, c, g, or t
  misc_feature (1026)..(1026): n is a, c, g, or t
  misc_feature (1028)..(1028): n is a, c, g, or t
  misc_feature (1034)..(1034): n is a, c, g, or t
  misc_feature (1040)..(1040): n is a, c, g, or t
  misc_feature (1053)..(1053): n is a, c, g, or t
  misc_feature (1060)..(1060): n is a, c, g, or t
  misc_feature (1074)..(1075): n is a, c, g, or t
  misc_feature (1086)..(1086): n is a, c, g, or t
  misc_feature (1109)..(1109): n is a, c, g, or t
  misc_feature (1115)..(1115): n is a, c, g, or t
  misc_feature (1117)..(1117): n is a, c, g, or t
  misc_feature (1120)..(1120): n is a, c, g, or t
  misc_feature (1123)..(1123): n is a, c, g, or t
  misc_feature (1126)..(1126): n is a, c, g, or t
  misc_feature (1131)..(1131): n is a, c, g, or t
  misc_feature (1144)..(1144): n is a, c, g, or t
  misc_feature (1151)..(1151): n is a, c, g, or t
acttggtgttgggatttgttgtgaggtttgctgacaccttgaccatttttcactttttggaaatgaaaggcacttcccacttgctctttgaaggcaattccattctctccagggtccttatttccttcccatattctctcacactcccaaacttctgaagaagcggagcaaacattgtgcgccgagcgaggacaggagtgcgagctgcctctgtacttgtcactgcacctagcactggttgaatccacctttcctgggtcacgccgctgtgctgggtggtcacagcctaggacccnntanagccgcancctccatgngaacnggantcaggtctggtgcngtgtcctcagtnnagtggcacacttgcancagaacctcnnggggctcggtagaggcaccaagggtcacgaagcaantctacccaaagatnctggggcgaccaacnaaccccacaangaagagaacaanaaatggctgtgcccaaccagcacnggcagctgacccaacncaacccngtccancccctcnacctnagcaaacactttcagcggccctcgagaaatggtaggatnggcnatgtgcagagcctagtggcacagcagcccacggaggcacgcaccgcgcctcaggccgcgcgtggccttggcaggncccntnagangtgcacggagagtggataaaatgcctagcatcagcttgacactgnanttttntgagacaccaggngacctcttgcagcnagctggngaaatcttttcccanctangttctcccaccccttcccctctaggaacaccccctnnncgaggccagggggaggaaccctcactctgatgtnctactntggtaccnagngctcacggtgagcaggctggctcggggcagccctcctcagagctggagcgcntnttcaggtgccctctnaacagatanngtacagaatacaganaaacagntgcnatcaaggtcccctagctgtntngtggnggggnaggtttcaaaatcagatctgtttctaaagttccngntcttanacaaanctgtcccatcttnccacccntctccatggggctnntctctcccccnagtaccatatcccactctcccangactgncntcnccncanagccntgccttttcggtnccagggnccc

SEQ ID NO: 431482 - DNA, 825 bp, Homo Sapiens
  misc_feature (20)..(20): n is a, c, g, or t
  misc_feature (24)..(24): n is a, c, g, or t
  misc_feature (30)..(31): n is a, c, g, or t
  misc_feature (54)..(54): n is a, c, g, or t
  misc_feature (58)..(58): n is a, c, g, or t
  misc_feature (60)..(60): n is a, c, g, or t
  misc_feature (69)..(70): n is a, c, g, or t
  misc_feature (79)..(80): n is a, c, g, or t
  misc_feature (90)..(90): n is a, c, g, or t
  misc_feature (99)..(99): n is a, c, g, or t
  misc_feature (101)..(101): n is a, c, g, or t
  misc_feature (103)..(103): n is a, c, g, or t
  misc_feature (106)..(106): n is a, c, g, or t
  misc_feature (114)..(114): n is a, c, g, or t
  misc_feature (150)..(150): n is a, c, g, or t
  misc_feature (152)..(152): n is a, c, g, or t
  misc_feature (154)..(154): n is a, c, g, or t
  misc_feature (160)..(160): n is a, c, g, or t
  misc_feature (186)..(186): n is a, c, g, or t
  misc_feature (227)..(227): n is a, c, g, or t
  misc_feature (230)..(230): n is a, c, g, or t
  misc_feature (235)..(235): n is a, c, g, or t
  misc_feature (240)..(240): n is a, c, g, or t
  misc_feature (246)..(247): n is a, c, g, or t
  misc_feature (250)..(250): n is a, c, g, or t
  misc_feature (258)..(258): n is a, c, g, or t
  misc_feature (288)..(288): n is a, c, g, or t
  misc_feature (302)..(302): n is a, c, g, or t
  misc_feature (305)..(306): n is a, c, g, or t
  misc_feature (317)..(317): n is a, c, g, or t
  misc_feature (321)..(321): n is a, c, g, or t
  misc_feature (333)..(333): n is a, c, g, or t
  misc_feature (339)..(339): n is a, c, g, or t
  misc_feature (350)..(355): n is a, c, g, or t
  misc_feature (373)..(373): n is a, c, g, or t
  misc_feature (383)..(383): n is a, c, g, or t
  misc_feature (385)..(385): n is a, c, g, or t
  misc_feature (390)..(390): n is a, c, g, or t
  misc_feature (398)..(398): n is a, c, g, or t
  misc_feature (423)..(423): n is a, c, g, or t
  misc_feature (432)..(434): n is a, c, g, or t
  misc_feature (474)..(474): n is a, c, g, or t
  misc_feature (484)..(484): n is a, c, g, or t
  misc_feature (490)..(491): n is a, c, g, or t
  misc_feature (506)..(506): n is a, c, g, or t
  misc_feature (515)..(516): n is a, c, g, or t
  misc_feature (521)..(522): n is a, c, g, or t
  misc_feature (527)..(527): n is a, c, g, or t
  misc_feature (568)..(568): n is a, c, g, or t
  misc_feature (605)..(605): n is a, c, g, or t
  misc_feature (612)..(612): n is a, c, g, or t
  misc_feature (737)..(737): n is a, c, g, or t
cccttctaatagttgtctangganttatcnngagggaaaaggtttgttcttagncccntntcctgtttnngtaaaccgnnccacacctgngggaaaaantntnganggatcaangcaccaaggctaaaaacaagttagttgtgacacctncnanataaanaaagaacaatacaatgttaccaaaanaaaccaacctacatggcattagtaccaatccacatataaanccnaaccnttganttcccnnaantcaatatnccgattggtgtacccaggtcactattgganccagctttctgggnccnnaaatttgctanaaangcactctacacnaaacgnaataaatcccnnnnnnaaaaaatctcttcaagangccttcatgncnaaatnccagattnccttttaacaagaaaaggggatcangcttaacgnnnaaatagaagacaagacgtctgtcaggacatacagatggcncaagacaggnctgacnncaggccccgtgctgnacaagaggnnctggnnaaacnacaaggagtaagaactgtaaatatccacagtcatgtggaanacaaaagtgtttcccatttagtcatcctttgagctcncagcagncctttcatctgtagctactttccaatttgtgcgtttgtttgtcctctcctgtatttcattgttggctacagaggtatgggcttttttctctctctttttccttttggttttcttagtgtctcttncctcactttcctcagaactgctggatgctgaatcatctgaatgtgaagtgttactttctgcctctaagaataaagcaggttttttgag

SEQ ID NO: 431483 - DNA, 2054 bp, Homo Sapiens
  misc_feature (212)..(212): n is a, c, g, or t
  misc_feature (1580)..(1590): n is a, c, g, or t
  misc_feature (1922)..(1966): n is a, c, g, or t
attccttgcaaaagaacaagcctgctaacttgggaggaagggaaggtcaggacccaaatagagccaatttcctggagatggcctgttctactggcacattttcctgagtctgtgcttaaaacctttcaggtactttcagggcacagaaacaatgcatgctaaaaaatatatggccaaagctccttccaacaaagatttaacttgctccaggnacaaaataattgctttaggttaagaggtagtaattagagactattcttctccctttagacccccactaatcccaaaaataaaaatacacaccatggaacactgacaattgagtaccaaagtattaaaatttaaaataaatatcccaaaaggtagcacctgctcatagttaagggatagggcacctctgtccaaccatgtattttaagaccaagcactttattagaaatctgtcccgtaaagagaacaaatttagcagttagaactaaaaataccaactcatggaatgtcatcatagttgtatctactgctggtgtcttatactgtcatgctactgtgaagtaattccgtattacacatcaggaaagtaaggccaggaaggtgaacttacctgctctgggcctcctcataaccaatgagtggcagaaccaagaccgaaagtctgagttttcaagctttttactcagcccattaagtgacaaccaggaaaaaataatacgtcacttgatctttcttcccacagtgaaaaaatgcacttgcgttctgccagccttctttcagtgatatgttggtttcttaagaattaacatactaaggatcacagtatagcaaagggaattaatgtggtctctgcttggtgctttaatccaaaggcagactgggaagaagtggatatgtccctgagaagcctgtttcattttggaaataattcaacttagtttcagggaaaacctaaacttcatgaacagatttagaaatgaacaagacaacatttaaatggcagttgctgccctgaatccagagtaccattagacaacatgattatttcctaattcttccccatttggtacaggattatctatgacaattgaagaaataatttgaacacaagtccatttaggcaaatatacagcaatggaactagaaaaccatttactatccaattaccatgtttaggcatatactaagtatagctataggccccatccagcagggaaatttgcaaaaactctagtcccttctaataagttgtctatggatgttatcatgaagggaaaaggtttgttcttaggcccatgtcctgattaagtaaaccggaccacacctgtggggtcaaaatatagaaggatcaaagcaccaaggctaaagacaagttagttgtgacacctgctatataaacagagagcaatacagtgttgccttgtcataccatcctacatggcattagttccaatccacctcttgatcccagcccttgacttccccaaattcaatattccgattggtgtacccaggtcactattggatccagctttctgggtcctttaatttgctgtatatgcactctacactaaacgtaattaattgcnnnnnnnnnnntctcttcaagaaaccttcataacaaaataccagattcccttttaacaagaaaaggggatcaagcttaacgccaaaatagaagacaagacgtctgtcagaacatacagatggcacaagacagctctgacctcaggccccgtgctgaacaagagttactggcaaaaccacaaggagtaagaactgtaaatatccacagtcatgtggaaaacaaaagtgtttcccatttagtcatcctctgagctctcagcagacctttcatctgtagctactttccaatttgtgcgtttgtttgtcctctcctgtatttcattgttggctacagaggtatgggnnnnnnnnnnnnnnnnnnnnnnnnnnnnnnnnnnnnnnnnnnnnncctcactttcctcagaactgctggatgctgaatcatctgaatgtgaagtgttactttctgcctctaagaataaagcaggttttttgag

SEQ ID NO: 431484 - DNA, 969 bp, Homo Sapiens
  misc_feature (268)..(326): n is a, c, g, or t
  misc_feature (522)..(584): n is a, c, g, or t
tgggacaactaacccaaatgaggcaagcgtcgtcagacaacaggcaccagacaggtcgaccccggccccgggctgacaagattcactggcaaacccacaggaggtaagaactgtaaatatccacagtcaatgtggaaaacaaaagctgtttcccagttgagtcatcctctgagctctcaccagaccttttcatcggtagctactttcgcaatttgtgcgctttgtttgtcctctcctgtatttcattgttggctacagaggtatgggnnnnnnnnnnnnnnnnnnnnnnnnnnnnnnnnnnnnnnnnnnnnnnnnnnnnnnnnnnngaactgctggatgctgaatcatctgaatgtgaagtgttactttctgcctctaagaataaagcaggttttttgagagactttttcctggattttttcttgcgtttatgtggttgtttccctttccttgtaccagaagccccagtttcttctgagaactcactcgaggaatctgctgttatatctgtggcttcctttnnnnnnnnnnnnnnnnnnnnnnnnnnnnnnnnnnnnnnnnnnnnnnnnnnnnnnnnnnnnnnnacttcttgtgtttgcgggattcatgggtagatgactttacctggggagatgttttcttcccgttggtaatatcttgctgatcactactgtctgtttcaaattcttcagggtataactctttataaccactgtgaccccatctgtctggcatgtttgcttcataatcatagaactttttattccaggatttagccttaagaaaatcatcttccagtgtcccagaaatttcattctttggcctccaatagtatctttgactttcttcatcaaaaccatcactgcgcatccggcttgaactgctgggtagcattttccttttggtcccccggtaagcatcttccatctgtttttccagttctcttattttccacatatctgattcctc

SEQ ID NO: 431485 - DNA, 1358 bp, Homo Sapiens
  misc_feature (200)..(230): n is a, c, g, or t
agtattaaatgaacagagatggtgagttctttatttacaattattgtctagataaaaaaattcataaaaacagatgaatggtcataaattatttaccccctaatggagtgaactgccaaacgtaccccatgctgctagatataggacgcagagtgcaagctttatgtactacagtgagttttgacaaaccaaccatttcnnnnnnnnnnnnnnnnnnnnnnnnnnnnnnnagagtgagggggtgcatgtgtgcaagcatccttcattcctgacaagagaagaccaacgctaatgttggcattcttccatcgctccctgttccctaagccaggctccactgagaacccctcctggctccaaatgaacatgcagcatggtgtgcaaacacagctatcctgatgtcatggaacgaggtcacggacacatgactgatcaaagaagtggggagatggaaaactgtgagaaaggaaactccaaaaaacaccatgttccaaggctgccccatgttttacacgtgcagatctttccttccttgtaggagagcagtgggctggctttggtggcgtttgtactggaatccaataagcacatctgagggctggtcacccctttggttatgcagttcctctcctggatacattcagagatacttcttcacgacattcaggtgatgcgctcttgaaggtcctccttccaggaggattttgccaggtgggatgggctgactttgaaccccaaaccctcaagtttttccaccgccatccagatgtaggccctcccagttgactatggctcttttcccgagtggctctcatcttgtttgtggaagagttctctgggcctggagaagggaaggggctgggctgacacagccatcgtgaggagggtcagcatgaggaatggattttgcaagagaggcggaaagtgtttggttttcctcgaagcatgggacatcatcgatcatggtattcaaaatgtcttttgcactgtacaagtttatggaaaaaagatcatatgctgaaaagtctcaaagcaaactttgtattaaatacaaaagttcttttatgaaaaacgctgagacccacaaagtgcttagcagttaagaggctgacatccaattaaataagctcttattaagtgggattactagtgctgttgtcttggggaaaaaataaccaccttttctcacctgtgatactgtagggtttcagaatggctttctgtttgggtaagcaagacttgctgttaaaaggctacagtatatattgtgactacaggaagacaatttggtttaaaatcacactgagtacatctcactatacacatcataaggttcattcggatcgatgtctatatgg

SEQ ID NO: 431486 - DNA, 447 bp, Homo Sapiens
  misc_feature (343)..(363): n is a, c, g, or t
ccaccaaagccagcccactgctctcctacaaggaaggaaagatctgcacgtgtaaaacatggggcagccttgggacatggtgttttttggagtttcctttctcacagttttccatctccccacttctttgatcagtcatgtgtccgtgacctcgttccatgacatcaggatagctgtgtttgcacaccatgctgcatgttcattcggagcccggaggggttctcagtggagcctggcttagggaacagggagcgatggaagaatgccaacattagcgttggtcttctcttgtcaggaatgaaggatgcttgcacacatgcaccccctcactctcacaccttgnnnnnnnnnnnnnnnnnnnnngaaatggttggtttgtccaaactcactgtagtacataaagcttgcactctgcgtccatatatctagcacccatggagtcaatgg

SEQ ID NO: 431487 - DNA, 1095 bp, Homo Sapiens
taacataagtgctattcattgaaaagagcaaagcaagagcgctgaccccttacggacaggatgaaacaaaacaagctctgcaagtctgcctcctgctcagcatataggcttgttgccccactgggccatcttgttgttgatgggcatcttgcagaactgatcagactgtaagtaggcagcgattttctccaaagcctgaaaggaaaatacaccaaatcttataaagaccccaacccagtccaacagatgcataccagaaaagcaacattcacgtgttgcctgcgtctacctcctccatttttttgtagacagtgccttcaaggtatagaagttaggctcttcccaagacttaaaggtctagaggtgtccaaccattgatcccattaggcaaaagccggggaagaatcctccactatgggatcctgcaggtcccaggggagcctgtgagtgtttttataagagaaaggtgcaggaaacgtcacctcaaaacggcacatgaaagccttcaggtttgggaactcatccaggcacttggggtcaaatatacggttctgatccaagatatcataggtgagaaaatccacaaaggtgagcttttccccggcaaaccatgagaatttccccagaaacatggagaattgtttcagttttccagggtagctcttccaaagtactgaggcttcagtttttcgtggtcagagctgtaacagagccttatcagttgtgtgcggaaatccattacttggttctctatgatgtccactcgaatcttttcttcttcagtctcaccacacatgttgtgcttgcgagcgatgtagcgcaagatggcattgctctgggtgatcttgttcttcccatccaggaggtagggcagattaggaaagtccaggtctagcttgaatttcacatccagccattggcttcgatcatagtcaggagcttccccgcacgtgtaccgtttctcctcataagaggtatccgtgaactccaggagcaggcggatggcgtgcgccagcccacgaatatcccagtacccgagaaccatagacgactcgcacgacatggtgacgggcttccgagccttcgaggactccc

SEQ ID NO: 431488 - DNA, 918 bp, Homo Sapiens
agcggagtcctcgaaggctcggaagcccgtcaccatgtcgtgcgagtcgtctatggttctcgggtactgggatggttcgtggggtgagtgcctgtctcaacggtagagccgctcggtcaaagagactgacgcggagagggcgggtctctgggtccgcgatctccagcaggagcagctctacgcgggagccttttcgagctgccgagccacggatgtcgacccctgcccagcctctgggatcgcgggccctgtggggaggggcggaggagaccacgccggagccgggcctaggggccgcttatccaccgccccggcaggacgcagggactcggcagccccgggccggggaacgttagcgggcgggggttgggaatgggtgggagctgcgcacgtcgctgaaccgctgtcttccccagctggcgcacgcctatccgccctgactcctggagttcacggatacctcttatgaggagaaacggtacaccgtgcggggaaggtactgccgctccgcgtgcccgtgcagccaagtcttggccctccacctgccctggtcttcttacgcccagagggtggtggcgtcgcgccaaggccggggtgggacgtttgccccaatctgggtgactagagaccaacatcctttatctggaactgaggggttctctttttaacatagcccaaacccgtcttaatgcttaaccaaatagggctcagaggctcaatggttatgcttttggggcctggaatttgaggtatgggaccaagtcatttcttaagatctttgctcttgtcaggtgggcgtataaggaggttggggtcccacttaaataccgtctcttacagctcctgactatgatcgaaggccaattggctggatgtgaattcaagctagacctggacttcctaatttggcctaactct

SEQ ID NO: 431489 - DNA, 1366 bp, Homo Sapiens
  misc_feature (45)..(83): n is a, c, g, or t
  misc_feature (105)..(162): n is a, c, g, or t
  misc_feature (182)..(227): n is a, c, g, or t
  misc_feature (250)..(250): n is a, c, g, or t
agaaaaagaggcttctccaaaaaattcccccagtgccgcagtttnnnnnnnnnnnnnnnnnnnnnnnnnnnnnnnnnnnnnnnagtttataataggccccaatannnnnnnnnnnnnnnnnnnnnnnnnnnnnnnnnnnnnnnnnnnnnnnnnnnnnnnnnnttgttgggcgcgcccgcccnnnnnnnnnnnnnnnnnnnnnnnnnnnnnnnnnnnnnnnnnnnnnnaacataagtgctattcattgaanagagcaaagcaagagcgctgaccccttacggacaggatgaaacaaaacaagctctgcaagtctgcctcctgctcagcatataggcttgttgccccactgggccatcttgttgttgatgggcatcttgcagaactgatcagactgtaagtaggcagcgattttctccaaagcctcaaaacggcacatgaaagccttcaggtttgggaactcatccaggcacttggggtcaaatatacggttctgatccaagatatcataggtgagaaaatccacaaaggtgagcttttccccggcaaaccatgagaatttccccagaaacatggagaattgtttcagttgtccaggtagctcttccaagtactgaggcttcagtttttcgtggtcagagctgtaacagagccttatcagttgtgtgcggaaatccattacttggttctctatgatgtccactcgaatcttttcttcttcagtctcaccacacatgttgtgcttgcgagcgatgtagcgcaagatggcattgctctgggtgatcttgttcttcccatccaggaggtagggcagattaggaaagtccaggtctagcttgaatttcacatccagccattggcttcgatcatagtcaggagcttccccgcacgtgtaccgtttctcctcataagaggtatccgtgaactccaggagcaggcggatggcgtgcgccagctggggaagacagcggttcagcgactgcgcagctcccacccattcccaacccccgcccgctaacgttccccggcccggggctgccgagtccctgcgtcctgccggggcggtggttaagcggcccctaggcccggctccggcgtggtctcctccgcccctccccacagggcccgcgatcccagaggctgggcaggggtcgacatccgtggctcggcagctcgaaaaggctcccgcgtagagctgctcctgctggagatcgcggacccagagacccgccctctccgcgtcagtctctttgaccgagcggctctaccgttgagacggcactccccccacgaatatcaccagtacccgagaaccatagacgactcgcacgacatggtgacgggctatccctacattccgaccgaccac

SEQ ID NO: 431490 - DNA, 886 bp, Homo Sapiens; identical to SEQ ID NO: 135674

SEQ ID NO: 431491 - DNA, 967 bp, Homo Sapiens
gggagtcctcgaaggctcggaagcccgtcaccatgtcgtgcgagtcgtctatggttctcgggtactgggatattcgtgggctggcgcacgccatccgcctgctcctggagttcacggatacctcttatgaggagaaacggtacacgtgcgggggaagctcctgactatgatcgaagccaatggctggatgtgaaattcaagctagacctggactttcctaatctgccctacctcctggatgggaagaaacaagatcacccagaagcaatgccatcttgcgctacatcgctcgcaagcacaacatgtgtggtgagactggaaagaagaaaagattcgagtggacatcatagagaaccaagtaattgggatttccgcacacaaactgataaagggctctggttacagcctctgaccacgaaaaactgaagcccctcaggtaccttgggaagagctacctgggacaacttgaaaccaattcttccatggtttcctgggggaaatttcctccatgggtttttgcccggggggaaaaagctccccttaggggggattttttccttcaccctatggttatcttgggatccaaaaccggaatattttggacccccaaggtggcctgggatgaaacttccccaaaaccctgaaaggggactcttcatgggggcccgcttttgtgagggcttttggggaagaaaaaactcgcttggcccttacgtttaccaggtcctgggatcaagcttcctcggccatagaattcgccactttctaaaccaacaaattgaatcgggcccccgaagtggggggcgcaacatgaggcgctaattattggccctgtagatcacagggagaggtcaaaacaacttcggcccaccaaacccattgggtctatgcggattctcacttccacagggaccccccaataacgagggcgctcacaaccccggcaccctcttgggtctttcgggcg

SEQ ID NO: 431492 - DNA, 1373 bp, Homo Sapiens
acgtctttaaagaaacttctcctaccccgtggtcacaaaaattcttacattttcatcaatatttcaacagctttgtgtttaatgttgggccttaaattccagattaattttagtgaatagtgtcaagtggggctctattatttttaatgagtaagcaattgtcccaactctattggctagcccaccagtctgaaatactgcctttatcacactaaactcccatgtgtacacaggacggtttccgaactccggttaagtccatcagtaccacagttttacttgtgttatcctcacccagtcttcacagggactccagtcccatttaacacacctgctctctccaactgtgcaatctcgttttttctagtacccactctcagggcttgggcatgaacctacagcccttgaactcagttggggagtagggaaatgccagtatcgcagcgattcaattcatatcttgatgattctccacatatcctttttcccttttagcctttatacccaagagaaactcagctggacaccagtaacataagtgctattcattgaaaagagcaaagcaagagcgctgaccccttacggacaggatgaaacaaaacaagctctgcaagtctgcctcctgctcagcatataggcttgttgccccactgggccatcttgttgttgatgggcatcttgcagaactgatcagactgtaagtaggcagcgattttctccaaagcctcaaaacggcacatgaaagccttcaggtttgggaactcatccaggcacttggggtcaaatatacggttctgatccaagatatcataggtgagaaaatccacaaaggtgagcttttccccggcaaaccatgagaatttccccagaaacatggagaattgtttcagttgtccaggtagctcttccaagtactgaggcttcagtttttcgtggtcagagctgtaacagagccttatcagttgtgtgcggaaatccattacttggttctctatgatgtccactcgaatcttttcttcttcagtctcaccacacatgttgtgcttgcgagcgatgtagcgcaagatggcattgctctgggtgatcttgttcttcccatccaggaggtagggcagattaggaaagtccaggtctagcttgaatttcacatccagccattggcttcgatcatagtcaggagcttccccgcacgtgtaccgtttctcctcataagaggtatccgtgaactccaggagcaggcggatggcgtgcgccagcccacgaatatcccagtacccgagaaccatagacgactcgcacgacatggtgacgggcttccgagccttcgaggactccgctctcgacgaattcgagctcggccgatttggcctgat

SEQ ID NO: 431493 - DNA, 419 bp, Homo Sapiens
  misc_feature (305)..(305): n is a, c, g, or t
aatgcaactgctgtttattagaaaggagcagaggagacagagtgggggccctcagggacaggatgggaacaagacttgacagtgagctaagagtgtgggcccctcagggcaagatggctcagcagcagcgagctctggctcagcataagcacttgttaccccacttggccatcttgttattgattggcatcttgaagaagcggtcagactgcaggaatgcagcaatcttctccaaagcctcaaaacggcacatgaaagccttcaggtttgggaactcatccatgacacttgggctcaaatatacnggttctgatccaagacatcataggtgagaaaatccacaaaggtcagcttttctcctgcaaaccatgtgaatttccccaggaacaatgagaattgtttcagctgtgcaggtagct

SEQ ID NO: 431494 - DNA, 559 bp, Homo Sapiens
  misc_feature (74)..(98): n is a, c, g, or t
  misc_feature (160)..(337): n is a, c, g, or t
tggaaccatttcacttgtaacattcttttgtcccatagcactctgctaaactactgtctttcaaatatctttcnnnnnnnnnnnnnnnnnnnnnnnnnagacagtctctctttgtcgcctaggctggagagcagcaaaccctgcctcctggatttaaggnnnnnnnnnnnnnnnnnnnnnnnnnnnnnnnnnnnnnnnnnnnnnnnnnnnnnnnnnnnnnnnnnnnnnnnnnnnnnnnnnnnnnnnnnnnnnnnnnnnnnnnnnnnnnnnnnnnnnnnnnnnnnnnnnnnnnnnnnnnnnnnnnnnnnnnnnnnnnnnnnnnnnnnnnnnnnnnnnntgagccatcgcgcccagccatctttcatatatctttctaaagcaaaaaaagccaaattcttccatcatggtttcctttgggacttctagacctatagtaagtctattttaaaaaattatctgatacacttagctttgtgtgtttattcttttttcccaaattttgtgtggcttatattagttactattcattattgttgagttatttttcagattcactcat

SEQ ID NO: 431495 - DNA, 618 bp, Homo Sapiens
  misc_feature (67)..(67): n is a, c, g, or t
  misc_feature (76)..(76): n is a, c, g, or t
  misc_feature (81)..(81): n is a, c, g, or t
  misc_feature (108)..(108): n is a, c, g, or t
  misc_feature (123)..(185): n is a, c, g, or t
  misc_feature (203)..(217): n is a, c, g, or t
acccagccaactggtgaaaccccgtctctactaaaatacaaaaattaactgggtacggtggtgcaanccctgtaanccccnagctactcgggaggctgaggcaagaanaaatcacttgaaccnnnnnnnnnnnnnnnnnnnnnnnnnnnnnnnnnnnnnnnnnnnnnnnnnnnnnnnnnnnnnnngaggaagaccccatctcnnnnnnnnnnnnnnngatttttgagataatggcagagtattcgcttctgacctgcttttgccttcatgcgtgaccggggtgagctacatgaggcccagatctctttaacacgtcctgaggaccagcgtagattctcctttatggggctgggcctgatctccccagccgtagaggtgtggtgagtcatctattattttcttacctgcaaacaaaatcactttacagtagagaaagatgagggaattctcgtacccaagacccacttgaaaagtggagagcaagcatccctgaatctagagggtaccccggctgcctcggggagctgccagaactcagtctagggaggatacacagggtgggtcgcacgaggatcgaggcatcctgtcggacagtaggcaccaggtgaccgccaggcg

SEQ ID NO: 431496 - DNA, 2923 bp, Homo Sapiens
  misc_feature (775)..(784): n is a, c, g, or t
ttttttttaaaggtcacatgaatgtttattacaacatagaaaagagggaaaggaagaaaaaggtttccaaagccgtatttccaaggatttaaaaaaacacaaacttggaatgccaaagagatgtcatgctttatatatttataataggaaggtgtgtgtatgtataaatatgtacatggaaatatgtacacaggttttgactgtcatatatagtatttttcattgcatgtacagtaatgctgcttgagtgaagggttttaaagctggcagaaggctggagaatctggaaccctgcttggcccctagagggcgctgtggagaccacctaagcagctcccagggaaggtctgccggggctggggctgggtcctgagggtgttggggaaagctgagctgcaggcgggctggggccccaggctgcagggttccggccagggcaagtctggaagcgtccctacgtccccgacattagacgttttcttccaagaagggtttcagtcattggaataggctggaaataccctcatggctggactggggtggggtgggctcccagcaggtcagggtagaagtgagacaagaaaaccccaggagctcagggtcttctctaagaacagtgaaaacgcacagcagttaatttcacagaaagaagagagacccaaacaaagccaatcacggtgtcaaaacactgcaaatcacaacacaacactcattcatatgcaaattaagttgatacacacagaaccagttgttttgtttttatatatgttgtttnnnnnnnnnntggcaccacgcacaacagcagggaactcagccaatgaaaagggctggccacaggttctcatgggtgcccaggccttctggggtgacggtgcccacgaggagcctattacagccaccatcaccttgtcccttgcttgaaacatccaatcaagcgctaacccagaagacggtgaatggaacctccctctcccttctttcctccctggttcctgtgctggagcaggtgggtgggaacactgcccctctcctctgggcaggtctgccttctccttcccacaggaggccaagctggggttgtggggaatgggcacagccaggtttggtgctgagcccattcaccctaggagtgcatgggaggaagagatccacaggctagggccctggagacaggaaacagcatgtgcatgtgggctgggcaggggtcagggatgtgatgagggaaaaaagtgctgccagccagtgcccatcctggaagagggggtgtgggctcctttggagataagtcccaaccctgaggctccaggcagaccctggcctgcatcccccagcagtcaaaggtgctgggaatgtgtgcgagtgtgtgcctctgtccatgtgggggtgaaatgcaatggggatggactgtggcatccacacctgcccggatggttggcattttggcaaattcaggcagagagggagagggtttgagggccgagtttccctagctaaatgcaaatccagatgacttgcactggaaactcaggacacacacatggtggacgctacagggcacctttctgccctctgcggtagcatcaggaggggagagtggaattgggggccagtgtttctgttctgctagaaagaatcttgccagctgcagcgaggaggtgaggcctgggcaggagcggacagcctttgcccggattgggtctgggcctccaagcccttggctctgacagaaatggggaaacgatggctgcctaagcccttctttgttcctaacctatagatggttaaactgaggcgagaggcagtcggagagacgccggcagtcataacagcactcaggccggaactcactcttgggccacaagggaacgtttggggaagaatccctctggttgggattcttcctatctctgcagggcctgggattgagggtggtgcatgactgtctgagcgtgaccacctccatgccccatgatcccgtgaacatccagctctaagaatcttgcaggaagaaaactgattgatgaaaaacacaggcccctgagccttgcacccacctgctcaggctgagcttttttgtgattattttaaagatccaagctggtcagaaggaccacagtcacctcccctgaccaggctggcgcctcatccccaaacccagtgcacagagctctcaggagggagaaggggcagtgcagtccttgaagagtgtgtccccacgcctgcctctgctcaccttgcagcttcacctgcagaggctggaacagcaggagtgtggaggtgacggcatcatttccaagcacaggactgctgggcccacgttagctctcgatgagcttgctgatgagttaatgcaaagcagggaggtgtccccctggtgaggactgcccgaggccactacccggctgctcattgagccctctggagaggaaactctgtttttcctcagcctgaggcccggcttctttcctgggagggttgacagcaaaggcttcaggctgctccctaagcctgaggcctccagccacatacaaggtcatggtctctgggaagcttaggtgccgctcgggtgcagggggtggggtgtgctttaaaagtgctctcccacctccaatctctctgataaaagccctccagcaaagccagcaagagggagggataacagtaaactctgccttcagccactattggagaacttccatttaaatgacacgcccccaagcatttatgcaatgctcagggctttctttgcaaaattcactaacaccataagaaacagccaatgcaattaaagcctaaggtgggcctgggagcctagaagggaccctgaggaggcctggctctccaccctcaagcctaggggttggatctggcaaaactgaagtgaattctcagaattgcaggcatctgggcagggaaggggtta

SEQ ID NO: 431497 - DNA, 1208 bp, Homo Sapiens
  misc_feature (161)..(179): n is a, c, g, or t
  misc_feature (608)..(665): n is a, c, g, or t
  misc_feature (704)..(734): n is a, c, g, or t
  misc_feature (739)..(864): n is a, c, g, or t
  misc_feature (881)..(906): n is a, c, g, or t
  misc_feature (1096)..(1096): n is a, c, g, or t
agtcttacattattaactttacttctatggctgtaacagaaatactctggaagaaaacacagaaacagtctttgcttttatataaatttaaaaccagcacttgtgcatagaaatagctataaaatattaaatggcacttttgtattctgttgtactttacnnnnnnnnnnnnnnnnnnnacatttgctacacggtatttattcaatgactgtatatttagtcaccacctcaaccactgctaagctctcttcatgtctatctgtaccagtttcccatcttagactgtgatgtcaactggcaagggctggctgttggccgattcaccatgactgacatggtgcatgttcacttgtttttaaagcagattgtacaaacaggagaaacaaacaggggaaactgtatttccagtttctttttgttaacagcctgttgcctcacccatgcaaactcttctagctagtttaaggctacataatcttattgctaatcaaccagcaaccatacctatcactctccaaaattataagttaatacttatggacaaaaaccactattgagaactttgcattcaaacagacaagagtcggccaggcgcagtggctcacacnnnnnnnnnnnnnnnnnnnnnnnnnnnnnnnnnnnnnnnnnnnnnnnnnnnnnnnnnngaccaccctggctaacacggtgaaaccctctctctactnnnnnnnnnnnnnnnnnnnnnnnnnnnnnnncattnnnnnnnnnnnnnnnnnnnnnnnnnnnnnnnnnnnnnnnnnnnnnnnnnnnnnnnnnnnnnnnnnnnnnnnnnnnnnnnnnnnnnnnnnnnnnnnnnnnnnnnnnnnnnnnnnnnnnnnnnnnnnngacggagcctctgtctnnnnnnnnnnnnnnnnnnnnnnnnnngacaagagtcaaatcaagtctttgtacatattcaaatatttacatgtggaaaagattaaataacctttctaaattatgagttacctaaaatgtatgtgtgcctttgaaatggaggatatgggacagcttgagaggctttgcttctcagtgtgtattgataaatccatgtgaatgttattaccaacccccnaaatacaataatagtatgcttaacatcttgctattattagattatttccccaattttagttatttcctagcaactttatttaatgcagatctcttgcaaagaaagccttacg

SEQ ID NO: 431498 - DNA, 1284 bp, Homo Sapiens
  misc_feature (70)..(78): n is a, c, g, or t
  misc_feature (109)..(109): n is a, c, g, or t
  misc_feature (246)..(290): n is a, c, g, or t
aaagggggttggaccaaagggccccccagaagttgggatgaaaatgggaaaacgaaacggattccaatgnnnnnnnnnccccttttgggctgaataaaaccctcccaancttgagggcagggaccagtgtcgctcggtggacatgcagaaaccatgactgtagcagagatgatgatgatgagaaatgcttcgcatttcccacactgccgatatcccaagcccctgtgctaccaccctctcccggannnnnnnnnnnnnnnnnnnnnnnnnnnnnnnnnnnnnnnnnnnnngagcatctgcagaataagtcagaggttgacacccagagcctgacgtcaggataggactcttggcactccgcactgaaacaccgtgattagtcctgactagacagcaaaagtaacgccagcctaagcttgaaatgaagggtccatcttgtgaaaagttaggctgcgcccaagacagccaggtctgggaagtctttcacttctcctacttcgctgaaaggctgtccaccttggttgaatgtcagcttgtaccgtaagcggataggttctttgtgtggattgtcaagcagcagcatctgagatatcacagctggaggcatcaaaggactgaatgcaggaagcttggagctggatgccggctgcagcttcactctcattgactttggcacagccacttgaaacatgatatcccagacaggctggggagccgtgctcatcatggtcaagagcagcacctgtacctctgggtgcccaggggctcccgtctgggagaagtggagcagaattctgaatccattccggtcatacacaatgagaggcggcaggctgctgggcttaacagactccaaagggacaaacacttgagccagaggtgtattctgtgaagatggggaaggagccaacgggccagcctcccaggaccaacctggagaggacttagtacctggtggcacttccttgggtacacttttctgcgaaacataattcagagggcacggagctggctgtggtgagatgaggtccagcaaattcctgtctgcagaagggttctgaacaccaccgcctggcagcgtgctggaggagggattcctcttttcctcacagcaattctgaccagaaaccatgcctgtaacaggagcatcactgattcccaaggtctgccaggtacctgatgaagtcaaagatggcaccacagtccccatctgcgcaggtccattgtccacctccaagtacacgacgcgtggtcgacgatatcccgagaattccggccgtacca

SEQ ID NO: 431499 - DNA, 1880 bp, Homo Sapiens
  misc_feature (108)..(108): n is a, c, g, or t
  misc_feature (170)..(224): n is a, c, g, or t
  misc_feature (259)..(259): n is a, c, g, or t
  misc_feature (1694)..(1744): n is a, c, g, or t
ggcaggcgggatcacctgaggtccaggagttcgaagacccaccctggcccaacatggtgaaaatccctgtctcctacctaaaaatacaaaaattaagcctgggcgtgnctggtcacgccctgtagtccccagctactcgagaggctgaggcacgagaatcgcttgaaccnnnnnnnnnnnnnnnnnnnnnnnnnnnnnnnnnnnnnnnnnnnnnnnnnnnnnnntgacagagtgagatatggcctcaaaaaacaaaaanaagccacacagaatacaagcaagaaagtacttttagattaaaattcgtcttatgtgaattatggcaaatgaaatcaccccactgtttacctgttttatgagtttttacatttgcttaaaattagcatacttgatcttttacagttcccatctccaccaattagtattggcagatttccactatatgtagaagtcaaaagatcagactgtaaaaatatcagatattgtaattaagagctccaaacaagtcttgcagtttcaaaggtagaaacccacccagccagttcagctgcttggacttcaaagccctccgcctagccatctcagccaggctcaggttccttctcccacccatcaggccaagcaggacttgtcaaacatacacattcaagttcctagcacacagtaggtgctaagtgggaattgattataaacttgaattcttccatcaacaaatatccacctctcctgtccagcttgcctcagatcttcaggttctctcttctttgaggcagctaagcttctacatccttcatgaagtttcctttacttctcgacagaagacagttccctttaggcctatcatctctaaatgcaactggctttccattttccacttactcaacactccacaaagtacacttgctacatggtatttattcaatgactgtatatttagtcaccacctcaatcactgctaagctctcttcatgtctatctgtaccacagtttcccatcttagactgtgacgtcagctggcaagggctggctgttggccgattcatcatgactgacatggtgtgtcacaaagagctccaagtaaatgctgtgaaggaagaggatgaggatggagatgaggatcctgagaagggcccagactggctgcccaacccatggacctgaggcctgagtaaggcctgggagctgctttcccctctgcccaggaactctgtccaggggcgattctaaggcacagtggtgaaggacatgattggtcccccaagtgtggtcctcaggtctcatggcagccactcgcctgggaacagtgcaacaagcattccatttagaagatcttccagaacacacacaagaagcattgtctaatgaaaatggagacaaggtctttcttggaagagagtgcccaagtagatactctctgccccaagactaaccaggtcccttttaaggtccctgagaacagcagcctgggagcaaccaagcctttcaaaggctgacaaggcacagagtggatgaatggaacgaacgatacatgaaaaaaacactttggctgataaaacctccaccttgaggcagggacagtgtcgctcgctgacatgcagaaacatgactgtagcagagatgatgatgatgagaaatgcttcgcatttcccacactgccgatatcccaagccctgtgctaccaccctctccccgannnnnnnnnnnnnnnnnnnnnnnnnnnnnnnnnnnnnnnnnnnnnnnnnnngagcatctgcagaataagtcagaggttgacacccagagcctgacgtcaggataggactcttggcactccgcactgaaacaccgtgattagtcctgactagacagcaaaagtaacgccagcctaagcttgaaatgcc

SEQ ID NO: 431500 - DNA, 1710 bp, Homo Sapiens
  misc_feature (65)..(65): n is a, c, g, or t
  misc_feature (150)..(150): n is a, c, g, or t
  misc_feature (314)..(355): n is a, c, g, or t
  misc_feature (978)..(978): n is a, c, g, or t
  misc_feature (1303)..(1303): n is a, c, g, or t
gtgtgttccccgcacatgcacttggtgctttagcatgaacgtgtcgtagacccacaccctgtggntgaagaggtgctgacggggctggtctgggggggctcttcatgccccccagggccaggcggggaggactgggtacggcccagggcnctggtggggcacagtggccaggctgaggggcgcctggtacacctgcaaaggctgcagcggctgggcatctgagaacagttttttgtatccagcaccaggctcctccaagtcgggcccctcctcagcaccactctcgccctcctcgtccttaacctggatgcaannnnnnnnnnnnnnnnnnnnnnnnnnnnnnnnnnnnnnnnnnaggtcttcctgtgtgctctcactctctgtggagccctcccggggcatggtcagggctccctcccccagcaagacctcctgctgctccgtcagctcctcctctgtctcctcagggtgggtggtgggctgcctgggcagctcccctgtcttggtgaggatcttgcccagctgtagctgctgctgcttctgcttctccaggaactgctggtgctgttgttgcatgaccagctgctgcagggcctggggactctgcggcagcggtgaggactgagtgcggctcaggggccgatgccgcgggagcttgcctaccgtccgcatgctggtggccacacgttcacccgtcactagtggggactgcccgtggagtggcacagcaatgagggtgctctgctgccgggcctgctccagcaacagcacatgctgcagcagggaggcatgcccgtgggggctcccgtcgccctccagtgccacgcccagcaggcagccaggaatagaggatgtgctcatgaacttgccggtcagcgtgccaccctgccgcagggactggagggcctcctctcggcctcctgctgtgtcgacagcttcggggaggcagtgaggtgtgagttggtgacagtgaccgtngcctgcagccctagggagatgttgggcagagaaggagacgtgtagaggctgaactggttgggggagctgtccagagggagggctcggtgctgagggagcatctcagtggggatgttggggactgagccagtaaagcccattctcagcgatggtgtctgtgggagctgttgggagagctggggccggagccgggtgcgctgttacacacggacgacgccccaggcccggcacctgtgatctcaacagctctcttcttaaaggtgctaataacagtcccatccttgcgacgcaggaggggactgcttctccgctcagccaccttctnttttagccttgaacgcactttcaagttgggttcagaggctgttttgcggagggggaagtcgtctcgactgtcgtagggcccaggcaaaggcagtttgtaggagggaggcgtcccaggggggccgctctggggaggggaactctggtccaaagaagcatggtgggctccccagcatttggggtgctgtgggagggaatggttgaggccgcctggtgtgggctcctttgacttcgacaagaggaattcctggagcctcagctttacctcagtgctggcaatggcactctctttgctcttctccttgttccgcaggatgagcagctgctgctccagccgctgcttctccagctcttccaaggatggttcccgacctgacatcccatccgctgcggctcgagctccggttc

SEQ ID NO: 431501 - DNA, 1797 bp, Homo Sapiens
  misc_feature (1657)..(1699): n is a, c, g, or t
tttttgaatgtgtgactttttgtttttaatagaaaaaataaacaaaatcacaatggtgaagcccagagggatgggggccggggcgtcacagggcaggctcctgctccatgggctcctctgccggcctggggctgtgttcccgggctgccgcagcctgggcctgctcggcccccaccgacagcaaggccatggcgctcacagtctcggcctcctcggtctcacctgcttgggcctctcgcagggaccggcccagaccagcggcgaacttctgcacacagctccagtgtttgctctggatctcgatgactttctctagcgtggccactgcgttgatgttgggcttttgctgcaagactgcctcatccaagggctgcagctctacactgagcagagccgagacacaagcctcagaggcatcacagatggcggtcaagtcatggcctccctccagggccagcaccacccggccccctgccagggtcatcagctgcctggtcaagtggccaaaacatctggcggtgacagagtagccacccagaggagacagatgtccttcaacagcatcaaacccggcggagactaggaccacatcaggtgagaactcgtgggcaatgggcatcaccactgtcctgaaggctgtaaggtactccacgtctccaatgggggggtccacacctcctgtccatgccacgttcacattgtaccccacgcctggtcctccaccaacctcttcaggagccccagagcctggaaagaagttcccgttgtcatagcgatgcagagagatgtagagcacagaggggtcattgtagaacgcctgctgggtgccattgccatggtgaatgtcccagtccacgatgaggaccttgcccacgttcaacttctgctgtaggagttttgcggtgatggctacagagttgaagaagcagaatcccatggctgtggattcctcggcgtggtgtcctgggggccggatgatggcaaatccattcttgagctctcctgcagccaccttgaaggccagctccagcaggcagcccactgccatgcgcacagcactggaggagtgcatctcattccacacggtgtcactgtccaccccgatgcccccacaaggcagcacagcatacatcttctggctgatggggccgagcaacttcttgctgtctagcttctgccggttgaggggactggtcccatagagcagggtgtggtattcagagtgcactgtctggatctcatctagcgtggctttgcgacctcggatccgctcgcacttgctaagcaggcctgtctcctgcagccgggaccagatgctctggatccggccagcatgctcagggtgcacgtgtgtgttcccgcacatgcactggtgctttagcatgaacgtgtcgtagaccacacctgtggtgaagaggtgcttgacgggctggtctggggggctcttcatgcccccaggggcagcaggggaggactgggtacggcccagggcctggtggggcacagtggccaggctgaggggcgcctggtacacctgcaaaggctgcagcggctgggcatctgagaacagttttttgtatccagcaccaggctcctccaagtcgggcccctcctcagcaccactctcgccctcctcgtccattaacctggatgcaannnnnnnnnnnnnnnnnnnnnnnnnnnnnnnnnnnnnnnnnnnggtcttcctgtgtgctctcactctctgtggagccctcccggggcatggtcagggctccctcccccagcaagacctcctgctgctccgtcagctcctcc

SEQ ID NO: 431502 - DNA, 357 bp, Homo Sapiens
  misc_feature (240)..(282): n is a, c, g, or t
ggcttttggccccagcactctgctctcgctaccatgggtgcttcccaaaccctgctcctaatggtggaggcagaggcacacaccactctctgtgagctggggaagtagccaggaccaagcctcaggaaggacaaaatctcttggaagcccaattctggcttaaaaattcatgtaaatgttggatcctccttcagaatcttacgtgcttgtggttgggcacaatggctcaaagcctgtaannnnnnnnnnnnnnnnnnnnnnnnnnnnnnnnnnnnnnnnnnntgatcaggtggcatttgaccattgggtcagagcgcgggccattttcccgatgcttctacctcccctcatagaaat

SEQ ID NO: 431503 - DNA, 736 bp, Homo Sapiens
aatgaaaatggaccaaagtgtcaagatgtatttgttttctttgactttattagcacacatcagaaaaatagcattgtattttgtgatttctcatgatgctctatcaaacagatagaaaacagatcatcaatagctgccactgtgttcctggagaatcttaagtcactccttttgttaattcgttgtaagtatgggtattacaaagatgacctgtcttgtgaattgtttgtaaatctgaatgctttggaagcactttgagatcccaaagtgaatcgtgcaaagtcattatcggttgttgttggtttttaaatgaagctccaaatactgcccatgttataaatggcaagactttcaaaaaatgatcactattgtattataagcaatatgcttgtaatttaagttaaaaactttattttcaagtacacttggtggtgataagtggtttatcctgggtagagttttgcaaagctgcgccaacctaaaaaaggaacaatgcttctgcttccactgaacaggtttcttctccccatggtgactgcaatgtaatttaaatttacattttagatgctggttgggctatgaaaaagagggacctgggaacagctggtgttcagatcattgttactccggattaactgtgaattgatgcttcctgaacctgaccttcacaacatcagagaagaagtaatttgttatttttatccagctagtctccattcacctcttctatttgttt

SEQ ID NO: 431504 - DNA, 292 bp, Homo Sapiens
  misc_feature (251)..(251): n is a, c, g, or t
  misc_feature (259)..(259): n is a, c, g, or t
  misc_feature (266)..(266): n is a, c, g, or t
gttagaccaagcaacatgtcacaatggctgatatgggccagacacagacaagggagtcacatatttgggtgtagggctcagttatatgttgaaatgccccctgtggcaggcggacaaagcagaagattcacatcacctgggatataaggcccggtgatacgttacaattcccctgtgaggcagcgttaaagcagaagaatagggtaattattcacctaggggctgagtccagtgatatgttcacaattccntctggggntgggccngggcaggttgttttcaattcttgaag

SEQ ID NO: 431505 - DNA, 747 bp, Homo Sapiens
  misc_feature (259)..(308): n is a, c, g, or t
gatcgaatgggccaagagggaaagtgagagagaggaagagcagaggcttgcccgactaaatcagcaggaacaagaagacttagaactggctattgcactcagcaaatctgagatatcagaagcatgaagaattctcttgttctttggcaacaatatagtattcttcttcctgaatactgaaactatttacaatgtgtatcaaaactacctgtgagcatgggaatacaaaaggtttgagattcctgtaaatgtgacaaannnnnnnnnnnnnnnnnnnnnnnnnnnnnnnnnnnnnnnnnnnnnnnnnncttataaaagccgtaacccagtcagacaaattcaccttcacttaggcccctgttctggtatacatttactgtgagcttttgcctgcctgtgctattttacttgtaaagctagagcacccaagcttctgccttctggaatatagagaaatagtttcaccctgcactaccctgttctgtagttattctgatgatagccagtgaggttcttaaaagtttgcagtattctcccctgattggaatggttgagtgagggtaagggaaagaatatcttatttcttttatgattggtgcaaattggctaaagtgcatttttaaatttcctctacttaatttgtttttcagagataaggaaaaatattttgcacagatttactccactatggaaaagggatgctgtaggttgaaccattatagcctcagattcgatcttttcctaact

SEQ ID NO: 431506 - DNA, 1040 bp, Homo Sapiens
  misc_feature (29)..(29): n is a, c, g, or t
  misc_feature (35)..(35): n is a, c, g, or t
  misc_feature (58)..(58): n is a, c, g, or t
  misc_feature (65)..(65): n is a, c, g, or t
  misc_feature (80)..(80): n is a, c, g, or t
aaaaaaaacccctaaaatttgtccaacanttaacnggaacctcaaaaccttttgtatnccccccnggctccacaggtagnttttgaatacacacattgttaaatagtttccagtattccaggaagaagaatactatattgttgcccaaagaacaagagaattcttcatgcttctgatatcctcagatttgctgagtgcaatagccagttcctaagtcttcttgttcctgctgatttagtcgggcaagcctctgctcttcctctctctcactttccctcttggcccattcgatcatatcttcttcagagggataagcactgaagttggcaaaattgcttggatcagcctctttattggtagtggtagtagcagaagtgaatggatcacaaaatatttcaggatctttttctttggggctatcgttgcctgggaaaggctgaaatggatcattcagtttaaagggatcaggagaatccaatttgttgatggatcttttcccaggtggtagagggcagggtcttgttggagttccgatctttggtggcagtgctgggggttcatcttcacttttgaccgatgtttcctcaaatacattttttgtaatcactacgttgctgacagagctcgatgtggctgaacgaaaaggatcttcattgttgacctttgacaatgtgctgaagtcagcaaatccacctccaaatgattcattcccaaaaacagaagcaaaggggtctgtggctgaatcgcttgctgcaacaactgttccaccaggagcaaaatgatcattgtgcttcaacgtttctaccgatgtaatactgctattgttggctgcactgaaagggtcagtgcttgaagtggcaaaaggatcagtagattgcctgaagaaacagtctgatgcaaatggatctgaacctttgaaaggatcaccaccaaatggatcgatttttccaaaaggatcatccttgaaaggatcactgccacaaaaggatcagactggaaaaaatccaagtttgtatctgcaactggacctgtcagccgct

SEQ ID NO: 431507 - DNA, 1395 bp, Homo Sapiens
  misc_feature (706)..(718): n is a, c, g, or t
cgagcggccgcccgggcaggtgtcactggattcgtttatcaaaattaagccttgtgattatgattcagcccttgcttcatatgtatgacttttatgcagaaatgtttctatttacaaaggtagaaaaaagttagcagtgcaagatagtggtttaaagtttgttttaaactgtaggagtctaattgtgtaatggaaagaaaacaaaacaagcaccatttcaagaagaaatgaattggatattttggaatttatttataggctaggcaataagttactcagattaacacagatcaataccaccttgacttgttgacccagagaattctaattagattttaggtgcatttttctttatcttggtatttaatacatcatctaagtcagtaaccgtgttaaacaaaattaaaatgacaagttacagcttacttcacagtctatttcaaattcagcttgtccactaggtcagttttacaggagatggtcttttaacatgaagaggtctgataatctggcaggtctcttctctcccaattaaaaaaacaagagtttttttgctagcttgacaattttataggtgaaaaacatgaagtgagtaaataaactaaaccacaaagatggacaaaaagcaatatgatataaaacacatcactttttctatttgtattcagtgaaagtttttacatttcaagtaaatgagccttcattnnnnnnnnnnnnncaaatatatatgaaaaattaaagtaccttccagttctagcttgctgaagtttcttctgcaaaagtacaaaaattaacccactaagaactaaacaggacagggccacggcaaaggcagaatggctgccatgttaagacttttgcttgccttatactgatgggtatattttaggtgataaattttctccactatctatcacttaaaatgaacattttcttacaaactttatttgtaagaaactgatttttattaattagcaaacacactgagaggtatctgttgatctaaaattctctaaatccagataaatctttttaaaaatttatttcacacatgaggctttaatatttttagttaggaaaagatcgaatctgaggctataatggttcaacctacagcatcccttttccatagtggagtaaatctgtgcaaaatatttttccttatctctgaaaaacaaattaagtagaggaaatttaaaaatgcactttagccaatttgcaccaatcataaaagaaataagatattctttcccttaccctcactcaaccattccaatcaggggagaatactgcaaactttaagaacctcactggctatcatcagaataactacagaacagggtagtgcagggtgaaactatttctctcccgcgtacctgcccgggcggccgctcg

SEQ ID NO: 431508 - DNA, 1218 bp, Homo Sapiens
  misc_feature (121)..(121): n is a, c, g, or t
  misc_feature (397)..(397): n is a, c, g, or t
cggtctagactagacaaatttgtgtttcctggcaaaagcaggcttaactggcatgggcccagatggtacacgccaacccagggccttatcctgggatgctgccaagcacgggcagtgcatncagtatgcaagagaaggttcctgtccacagtgccctcaaggcaggaccctccaggagcccactgcccaggcccagaggtgggttagctctgcagtgtgaactcatagggttctggtctcccagtgggagaggtccttgtccatcatgctacgctcagtgaaggtcacggtggccgtccgcatctaccaggatgatagtgttggttctgggtgccgtagccagggcagcgcacgcacacagccgcgtacttgctcagcatgggctgcacgtactccnccaccctgttcctcgatggccgggtctggcagctgcgcctcttcattgttgagcacatccaggaggctggcgatgagcacatccttgggcagcgcctggctccgttccacagcctccaggaagagctgcttcccaaagcacagcttcctccagggagtctccagcagcgcgttgctcagcccgtaggtgcctggcgtcaaaacgataggatcaggctcccctcggttcccatagtagcaaatgacgtctccctttgctgtgctcaggtcggctgctatgaggttgaagccattgtacagatggccctccatagagaccttcttcaggtaggacaagctgtccacgtcagtggtcagaaagtgggtgacaagttcacctcgccctcgggcctgccagtccagctgcggctgcaggtagttggtgagtgctgccagcttgccacgtgtgctgatgcccagccatgtgcctccttccttgccttcctccatgtccagcccactgaggatctcgttgttgttcccccagaagtcagctaacttggagggtcggctgtagaattcatccctgttggctgccaagatgagcctgtacgcgtttttggaaacagggcgaggatcaaacttaaagaagatgatgcacatggtggtgcagggcggctctgctgacacaggtcgcgaggtcttcaagcagcctggcccggtccgcgcacccagagcccagagcccggagcccccgagcccaggccggccgggccactagcggagtcggccagccccggagccgcgcactcaccgcctccgccaccgccgccgacttccgct

SEQ ID NO: 431509 - DNA, 562 bp, Homo Sapiens
aaaataacagacatttattgtcacacagctctggatgctggaagtccatgatcagagtgacagcaggtctgctccctctgaaggctctaaaagaggctctgaagcaggcccctctcccagcttctggtgatgccttggctcgtggagcaaaattccagtctttacacggggttcttcctgtgctcaggtcggctgctatgaggttgaagccattgtacagatggccctccatagagaccttcttcaggtaggacaagctgtccacgtcagtggtcaaaaagtgggtgacaagttcacctcgccctcgggcctgccagtccagctgcggctgcaggtagttggtgagtgctgccagcttgccacgtgtgctgatgcccagccatgtgcctccttccttgccttcctccatgttcagcccactgaggatctcgttgttgttcccccagaagtcagctaacttggagggtcggctgtagaattcatccctgttggctgccaagatgagcctgtacgcgtttttggaaacagggcgaggatcaaacttaaagaagatgatgcacat

SEQ ID NO: 431510 - DNA, 2227 bp, Homo Sapiens
  misc_feature (895)..(943): n is a, c, g, or t
gccgcttttgtttgccccccccacaacgacatagtgttgtccgtcgtaaaaatgtatgcagagcgagacgggttgtgcaccgcgtcgggccgtttgtaagtaaagacggcgccaggtctctgcgtttaatatgaggatggcgccatgggggctacttttgtgccaagagaacgggggcccgcgaaaagctcggcccccctggagggaaatctttaagggcggggcgcctcttccgggcgttatcgcgaccggggccggttcttgtcgaggatgatgcggtttagggaccacttcaaacccgacctttatttcaaaaccaacccccagatccggccgctgggagcaagtgggactgaggcccaggtgctaacacggggctggcagtgtcgagagaacgctctggaagctcctaacagacggctccgcgtgcggatgcacaggccctgacgggcactctgagctgggcagtctgacaccaagcagtaaggcctcccgggcagcgcagcctcagtccacgagcacagcgggtggccctctggggggaggcagcacggggcgcagccctcggcaggcgagcgggcgggatggatgaaacgcagcggcaccaggagccccaggctctcacaggtgccacccccgaccccaggattttcaaagggacaggatttcaaagtcttcatcttctgagtcgaagaatctttccagtcgctctacatcagaagaatctagaaggaacaggacatagcgcatcaggcatcttgggtgggccacctgggtgtgagttaagggcccttggcgtggggcagactgagcagtgcctgctctgcagcccacagacagctgtccccatgcgggtgtgaacaggtccgggggttgtgcagacctgcgaatatgnnnnnnnnnnnnnnnnnnnnnnnnnnnnnnnnnnnnnnnnnnnnnnnnngcggccggcacaatctcaggcctgaggggcctctgtcccgcgtctgaccctcgtggtcatcaggagtggttccattgccattgccttgtttgtagagttttccacagggagacagagatgaggaggacgcgctcacggccactcacttcactgcacgagcccaggccggctcctgcggcacgctgggccatggtccgaggggtctacgccacccatggccagtggtgcccaagtgaaccagtcccccacccaggactgcgtcaccacagagcctgcatgttctgtctgctccagacccctgaggactccatggtagcacgcccagctccacagcgccccggcaggcagcgctggtggggaagacgaggtgggtccctgggctgctgggcgcaagcttggaggaggggacgctccactccatacctggtctcacaggcgaaccactgccaagtgctcacggctcaggctcacacacaccttaatggtcaaaaccaagggggcccaggactggggaagcaagggcacagatcgtacctccgagggaccccacctggacttggcagctctcacctagggacaggttcaggacgtcggggcaggccagatgtgaaggctgctgctccaccagctcaaacatgggcagggcacctccaagcagagacagctttttgacttgctggcaccaatcactgaagtcatcttcagtcttacagacaaaaccccacagcgatggacgggtcaagctccgcgatgctcatggcggcacggcgggtgtctggcagtggaagctctcgtccgggatgaagcagccatcagtgcgctccacggctggctgcgtggtgtgggggtccaggtagatgagctcctcaccaacgtagccgatgaagtagtgggcgctgttgggcttccctccgatgacgcccagggactggggcatcatgaagcagtgctgtggaggggcgggggactgagcacaggtcccaggtgggagcagacggtccccccacccactgccatagggggcccaagggcctgctgaggcccaactgggtgacacaagaggggacaggaggggacatggtaccaaagagcttactgtccaggaaagaccacaggacatcccacaggcacaagaaacccaatctgcaggctcagctcagggaagcttcatgtcagaggtgggctttggggaggccgggagtgagggggcctggcaggagatgtgagcaggggtgcgggaggtggccctgctgagtgctttgacctgacagggcagaagccgct

SEQ ID NO: 431511 - DNA, 926 bp, Homo Sapiens
ttttgggggtccaggttaatgagttctgtaccaacgtacccgatgaagtaagtggcctgttggcttcccctccgaatgacgcccagggactggggcattcatgaaccagtgcttcagcgtctccacgtaggcctcgttgaatgtccgtgagccccaggcgcaggggaattgagaagtaccaggggtctccatgggcgacggcctgttggtgacctcagctccggcagggaatccgttgcagttgccggtcggaatctgcaggaaacgcagtggcgcctgcacagggaacgctggtcctgcacaaccttgctgatttcctgccatcacaacagtgttgtccattgcaatgtggaccgccaaggagctccacgtatcgaagacagcaagcttcttcaggacctgggcgacagtgttgggcccgtaccactggcctatggacttgccttcgccaactcccatttgcgctatctggtgaatggagtagtaactgtccttcctgtcgatgaatgcgttgaggacgctgaagtagctgtctggctgcctcttcctttgtgtccacctccaatctcggcctaggtgccggcacaccagggcttgggcaaagatcatctgtccacaccgcagcatgcagccccagcctgtgtccgaggtggggcctgtcccccctcttaggactcagtaacgccaagggccacatttactggagagtgaaatgtcccgacaacctcctatggctggaaagtttttcctgtatgtaaaccaaagtctagatgccacatcagacaagatctcgtccttttctgtgaaaatgctgtattttctacccagtatccaaacgggcctctgaggtctcaggaaaactcttcaaactcagcaaaccggagagtgtcgtaggtcagagtagctgcgtccatcttcccagtccg

SEQ ID NO: 431512 - DNA, 1922 bp, Homo Sapiens
gaagggtttttcccaccaacaccccccaattttcgggaatatatttttctccccccaaagccaagggaggaaacctcggcttttgtttccttccaaacctcattcttcccaatgaaggtagccccttggtaaagccaggccggggcagagaagaacacagcggtgggcgccgccccccctcgagagcagcccagtccttgggcgtggggccgcagtgtggttgccgctcctctcacgccagcctgcacaggtcttctgagactctgactcagggagcgccccagaaattcatgtctgtgtctgacaacttcaaacaggactttaattccaaaccaaccacagaaccggcgcctgggagcaagtgggactgaggcccaggtgctaacacggggctggcagtgtcgagagaacgctctggaagctcctaacagacggctccgcgtgcggatgcacaggccctgacgggcactctgagctgggcagtctgacaccaagcagtaaggcctcccgggcagcgcagcctcagtccacgagcacagcgggtggccctctggggggaggcagcacggggcgcagccctcggcaggcgagcgggcgggatggatgaaacgcagcggcaccaggagccccaggctctcacaggtgccacccccgaccccaggattttcaaagggacaggatttcaaagtcttcatcttctgagtcgaagaatctttccagtcgctctacatcagaagaatctagggacaggttcaggacgtcggggcaggccagatgtgaaggctgctgctccaccagctcaaacatgggcagggcacctccaagcagagacagctttttgacttgctggcaccaatcattgaagtcatcttcagtcttacagaaaaaccccacagcgatggacgggtcaagctccgcgatgctcatgcggcacggcgggtgctggcagtggaagctctcgtccgggatgaagcagccatcagtgggctccacggctggctgcgtggtgtgggggtccaggtagatgagctcctcaccaacgtagccgatgaagtagtgggcgctgttgggcttccctccgatgacgcccagggactggggcatcatgaagcagtgcttcagcgtctccacgtaggcctcgttgatgtccgtgagccccaggcgcaggggaatgagaagtaccaggggtctccatggcgacggcctgttggtgacctcagctccggcagggaatccgttgcagtgccggtcggaatctgcaggaaacgcagtggcgcctgcacagggaacgctggtcctgcacaaccttctgatttcctccatcacaacagtgttgtccattgcaatgtggaccgccaaggagctccacgtatcgaagacagcaagcttcttcaggacctgggcgacagtgttgggcccgtaccactggcctatggacttgccttcgccaactcccatttgcgctatctggtgaatggagtagtaactgtccttcctgtcgatgaatgcgttgaggacgctgaagtagctgtctggctgcctcttcctttgtgtccacctccaatctcggcctaggtgccggcacaccagggcttgggcaaagatcatctgtccacaccgcagcatgcagccccagcctgtgtccgaggtggggcctgtccccccaatggctggaaagtttttcctgtatgtaaaccaaagtctagatgccacatcagacaagatctcgtccttttctgtgaaaatgctgtattttctacccagtatccaaacgggctctgaggtctcaggaaaatcttcaaactcagcaaaccggagagtgtcgtaggtcagagtagctgcgtccatcttcccagtccggccgccgactgacccgagcatcccgctctcgacgaattcgagctcggccgatttggcctgat

SEQ ID NO: 431513 - DNA, 1016 bp, Homo Sapiens
  misc_feature (948)..(948): n is a, c, g, or t
ggcctgggtggcgaattcggcacgagggaaagatagacacaactgctccgagctactacactctccggtttgctgagtttgaagattttcctgagacctcagagcccggttggatactggggatacttgcgcccttttcactcatcactgacgatatcttcgtctgatgccggcatctcttactttcggtttacctaccccgaaaaactttgcaaccattgcggggacatgcctgacctcctacccaggctggtgctgcatgctgcggagtggacagataatctttgcccaagccctggtgtgccggcacctaggccgagattggaggtggacacaaaggaagaggcagccagacagctacttcagcgtcctcaacgcattcatcgacaggaaggacagttactactccattcaccagatagcgcaaatgggagttggcgaaggcaagtccataggccagtggtacgggcccaacactgtcgcccaggtcctgaagaagcttgctgtcttcgatacgtggagctccttggcggtccacattgcaatggacaacactgttgtgatggaggaaatcagaaggttgtgcaggaccagcgttccctgtgcaggcgccactgcgtttcctgcagattccgaccggcactgcaacggattccctgccggagctgaggtcaccaacaggccgtcgccatggagacccctggtacttctcattcccctgcgcctggggctcacggacatcaacgaggcctacgtggagacgctgaagcactgcttcatgatgccccagtccctgggcgtcatcggagggaacccaacagcgcccactacttcatcggctactttgggtgaggagctcatctacctggaccccccaaccaggcagccagccctggaaccccactgatgggctgctttcatccccggaccaaagctttcactgcccancacccgccgggcccccatgagccatcccggaagctttgacccgtccatttgttggggggggttttttt

SEQ ID NO: 431514 - DNA, 743 bp, Homo Sapiens
  misc_feature (728)..(728): n is a, c, g, or t
gactgggaagatggacgcagctactctgacctacgacactctccggtttgctgagtttgaagattttcctgagacctcagagcccgtttggatactgggtagaaaatacagcattttcacagaaaaggacgagatcttgtctgatgtggcatctagactttggtttacatacaggaaaaactttccagccattgattggaggtggacacaaaggaagaggcagccagacagctacttcagcgtcctcaacgcattcatcgacaggaaggacagttactactccattcaccagatagcgcaaatgggagttggcgaaggaagtccataggccagtggtacgggcccaacactgtcgcccaggtcctgaagaagcttgctgtcttcgatacgtggagctccttggcggtccacattgcaatggacaacactgttgtgatggaggaaatcagaaggttgtgcaggaccagcgttccctgtgcaggcgccactggtttcctgcagattccgaccggcactgcaacggattccctgccggagctgaggtcaccaacaggccgtcgccatggagacccctggtacttctcattcccctgcgcctggggctcacggacatcaacgaggcctacgtggagacgctgaagcactgttcatgatgccccagttccctggggcgttcattgggaggggaagcccaacaagcggcccattatttgattcggttaagtttngttgaaggagttcat

SEQ ID NO: 431515 - DNA, 1297 bp, Homo Sapiens
ccccttctccgtctgacctctgtcccgtgggtcccggttgcctggagggtatttccggggaggatgcgttgccccatagcttcccctgtccttccggggaacagcacgttggcatgcaccttctgtgcacccacggcttcgaagcccttctccggccctacgagccaccggcccgtttcgcctaccaaggaagccccccaccgataatcgtaattgacttcgacttcccgctgaaatcttctccaagcttctaaagtctccaatctttctgaaaagcgttgttctacttttcacctctgctccagccctatcaatggcagacagacttcttgggagtacctcctgttgcaatcaagcacttttcataggttatttgagagccatcattaagtttcacccatgttgtctctcacatccagctgtactaccttcttccccagtgaggacagccacaccaccattctcaatatgaggcaggtcctgagcagagacatagaaagaaggtggctggaaatatatgcttctctcttttccattccactgtttgaatcgcagtgtctttgtgacatttgggtcatctgaaaaccacagttcttttgaaagaggaggtcgcatgtacggcagctcaggatcttcagatacaatcagtaccctggccccaggatcccgagcccggatggatctggctgcagcaaaagcagctgtgcctccaccaattagcaggaaaggaacatgacttggcgccttgtcttgaggaacttcctctccttctgaagcagataacgcggcctttttctgtttctgttctggtgtcagccctaaccctgaaattctttcattgtatcttttttcatcctctttcatagtcttgtaggcataggcaccagctcctactgttgataagcccacaataaggactaacacagaattatcgattttgccccctgatgcaccagagctagccatttgtcttgtcatctggagttctagaggaacatgccatcgctggaacaagttgcctgggagccggttcctctgcctcgggcttcggacgcacacggtccgcaccaagggcaccagcttctgcttcaaagcacccgccgccaggcctccacaccggaacatttcggcgaccgctattcgggacctcctccttccctttcctctcacgcacgaccgacgggtcaaacaccgtgagccccggccagctcccccagtctcttcacacgcacattacgcagactcctcctcccagctccgggtgggcattggacagagaagccggcctgctagagcc

SEQ ID NO: 431516 - DNA, 1147 bp, Homo Sapiens
  misc_feature (290)..(290): n is a, c, g, or t
  misc_feature (418)..(418): n is a, c, g, or t
ccaagttttgtaaaaaaagtggtgcccaatacttgtatgaaaaaaagggcgagggtggtctaatttgttgccgccacttggcgtgcagacgcccatattccaaagggccgagacccaggattttcttgggaggttaccttccctgtttggcaatatcaaaggccctttttcaataaggtttattttgaagaagcccatcaattaaagttttcgaccaaggtgtttcttttcacattccaggctgttactaccttttttccccagggaggaccagcccacaccccccattntacaatatgaggcaggtcctgagcagagacatagaaagaagggtggctggaaatatatgctcctctcttttccattcccactgttgaaatcgcagtgtctttgtgacattggggtcatctgaaaaccnacggttcttttgaaagaggaggtcgcatgtacggcagctcaggaatcttcagatacaatcagtaccctggcccccaggatcccgagcccggatggatctggctgcagcaaaagcagctgtgcctcccaccaattagcaggaaaggaacatgacttggcgccttgtcttgaggaacttcctctccttctgaagcagataacgcggcctttttctgtttctgttctggtgtcagccctaaccctgaaattctttcattgtatcttttttcgtcctctttcatagtcttgtaggcataataaactcctgccccagtgactgttgctcctacaattaagaagtacactaggttgctgccatctttcccagaagcacctgtagatgctagtgatctagaaggggatcctaggtgatgagactgcacaactgggagccggttcctctgcctcgggcttcggacgcacacggtccgcaccaagggcaccagcttctgcttcaaagcacccgccgccaggcctccacaccggaacatttcggcgaccgctattcgggacctcctccttccctttcctctcacgcacgaccgacgggtcaaacaccgtgagccccggccagctcccccagtctcttcacacgcacattacgcagactcctcctcccagctccgggtgggcattggacagagaagccggcctgctagagccggatcccgggaattccggaccggtccac

SEQ ID NO: 431517 - DNA, 1828 bp, Homo Sapiens
  misc_feature (113)..(113): n is a, c, g, or t
  misc_feature (252)..(252): n is a, c, g, or t
  misc_feature (1216)..(1216): n is a, c, g, or t
  misc_feature (1227)..(1227): n is a, c, g, or t
  misc_feature (1274)..(1274): n is a, c, g, or t
  misc_feature (1282)..(1305): n is a, c, g, or t
gtggaccgggggaaaaaggggcccgtcaactaagggtctccactagtggaaagaccatccacagggatgcgtggtaccacaggtcgaaagaggggaattggggggggagaagnatgtggaaccactaggggcccacaaacacaaggggcccccaccggcgtttcggggtggaggcccaaatggccccttgaagggcaaggaaggcccaatgggcccaagcgaggagggcccatgaagccaagtatagccagngcaccgggagacacccccatcagaaggccagggccattttggtagggcaggctccaagccgaagaaggggaagggtgcacatggtgaatgtcctggggttttctaacctttccccaaaaagaacctaaaggcagggtggaaggactcccttgcacttccggctcatatcagcttccattttaggaggccatgactaagatagggcagaaggaaaaccatgttctggtcccccaaggagttctggccctttgactcccctgcaaagggatggtggggtgcctggcttggtggatagagctcagggccaactccagaacctgacatgtaggttctccacagtgcttaccatgaaacattctggaatccaaggccttggttaatccaccaaggccctgctggaaattctacctgctcctcggggcacttcaagctttagaaattaaatgtcttctacggtctttgagatcctcaagatgaaaggctctggagatgtataaaatatggtattaattatttccaccgcctgtgaggagtccgaaaccactcagttcccacagaggctattagggctgttgctttttaaaatattcattttataacgcaaatccccaatcacagacttcaagcaacaacaagggaaaatgcagagatatatcaccttcctcacggttttgggctggagtgttcttgtgtagggttaatggttctgccgcctccaatcccttccggtcaaccattaatttagagccaaggtcctgttctgcattgccattgattaattacatctggtctcatatgcttaggagcaggtcttgattacttttcttaactcccttcaccttcaagatggtagttttttacttacctttcaaatatgttttaaaacactgttattcatcaggtgaaggaatacgactaacaaattcaagctggctatttctctatgtgagacctgtgattccancccctaagttntaggcctccaccccagatttcccttctatattatttccactattttnaacttcannnnnnnnnnnnnnnnnnnnnnnnaatcttaaatattaatctcaataaggggaaaagaattttgcaaaattctaaaattgcttctgtgggaagaggcgggtacctgggggtggggtggacattggaacctctccctgcagagatgaaaacctcaatgtcggagcttggggtgggctagtgtgaccatcagggtaggaaagtgacaagaaagtaacattgacacagcagtctggctgcaaaggccccgcagagtgcagaatgcagaaggcaaacagagagtggttgcagggacatggagctagatgctgaacattctttcaggtctcacactctggggctctgtgaggcacccaaaaaggcaatcatatgtattttaagaaggatgacatttatcttgacagcaccctttcaagctctcattgtggcttccctggtgacagaggggacagtacagtccctcgtgacattctaacagggtgagacagagactaacccagagggtgaaatcccagggtctcttcctcctcagtggactcacattgcttta

SEQ ID NO: 431518 - DNA, 810 bp, Homo Sapiens
tgtctacaagaatgtttatatctgtatggtatatgaggacacataaggctggcaaaatctcctgaactggtctgccataggcggttggggatccttattcctgcagagattgacaatgacccatgtgacgttccgaaggaaggtgatggggatggagggactgatgaaggacagaagaggtttgacaactcccagtgatatgacataatctctacattgaggaccatcacctataatgtttcccaaagcccatactgcttgttcacaaacattctgatgtggtgaacgaagaagtctcagaaaaagaggtactgcattagactgcacaacagcttgagtctgtgcagaagttcctgatgctatgttagttaatgcccaagcagcttcaaactgtaatgaaggattatcatccctttctagacatttgactagaattggtaaaatcccagattttattaagtcatcaatcggtggatttctgtcactggataacagttttcttgctgcctggacagcactcaattggaccactgggttatcacttgtggcattctgcaatatagcttctagggttacattttgtgctttaaaatcagcatcaacatctgaatcttctagactttcttcttggggaacatttctctttttcaataagtgttcatctcttttgttcttccgcagttccactgtcacttcatttctatgtcttcgcattgtttccacatcgcggcccttgttcttgaagctcttgatgcggtggttctccaagctggggttctcggccatggctgcgcgcggctccggcggcgg

SEQ ID NO: 431519 - DNA, 569 bp, Homo Sapiens
  misc_feature (29)..(29): n is a, c, g, or t
  misc_feature (96)..(96): n is a, c, g, or t
  misc_feature (123)..(123): n is a, c, g, or t
tccggccacttattgttaaagttgctgantgccccaaagcagcttcttattgtggtcccaaaagtcccccctttagcaagctgaatgaattaatcnataggaatttaacccagcatcctaatnacagcttgaaacttgttgcctggttgcctgctgttatgttggaaaggaaccacactgcttcccttatttatcttctcttttgggtgtgataagagatttgggaagtgtgacaggacatcacaattgagaacaacctgggtctgctcgtcggtgccagtcactatgttgccaactgctctgagggctgctgtttgaactttgacttcctgatggctcagaagggacacaagaaagggcacaactcctgaatcaataaccatctgtatctgttcattacctccatctgtcaagtatgacagagcccaaacagtgtctacaagaatgtttatatctgtatggtatatgaggacacataaagctggcaaaatctcctgaactgtctccataggcggcgggggatccttattcctgcagagattgacaatgacccatgtgacgttccgaag

SEQ ID NO: 431520 - DNA, 1230 bp, Homo Sapiens
  misc_feature (92)..(92): n is a, c, g, or t
ctttatttgatccaagtaggtccttttagtactaggtgaattaattttgttcttgcaaatggaacaagatataaatcccaaatgttatcctngggccaagccatcgattttctaatactcgccgacagcactgtaagtggaatatgtgactacgatccagctggatggctggtgctgccgagagcgcttcgtgtgaaacatatcatgcacatgtcatcggcgtcttgcttcaggcttgtggcacttttgtcacagccgtgtagacagggcagacagtgttcttcgtttttaacacccccgcatggatggccacaaggatgcgtcttactacaggctatcttagcgtattcctggcaatctgcatcagaacaaacactgccaacagcagataactctgttccactcctggaaccacagaagcgacatgcttctgagctactcgtggtgggtttgcctgtgtgttctcggaattccaccattgccttcattgttttagaatctgccagtgccatcaaccagaacaatttggttctaccacaaccttcatgaaggtcaacctttatagcttcttcttcttctttgaagacctgtctttgatgagttttggttcttcgatgaaggtgaaggaatctgtcacagtctgtacataaatttccacagacattgcataaaatgattgctgcagtttcaccatcatcatggttatcacacataggcatttgtttttgttgtccatcctttcccatccatctccccgaggagagacgatctacgtggtcctgatcaagaacacatagggatgcgagagcaagccagagtctagttgttgcaatacatctcactggagacctaaattcttcttccatcttggtcaaggcaatgatggtttctgcaatagcattttttgtcactcgggaccaagcttctgacagatgacctgctgccatatccttgataagtttaatgatgatctctgagatctgggtaggggttgagcccttcatccaccaatgactttcacctcgtcggagataactggaattgaaaatcatcggaagagtaactgttgtaactcctttgcccacagtggtaccagctgttccagtgatggtggttcctttggcttttagctgtacagtgagtgctttggcaatgcatcctagaaacatgtccaagatacccagcttattccagtctcctttctctgttgagtgaatgatatcaccgata

SEQ ID NO: 431521 - DNA, 1520 bp, Homo Sapiens
tttaaataacagtctaggaaataaaccagaatattcctctttttatccccacccgtgatgcaattgtacaggattacaaaaaggcagtatacaataaacaatgattatttttcttttttgcttgaaagccagcatcgttcttagtccatgggcatggcgattcttttatatcaattatctataaatgtccaatgcttcacaggccaatgacggtaatggccacatgcaaacacctcacaagtttgatgtcatttgttcaaaagaagataaaccaaaataatgggggaaacttttcataggcaaggaattatgtacatgggtatttgggtatccttcttgcactgtggaatgggttcattttcatggatgttaaaatggggtcccgtccttatcctgagcagagtttaaacttcaccgcatcctcttgggggatgaaggcaatttttctctctgtagaccaaggatctgcgtgttctaaaaagtgtgggcatttctgcacactccacatcccagagcaaactcttccccagtgggtggatgaacaacatggagtggacattcagttccttctaactgcttgcctttgggacctgcaggacagtgtggtagttcttccttaggaatgctagtcattctttgaaaatcatcatgacaagcattacaaaaatgtgttgttccaaaacagaaaaaaacagccactgaacagcagtagcgacatttatattccaaaaagtctgtgccatgtttgggacacatctgagccctggaaacatcagaacaggcaccacaaatgagctctctgggatcataatcatctccccgtccagcctcagcatcgcagcgagcttcaccaccaaaatatgcctttctgcatttgtagcacacataatatgcatatctattcattgcatagccagctgggtcattataaaacctcacaccaggagttgtgatagcttcactcttatgcagaccttcatattccaatctcattaaggcttttcttctgacatcctcatagagttcttttattggatcaagtaggtcttttagtactatgtgattaattttgttcttgcaaatgggacaagatataaatccaaatgttatccttgggccaagccatcgattttctaatactcgccgacagcactgtaagtggaatatgtgactacaatccagctgaatggctggtgctgccgagagcgcttcggtgaaacatatcatgcacatgtcatcggcgtcttgcttcaggcttgtggcacttttgtcacagccgtgtagacagggcagacagtgttcttcgtttttaacacccccgcatggatggccacaaggatgcgtcttactacaggctatcttagcgtattcctggcaatctgcatcagaacaaacactgccaacagcagataactctgttccactcctggaaccacagaagcgacatgcttctgagctactcgtggtgggtttgcctgtgtgttctccctcgtgccgaattcgccacccaggcctcgctc

SEQ ID NO: 431522 - DNA, 528 bp, Homo Sapiens
ctgggcacaagctgaagcagacgccgatgacatgtcgatatgttcaccgaagcgctctcggcagcaccagccattcagctggatgtagtcacatattccacttacagtgctgtcggcgagtattagaaaatcgatggcttggcccaaggataacatttggatttatatcttgtcccatttgcaagaacaaaattaatcacatagtactaaaagacctacttgatccaataaaagaactctatgaggatgtcagaagaaaagccttaatgagattggaatatgaaggtctgcataagagtgaagctatcacaactcctggtgtgaggttttataatgacccagctggctatgcaatgaatagatatgcatattatgtgtgctacaaatgcagaaaggcatattttggtggtgaagctcgctgcgatgctgaggctggacggggagatgattatgatcccagagagctcatttgtggtgcctgttctgatgtttccagggctcagatgtgtcccaaacatgggagagact

SEQ ID NO: 431523 - DNA, 736 bp, Homo Sapiens
atctgctgggtctttaggggcccaagtggcagagcagcttgcacagcagcctagacctgcctgttgcagagccttctcctgttctggatccccactcaaaactggcagccatttgggtcactcgataaatgggctggagtggcatacccaaatgaggaatgtgttgcctccaaaaaccaaataggcccactaggcattgtgcctctttcttggttgtaggaggggccaaatgtagcaacttattcttcaccttagaaggcatatcttgactggccccatgccactggacccctagaaattttactgaggtagaagttccctgaattttagttagatttatttcccatcctctggcatgcaaatgtctcaccaataagtccagtgtgtttgaaagccaccattataggtataaagcagcttgtataatcagtgatgatcattgatgaattgtccatgtattcttttgaatttggaaagatagaatgatgttggctcacaatgtaaaatgtagcttgatcattttatttcctagaaatgataaaaagctgtgccatttctggaaattagaaaaataaaagattaatcataaaagttcaggatttttgtatttcagcctgttctcataagcacagaatgatgtgtgccctttcctattagattttccaagggtgtttctgatttgcaaagtaagaagaattgccttgtatctagctaattaacttggagtactaatgcc

SEQ ID NO: 431524 - DNA, 1801 bp, Homo Sapiens
  misc_feature (148)..(208): n is a, c, g, or t
  misc_feature (860)..(860): n is a, c, g, or t
  misc_feature (936)..(936): n is a, c, g, or t
  misc_feature (957)..(958): n is a, c, g, or t
  misc_feature (1003)..(1003): n is a, c, g, or t
  misc_feature (1097)..(1145): n is a, c, g, or t
  misc_feature (1154)..(1154): n is a, c, g, or t
ttgacttctttatgctctttaggctttgtctttttttcttctccagattctccgtcactcacagtcaatttgtgccgcaaaagcctatgtctgtatcttggcttcttagattcttcagaatctgaatctgattcagaattgacttgannnnnnnnnnnnnnnnnnnnnnnnnnnnnnnnnnnnnnnnnnnnnnnnnnnnnnnnnnnnncttctggctcatcatctgaagatccatcctcatcagaggaaagattggctttaatttcttctaaaagcatcttcttggcaattctattctcaggatcattgtcgtcatcatcatcatccactgtgacaggcactgatttagataaggcttcatctcctgaagattggcaaaatccagtatgtgaagacagcactaaattttcagtcacaggcttaattttctgttcatcgctgcttccctcacctatagaattctgatcatcatcttctatatcagaagaagatgaggatgtaatgtcagcttgcttccttttagtgcttgttcttagggagtttctctttttctccttgacaatgactgccttctttttagatgaagttctttgcttcttctttttattatcttcagaactttcctcagcatcagatgatgatgagccactttgtatttccttagtatttctctttgaacttaaatttcttctttccctcaattctattcttttcagtctcttatcagaagagttacaaccatcttctttcatggaatatttctcagtatcagatgatgaacaatcttgtctcttccttgaactctttccaagcaacttgcaccttttcttctctctaccatatgctccattcttactctntttatcctctgaagagtcacaactatctcctttccctgttgacttctcagcataatcagataattcatccttcttnttagaagttttatctcttatnnttttacttttcttttctccatcagttgttccattcttaatttgtnttatgcccttaggaaaatgacaaatttcttctcgctcaggtaacttttcagtgccatcagatgaagattcatactgttgttccattttaattannnnnnnnnnnnnnnnnnnnnnnnnnnnnnnnnnnnnnnnnnnnnnnnngctctgctntttatcatcttcagaagtttcatcgctctggtctttctttaggaatttctctgcaatatcagataagccatcctgtacttttttacatgttttggttttgagagtgcttgctcttttctttagtttcagcaacttttctaacttccaaagaagtaaagctctgctctttcccagaaagtttatcgacaccatcagtggaagcacttgcttgctgcttcttaggaagtcgatctcttaattccatgatggtcgtgtctttatcaactgtgccttctgctgaagagaaagtctctctctcttgttttctttcagcatcatcagatgatccttcttgtgaggtcttcaaatttttgtgcccttgattatccattccttttttgctgtgtttctcatcttcagaagagtcaaaatcttttgtatttggaattctttttttggtggttctggcagcaccaattttactcatgctctttatctctttttctaattctgagtcataattagaagactcagactgggtttgtcgtttctttttagaaattatagagctcttagctgatttgccctttttagtatcaaaatctgagccagatgtagaactttttcgtttcctttttcctttatcatctttccccgccttcagcccc

SEQ ID NO: 431525 - DNA, 1698 bp, Homo Sapiens
ttttttttgtcttattacccgatttattagagagatctctaaaaagacggggtgtggcgggggtaggtgggcgaggaacctgggatgcaaaccagtgtttggggccaggagtggctgtatggtttcagaggcgcccaccactctgggtttgagggacacagcaccctcgtctcggcgctttggattgtcacgcaccagaccacggggcggaggaatggagtggcatccctggggggagttaagacacacgaggtttgcagtttcattttgtttcagaatcagtttggccataaaaatgggactgggttggggacaggcggagcgattgaaccaccggagatgaggaggaggtggcaggcgcctctcctggggtggggactgagggctgtggagacagtaccatggtgaaggaccccatggcaatgggagtattgcactgagccaggtttcgggggaacggggacgtgtcgggatggcgtagggggacagagcctggcaggagacacatggaagtttccgccttgtcagtctcagagcaaacgccttttagtctttacagtacaggaatttggacactgcccacgttctcagtggacagcagccatcagaggtgacccaggaggggaagtgggcattggtcaccaaggtatttacagacttctatcatgggggacagcggggtgggtccagcagcctccctcgcgggggatctgagggagaccgagttcgctaaatattataaataggtcttgccgtcctcctgcccccgcccctcggcacagtcagtggagcacgtcagcctcggtttacagttctctgaaaaggaaccaaaaaacacaaccaacaccaagtatatctccaaaggggccttggagacaacacaagaatggaaatgaaatggtatccacagaggtttgcacatttctcctgcaaaggcgcgtcggccgggcactggtgtcccgtgtcactcagcggagggaggctgccctggacgcggtgccgcccgcccggggccacacctgctgctccgagtcaccccacaggctcttggcgtctctggtgccagggctctgggcagggcgactcgaggactccctgggaggactggtgtggcctctgggggttgggcctttgagatgacaatgcccctgtccctgctggccatccaggtcccagacaccccttctgacctctgcccctgcctccccggggggtgcctgctgggtgtccttcggagggacagggcgggggctgatgggtggatgcccggtgccagcagatgagcaccaggctgtgaactgaggccaaggtcgcttcccagggctggacagaccctctgagcacgcagggaggaccccacgtgggcttgtcctgatggatgctgggagccacgcgggtggccggttcccgaggagggtcggcccctctcctgggcagagtggaggggctgctctcgtggagtgtgtgtcctcgctggggacctcggggatgggtccggcttctccacagcaggggccttccgggcgcagcgtgtgggctgtgcaggaggccgacgggacgtgaacagcgggtggcgtggcgtcatacggaggttgtaacagacaaaacacagagccctgcctgggaggttctccggccgtctcagaccccacaccaggctctgccaggtctggagaggaattcttcccaaaggtgcag

SEQ ID NO: 431526 - DNA, 978 bp, Homo Sapiens
  misc_feature (66)..(66): n is a, c, g, or t
  misc_feature (895)..(895): n is a, c, g, or t
atggcctagggggccaggcccggctccacaggagtctccttcaggactggtgtggatgtccgacgnctctttcttgtttaagtgatgtgatgtctccgaggaggggagagaagactttgtttccgactcatcaccctccaagagggcagcgctcccagtggtgggactcagcccagactgccctggggcagcttcctgggcccgctgcgctcagagggtgctggttggaggccagagctcggcagagtcacccaccctgcccttccccaggacccctgagaggggcttattggtgatggctgtgggaatcccccacttccaagatgtgcccaggatgtgaggagctggagtggaagctgcacctttgggaagaattcctctccagacctggcagagcctggtgtggggtctgagacggccggagaacctcccaggcagggctctgtgttttgtctgttacaacctccgtatgacgccacgccacccgctgttcacgtcccgtcggcctcctgcacagcccacacgctgcgcctggaaggcccctgctgtggagaagccggacccatccccgaggtccccagcgaggacacacactccacgagagcagcccctccactctgcccaggagaggggccgaccctcctcgggaaccggccacccgcgtggctcccagcatccatcaggacaagcccacgtggggtcctccctgcgtgctcagagggtctgtccagccctgggaagcgaccttggcctcagttcacagcctggtgctcatctgctggcaccgggcatccacccatcagcccccgccctgttccctcccgaaggacacccagcaggcacccccccgggggaggcaaggggcagaagttccagaaggggtgtctggggaccntggaatgggccagcaagggacagggggcattgttcatcctccaaaggcccaaaccccccagaagggcccacaccagtttcctt

SEQ ID NO: 431527 - DNA, 1748 bp, Homo Sapiens
ggtccggaattcccgggatggacatccgcccctttccggtttttttccccgcctcccaaccgtgaggtgttgggtttgggggacgctggcagctgggttctcccggttcccttgggcaggtgcagggtcgggttcaaagcctccggaacgcgttttggcctgatttgaggaggggggcggggagggacctgcggcttgcggccccgcccccttctccggctcgcagccgaccggtaagcccgcctcctccctcggccggccctggggccgtgtccgccgggcaactccagccgaggcctgggcttctgcctgcaggtgtctgcggcgaggcccctagggtacagcccgatttggccccatggtgggtttcggggccaaccggcgggctggccgcctgccctctctcgtgctggtggtgctgctggtggtgatcgtcgtcctcgccttcaactactggagcatctcctcccgccacgtcctgcttcaggaggaggtggccgagctgcagggccaggtccagcgcaccgaagtggcccgcgggcggctggaaaagcgcaattcggacctcttgctgttggtggacacgcacaaaaaacagatcgaccagaaggaggccgactacggccgcctcagcagccggctgcaggccagagagggcctcgggaagagatgcgaggatgacaaggttaaactacagaacaacatatcgtatcagatggcagacatacatcatttaaaggagcaacttgctgagcttcgtcaggaatttcttcgacaagaagaccagcttcaggactataggaagaacaatacttaccttgtgaagaggttagacatatgaacacgttttcagtgtggacagcagatgacaggacattgagagcacagcatgaagacaaatattaacacaagttcagcagaccagtttttagaggaacaaaagcaagagacccaaaagattcaatcaaatgatggaaaggaattggatataaacaatcaagtagtacctaaaaatattccaagaagtagctgagaatgttgcagataagaatgaagaaccctcaagcaatcatattccacatgggaaagaacaaatcaaaagaggtggtgatgcagggatgcctggaatagaagagaatgacctagcaaaagttgatgatcttccccctgctttaaggaagcctcctatttcagtttctcaacatgaaagtcatcaagcaatctcccatcttccaactggactaacctctctccccaaatatgcctccagattcacacataaaccacaatggaaaccccggtacttcaaaacagaatccttccagtcctcttcagcgtttaattccaggctcagacttggacagtgaacccagaattcaaacagatatactaaagcaggctaccaaaggacagagtcagtgatttccataaattgaagcaaaatgatgaagaacgagacgcttcaaatggatcctgcagactatggcaagcgacatttcaatgatgtcctttaagtcctaaaggaatgcttcacgaaacactctaaagtcgctagcaatagttacacacacagagggaaactggaagcccaacgctgtacagtattgtgtagacacagtcacctcccatactccttcttattttacatgagtgctagatgatgttttggcagatgagctttcacctgaggcctgatggacattgagataacccagcgcgcccacacgttactcaaccctagccgccag

SEQ ID NO: 431528 - DNA, 565 bp, Homo Sapiens
  misc_feature (489)..(489): n is a, c, g, or t
aaacagatggggttactgtgaagaagttttcacaactatttatgctggtaaaacaaatgctgttaaatcaccttatgcgtcgttttcaacagcagtggggctaattacccggaatacggtctcaccgatgcagttttcatggacatagaaaattcaaatagaatatataatattgaatttaagatttggggggttaaaaaagaaaacttaactttataaaattatttattctattttaagccttctatcatattttcccatccaattgtttggtttcagtggtccagctttatttacaggcatataaaatgaaattgtgagatgttttgcaagcttctttttactttgagtagcttttaatttgtatgtttttatgtggatgaagagcattttttatgcttttgtgcaataggttccaatatgcatttattagacatctgtttaaatggtaatgtagcatttattttgctaaattgaaagggaacatanatggaattccaaaatatgtacattcagctgtttggtttttcgtttttcattgttattattgtgagaatgctgttat

SEQ ID NO: 431529 - DNA, 1305 bp, Homo Sapiens
  misc_feature (505)..(514): n is a, c, g, or t
  misc_feature (1259)..(1259): n is a, c, g, or t
gctatttgatatgacagttgtcaaaaagcggctggtacggtccggaatccgggatatcgtcgacccacgcgtccgacatttaataaataatgtgatataattatttaatagaaagaataattccgaccttcaagcaagttcctgaaggtattttatgatgtataacaactgaagttttacaataaaaactaatttaaatgttagctgatgatatgtggcatttaaattaaaatggaaattatataaaggaaagtgatttttaaggatatacataaagatatatttagaattttcatgatactgttctcctcatctactgcttatgttaagtgagaactttcttagtaatacataatgcatgatgttactgcattttctaaatgactagtaagtgattagttttttcacttatgcctattaatttgataccaatttaatcatgataaaacaataaccgttaacatatattttgttaaatggacatttaaaagaatgttgttcaggnnnnnnnnnnaaatactgatatggggcatacaatctattcacatgttttctactgaagtactaagtaaaaaaattaaatcattatcagaataaaaatatgtgttctaaaattagcaacaatttctggggatacatgcagatgttgttaaacgtacctctgcatacagatatattataaaacacaagcaatgttatttatgaaactgtgatgcagtcttcaacatcaagaaaaaatgacaactataataaaatttacaacacagtttcacagtctaaatgctatgttcctttaagtattttcatatttttaatcatttattaagagaaaattgtgaaaagttaatttggccttatagagagattcaggatagatgtagcctatagatgtgtcattttaataagttgggatacatgtttagtttttccttatattcctgttcagtgaacagattttcataattctcacttgttaaagtgctgcaaaaattgcattttcagtactctaaattactacattagaagagagcatttctccattgtctttattttctgttatatatgtgttgtaaaagtacactacattagaagggagcttttccgttgtctttattttctgttatacatgtgttgttaaagtacatgcattcttagactaactctcagatggctttgctcttttgggaagctggaagaaattgtttggatgggtgatggccataatatcctggataagattaggtttccaggtgggttcnccaatttccacctttttataacggtaaattccttaacctataatta

SEQ ID NO: 431530 - DNA, 1527 bp, Homo Sapiens
cacttaagcttttcttttgcttttattacaagcatataatattaattggcaaaacactgaatacaagcttcactatcataaaatcaaaacatttaagcaatattccaaaaaagatttgacaaaaactagccaccaagagtacaaaaattacacaccaacacaaagcataaaaaatgtaaactttcaaattaaacagtcaaacacatgtatcttcgtgatcacctccacacctcgactgccttcgtctgccgtacgctgctggtaaaggctgggtggctgcactgtcttccccaacccaacattgctttcgtctgggaaaatgcgtctgataggcaattaagccatgggagtggacatttacacggaggctacgcacatctcaggggaacgctcaaactgcagctcgttcctcagacgcactgttgggtgcgaaggacacctggagggtgagggagacctcggcgcgttcctgcggggccttggccacgtggccattgcccgcaccctgtcccgtacaaattatggtatcatttgaatgattttctaatctacttatctcaatttatgtatttaaatgtcaaggcagagaaatacattgatcatgttaaggtcatgtgatgtggtggccgcagtaaatgacttcctgaggaaacagagaaattggaatgttttgtgatttagctaatgtgcacttaaacttattttcccatgttttgagagcacattaaacattcacgtacaacgtgggactaggttggcttgtacccagaacgtccaacccaatgccaccctttgaatcgctgtgaacattgttctgtttgctgttcagagaaaaacaagccaaggctgcgaaagcccgggggtgcaggcagctgcagtgcttgggccagggcagctccgctcttgtggtctgaggccacattggcccgcccaggggcagcctggccacaagcacgtggggtccaaggcaccaggacccaggcaggactgaggtggccccacagcgtggcccgaggcatcactggctgacgggcactcacacacaaccccaataacagcattctcacaataataacaatgaaaaacgaaaaaccaaacagctgaatgtacatattttggaattccatctatgttccctttcaatttagcaaaataaatgctacattaccatttaaacagatgtctaataaatgcatattggaacctattgcacaaagcataaaaaatgctcttcatccacataaaaacatacaaattaaaagctactcaaagtaaaaagaagcttgcaaacatctcacatttcattttatatgcctgtaaataaagctggaccactgaaaccaacattggatgggaaaatatgatagaaggcttaaaatagaataaataattttataaagttaagttttcttttttaaccccccaatcttaaattcatattatatattctatttgaatcggacgcgtgggtcgacgatatcccggattccggaccgtaccagccgctttttaacaacggtgatatca

SEQ ID NO: 431531 - DNA, 305 bp, Homo Sapiens
  misc_feature (98)..(98): n is a, c, g, or t
  misc_feature (104)..(104): n is a, c, g, or t
  misc_feature (189)..(189): n is a, c, g, or t
agccacacaaccagagggtgcacatgacttgatccctatgaccaagtcaagttggtgttgcccaaatcgcagtttgacataagggtcccacaggcttncccacnccccgcccccactcactgccccagggaccaacttcctaccctcacccaaggctttagaggacctgtagcatgtctttttcaaccntgtcagtatccccttctgcttaacacacccactgagaaaaccctgtttgtagttcactttgactcttgaatgtgtcactttactggcaagagacttcctttgatttctactgttta

SEQ ID NO: 431532 - DNA, 996 bp, Homo Sapiens
  misc_feature (519)..(519): n is a, c, g, or t
  misc_feature (791)..(807): n is a, c, g, or t
  misc_feature (844)..(844): n is a, c, g, or t
  misc_feature (857)..(857): n is a, c, g, or t
  misc_feature (863)..(863): n is a, c, g, or t
  misc_feature (868)..(868): n is a, c, g, or t
  misc_feature (903)..(903): n is a, c, g, or t
  misc_feature (908)..(908): n is a, c, g, or t
  misc_feature (929)..(929): n is a, c, g, or t
agagtgagggcctcacagttccttacctcaaagtccctttaggtccttctggtttggaggaagtggagcctccacgaactctctcttactccgaccattcaggcagcaaagtctctgcttacatcattttggttgtcaccttggggctgagtgagaagtcttttgtaaattaattcggcgtgtgctacatgagccataattattaacagaacaggaatatcagaaacgaagttgttgatcaggcccactgcgaccttcctttctatctcagggtttaaaactgtgaggaaggagaagtatgaaggaaggtagaaaatgctggtgggtctccgtgtttatggagtcacagatttgaaagctatcaggaaatgactagagtggatcctggcactgattccaactctttgccagctaatcttaacatttagcagaaagctctagcaacatgatcttaattgtatccagaggatttgccaatgtatgttcagtctctcaagatttggcattagtcagacatgntgatgctagccacaatttggatttctccatagaataatcatttatttttgcagatcaaataaatcagagtttacaatgcacaggggatcatttatttagcattcccttgctagaagcccgtgtgccaggcactgtgctagaagtggtgggcagtataaagaaatctgtctccacagccacacaaccagagggtgcacatgacttgatccctatgaccaagtcaagttggtgttgcccaaatcgcagtttgacataagggtcccacaggcttnnnnnnnnnnnnnnnnnactcacttgccccagggaccaacttcctaccctcacncaaggctttaganggaccntgtangcatgtctttttcaacctggtcaagtatccccttncctgnttaacacacccactggagaanaacccctggtttggtaggtttcacttttgactctttggaaatgtggtccacttttaactgggcaaag

SEQ ID NO: 431533 - DNA, 683 bp, Homo Sapiens
  misc_feature (583)..(583): n is a, c, g, or t
  misc_feature (632)..(632): n is a, c, g, or t
  misc_feature (641)..(641): n is a, c, g, or t
gttgtttgtgtggttgttttcgtctttagcatttatttataattggaaaaactgtttgtttgtttgtttttctgagcaagcacagaccacaagcacgtcacaatcaattggctatacatgaatatttttgtcattctcttacagcaggaatgaaatagcaccaagagaggtgtgcgctacatgttacatagacaatctgtggtatgcaacaaaacccaggccacaaaatcgtaattagacacttcctgtctgcctcagagaggcaaagaaagctatgtggaccgaatgggagcacagacaggacagattgctgagggaagccaatgcgcagctcttggggctgcttttgcaggcagggaaacagcgggaaagcttcagtcccagctccctcgccagggaaggacggagaaccacagggaaatgtacagaggccagtgggacgagctttggaagcttggtcaccttcaggaaggcaacacccaaacactgcttgtggaaccaaaatcagtttcattcagtacgtttgggatatagaatgagactggctgagttttatttgtaaacagtagaaatcaaagggagnctcttgccagtaaaaggacacattcaagaatcaaaagggacttcaacangggtttttnaagggtgggttaacaaaaagggatcttgcaggttgaaaaaga

SEQ ID NO: 431534 - DNA, 1112 bp, Homo Sapiens
accattcacattaacatataaatgtaatacagtgcaaatatttgagaataacatgtttcccccagtgaaacaagagccagcattatggctgaatattctccagatctatttacacattgagttaaaagttcaccataaacttagaaatttgctgaatatcagcagaaatgtaactgaactagcagcaattgcatttacaatatttgatagttacttgagagaatgcataaaattttccaggctgtactctgaatcatactgctcttgatcccaaagatcactcaggttttcaagaattgatgttcatacttgctttcccagaagtagaggtgtcagctttttctgctttgccatccttatcaagagtaaacagatcaagaagctgatcagtccccatgctctgcaaactagaattctcttggctaataacagtattcgctatgttcatctttgaatttctgcaaccccattattttttcttccaatgttcctctggttatcaatcggtatacgttaaccacacgtttctgcccaatgcgatgggcccggtccatggcttgtagatctcgcataggattccagtcatgctccacaaatactactgtgtcagcgcctgtcaaattaagtcccaggccaccaacgtgagtggtaagtaacagaacgtctatagatggatcattattaaaccgggaaacaatggaatgcctctgaccaggaggtatgctgccatctaatctcaaataagtgacagagggcaagtgaggtttgaggagatcatgctctactatatcaagcatgcttttcagctgacagaatatcagtatcctgtgctgggccacaacagactctgtgccactctcggaagtgctgccatttcccaaaccgcagtccaacagcaattgtttcaaagctgagagcttaggggcatgttgaatatcatgtagagaagaattctgaactgccagtttttcggcagtggtcttgaattctggatgttgaggtgttaagactaatgctggatggttgcacagtttacgtaagtactgtaatgcctggaatacgtggcctgtagctttaagctttggtttttcaatcccgggaattccggaccc

SEQ ID NO: 431535 - DNA, 508 bp, Homo Sapiens
ccttttttggcagttgcctttcagcagacaataaaccccacaagttcttgttggtaaaatgttttaaatgttttgtggtcagtaagtctgggaatgcgataaagaacacatgagaatcaggcaataataatgagttactaagaggaagtgaaagacacggaacctatccccatcatcggttgggggagccaccaggtaccctgggccactgggtgtcaggtctcagggtggaggtgggtggaggtaggcagcgtgggaacggcagccaaattaaagtgaggccagggaagttgaaacccgcagagtctctctcccgacctgctgcatcccgtatcgacttatgaggtacgtgcggcggggcgcagagctggggctgagctctgtctgaaaagaatgtcagtgagagaacatgggtttactttcatttttccttgggcacagacacacacgcgtccactcccatatctttgcacacacgcctgtaagcattcaggaacgcacgcgtggt

SEQ ID NO: 431536 - DNA, 1926 bp, Homo Sapiens
  misc_feature (1194)..(1194): n is a, c, g, or t
caaaggagcgaggcctgggtggcgaattcggcacgaggcaaggacatgtactaacggcggcacccaggcctccctgcagactccaatggggccagcactggaggggcccacccacatgacttttccattgaccagcccttgagcacccggcctggagcagcagagtcccacgatcgccctcagacacatgacacccacggcctctggctccctgtgccctctctcccgcttcctccagccagctctcttcctgtctttgttgtctccctctttcttagttcctctttcttttctaattcctgttgctctgtttcttcctttctgtaggtttctctcttcccttctcccttgccctccctttctctctccaccccccacgtctgtcctcctttcttattctgtgagatgttttgtattatttcaccagcagcatagaacaggacctctgcttttgcacaccttttccccaggagcagaagagagtggggcctgccctctgccccatcattgcacctgcaggcttaggtcctcacttctgtctcctgtcttcagagcaaaagacttgagccatccaaagaaacactaagctctctgggcctgggttccagggaaggctaagcatggcctggactgactgcagccccctatagtcatggggtccctgctgcaaaggacagtgggcaggaggccccaggctgagagccagatgcctccccaagactgtcattgcccctccgatgctgaggccacccactgacccaactgatcctgctccagcagcacacctcagccccactgacacccagtgtccttccatcttcacactggtttgccaggccaatgttgctgatggccccctgcactggccgctggacggcactctcccagcttggaagtaggcagggttccctccaggtgggcccccacctcactgaagaggagcaagtctcaagagaaggaggggggattggtggttggaggaagcagcacacccaattctgcccctaggactcggggtctgagtcctggggtcaggccagggagagctcggggcaggccttaccgccagacagtcccactggccccctgcccagtagcagccgcccacaattgtagtcagcatccaggggcagggcctggcctcacatccccctgctcctttctctagctggctccacgggagttcaggccccnatccccctgaagctgcctctccagcacacacacataagcactgaaatcactttacctgcaggctccatgcacctcccttccctccctgaggcaggtgagaacccagagagaggggcctgctggtgagcaggcagggctgggccaggtctccggggaggcaggggtcctgcaggtcctggtgggtcagcccagcacctgctcccagtgggagcttcccgggataaactgagcctgttcattctgatgtccatttgtcccaatagctctactgccctccccttcccctttactcagcccagctggccacctagaagtctccctgcacagcctctagtgtccggggaccttgtgggaccagtcccacaccgctggtccctgccctcccctgctcccaggttgaggtgcgctcacctcagagcagggccaaagcacagctgggcatgccatgtctgagcggcgcagagccctccaggcctgcaggggcaaggggctggctggagtctcagagcacagaggtaggagaactggggttcaagcccaggcttcctgggtcctgcctggtcctccctcccaaggagccattctgtgtgtgactctgggtggaagtgcccagcccctgcccctacgggcgctgcagcctcccttccatgccccaggatcactctctgctggcaggattcttcccgctccccacctacccagctgatgggggttggggtgcttcctttcagg

SEQ ID NO: 431537 - DNA, 1574 bp, Homo Sapiens
cggagagcgagcgggagtcggtgctcggcctcctgcggggagcagcccgaggaatctgcaggagaggtcgggaggtgacaacgccagcatgccagtgctatcggaggactctggtttgcatgaaaccctggccctgctgacctcccagctcagacctgactccaaccacaaggaggagatgggcttcctgagggatgttttcagtgaaaaaagcctcagttacttaatgaagattcatgagaagcttcgctattatgaaaggcaaagtccaaccccagttctgcacagcgctgtggccctcgctgaggacgtgatggaggagttgcaggccgcctccgtgcacagtgatgagagggagctgctccagctgctgtccaccccgcacctgagggctgtgctcatggtacatgacacggttgcccagaagaattttgaccccgttctcccgcctctgcctgacaatatcgatgaggatttggatgaggaatcggtgaagatcgtccgcttggtgaagaacaaggaacccctgggtgccaccatccggcgggacgagcactcaggggctgttgtggtggccaggatcatgcgaggaggcgcagcagacaggagcggcctggtccacgttggagatgagctccgagaagtgaacgggatcgcagtcctgcacaagcgggccgacgagatcagccagattctggcccagtcccagggatccatcaccgtaaaaatcttcccaagccacccaggaggaagatcgcttacagcgagagcaaggtgttcatgcgcgccctcttccactacaaccctcgggaggaccgggccatcccttgccaggaggcgggcctgcccttccagcgcaggcaggtcctggaggtggtgagccaggacgaccccacgtggtggcaggccaagcgagtcggggacaccaaccttcgagccggcctcatcccctccaaggggttccaggagagacgactaagctaccggagagccgcgggcaccctgccgagcccccagagcctcaggaagcccccctatgatcagccttgtgacaaagagacctgtgactgtaagggctacctcaaagggcactatgtggctggtcttcggaggagcttccggctgggctgtagggagagactgggtggctcgcaggaaggaaagatgtcctccggagctgagtctccggagctgctgacttacgaagaggtggccaggtaccaacaccagcccggagagcggccccgcctggtggttctgatcgggtctctgggagcccgactgcacgagctgaagcaaaaggtggtggctgagaacccacagcactttggcgtcgctgttccacataccaccaggccccgaaagagccatgagaaggaaggagtggaatatcactttgtgtctaagcaagcatttgaggccgacttacatcacaacaagttcctggaacatggtgaatataaggaaaatctgtatggaaccagcctggaggccattcaggctgttatggccaaaaacaaagtttgtttggtggatgtggagccagaagcactgaaacaactgaggacctcaga

SEQ ID NO: 431538 - DNA, 784 bp, Homo Sapiens
ttacaaagcacagtgtttactaaaggcacaaagtgaggggtcggagggcagctgctcttccggcagtgacccctcccgcttctggcagcccccgcgctcacaccacctggtggagagctattagcaccaaagtggggggtgcccacctgtgggagagccgaggaccaggctgcggggtggacctcctgccatctgagtcccaaaaaggcaggcctgagcacccccaggaccagttgcctcagatgaggagcttcccgaacccctcaagcatgtccttcactggtaatgaggggctcgggctcagaagacagggaatctccaccaggccctcttctcacctctagaacaccctgcccctccctgccccgcgattccatctccgggagaggggctgaaggcctcttcccactgcgccagtcaagagggctgccctgggggtgcttctcctgaccccacaggctgccagacaggcactaagtccaaacaggggccaacggggaggagggaggcagggcaggtggctacttcacacacagtgcagcctgaagggtgagagggaggtgcccctggccctcccagcccccaggccggcccctgttccctggcacaggggcagccaggggtcacagcacatcgccctcctccatgctgaagctgctccggcggctgctggccttggaggcctcgggggacatggtggacagaagtggatcagaggccagcggtagcagtgagtcgtccaggagcatgaggtccagatccttcttggacaggctggggaatg

SEQ ID NO: 431539 - DNA, 1097 bp, Homo Sapiens
  misc_feature (391)..(399): n is a, c, g, or t
aaacttaaaagaaaaaatatttaatggtgtttgggtttaaacactgcttttcctcttctgtattttgaagaaatttagtttttattgttgttgaataacaagctcactttaaatttgaaggagttgagggaggtggagtgtatatttatttagctctgggccagtaaggtattcttcaaattacttaaccacgccattattggcaggggtacaaagtagtttctaacagggtcctttctataagtcaagaatattctgttaacagcatttcgttacacttctatatcacagtaagtcttttgtgtttataaatacttgagtgtccactattttgtttattctttttctcaatagcaaacaaagccttgggtattgatgaaaagtatgtatnnnnnnnnntacggcacaaccatcctgttctcttattgagtttatagcttttgaaggaagtcacaatttctaagtcatacctgtacatattttgaagctcacttagttgtagggacccagagctctttttttatggtgatctttgattggtgaagtagccatttcctggtgacccttaggctcgtgtggttggctgtaaggtgtttattttgttttgctcctacacttctttactgactgcgtttccgtatgtattttgggggaagattctgacttcatttagtcttagtcttgagatactgagttgctggttgcaggcagcagagtgtccaccacagtgcctgcactgcccgcagagctgccctccggaaagcatgcagtataacagctagtgctggaaggaggaaaaccaaataggcctggaggctgaggttgtactgccagcttccttagatgtgagcaaatttcaactacaacttccatcacaggctaataaaaccaggtgtgtgaacgctactattttaaattttcttttttaagatggcattttattttgttccagaaaagcgccttatgtagaccctccctctgagaatagccgtggagccatgtagagaggtgtagctcagcacatctcaactaccagtcagcttccctttgagaacttctgtgctcacttcctgttttcagagattccagggcagggg

SEQ ID NO: 431540 - DNA, 621 bp, Homo Sapiens
ttttttctgaaaagaataagtacattttagagtccatttatttgacgacaggcagtatgacaggttgctgaggtatataaaattttctagagaaatgctgagtttgatgacattttatcttcagttttgtagaacagatgttaaaatgttaactctcctggtgtgcagaaagctgtaatcatgacagttgataatatgcaatttagtttgattttataggtttaattataaaaggcttcacaatatgcatgttttaggaaaatgttcatttatttagtcatataatcgtttgtatatatgtaaataactttattctggaataatgtgggtgccatcttgagcgtgtgttttttatctgttttggattattttttgtatacaaacaccataatactgtattttcctgttatctacttaagtctagttctactttttcccaataatttcagggaaaatacaagcttgagatattatactatctccctgggtattttttgtgtgcaaagtcttagaattggatttataacattgataataaaaatataaaacgtttttcctcgggagttaagatggtaaaaaggaaaaaaataggatgaatatgatcatttctccatcataaag

SEQ ID NO: 431541 - DNA, 712 bp, Homo Sapiens
tgcaatacatataaaagacaaatggttagtatttttggtattttgagctcatacacatcattaattaaaagcagaatgcctcgatgtcacaacgggcgaaggacacaaacaggctgcaggacacaagggccaacctaaccttacgcccggctccatctcacccgagccaggaaatgcacacacaaacaaggaggtacaacttgcaccctccgacaggctgacatgagaagggatggctcctgcgccagccacttcgaggggtcgttgatggtttgctggtgggagagcaaaaggggacacaggtctgaagggccatcgatacagttatcactgaccgccaaccagcatctctacttctagggccttggtcctacaaaactatccccccagatccacaaaggtctgcgctcaccaaggcacatcgcaggactgtccggaagtccctgtgtaaaccagagggtcatcacaaagaacgctggtggcacagccaagtgtcctgtgcagtcatcagggatgagaaggtggaggagtgtgccctgacgcaggcggacaggacttacgtacgtggtgtcgggtgaaagatcaagtgaggaaatggagaacaaggtcccctccttatccaagtctcatcggcaatgttagtgcccgcggggagcagtggaggatgtggctcagcctctgagtgcctgggatgcggtctctggggtggggt

SEQ ID NO: 431542 - DNA, 2902 bp, Homo Sapiens
  misc_feature (1056)..(1069): n is a, c, g, or t
gaaaaagcccccattctcaacattaaggtggcaggaatgttttaaaattagggaggcccgccccctcgggccttcagtgtggtgggaaccaattttaccccggcccccttgtcggagttccccggttttaaataaactggggggaaaactcagcaagcaagggagattccttttgggcaccctggaccccattgggcccgaaagaaaatcaaacaggccttcttcccacccacccgcaaggcgttggaatgcccctcagctcccaggcaccatgccccctacagcctgcagggcaggttctgtgccagagttgtttcccagggacccccttccgccaaaagtgggccccccatcctggggcgtctatgcgtacgactgaaaatagaccccgaattttcccccatgatatgggaattggctacagatgtaccagaggcacggcaggcactgctatgggccagccccaaggacagaggacgtcaggaaggaaaggcgggtgcaagcctcctggtgccaggcctgcaccaccccagggagcacagtcttcattggctgccagtgtctgaaacctggaaccctcgcctaggccaggaagcagggggctcgagtcaggtgacaggtgagaatccatctctctagtgagcaagcaggcccctgccagccactggggagggcaacactggggaccaggtcacagcccctccgtgccacccacaggggcctggctgcatcgcctccaggaagccctggctgccgggaggggctgcccacaggagatgggaggacagcactagctgggcaggcctggggcaccctgagccacgagggacatgctggtgggaagggcaaggcctgacacaagacacaaggcacactttgacgacgtgacggagggacaggtccctgagacgctgggtggctcccacccctcagcaaacaaggacgcaacaacagctaggaaaatagaatacaaaaatctggtacaggaaacagaggcggcacacacggacgtccctaggccgagagtctttaggctttcttctttttaaaaatggnnnnnnnnnnnnnnctgggaaagcctctctgccagctgaagctgccgcagcagagctcatgagaagccctttcctaaggtggctccaggagccctaaccgggctgctgggcagtgcagcattttacttttttgctttttgtttaaaaaagggagatgagtaagcccccgaggacccagcggctgcaacttaaccagcctccagttcaccccagccccagccaggaagagaagcccctctcctgtgcagacaggcaggactactgggtgggcgtgggtgagcaggagctagagggggatccaggcacagcccaggggctgtttgccagatgacccctgaaggccatcatccccagaacatgtgacctcgggacgcccaggtgtgtctgcatgtgtgagcatgtacatgagtgggtgtgtctaggtgcgtgcgcgtgtgcgtctgacagtcctaccagagcagacgctgcccagctcggcgtgggctgggctggcctgcctggccccgagagcccagccctaggttctgacacctgcgaagtgggaaggaccttaaccacccacctgccccaggtgctcacccagttcccgcccttcacagaccccttgtccacgccaggagcctatgtggactgacaggtaggtggacagacggacggatggacagacagccttgccttccttccttcctcggtccactcctttctcctgggatccagggttggggtctgagctccctgtggtggtcattaagcccctcaaacggcacctgccgaggtttgcagcaatgacgtttaatacttctggaatgattaggaatctgagaacagaccgtgggcggctatgctgaccagggctccggatgtggaagctgggccctgcctccttgcaggggactctgcccagctggaaggggcaggcagctcggcaggccctgaccggcaagcgggcagtgccaggcagcccagcagcagctggagcttccagaatggcacagcagtgggcctgtggagaggctggcgtcaactgaaggagaactggagggctgacacgcgtggctggcgggcaggcaggccaaggagcagagggcacgggcctacgagagggcggggcggcccagccgccggcagtggggcccgaagccactgtcgccgccggtgccactctgcaggctgtagtggtcgtccgcgtcactgctgctgccaacactgtccagctcaccagggccaaactccatgccctctatgtccacttcttgctctgagtcgtccgtggagacagcagagcccgtgctatctgtgcgcacgcgctccacgctctgcaccgacagctgctccaggcgccgcttcaggaaacgatgctcctgctgcagctgctccttgatgctcagtgcccggcggtcctgctcctccagtttcttgatgtgcaccttggcccgcttcaggaggctcagcgtggtgtggcgggtgctgtcggggcccaggggcaccagttgcttgagctgctcaaggtacagcctgagtttggctcgtctgtgcttttctagctcgttgtgtgaagacctgttgttcggggccttgcgcaccaggccggccgcctttgttttctccctggcgaagtcgccgtcgaagggcagcaccgaggcgtagccgtgctcggcctctcgatccctgcgctccaggtactcggccgcctccagcaggatcagcagggagttcagctccatcctcccgcccgcgcccgtccgccccgggacggcggcggccgctgcccggcaccgcatccggcctggctccgctcagccgccacaccccgcacctcgtgccgaattcgccacccaggcctcgcc

SEQ ID NO: 431543 - DNA, 2107 bp, Homo Sapiens
  misc_feature (129)..(224): n is a, c, g, or t
  misc_feature (295)..(344): n is a, c, g, or t
  misc_feature (1655)..(1655): n is a, c, g, or t
ggcctgggtggcgaattcggcacgaggcgcgatgtgaccttcagggccgccaggacgggatgaccggagcctccgccccgcggcgcccgcggctcgcctcggcctcccgggcgctctgaccgcgcgtcnnnnnnnnnnnnnnnnnnnnnnnnnnnnnnnnnnnnnnnnnnnnnnnnnnnnnnnnnnnnnnnnnnnnnnnnnnnnnnnnnnnnnnnnnnnnnnnnttgccgcgctgttgccggcgcgcgaggccacgcagttcctgcggcccaggcagcgccgcgcctttcaggtnnnnnnnnnnnnnnnnnnnnnnnnnnnnnnnnnnnnnnnnnnnnnnnnnntgtgcagccgcgaggaggcgcgggaggtgttcgagaacgaccccgagacggattatttttacccaagatacttagactgcatcaacaagtatgggtctccgtacaccaaaaactcaggcttcgccacctgcgtgcaaaacctgcctgaccagtgcacgcccaacccctgcgataggaaggggacccaagcctgccaggacctcatgggcaacttcttctgcctgtgtaaagctggctgggggggccggctctgcgacaaagatgtcaacgaatgcagccaggagaacgggggctgcctccagatctgccacaacaagccgggtagcttccactgttcctgccacagcggcttcgagctctcctctgatggcaggacctgccaagacatagacgagtgcgcagactcggaggcctgcggggaggcgcgctgcaagaacctgcccggctcctactcctgcctctgtgacgagggctttgcgtacagctcccaggagaaggcttgccgagatgtggacgagtgtctgcagggccgctgtgagcaggtctgcgtgaactccccagggagctacacctgccactgtgacgggcgtgggggcctcaagctgtcccaggacatggacacctgtgaggacatcttgccgtgcgtgcccttcagcgtggccaagagtgtgaagtccttgtacctgggccggatgttcagtgggacccccgtgatccgactgcgcttcaagaggctgcagcccaccaggctggtagctgagtttgacttccggacctttgaccccgagggcatcctcctctttgccggaggccaccaggacagcacctggatcgtgctggccctgagagccggccggctggagctgcagctgcgctacaacggtgtcggccgtgtcaccagcagcggcccggtcatcaaccatggcatgtggcagacaatctctgttgaggagctggcgcggaatctggtcatcaaggtcaacagggatgctgtcatgaaaatcgcggtggccggggacttgttccaaccggagcgaggactgtatcatctgaacctgaccgtgggaggtattcccttccatgagaaggacctcgtgcagcctataaaccctcgtctggatggctgcatgaggagctggaactggctgaacggagaagacaccaccatccaggaaacggtgaaagtgaacacgaggatgcagtgcttctcggtgacggagagaggctctttctaccccgggagcggcttcgccttctacagcctggactacatgcggacccctctggacgtcgggactgaatcaacctggngaagtagaagtcgtggctcacatccgcccagccgcagacacagggcgtgctgttttgcgctctgggcccccgatctcccgtgccgtgcctctctctggtggcactggtagactatcactcccacgaagaaactccaggaagcagctggtggtcctggccgtggagcatacggacttggccctaatggagatcaaggtctcgcgaccggccaaagagcacgtggtacaccgtctcgctgagggacggttgaggcaccctggcaggtggacggcacacgggccaagaagcgacggtgaagcgcccgcgcagcctgcacggacgacgcgctggcccggtgaccgacagagggaccctgccgcagacgcccccgggcactcaccctattgctggcgggccctgccacgactgtgcccggtgacattcggagccaagaacagccgcgtgcaaccgag

SEQ ID NO: 431544 - DNA, 959 bp, Homo Sapiens
taaaaacatgagatatttcgtgtggtcaacgcgcacataatacccgttatttcatggcggcccgccgctcttcttaaaccgttgatatccgctttaacgcaacccttgtcttcacactacactggtgcacactaccgtgccgaggtgtcaacccgcaatttcgggctgcctttgtcatcttcttggacgaaaatatcagtttattttgttcattacttcgctattttctcttgtcttcatccatgggagatccaggattcgcaaggaggtaaattagccccctaccacatttttggccagacccctcaaacaaaatataagccaaaatgggttccactagagccttcttgaggccgggtccagcttttcctgctagatgtgtggcgcttcacctcggtatggcccatggtgcgttccacctccagggtggcctcaccgtccttcagcgagacggtgaccacgtgctcttggccgtcgccagaccttgcatctcccattcgggccaaggccgtatgctccacggccaggaccaccagctgcttcttgagtttcttcgtggagtgatagtctaccagtgccacagagagaggcacggcacggaggtcgggggcccagagcgcaaacagcacgcctgtgtctgcggctgggcggatgtgagccacgacttctacttcccaggttgattcagtcccgacgtccagaggggtccgcatgtagtccaggctgtagacggcgaagccgctcccggggtagaaagagcctctctccgtcaccgagaagcactgcatcctcgtgttcactttcaccgtttcctggatggtggtgtcttctccgttcagccagttccagctcctcatgcagccatccagacgagggtttataggctgcacgaggtccttctcatggaagggaatacctcccacggtcaggttcagatgatacagtcctcgctccggttg

SEQ ID NO: 431545 - DNA, 885 bp, Homo Sapiens
tttacaaagctttctgtaaatattttattttccatattttagagtcagaaagaagcgcttggtaataaaaataatagagaattattttcttcgagcccgctctgcgctgcgccggcctccccgcgcccgggcccacggctgagtgcgcggcgtcagaggccccaagtccatctcactatttacagatatgttacaggccgggatggtcacagaggaaagcccagctctcagcatggccccacgtggtgaggagcccccaggctcctcccggctgtctcggacagagactgagaagcctgccgcgtcccgtgggggcctaggctgcggcgggctccacgggggggcaggagtgggccgtgatgtcgctgtgcttgtacgccgcctcgtccaggtccagcagcctccggttgacctccagtgtcatgcagccgcggtagaacgcggtgactggcgctgaagtcaccggcacatctggcaggccgccagcaaaggtgagcacggggctccgcaggtgcctctcgagcacggccagcctctcctgcagctgcgcggcgctcacctcgctctggcccctggtgccgtccacctccagggtggcctcaccgtccctcagcgagacggtgaccacgtgctcttggccgtcgcagaccttgatctccattagggccaaggccgtatgctccacggccaggaccaccagctgcttcttgagtttcttcgtggagtgatagtctaccagtgccacagagagaggcacggcacggaggtcgggggcccagagcgcaaacagcacgcctgtgtctgcggctgggcggatgtgagccacgaccctcgtgccgaattcgccacccagtcctcgctaccttattaccgcggattactgcc

SEQ ID NO: 431546 - DNA, 952 bp, Homo Sapiens
  misc_feature (4)..(4): n is a, c, g, or t
  misc_feature (12)..(12): n is a, c, g, or t
  misc_feature (14)..(14): n is a, c, g, or t
  misc_feature (18)..(18): n is a, c, g, or t
  misc_feature (53)..(53): n is a, c, g, or t
  misc_feature (74)..(74): n is a, c, g, or t
  misc_feature (77)..(78): n is a, c, g, or t
  misc_feature (84)..(85): n is a, c, g, or t
  misc_feature (89)..(89): n is a, c, g, or t
  misc_feature (97)..(97): n is a, c, g, or t
  misc_feature (102)..(102): n is a, c, g, or t
  misc_feature (111)..(111): n is a, c, g, or t
  misc_feature (119)..(119): n is a, c, g, or t
  misc_feature (135)..(135): n is a, c, g, or t
  misc_feature (146)..(146): n is a, c, g, or t
  misc_feature (166)..(167): n is a, c, g, or t
  misc_feature (180)..(180): n is a, c, g, or t
  misc_feature (194)..(194): n is a, c, g, or t
ccanatctttgncnaagngacagtgagtggagccctcactctgggcagccgtntttgtgtcaggcagggcgtgngannacacannacangccatcanccacntcagaatantgttcaancaggtcctccaggcantggaaggtgancctcggggaaatgtagtacnnagttgttgggcangacggaaaatgcgntaatgctttacctgcctgtgtctcaccgacagtgagtaaaaccctttcttggtctcactctctctgatcatgaaggagccgacctttgtgtctggcagctgcagcggctcctcggccttgtctctgcccaggccctcaaacagccagccatggtaaactctggccacacatattccagggatgtaactctctcgaccagtgctaagagaaatagctttccaccagcccccttcatcagaaatcacacgcagtttctcccctcggcggaatatcggggggctgatgtcaggagacgggtagtcacttagcacggcaaggaagtcgctatccagtccctccgggttgggcaggggcctctcggcaggcgcaggggtggatttcatgctgtttcccatttctttctttttccctggggccgctggtgatgcccagagccttcacacactgggcatgactcctgtgggagctgtctgcagagggattgctgggtgcagagtcactgcctctccgtctgtcaactgctgctgctccagaataaacaggcagccgggcctctcgcggttgtggagaagcagcccatgctacacagaagaactgcagttgctaaactggccgcatacttcctctgctaggaacgaggaaggcacagggcttgcagaagggcaggttcctgttttcagtaaccactctgagcaagcttctctctgcaaggacggtggagcatcagggctgcctgagatgttctccattcgcagcaa

SEQ ID NO: 431547 - DNA, 1658 bp, Homo Sapiens
  misc_feature (1564)..(1564): n is a, c, g, or t
  misc_feature (1588)..(1588): n is a, c, g, or t
  misc_feature (1604)..(1604): n is a, c, g, or t
  misc_feature (1611)..(1611): n is a, c, g, or t
  misc_feature (1615)..(1615): n is a, c, g, or t
  misc_feature (1628)..(1628): n is a, c, g, or t
  misc_feature (1630)..(1630): n is a, c, g, or t
  misc_feature (1636)..(1636): n is a, c, g, or t
  misc_feature (1639)..(1639): n is a, c, g, or t
  misc_feature (1643)..(1643): n is a, c, g, or t
  misc_feature (1656)..(1656): n is a, c, g, or t
ctgtgtccatttgaaggctaaagaaactgcagctcagaccagttcagcaactctcctacatcgtgtggctaaagctaagaattgtgacccatttttctgaatccaggtccccgcgatgccctgggttcagaccctaacaccctcccgtccctgagtgctggggatttaaggcagcagtgcctcctttcaggaaatcacacacacactggaaactcctgcatacttctcttactataatctgtcaccaaagactggatattcctgtgctggggctcgtgccagcgcctcgggctgccaggtgctgctttccaactcccacatgggctgccctccccctactgctacccacagggcccccactccacctgctcccagacgaggccaactcctggccaagcttaggggcacagcggaggcgctctgtttctgatttttctcgccttccttggagatgcctgtgcttggaagggaaggcagaacattgcatcttggaacaaatctgcttttgatcatgcaaatgaatgcctggataatgtaggcagactgtcaatttcaccagttagaaagaaagagaaaagggggagaaattccccatgacagcgactgatgaagaatttcaatagaaagctgctacttcagaaaataagatcatttgctgcgaatggagaacatctcaggcagccctgatgctccaccggctctgggcatcaccagcggccccagggaaaaagaaagaaatgggaaacagcatgaaatccacccctgcgcctgccgagaggcccctgcccaacccggaggactggatagcgacttccttgccgtgctaagtgactacccgtctcctgacatcagccccccgatattccgccgaggggagaaactgcgtgtgatttctgatgaagggggctggtggaaagctatttctcttagcactggtcgagagagttacatccctggaatatgtgtggccagagtttaccatggctggctgtttgagggcctgggcagagacaaggccgaggagctgctgcagctgccagacacaaaggtcggctccttcatgatcagagagagtgagaccaagaaagggttttactcactgtcggtgagacacaggcaggtaaagcattaccgcattttccgtctgcccaacaactggtactacatttccccgaggctcaccttccagtgcctggaggacctggtgaaccactattctgaggtggctgatggcctgtgctgtgtgctcaccacgccctgcctgacacaaagcacggctgccccagcagtgagggcctccagctcacctgtcaccttgcgtcagaagactgtggactggaggagagtgtccagactgcaggaggaccccgagggaacagagaacccgcttggggtagacgagtcccttttcagctatggccttcgagagagcattgcctcttacctgtccctgaccagtgaggacaacacctgcttttgatcgaaagaagaaaagcatctccctgatgtatggtggcagcaagagaaagatctcattcttctcatcaccaccttactttgaggnctagccaagaacagacacaatggntcatgcccaaaagganagaagtncaantattgctgggatntncgaaancgnggtncctgatcccgggngc

SEQ ID NO: 431548 - DNA, 731 bp, Homo Sapiens
  misc_feature (642)..(642): n is a, c, g, or t
gggctgcagaattcgcacgagattttatttgggtttattaaaaattttttcaaagtaatacatgcacaaggtaaaaaattaaatagtacagaaggacttaaaatgaaaaacacagtttcccatcccaccctttttaaatctaaatcccattccctagaggtaatgcttttaacaatatttattttagatcgtctggtaactttctaactttaaataatatgtttgagcaataatttcttgacttactgactttacaacatctttaataattccccattacaaaagataaggatttaacttacactatcgccactttcctttgtccatctctctccaaatgtctgatagttacatcactttttaatacatctattggtttgattttatagctttgaacaatacactaatcctctagttcttgttccattaactgaagatcttttcatccccactttgaatatataagtatctctacctttgattccacttctcttcctctaattctcaatctctttctgctttctttccctttgtcagcattaattactttcaacttcagttctgaataaaaaatgaaacctttcacactttgttaataggctgatctgaacattgaatactaataaatgatatccacattantttggctattttacttcttactgggagcctagtataagctaggatattttcttccctacacaccctatcatcatgcctgtgccataggg

SEQ ID NO: 431549 - DNA, 1335 bp, Homo Sapiens
  misc_feature (16)..(16): n is a, c, g, or t
  misc_feature (504)..(542): n is a, c, g, or t
  misc_feature (645)..(645): n is a, c, g, or t
  misc_feature (694)..(745): n is a, c, g, or t
  misc_feature (832)..(886): n is a, c, g, or t
  misc_feature (1214)..(1214): n is a, c, g, or t
  misc_feature (1282)..(1282): n is a, c, g, or t
  misc_feature (1291)..(1291): n is a, c, g, or t
ccgggttttcaacccncattttggctgggagaatttccctcaaagatacttccctcaagtaagggtgcaaaggagactttcctgaaaatttgcctgacagaaaatgtcttcactttgatgttccttcttgacagtctgccttactatgaaattcctaggtacaaaaattttccttaagctctgaagatgttgatccattgacttctggcattcagtgttgctgatgacaaatctgttagcagtctatttctcatccatttttgtgttgagctaatcgtgatgacctcatttgttttctccctggccactttaatatcttccttctatccttaatattccaaaattttacaatattgtgtctagatgtagattgtattgggccctctcaatctggagacttagcttgctctgttcttcaattctttttctttttatttcttcacctacactgtctctgttctctcttccaggaactcctaacattacatattgattgtctatgtnnnnnnnnnnnnnnnnnnnnnnnnnnnnnnnnnnnnnnngctctttatctggagagattccctcaactttattttccagactgtataccaaatacttttagcagtcttattttattttcaaagagatcttcttattctcagncttctctttcttttcttgctttttaagagacagggtctcactctgtccnnnnnnnnnnnnnnnnnnnnnnnnnnnnnnnnnnnnnnnnnnnnnnnnnnnntgggctcaagtgatcttcccacttcagcctcccaagtagctaggaccacaggcacatgccaccatgcttggctaatttttaaaaatnnnnnnnnnnnnnnnnnnnnnnnnnnnnnnnnnnnnnnnnnnnnnnnnnnnnnnngttttccgtttctttgtagtatcctgtttttcatcttaaatacacctcaaatctctctggagatggaattaaaattaagttattctttccacattgtctttgtttccctcagagtttgtcatattttcaaggtccctaattctacctcgtgacttttcttattcctcttccctccccatcgcccatgtctgggaatttctaactcaccattcccatttaagaaacaacataactgttaacttgtataacagttggcatgggtttcctctgctgttgtacagttaggtctgtttcttcaggaaacctcttctatacctgaaggcaacangcacttgagtaggaggtctcagctgtcagtagagaattagctgaccggctgggggtaagggcacttanttccactanaagagaaatttttttccgggagcaacaactcctaactctctgca

SEQ ID NO: 431550 - DNA, 497 bp, Homo Sapiens
  misc_feature (176)..(219): n is a, c, g, or t
  misc_feature (314)..(368): n is a, c, g, or t
atatttttctatctatttctttttgctctttatctggagagattccctcaactttattttccagactgtataccaaatacttttagcagtcttattttattttcaaagagatcttcttattctcagtcttctctttcttttcttgctttttaagagacagggtctcactctgtccnnnnnnnnnnnnnnnnnnnnnnnnnnnnnnnnnnnnnnnnnnnntgaacttctgggctcaagtgatcttcccacttcagcctcccaagtagctaggaccacaggcacatgccaccatgcttggctaatttttaaaaatnnnnnnnnnnnnnnnnnnnnnnnnnnnnnnnnnnnnnnnnnnnnnnnnnnnnnnngttttccgtttctttgtagtatcctgtttttcatcttaaatacacctcaaatctctctggagatggaattaaaattaagttattctttccacattgtctttgtttccctcagagtttgtcatattttca

SEQ ID NO: 431551 - DNA, 950 bp, Homo Sapiens
  misc_feature (26)..(26): n is a, c, g, or t
  misc_feature (55)..(55): n is a, c, g, or t
  misc_feature (68)..(68): n is a, c, g, or t
  misc_feature (85)..(85): n is a, c, g, or t
  misc_feature (101)..(101): n is a, c, g, or t
  misc_feature (129)..(261): n is a, c, g, or t
  misc_feature (271)..(271): n is a, c, g, or t
cagattgagagggcccaatacaatcnacatctagacacaatattgtaaaattttnggaatattaaggntagaaggaagatattanagtggccagggagaanacaaatgaggtcatcacgattagctcannnnnnnnnnnnnnnnnnnnnnnnnnnnnnnnnnnnnnnnnnnnnnnnnnnnnnnnnnnnnnnnnnnnnnnnnnnnnnnnnnnnnnnnnnnnnnnnnnnnnnnnnnnnnnnnnnnnnnnnnnnnnnnnnnnnnttcaagaagnacatcaaagtgaagacattttctgtcaggcaaattttcagaaagtctcctttgcacccttactgagggagtatcttgagggaattcttccagccaaatgaggatgaaaaccaggaaagaagaagaaatgggatccataaaacagtggaccttacttaggatgtctcattctagagtgacagccaaaagggtatctcaccctagagtgacagctatccagcagactaatttcagatgagagcatactgtctcgggctttctgggaagaatgtgcattcagtgccatagatagtatcattgaagagctgggatgcttgagaagattatttagtcaagaaaaaagaaagacaaatcaacaatatgtcaaaaaattcaggtccaattatagagcaaaataaaatgaggcatgattttgagttattcatgaagaataagaagaggcttgataggtacatttccttttctatggcacaggcatgatgatattgggtgtgtagggaagaaaatatcctagcttatactaggctcccagtaagaagtatttaaatagccaaaataatgtggatatcatttattagtattcaatgttcagatcagcctattaacaaagtgtgaaaagtttcattttttattcagaactgaagttgaaagtaattaatgctgaccaacggaaaggaagc

SEQ ID NO: 431552 - DNA, 599 bp, Homo Sapiens
tgtagaagaggactaaacttgataaaatattaaaagaattgaaacccttcctaaaggcagcttctcaagggagcacaagttcacacacagtttacttttggaggaacgtctgaggtcatgaggactagattctagagctacaggtctcagggacagtctcgagggatacagggcccccatcaccacatccccagatttaaccgcagcagctcagcttttatctgtatctgttggagctctctaggaaatgtcaataccaaagcaaacccaaatcacaactagattagattactattcaagagaatgattctctaccgggactgttcaaaatggggatatcaagcgagttggaaaatgtaagacgtaaagaccataatcaggaaaatacgcatcatattttttattcactgagagggaggaatttccacttaaatcctatttccagcagctggattgtgctctcagtggagtgctctggattctgattaatagagattttctagtcctcccagcaacttccttctcaattctcttcacttttccgcagatctcggcaccagtgttgcatcttgtgggctccattgtgttttcacacggtt

SEQ ID NO: 431553 - DNA, 1133 bp, Homo Sapiens
agggtcacccgttcacacctgtttacaggctgttctagcgcggcagcagaatctcagagggtagccggttccagttcaggaatattctcagggcacccagtgtgatagtcatgcgtccgagacacgcagcaggctgaccgagagtcaagccaggtggcacataccttgagctgccggcctgtccacaaagttccgcttccaggcgctcagcagcctgctggatctcttggatcatgccaatgaattcagagaaggcccagttgagctgattgaggacgctgttgaggaagctgggtgccacatcaggaccctgctgtaggaggtccgccatgtgctgctgcagcagggtggaagggcagggcttctggaggctgggcaaattggcgtcctcaagtttggttttcagcagatgtggcagccgtgtatagcggtacccgaagccacagcccctccagagccgcaccaggatccagttggtctgggcccagggccgctgctcatagggcgccaggaggttcctcaccatggcgatacgcctgtgagggccgcaggagggtcgagttggtgtgggcgctgggcatggtgctcatagtgcgccagggtgtgtgctccccatgcgcgattcgctgctcctcggggattcgctccacagcccgcagggagtgtgggtagcacacgtagctggccagggcctgcatcagtgagtctcggatgtcagtgcccacaatgcgtgcgtcggcaaagtgtttggcgagaatggcagccaggcgggtcagggtctcttcatagcctgggagctcctccatgctgtgcacgggaccaaagtaattcttgagagcccctgtagctgttgatggccacgctcaggtagaactcgggcatgaaggcaaagagagaccctgtgcgatcaccgtgctcaatggtcaggcagacgcgcagcagccagtagatgtccagcatcttctcctgggagtagacagtggcatggacccaggcaagacggcggctcaggtggtccagcttttctgagaaaaccttctggctcttggtcaactctgcaaggatgtccttcctcctcttggggcaccggcggagcttgtcctctgtgtccctcagagccatagcgtattcat

SEQ ID NO: 431554 - DNA, 1583 bp, Homo Sapiens
atggaataataatttaatgctcactgtggccctgactgaaagtcaagctcaggcacaattagggccatggctgggctcccaccaatgaggatacaggcaggcaaggaggttggatgtggtggtgtgggatacaggagaagggcaaagggagctcataaatagggcccagcctggctctgggttcaaaggtggaggttccaggatggcacaggctgtgagggctaggcagctgaggaggtagtactcgtattggctcccttctcccagtcctctacagacacgatggtggttttgcagaagaagcagtccttgttgttcatcaggtgctggttgatacaggctttgcaggacttgtggccacagggctggaacacagcagagatggggtgggcatagcagatggggcagaggtcctcctcactggtgggcagggaggcagctgctgcctgggcagatgcagaggtcaggtgcgccagcatctgttccacttgggccagctcatcggcactgatataatccgcatagctctgcagggagaagcgcttccggtcaggggctggcagagcagtgccaggtgctgggggctctggctgtcccaggagatagcatattgagcgtagctggaagcagggatctgccaggagcactgatgtggcttgctctctctctgaggctgggccacgcaccaggagctgcaccaggatgcccgtcactgccaccagaatgggatagtggtccacgctctctaggccaggcagccgtagggtgaccacacgatcaaacaggttcctctcagctgtcacccggttcagcacctggtttagcagctgtgcaagacgccgcagcagcatctcagaggtaggccgggtccagtcaaggaatatctcaggcaccagtgtgatagtcatctccaagacacgcagcaggctgaccgagaggttaaagcaggtggcacataccttgagatgccggctgtccacaaagttccgctccaggcgctcagcagcctgctggatctcttggatcatgccaatgaattcagagaaggcccagttgagctgattgaggacgctgttgaggaagctgggtgccacatcaggaccctgctgtaggaggtccgccatgtgctgctgcagcagggtggaagggcagggcttctggaggctgggcaaattggcgtcctcaagtttggttttcagcagatgtggcagccgtgtatagcggtgcccgaagccacagcccctccagagccgcaccaggatccagttggtctgggcccagggccgctgctcatagggcgccaggaggttcctcaccatggcgatacgctgctcctcggggattcgctccacagcccgcagggagtgtgggtagcacacgtagctggccagggcctgcatcagtgagtctcggatgtcagtgcccacaatgcgtgcgtcggcaaagtgtttggcgagaatggcagccaggcgggtcagggtctcttcatagcctccaatagggggtcatcccgggaattccggaccggtaccagcaacgtaatcgacagctctcgaaggcggcggagcggtaacaagcgcgcg

SEQ ID NO: 431555 - DNA, 373 bp, Homo Sapiens
gtatggaataataatttaatgctcactgtggccctgactgaaagtcaagctcaggcacaattagggccatggctctgggttcaaaggtggaggttccaggatggcacaggctgtgagggctaggcagctgaggaggtagtactcgtattggctcccttcttccagtcctctacagacacgatggtggttttgcagaagaagcagtccttgttgttcatcaggtgctggttgatacaggctttgcaggacttgtggccacagggctggaacacagcagagatggggtgggcatagcagatggggcagaggtcctcctcactggtgggcagggaggcagcttctgcctgggcagatgcagaggtcaggtgcgcca

SEQ ID NO: 431556 - DNA, 588 bp, Homo Sapiens
  misc_feature (93)..(93): n is a, c, g, or t
aggtctgcatcactctggtagcgcagtggcgaatgcacgatgggcgtgagcttggtggggctgagtggccgtggcaggctctccacggtgctngccatctgcgggggcggcggggccatcctgctcaggctctttctcagtactttctgaaggtggctgaggctgtggtgtgcccgtggacagtgacccgtgaagaaacggcagcggcgatggagaggttgaacccgaaggtaaaacgggcttaccatacactgctttaactgacttatttaaggcgctgtgtgctgccggctggtaattcttaggtggtgtggcttgctggaggtacatggagtatatggaacttgaattcactgtctggggtcctttcctgggagactgtggccttgaccctttatcagccaggaaatgcctaatggccactgtcagtgggagttcaggcttgctgtccccagctggaaatgcaggtggtcccgctggcgggtacgtgggacttggcggtacggaaatcctctgctgaatctgttgtgaggagcctggctggggggtgctgcctgtggcgggcagcagggtgggcctctgtcgact

SEQ ID NO: 431557 - DNA, 842 bp, Homo Sapiens
  misc_feature (509)..(519): n is a, c, g, or t
tttgcttagtggcaatttattccgtaatcggagaagacctgaaacctcaccttgcacagctcacagggagcaagatgaagctactaaacttatacataaagagggcccagaccaccaacagcaacagcagctcctcctccgatgtctccacgcacagctaatggcagtacctgtctcttgtgtagacctagaagcaatcggtggtgcctctcagagacctttccccacccccttcatcggctgcccagtcagtacaaggaggcccacaaatatttattacaatcagtattttggtcccttccagcttttctgtagaatcttactggtattgaatgtaaaggaagcaaggcctgtattgcagtcttcatacaaaacaaaaggaataagaacagaaaagagccatactgaaacatgtcttgtacagcctgctgagatggcgaaaccctgtgtgtggggtgcagtttttaaaaatcagagcgctctagccactacttggtagaaagtagcannnnnnnnnnncagttaataacatatttgggggtggggtggggtgttactttgtgttcttcctccttagcctattttcttgtgcgtatggtctgtgtggggcccctttcacagctgacaccacgaaaggtgatatatctttaagttgtgttctgagacctactaaaaatgggaatcaagtcttggcaagaacagtctgaagatggccttttaacaaacgctgggaattttgcttgtcatatccagactggaggccgactgccctggctttcagcgtagaattgggagtgcaccctgacagtctccttccagctctccctaatcgactccaaccg

SEQ ID NO: 431558 - DNA, 1241 bp, Homo Sapiens
  misc_feature (326)..(354): n is a, c, g, or t
gatcaaaatattttaataaagattctttctgacatagatacacatacaaatggtcgtacatagctgtcatagtctgattgacctatttaatatatatatcattctttacacatccaaaacccgccaacagatccatcacagctcccaactcaccatccaacctgacaaactgaatttgtattatctgcaaggggtggaaaatagcaggactccatttttaaaaaagattttcttgattttcatagggcggaaaggcagtcaaacagccatgcaaaactaaaactgaaagctcactttgggtaaatagcttcttgttcttccttagnnnnnnnnnnnnnnnnnnnnnnnnnnnnnagaaaaataacaaaggatttcacaccataggcaaatcaaaccagtcttttaacttaaataattctccacagttaaaataacatatatgtacatatatattaaaagcaattaaattagaccttttaaaaatgcacagcacagcctggaaaaatatttgcttagcatgttcttacgtatagcaactattgctgtgatgtttttcccttttggaatgtaaaggagtcccctttcaaaaaagagatcaattcattcatcaattaagaatacacctttcctgtaatttttggactgaagcaatttattaaagctcaatttaaatacagggatgatgcaactgaaaatatccaggtgacctttcataaacctaagcagctcagatacatcaatatttctcttcatacttgttggcaaataaacctgttaaacacttggcacacagcataagtaatctataaaacaattttagaggcattaaaaaaatctgcacataagacccatgactttaacacatgataaatactgttgatgtggaagggtcattgaagaataacaaataaataccatgaattgttaatacatcattgcagagtagaaagtaacaaggtgcacataaatatttttaaatgcaattctttcagccacagtcagtttttttatatcactctcgccaaaactttgagcattttcacaggattaaagttcagagacaataaaaaatacaagtctttcatagtaacatgtctctctctctcgctctgggttttatttccccctcacttaagtcaacatttcaagtttttctcctggctcagaatcaaaatttattttcaagtgccctttctgatttgtctgaatgaatattccatctctcatgctaccaaaccgct

SEQ ID NO: 431559 - DNA, 593 bp, Homo Sapiens
ccatcgtacttgatctcagagaacatgccattggacatttcttcattgcatactcaacggacttgcaggcctccgccaacatgggctgcacaggtgtcatcagcgaggcctggacgctcagagctcgtctctggcccggctccttctccacctcctgcgcgttgtgaaggacccgctccaccacatcctgcaggttgcgcgaggctttgaaggcttcataggcattggggtcaagggcgtctaacacatgttttggccctgagttcatcttcagatcatgtttgatcaacctgatgatgcatttaaggtcattggctgtacacctggaggcaatgtcctgtagggcctgttgctgctcatcctccttggtgagcttggacagccgcagaaggaactcatccacttcctggatggtaaggaggctcttggcagctggggggaaagacttgctctgctcaaagaagactctgattgtctctgacacgtcaccctgctctaggtcccgtgccatatcatctgggttgcagttaaaaatgcgactgaaaagcttcacaatctgcttatcgttcaagttgtaaacagtcttaatgact

SEQ ID NO: 431560 - DNA, 819 bp, Homo Sapiens
  misc_feature (153)..(153): n is a, c, g, or t
  misc_feature (179)..(179): n is a, c, g, or t
  misc_feature (244)..(244): n is a, c, g, or t
  misc_feature (261)..(261): n is a, c, g, or t
  misc_feature (371)..(371): n is a, c, g, or t
  misc_feature (398)..(429): n is a, c, g, or t
  misc_feature (765)..(778): n is a, c, g, or t
aaaattggcggcattggaaaaatttattccaaaaccccgggtcaatcctttctccttggaagaggcaaagggttaaaaatcggttcctttaagacctcaccaggcaccattccaaaccatgttttcaagtgggggattaaaatttttaagtangctataaccaccttttggccctcccntaaccacccaagaaagtctggtgaaagacacttttatatgcttttgctgaatagagcttcccccntccccctttcttctttncaagatcactatcgtctgtcttaggtatcgaagctcaagaatttgtttcaaaatcttgtgaactttatgatggttttaatatccaactgatcttacggcatgcacatagnatggcaagagaaagctggatcacacannnnnnnnnnnnnnnnnnnnnnnnnnnnnnnnaagcagagttgttacagcggattggcaggttcacagcggtgagagttgataacttactgaagtgcgggccacagggcctgcactgtacacatgaggacttaacctatggcagcaaaactactcagggacagcctgctgctgttgtttttatttaaatacaaaacaggaagacccgtgacggataccccaacttaagttaacttgtaaacaggacaacgtggaaagttcaaacagaagtacagacaaactgcaatttttcggctgtgtcactctggccctgcatccgagaaaggtggggagactttgttcttttgggattaagagggtggatctacnnnnnnnnnnnnnngcatccttctgacaagtgtcctgctcgtgccaattcctgca

SEQ ID NO: 431561 - DNA, 1229 bp, Homo Sapiens
  misc_feature (625)..(625): n is a, c, g, or t
  misc_feature (939)..(970): n is a, c, g, or t
  misc_feature (1057)..(1057): n is a, c, g, or t
accttttcagactaagcttttatttttttgatattacaaaccagttttctttattcacaaaccactgtaagtgagtataaacactaatttctaaagacagatatacacatttcctgggtttgcagattgcgtgatgtgtgtgttaagaagtcactatatgccacacataatattaattttccataattcataatagcaatagttatttagataaatgaaaacattccaaataaatactgtttaaaaaaaatccaaaatgtttgtttacatctctgacatacattttaaaatgacttattggcatcttggagtgcctagacaaaagattctgcaacatcggttggcactcactcactctaaatgattttattaaaactacatacagtcatgggggaaagtacagctcattgatgaaaatcaaaactgcaaatgaattttactttaaccaacacagtaagaattctatgtttgtgattcgaaacacaatacaaattctggattttgaaatctgaaggcggccaattgggagaaatttattctccatagccccctgcgtcctactctgttcttccctctggaggatgtgcatagtgttttaataattcgtttcctttaagaacatcancccaggcacccattgccataacactgttttccaggtgggggaatgagaatgtcttagtgatgctataaaacaccctcttgcccctcccctcacccacccaaagaagtctggtgaaaagaacactttatatgcttttggctgataagtagctcccccctcccccttttctcttttcaagatcactatcgtctgtcttaggtatcgaagctacagaaactttgttttcaaatcttgtgaaactttattgatggtttaatatccaactgatcttacggcatgcacataggatggcaagagaaagctggatcacacannnnnnnnnnnnnnnnnnnnnnnnnnnnnnnnaaagcagagttgttacagcggattggcaggttcacagcggtgagagttgataacttactgaagtgcgggccacagggctgcactgtnacacatgaggacttaacctatgggcagcaaaactactcagggacagcctgctgctgttgtttttatttaaatacaaaacagggaagacccgtgacgggataccccaacttaagttaacttgttaaacaggacaacgtgggaaagttcaaacaggaagttacaggacaaactg

SEQ ID NO: 431562 - DNA, 697 bp, Homo Sapiens
  misc_feature (90)..(90): n is a, c, g, or t
cgggaagactatctttgtgcttttcagcctctccccagataatcccacccctgccatttaagtcatcaccttccctctcatgtgattcancagaagaattgtgaaccttggtgcttaattccaccatcccagccagataggctcaggtttttccttcacttgatcaccttgtaacataagcccctcccggggtgggggtgttggggagacagatgcagctaaactgcttttcacaagttggaaaaaaaacccaaccctataaactggtcttttgtcctttacacaatttcaggttcattgcacgcaattacataaactcccacaaatcggtcgaagagttcaaaactgcaagaccatgtgataccagtgagaaaatctgctccacactgtggcaaagtgtctctgtttcaactgctgctatttcaaagaacccttccaaaatttctgatcaggttcttaggacgtgagaaatgacctctcaagagggcaggacaaaatggaaaagtgtggtctgcattacgtggaagtgtgttgtgtgagatgggatctcctctcgcttccacctcctgacctcccatctttaaaaagctcagtctgccttagtatcgctcccttggaaagtgatctggccaactggacatgttgcagtatttccccatctaacactatcgtagtgctagtgcaaatcaaagacgct

SEQ ID NO: 431563 - DNA, 2337 bp, Homo Sapiens
accagatctacttttatttcagaaggaagtttgtattatagtatttacttttgtttatatacaagttcttcacatttgtgtttaaaatgcacagacctcccttagttctcttgttcctgcttaaattagctgttattttacaatacaaaaaataccaaaaaattgcagtcctaaatgtatgtataacacccacaatccccgcaatgaaatagtttacaatacttactccatatttacatgagtgtaatagatgctaaattatacatattaacaaactaaggcttggaatccaaacaaacggaaatcgtaaataactataaaacaaaaacatttccagagccagaattagttcaacgaaacaggcttcactagtgtttagaatgttttgtgcacaaattcagttactgaaaatcaattccattactgcctttaaaagatgaggtgccaattttcctctccatttcaaaacatctccttgtaggcagggtgtttgcctctcatcaaggggcaaatttttcttggtgggcctgggctatctagaacccaccgcaaatggctggagccaagtttggtcaatggggtaaacatttcagaaggtaggcagggcatgccctgaggccaggaggcctctgccgtcctggctgtgtcctcaggatggccaattctcacagaaaccaccacaaggaaagatctcctgggatgacaggggtgtgaggacttggattttgttttaattctaaaatctatttttacatctcagtcactaccctagcattagcttaagttagtgtttagcaaatacttgttgaatggatggatgaataaatgaaatggaaggatcaaagatgttcatgaaaacaccaccatctcccaaggaagtgaatcagcccctggccccagtacaccccattaaatcaaaggagcaggatttgcactggaaggtaaaatgcctcttcccaccagcagtgccctgctctttttatttcccaggtgtctccagtcttgaatggcaggacttacccacgggtagtccagtactttccttctgctgacagtcttctgtccaggactgcctttcctccgggttagctcaggggatctggggttgccttctctccacacggggaggcacaggcttctccccaggctgtgtgcagggatggcaggaggcacacaggagtccagggtatgtcaaattctccacggggaaatgggaactatttatcaacaaactagctccctactcccacccccagttttcagtataataaactgattccaggaaatggtcattaaaaatttagacaaaactacaaaaaatggagaacccccttttggaaagtctgattgctacaggttagtctttgaacttaaagactaagagaaacatttctcaggacaagactggtcatccctcactacccagagcaccaagaggctgccagaaagggtcatgatgtgcttgcagggccaagggcagcggcagggacgcctctgcttcctgagtctcctccagcgctgtcgtttcgattccctgcctgatttttcatgtgcactctgacagatgagtcctgttttaagaaatacctaattggtgccagatgcatctgaacacatcacacaatggggatgcgtttcttgggtttgttattcatgtatcggggcctggcgagaacctggatatccagcatatggcacaaaaacatcttaggtgaaactcagacattgttatatttaataaaaatacatgaagattttttctgttttatgtacactccgaatgtctgaacattctggacactactgtatagttatgtacaagtgcaaggtcagtgttgtcttgactattttaatttatatacaggctctcttgtgacgcgcaacactgccagatgacaaccaattccttcttggaaacaggctccgagcccagcgcctcttactccctgccattccctttttctgccctgaggccggagaaagctgtttgctgtcggttgcaaaggagaagcaggtggattcagcggcttccccaccgctggagcagaatgaaacttcacttgctccttccttcctttttaaaaataaacattatcttttaggaaaaaaataagacataaccagatggctgtgggtcatggtgcatgatatttcaaggcataggactaacatggggaagagacttctttggcctaggaaaactggtcctttgaacaaacaaagaggatcttccttgtaggaggacaatacccaggggcctccctttggccttgctgggggggcctgtgggaattaaggggccagtccactgcaggcgccatgggtgctgtgttctgt

SEQ ID NO: 431564 - DNA, 757 bp, Homo Sapiens
catgtctcaggggctagccatctccagccagggccagcttgatcctctctacccctcttgctcttaaaaaattaagcaacacacaggctgcctgctgggtgtggcgtgtcccgtctcctgatgctgtggtccttctctccatgatggtcttccccccgctccaccctgccttcgttttcttccagggattctgccagatggccacggtggtcgtggtttgtccttcctttgggtttctgcccatgtggccccctttctgagctgtgcgttttctctatggaagcaaaggtccttgtacctgcagccatgaaggctgggtgggcacagctacccagagggcttctaaggactgaggcctgtccccatgggcgccactccccctccttggcaggactgtgtttccttcatgaggttgaaaactgccctcagcaggccttgccgggacagctggctgggccgaggagacagagaccatgttcttctaaaatgcaggtggcaaaagatctcagcgcggctcccgagactaccctatggccaggctccggcggatacctaatgcccctggtgggcacatctgctggcaggtctggaggaaagttgtggaaggtctcaccagtgaccagagaggtgaggggccgctggccctggtggacttggggagggtggatcacggcctgggctgtgagtgctgtgtctggctcccgagctggccgagtagaaaggaacatcttgggggctgtgtctgatgcatctgggt

SEQ ID NO: 431565 - DNA, 1462 bp, Homo Sapiens
  misc_feature (145)..(145): n is a, c, g, or t
agctaaagtctggtaataaaggccccagattaagtgggatcttgggtcaaaggtcgaatcccacagaggagtttcaattcaaggtcttcaaccagggtccagtttccttctgaaggcaaggaatgctcccctccttcaactgganctaggacaatatacctggcccttgaccatgctatacccttttgttttatagtaagtgtgggtttgtgtgtgggcttgggcttttcctggatcttaggtaggggcttataaacttgaagagaggtctcttcttcaggccagaaccaggaccctacactaggctcttctccagtccaggaccagggggcatatattttcttcatcctcatcactggatttcatccccaatgctggtctctttccttctgtcaggtctggacccagtattggccttatcatgtgacttggcataggacctaatatttgcctcaatgacagcaacaaccttgacttcagacttggttacagtactgaccctagacataggcatggcctttgacttggtttgtggcactatactgcgttctgccaggggttttgtcttagtctcaaccatgactctagtcttagttgtatcttccaccttgatcacttcccttgtcacagccatagcctccctgtaggtcactgtatgtgtcctggtcattgctccatcaccagctttggcctgggtcactgattctgttttcagttctgcctcagccactgcctcggcctgggttttaccattcactcttagcagtggcaggaccactgattccatcttgcaggccagcctcagcctttcctctagcccttgcttctgtcccagagtcaaccatgttccaagtttaacgtaaggacaagttatatacccccacccgtctcagccttgactgaagttttgtcccggttggtgttttcacacaaagtccagtagtcactctgtcccctttccaactacaggctctgccagtgatatagaaaacatgcagaggaagctcactcaaggtagggaaggatggctgtgcatgggcccagccctgtggagggtggtggtcttcagccactccaaggccaccagatctgccactgaagtaggaccttgcttccaatggtgacaagccctacagcagatctacaggcagaccttctctgcttggatcagaggcagttttcttatttccttgcctcgaggtgctgtgtcatacagcagcaggaacagacagtcagacacaaggactcgaggcaatggcggcggctgtgtatggggattgactcggcacctgggactcaagacgagataaccgctttatcagattaaagactgcgattggcaactgttgtcacttttggtattcttttctccttcctgttcccagggctcctcagaacctcgcgcgtagttaccatttaacatctaccttttcctccgcagacgaggttcttccacgtccgc

SEQ ID NO: 431566 - DNA, 1012 bp, Homo Sapiens
  misc_feature (36)..(36): n is a, c, g, or t
  misc_feature (85)..(93): n is a, c, g, or t
  misc_feature (940)..(940): n is a, c, g, or t
  misc_feature (981)..(981): n is a, c, g, or t
cacacattctcctctctcctcaaacaataatcaccncctacatattactcactttgagttgatgactttgtttcttatttcattnnnnnnnnntagcaattagaaggtaacttttacaaactcccatcactatatctactataccacttgcatctatggacataaattctgccttttctgctattctatgaatgaattgtccaggctctgtatgctgaagccagcttgctctatttgccttaccagatgatatcccatttcctctattcaaggtcattagttccagcaattttcttctgttctctcttctgtcatagaaatttccctctcaatttctgttgtccggttctgcatgaagcttggaagtcaccactctatcccttctctttagctgatgttggaaaattccatagccatcaactgattaagtgtgtgctccacagggcatttgagacacagaattatttccaaagggtctggtccaattgtattttgatgatctccaacactgagagtagtacccacagctggtattacaggctacaggagtttcaaggtagggaaggatggctgtgcatgggcccagccctgtggagggtggtggtcttcagccactccaaggccaccagatctgccactgaagtaggaccttgcttccaatggtgacaagccctacagcagatctacaggcagaccttctctgcttggatcagaggcagttttcttatttccttgcctcgaggtgctgtgtcatacagcagcaggaacagacagtcagacacaaggactcgaggcaatggcggcggctgtgtatggggattgactcggcacctgggactcaagacgagataaccgctttatcagattaaagactgcgattggcaaactgttgtcacttttggtattcttttctccttcctgttcccagggctcctcagancgctcgcgcgtagttaccatttaacatctaccttttcctcngcagacgaggttcttccacgtccgcgatccc

SEQ ID NO: 431567 - DNA, 1004 bp, Homo Sapiens
gctattcagctgagtttaatttaagattattctgggttatcttggccaatgtaattgcaagggtactttagatgtggaaggcagggactccatgtcagattgaagcagcatagaaagtctacactggtcatcgttggctttgaagatggaaggaagccaagatccaagaaatacaggctgtctccagaaccagatgatatcccatttcctctattcaaggtcattattccagcaattttcttctttctctcttctgtcatagaaatttccctctcaatttctgttgtcccggttctgcatgaagcttggaagtcaccactctatcccttctctttagctgatgttggaaaattccatagccatcaacttgattaagtgtgtgctccacagggcatttgagacacagaattatttccaaagggtctggtccaattgtattttgatgatctccaacactgagagtagtacccacagctggtattacaggctacaggagtttcaaggtagggaaggatggctgtgcatgggcccagccctgtggaggttggtggtcttcagccactccaaggccaccagatctgccactgaagtaggaccttgcttccaatggtgacaagccctacagcagatctacaggcagaccttctctgcttggatcagaggcagttttcttatttccttgcctcgaggtgctgtgtcatacagcagcaggaacagacagtcagacacaaggactcgaggcaatggcggcggctgtgtatggggattgactcggcacctgggactcaagacgagataaccgctttatcagattaaagactgcgattggcaaactgttgtcacttttggtattcttttctccttcctgttcccagggctcctcagaacctcgcgcgtagttaccatttaacatctaccttttcctccgcagacgaggttcttccacgtccgcgttacccatgacccgctctcgacgaattcgagctcggccgatttggcctgat

SEQ ID NO: 431568 - DNA, 494 bp, Homo Sapiens
aacaggcctacaggagtttccaaggtaaggaaaggaatggctgtgccaatgggccccagccctgtggaagggtggtggtccttcaagcccatccccaaggcccaccagatctgcccactgaaagtaggaccttgccttcccaatggtgaacaagcccctacagcagatctacaggcagaccttctcactgaccttctctgcttggatcagaggcagttttcttatttccttgcctcgaggtgctgtgtcatacagcagcaggaacagacagtcagacacaaggactcgaggcaatggcggcggctgtgtatggggattgactcggcacctgggactcaagacgagataaccgctttatcagattaaagactgcgattggcaaactgttgtcacttttggtattcttttctccttcctgttcccagggctcctcagaacctcgcgcgtagttaccatttaacatctaccttttcctccgcagacgaggttcttcc

SEQ ID NO: 431569 - DNA, 735 bp, Homo Sapiens
caacggtggagccttcgcactcaatgccaactttttgttacagattaatttttccataaaaccattttttgaaccaatcagtaattttaaggttttgtttgttctaaatgtaagagttcagactcacattctattaaaatttagccctaaaatgacaagccttcttaaagccttatttttcaaaagcgccccccccattcttattcagattaagagttgccaaaataccttctgaactacactgcattgttgtgccgagaacaccgagcactgaactttgcaaagaccttcgtctttgagaagacggtagcttctgcagttaggaggtgcagacacttgctctcctatgtagttctcagatgcgtaaagcagaacagcctcccgaatgaagcgttgccattgaactcaccagtgagttagcagcacgtgttcccgacataacattgtactgtaatggagtgagcgtagcagctcagctctttggatcagtctttgtgatttcatagcgagttttctgaccagcttttgcggagattttgaacagaactgctatttcctctaatgaagaattctgtttagcttgtggtgtgccgggtggggtgtgtgtgatcaaaggacaaagacagtattttgacaaaatacgaagtggagattacactacattgtacaaaggaatgaaagtgtcaccgggtaaaaactctgggttaattctgtcaaatgcaatatatgatgggg

SEQ ID NO: 431570 - DNA, 1226 bp, Homo Sapiens
  misc_feature (55)..(72): n is a, c, g, or t
gggcgaggcctgggtggcgatttcggcacgagggagagagagaactagtctcggnnnnnnnnnnnnnnnnnnaccagtcgtatgattcaaggatttattaagtcatacatgcaaaacataatgctaattgcattagcaaaagatcaatgtaaaaacactccacaattctgcaactgtcaatttaaaaaattctgttgtagtggctgaagggtcccacgctgtattctcgccagtgagttaagttgtacagaacatcgtcagcactagcacagtttacagaacctcacagacccaaaggaacatcaataggcaaagcgactacaggaggcgtgtgtccgcgtgggcgaggtaaagagggtcagtattggtcaagtgacagtgtcggtaatctggcaagacagtgatgttaagaaggttcatagtttaagaattatctaaaatattttaaaaactataaagctgcaacacatgatttttacacctagttactagaaaactaaggaaagcacttattagctctgaataaagtaacatggaaagcacttttactaatcgacaaaaaaaccttctaatgcattatcagaaagattttataatacaaggaggcatattgctcagtcagaaggggttctataagaaaagcacttactaagttagcgactaacagaacaaccagtttaaagatgaattaaatgcccaatttggggaggcatggcaggtgtaagagaaaggaaaagcttaagaaaacatttcctgataataccaacctttctttcatcatctactgcatttgacagaaattaaccttttagagtttttacccgtgacactttcattccttgtacaatgtagtgtaaatctccacttcgtattttgtcaaaatactgtctttgtcctttgatcacacacaccccacccggcacacccacagctaaacagaattcttcattagaggaaatagcagttctgttcaaaatctccgcaaaagctggtcagaaaactcgctatgaaatcacaaagactgatccaaagagctgagctgctacgctcactccattacagtacaatgttatgtcgggaacacgtgctgctaactcactggtgagttcaatggcaacgcttcattcgggaggctgttctgctttacgcatctgagaactacataggagagcaagtgcggacgccgtgggtcgacgatatcccagtactccggaccgtacagcctg

SEQ ID NO: 431571 - DNA, 897 bp, Homo Sapiens
  misc_feature (720)..(728): n is a, c, g, or t
gtttcaggtcaagaaaggggtttctataaagaaaaagccacttacctaaagttagcgacttaaacagaaccaacccggtttaaaggatgaattaaaattgcccaatttggggaggcatggcaggtgtaagagaaaggaaaagcttaagaaaacatttcctgataataccaacctttctttcatcatctactgcatttgacagaaattaaccttttagagtttttacccgtgacactttcattccttgtacaatgtagtgtaaatctccacttcgtattttgtcaaaatactgtctttgtcctttgatcacacacaccccacccggcacacccacagctaaacagaattcttcattagaggaaatagcagttctgttcaaaatctccgcaaaagctggtcagaaaactcgctatgaaatcacaaagactgatccaaagagctgagctgctacgctcactccattacagtacaatgttatgtcgggaacacgtgctgctaactcactggtgagttcaatggcaacgcttcattcgggaggctgttctgctttacgcatctgagaactacataggagagcaagtgtctgcacctcctaactgcagaagctaccgtcttctcaaagacgaaggtctttgcaaagttcagtgctcggtgttctcggcacaacaatgcagtgtagttcagaaggtattttggcaactcttaatctgaacaagaatnnnnnnnnncgcttttgaaaaataaggctttaagaaggcttgtcattttagggctaaattttaatagaatgtgagtctgaactcttacatttagaacaaacaaaaccttaaaattactgattggttcaaaaaatggttttatggaaaaattaatctgtaacaaaaagttggccattga

SEQ ID NO: 431572 - DNA, 826 bp, Homo Sapiens
agattttataatacaaggaggcatattgctcagtcagaagaggttctataagaaaagcacttactaagttagcgactaacagaacaaccagtttaaagatgaattaaatgcccaatttggggaggcatggcaggtgtaagagaaaggaaaagcttaagaaaacatttcctgataataccaacctttctttcatcatctactgcatttgacagaaattaaccttttagagtttttacccgtgacactttcattccttgtacaatgtagtgtaaatctccacttcgtattttgtcaaaatactgtctttgtcctttgatcacacacaccccacccggcacacccacagctaaacagaattcttcattagaggaaatagcagttctgttcaaaatctccgcaaaagctggtcagaaaactcgctatgaaatcacaaagactgatccaaagagctgagctgctacgctcactccattacagtacaatgttatgtcgggaacacgtgctgctaactcactggtgagttcaatggcaacgcttcattcgggaggctgttctgctttacgcatctgagaactacataggagagcaagtgtctgcacctcctaactgcagaagctaccgtcttctcaaagacgaaggtctttgcaaagttcagtgctcggtgttctcggcacaacaatgcagtgtagttcagaaggtattttggcaactcttaatctgaacaagaatggggggggcgcttttgaaaaataaggctttaagacctcgtgccgaattcgccacccaggcctcgctacctttaaccgtgagatactgccgggttccc

SEQ ID NO: 431573 - DNA, 3084 bp, Homo Sapiens
  misc_feature (409)..(421): n is a, c, g, or t
  misc_feature (1588)..(1588): n is a, c, g, or t
  misc_feature (1591)..(1592): n is a, c, g, or t
  misc_feature (1599)..(1601): n is a, c, g, or t
  misc_feature (1604)..(1605): n is a, c, g, or t
  misc_feature (1612)..(1612): n is a, c, g, or t
gctgccatgtgatagaagaatgatttattagaacaaattccatgacaaatcatataaaataaccattttccgaaagacagccacaagaccacctgagaacgaatgtacagtgaaccctccgagaagcccggcaaacaaggaccagttcccaggcaaaggctggagggggaggaacaaaggagctcagtgtggggaggagcaggaacttgtgaacttaaaacattgcacagccactgccgaggggtgggaaggagccgtggatgaagcgtgaccacttcatgtccaggggcaggcggggtgggcaactggggcatgcaggggtgggcagcagcccggtggaccgggctagcacctcctccatacagacagcaggctcttggggcggggaccagggggggacacctgccannnnnnnnnnnnntcacacacacacgtaaacatcaggtgggccgcagggctcagaggaacagaacccgtacacccaaccccagctcagctaaaagtaaacaggggacacacaccacccgcttccagcctccagtccccagtgccgctcccccagcagctggccctgtccaggtccgactctcataccattgccaggcagggtgtggagctcacccacgccagtctggtccaggtgggacacccccacgtccacccccaccaaccacggccaacgggctctttggcttagaggctccggcaacacgggctgccccagcaggggccacggcagaggcaccaagctctgctcacctgccatgttcccagctgaaagaatcctgagaaaacaacagttcctgggcccgtccctgcccccatgcccacttgaggcctgatggcgtgaagccaaaaggggagggcgtgtggtgcaggccaagctgcgagcttccggaaacccggcttccagtgactttggtcgtgcgctcacccccgccagaagggctgccatgcacccggctgcacccaggaccttggaagcccacctacagaggcccatagcccctcacggggacatgccctgcagtcctcacggtgcagcgtggaggcgcctggactagccgtgtgcatgggagttggggggtgtctgcacctgtgtgcatggctcagctctcaacaagcccctggtccatacccaggaggcctccacagggcagccccaagctcaatgggtttggcaactgtgttggcaccagaggctggaagcagtggggctcctgcctataaaaggcctggggtcaggtgggagccaccagggcaagtgccctgccatctcagacagtcccaggaacaggtgagcctgcccacctccatgtttggcaccaaatgaccccacagtcgacctctcttcctctgcctggccgcaggccagcacaaagggttatggcaggttagtgcctggcggagccagtcaggcctggagggggcacctgcaatggcaccaacaactctttcctttaaagctaaagacaaaaataacagtgatgaagaggaggcggggtaatgcccttgagggcttgaccttggcagcagcctggccaggagctgggcccagaggcctgtagggtgcgaggcaggggtgggnttnnccatggnnntgnnaagggtnagtagggtgctggctgggagctgacgagggggcaagggcgtgggaggcacccgcccacagggatatggcacatgtgggggtcttcagggagagccacctgcggccaggcaggcgggtgtgcggcggacggaaggcagagacgcacacgcacagggaggctggcctggccaggtctggggcctagatcaggaacctctcggcatcagggaggaaggtggggtccgggaggctgggaggcccacagctggcccgctgtgggaaattcctcaggggcagggctggcagcagggcctcggctgaggcgggtgagggtgggctctgggcagccacgcggcccttccccaggccccggctgtgcagagctggccaagctcctgtttcctgtgagcaggtccaggctcccactggggtccacgatggcattgataacttccagctgtttctgcacccgcctcagttccttcaggatggagctgatttccttgttagatgtcttcaggatgggcacctcgttctcggcgttgatcctggcttccaggtcctcccaagctctccctgtgttctgaaagaggatcttcatcttctcggcaaggtgcttctgtgtttctcacggatggcctgcgacagctgggacaccgggttcagcatcaggttatcgaagatcacctcctctcggttccgaggccgcgtcttgttggccagggcgtcctcacagctgtcgttcatgttctggtcaaagtcccgagagttcagcgagccgggcggcaccttctggaagttgaggctggcctcggggatgcgctgcaccagctcctcccgggcagagatggtcgaggcgggggtgctgggcatgttgctgagggaggcgctgtgggcaggctccgaggagcccagtgtgtcaccgtccccagccacatcgtggatctcctgggctaggatggccacgtccttcaccagcgtctggctcagcctggcaatctccgcaatctctgccgtctgcacgatgaaaccataagggtcaggctcctcctcatcgtcgtccgtgtcccgggggccgggggcccgggaacgagcccggctggagctgccagccctcggggtctgagtggctgttgaggtgtgggagcgtgtgtgtttgggggagccgtggcgggagccgtactcctcctcagaggtggacgtgtaatccgagccctgctgccggcgcctcgtgttggaggtgtatcgggcactgcctgagctggccctgctgaagggctggcggggacccgtggtggtggctgtgttggcagccttcctggagacagcccgtgcttcggccatggtgggcttgcggctggcacagcacaactccacactgcggccagagaagctggtgcgggcaggggctgcctcggggtcactagtccctgtgaaggagccggcccgcttccggggcatggccaggatgtccaggcgtgacagcttccgct

SEQ ID NO: 431574 - DNA, 1839 bp, Homo Sapiens
  misc_feature (11)..(11): n is a, c, g, or t
  misc_feature (1787)..(1787): n is a, c, g, or t
gcgacgtcctncaaagtgtcctttgaggggctgatgccctgatcccagtccagacgggtgctgccggctcagccagcctcacgctgctaggaaatggttccctgatctatcaggtgcaagtggtagggacaagcagtgaggtggtggccatgtcactggagaccaagcctcagcggagggatcagcgcactgtcctgtgccacatggctggactccagccaggaggacacacggccgtgggtatctgccctgggctgggtgcccgaggggctcatatgctgctgcagaatgagctcttcctgaacgtgggcaccaaggacttcccagacggagagcttcgggggcacgtggctgccctgccctactgtgggcatagcgcccgccatgacacgctgcccgtgcccctagcaggagccctggtgctaccccctgtgaagagccaagcagcagggcacgcctggctttccttggatacccactgtcacctgcactatgaagtgctgctggctgggcttggtggctcagaacaaggcactgtcactgcccacctccttgggcctcctggaacgccagggcctcggcggctgctgaagggattctatggctcagaggcccagggtgtggtgaaggacctggagccggaactgctgcggcacctggcaaaaggcatggcctccctgatgatcaccaccaagggtagccccagaggggagctccgagggcaggtgcacatagccaaccaatgtgaggttggcggactgcgcctggaggcggccggggccgagggggtgcgggcgctgggggctccggatacagcctctgctgcgccgcctgtggtgcctggtctcccggccctagcgcccgccaaacctggtggtcctgggcggccccgagaccccaacacatgcttcttcgaggggcagcagcgcccccacggggctcgctgggcgcccaactacgacccgctctgctcactctgcacctgccagagacgaacggtgatctgtgacccggtggtgtgcccaccgcccagctgcccacacccggtgcaggctcccgaccagtgctgccctgtttgccctgagaaacaagatgtcagagacttgccagggctgccaaggagccgggacccaggagagggtgagctggaagggctgctattttgatggtgaccggagctggcgggcagcgggtacgcggtggcaccccgttgtgcccccctttggcttaattaagtgtgctgtctgcacctgcaaggggggcactggagaggtgcactgtgagaaggtgcagtgtccccggctggcctgtgcccagcctgtgcgtgtcaaccccaccgactgctgcaaacagtgtccagtggggtcgggggcccacccccagctgggggaccccatgcaggctgatgggccccggggctgccgttttgctgggcagtggttcccagagagtcagagctggcacccctcagtgcccccttttggagagatgagctgtatcacctgcagatgtggggcaggggtgcctcactgtgagcgggatgactgttcactgccactgtcctgtggctcggggaaggagagtcgatgctgttcccgctgcacggcccaccggcggccagccccagagaccagaactgatccagagctggagaaagaagccgaaggcttttagggagcagccagagggccaagtgcccaagaggatggggcctgagctggggaaggggtggcatcgaggaccttcttgcattctcctgtgggaagcccagtgcctttgctcctctntcctgcctcttattcccacccccactacctctggggaaccacagctccacaa

SEQ ID NO: 431575 - DNA, 423 bp, Homo Sapiens
  misc_feature (81)..(81): n is a, c, g, or t
  misc_feature (187)..(187): n is a, c, g, or t
  misc_feature (207)..(207): n is a, c, g, or t
  misc_feature (220)..(220): n is a, c, g, or t
  misc_feature (234)..(234): n is a, c, g, or t
  misc_feature (249)..(249): n is a, c, g, or t
  misc_feature (257)..(257): n is a, c, g, or t
  misc_feature (265)..(265): n is a, c, g, or t
  misc_feature (273)..(273): n is a, c, g, or t
  misc_feature (281)..(281): n is a, c, g, or t
  misc_feature (297)..(297): n is a, c, g, or t
  misc_feature (313)..(313): n is a, c, g, or t
  misc_feature (315)..(315): n is a, c, g, or t
  misc_feature (319)..(319): n is a, c, g, or t
  misc_feature (334)..(334): n is a, c, g, or t
  misc_feature (337)..(337): n is a, c, g, or t
  misc_feature (344)..(344): n is a, c, g, or t
  misc_feature (346)..(346): n is a, c, g, or t
  misc_feature (363)..(363): n is a, c, g, or t
  misc_feature (368)..(368): n is a, c, g, or t
  misc_feature (378)..(378): n is a, c, g, or t
  misc_feature (383)..(383): n is a, c, g, or t
  misc_feature (399)..(399): n is a, c, g, or t
  misc_feature (405)..(405): n is a, c, g, or t
  misc_feature (416)..(416): n is a, c, g, or t
gactgaaaaagaaatgttttaataaatacaaaactctccaataatgactcttctcagctcaggggcagcaggagtggagtntcgggggccctttgtgctgagtgaagataaattaaaattcccaacaagccagttacattatgtacaggaggaaaggggtggggcttccaggacagaggccgagggnggcagggcaggacttggagnggctgttacctcngtttggcccagctncctcttccccttttngagctgtngttcccanaggtagtnggggttgnagtagaggcaggacanaggagcaaaggcactngncttnccacaggagaatgcnagntggtccncnatgccaccctttcccanctcangcccatcctntttgncacttggccccttgcngctccnaagagccctcngcttctt

SEQ ID NO: 431576 - DNA, 1485 bp, Homo Sapiens
  misc_feature (56)..(56): n is a, c, g, or t
  misc_feature (158)..(158): n is a, c, g, or t
gcctttctaaaaccatttcttcccagcagctggaattggtgtttctacagtcaagnttaatttgtgttgcctgcacggggcttagagcatgctgttccaaacatgcaaatgtcctttgtacctgattttcttcatgtgctaaagagctgagcagatcntagatcaccaataaataaagatccaagcatgagacttgaaacatcttatcagtccattaaaataatttacatagccataggtaaattcatccagtctttccatcacattgctttcttgttatctcacatttgcccttcaaaacaaagtttcgacaacatagactggtgcaattaaaaatgaaacaaacaataaaaacagataaaggaggaaaggggaattccagaaccccattgtgtgagatgtcaggtctttcaaccttagttgtgaaaaacaaatgctcataagcatccaagacaaatcattctggacataatgacacagcacaataatgcttgggatggatgagacattcagagatttttggagcgatttctagaagctatatatcacatgtatcacgtttggttcctagagattttagtcaagtattagtatttctttttgctaagtatggtatacaaaaagatgaggatagatgtgccctagagatatgaaaatataatatataaaacaaaaccattataaattacatagatttttccatataaaattgttttccccatttagaataaataccatccaagtttacagatcatctaagtgaattaaatgtacacacatatgtgaatcattttcagaatttcaagaaaaacattgctagagatatgaccaggatgactcagaagccagaaattgattttacaaacgactacatacgacccaaaggacgaggctttggatttagtgtgaagcttttaaaactgcccaaatgagtccaatgtgcacgagtgtgtatgcacacacgttcagtcacactcgcatgaatttctatgaagctgaacagttcactttatctttgaaaaatcagctgaaagtcatgaggtcttctgcatttcatattctagcaggagggcctctcatttcataaagaagctgtaggatggataggaagagtgtagcatttttggaaggagaaattcccattttaagtcaacctccctttatgtcagttgttatcaaaaccgagagcattatgatgccttaaagagggagaaagttttgaaaatctacataagctctccccactgcagtctaaagcagcaaaaccaatcaggaaacattctttggccgcatatttctgctcttgctccactgaaaatctgcccacttttagcttattatcactattcaatgtctaggtggaatggatgccttctcctttccatgtggaaacctacacatgggtttgggtggaatgacaactgaataggatggggtaacatccatacagtatcacaaaatgaacttaagtcctctgttgttgct

SEQ ID NO: 431577 - DNA, 672 bp, Homo Sapiens
actaaaacagaaagactttcaggaaaatgtcatttaatgatttcagctatacattacatatacaactctgtagcctagcaacaatcattgctacaccatcattaactttaaatattttgcttggtgagctattctcaaatgtagcacattttaagattttgccatcattatgactgtggaatcattgtttggttttcataggaaacagatctgtcacagtatgaagctttgtttattttaagaaactggtacacaattacatttccacttacaagagaacgccacagatataactaaaggcaggcttcgatggctccacaaaggttgcgtgcgggaccaaccccacacctcctgcttccccgtcgcaccgccctggccaggttcacatggtttcatttccagagatgctttgctcttcgcagttaggtagttttaattccttcaaaggcacacagcttcccatctttttttccagcgtggctcccacacccgtgaattcctgtttgaacatgcgtggcagcctcatcaaaagcatttctatttcatttgcagatatcttggagtccagctgctgcatgtatgaccaaagatattctatgttggctccaaaaaggatggaccgtgaagaaacgttgatatgatacctattagcagaagctctttctctggatt

SEQ ID NO: 431578 - DNA, 486 bp, Homo Sapiens
  misc_feature (461)..(461): n is a, c, g, or t
ttttttttactaaaacagaaagactttcaggaaaatgtcatttaatgatttcagctatacattacatatacaactctgtagcctagcaacaatcattgctacaccatcattaactttaaatattttgcttggtgagctattctcaaatgtagcacattttaagattttgccatcattatgactgtggaatcattgtttggttttcataggaaacagatctgtcacagtatgaagctttgtttattttaagaaactggtacacaattacatttccacttacaagagaacgccacagatataactaaaggcaggcttcgatggctccacaaaggttgcgtgcggggaccaaccccacacctcctggcttccccgttcggcaccgccctgggccagggtttcacatgggttttcattttccagagatggctttggtctttcgcagttaggggagtttttaattnccttcaaagggacaaaggttttctt

SEQ ID NO: 431579 - DNA, 976 bp, Homo Sapiens
tttaattaaggtagtttccaatgattaaaataaattgtaggatttcaattattactttcaaataaactctgaagctaaaaatgtaatgaccatgacattccaatagttattacatcgtaggcataattaacatcctttcgggctgactcataattatttgagcttgtcatgctgtaatatgtacatggctatagatactatatagagtaattcatagctgatttcaaatctctagtttttcttatgtgtaccaagcttccaattacattagcagggactctgagcactcatgaacagagctgatgtcagatacaatgtttgttacttcaaaggattcatctaggaatgacaatgttatcttccatcataattaagcaacagtagaaaatacccctacttaagagctaaaccaaaagggtccacaaagggttgtacaggatccccattttcatctcatttggaagaataggaaattaatcaggtcatttgaaattcactttaaatcaggtcctagggtaaatctttaaaaaaggcaatggctgttttcgcatggagtgctttctgtctgcagttccatgagttagcaaatgcatgtctccattaaaggtctactggtaagctatgtcactatatacatactgtacatgttggatcacaaattagcagttattagtcagactgtacatagcaaaacaaaccaaatttaatgttgctatacatcccaaagataacatgggtctcaattcaaggactgacccctaatacaggttctctgtttaaatatgtagcccagtaaactaaattaaaggtaccaaactaaactggaaaaactattctggacattctgtcaattttgctaacactgttgaaagttttcttcgacatcagctagcgcctatgctgacgtcttctatagattctctgcactgtatccactgttgtaactcaggaaacgcataggatcttgagtacgatt

SEQ ID NO: 431580 - DNA, 786 bp, Homo Sapiens
aacactgcttgtgcaagttaaaattaagaacatgttatcaattataaaatcctcacattttctctaattaattttctcccatttctgtatattttaaacccatctttcatcactacttaacaaaatagggaaagacaaaggtttaaagagaaactatccaggatcaagtagcctacagggaacaaaaaaagaaaataatgtttatttccacaaattatctgctgcctgtgaagctggccacacaggcagtaactgcaccacaggactgctgctgtctccacacgtcctttcagggtctgggctgtccacctcactgcccattgctcctgtgtctagcctgaactcaaaccctagttatctgtcccattagggaccagacatttattctgtctagagaatggtcaccactccttttggttcaggacattcctgctggttagcagcctctttgggccctagagggaaggaatactctcataaggctttgtgtgtcactagctatggagacctacactgcagatgaaagccaaaaggaactaggtgctttctgaagagcccttgcagccaagtagaacgcccaggcaggtggtatcaaggtcaagacttcagtcagttgggtggggaactgaaaccagcagacatgggagggctctctgtggaggagagctttttccacccagccaaaatgctgatagcagagagacaagatgctagatttcaattaaacactccctttgtaagtctgtcactcaaggaacacctgtccattatacacggacgcgtggg

SEQ ID NO: 431581 - DNA, 672 bp, Homo Sapiens
ttttttttctttaaatagttcacatttattattgataacaataaaaaaatcttttaaagactatcagtattgtattaccaagtgaggtaatatgtttacaaaacatttacagaatttgatatgcaaataacaaatttaggaaggaaagtgaattaagacataatagagggagaatcaaagaatcattagtactaagaaatgggaaatgacagcagcgttttaaaagagtggcaaggtactaaaggtagaaacacgatgcaaactgcatactcaaaccatagctgccccagaattcccttacaaggggagtgagattggattactcgggaggaaaccctgtaagcatttgtgcggtcatgtgctttgagctcttcaagatgcactacagtctttgggtataaaagaatgccactcccgaatcaacttaaaaagaacagatcttcagcctgggagggggcaggggatggctgcaattcaaacagttctataaacatctctgggcacatgaggactgttgagtgaagcattttcttggcagctgtcagcaaaatcgccatctgagacacagagaaagagaaagagaaagcagggaccaccttcaggcccttgtgatttgggaacaggaagcaccaggtggaagcagcacagacgcgccactaaccctacctacga

SEQ ID NO: 431582 - DNA, 775 bp, Homo Sapiens
  misc_feature (503)..(503): n is a, c, g, or t
ggggggggaattcccagggccgttagttcatggcccccgggattttccttgggaagccggcttatggcccatgtttcacttttcccttgccgggggcccggccggcccaaagcaaattgttttgaaaaaggttcttcgaaggacccgaaggggggccgacaagggtctctccccccggtctgttctgggtcctttgaaaaggacccacgtcaatccttttaattgggtacaggaaactacttttcttttcaagagaagcccttgcgctctggttggattttgtgcacaacgtatacaaaatctatggctattgagttaagttaggatcagagttaaaactacctgccaaggtagttttgggatcaaacgactacgtttaccatctgagagctatttgctatctagaggtgagaggagtctgtacaatgtcgccgctgggtgggcgggtgcagctggctttccgaggaggggcggccgtcccctcttgcacactaggtgcaggncagcgcggcactacctgggagatcatggagctggagtgggactggctggaggaggtggtggcggcactcagctgggagaagccgctgtggctggactccaggctcgtcatggaacctctgaaatcctccgagccgatcacctcggtgtagtacatcactttacacttgtgcgaagagacctgcagggacgcaagcacgtcgtccacccggggaaggctgctggcggcgcacgcaggcatgctgtggaatttccactgcaggatgtagaagcc

SEQ ID NO: 431583 - DNA, 979 bp, Homo Sapiens
ggtattccagatttcctgagtggggagtgcatgtgcgaagtgccagagggtggactggtccccaaatctctgtaccggactgcagaggagctggagaacgaagacctgaagctctggactgagaccatctaccagtctgcaagcgtcttcaaaggagccccacatgagattctcattcagattgtggatgcctcgtcagtcatcacttgggatttcgacgtgtgcaaaggggacattgtgtttaacatctatcactccaagaggtcgccacaaccacccaaaaaggactccctgggagcccacagcatcacctctccgggtgggaacaatgtgcagctcatagacaaagtctggcagctgggccgcgactacagcatggtggagtcgcctctgatctgcaaagaaggagaaagcgtgcagggttcccatgtgaccaggtggccgggcttctacatcctgcagtggaaattccacagcatgcctgcgtgcgccgccagcagccttccccgggtggacgacgtgcttgcgtccctgcaggtctcttcgcacaagtgtaaagtgatgtactacaccgaggtgatcggctcgggggatttcagaggttccatgacgagcctggagtccagccacagcggcttctcccagctgagtgccgccaccacctcctccagccagtcccactccagctccatgatctccagatggcgattttgctgacagctgccaagaaaatgcttcactcaacagtcctcatgtgcccagagatgtttatagaactgtttgaattgcagccatcccctgccccctcccagggctggaagatctgttctttttaaagttggattcggggagtgggcattcttttattacccaaaggattgttagttgcatctttgaagaggttcaaaggcacatggaccgcacaaatggtttaacagggttttcctcccgagtaattccaatttcattccctttgttt

SEQ ID NO: 431584 - DNA, 481 bp, Homo Sapiens
  misc_feature (17)..(17): n is a, c, g, or t
  misc_feature (32)..(32): n is a, c, g, or t
  misc_feature (80)..(80): n is a, c, g, or t
  misc_feature (88)..(88): n is a, c, g, or t
tttttgggtggttgtgncgaacctcttggaantgaataaatgttaaaacacaatgtccccctttgcaacacgtcgaaaancccccaantgaatgaactgaacgagggcatcccacaatctgaaatgaagaatcctcatgtggggctcctttgaaagacgcttgcagactggtagatggtctcagtccagagcttcaggtcttcgttctccagctcctctgcagtccggtacagagatttggggaccagtccaccctctggcacttcgcacatgcactccccactcaggaaatctggaataatctctttgtcgatgtaatccagcaggcctccaggaccctggtagtcatttcctgcataaatgaggaacttccttctggtgttgtcatcaatgaacggactaaccagcgtccagagcacaggaaataccctgggcgcccgcaggatgagaaggcggcccagtgtctcagggtagttggcct

SEQ ID NO: 431585 - DNA, 428 bp, Homo Sapiens
ctttaaatagttcacatttattattgataacaataaaaaaatcttttaaagactatcagtattgtattaccaagtgaggtaatatgtttacaaaacatttacagaatttgatatgcaaataacaaatttaggaaggaaagtgaattaagacataatagagggagaatcaaagaatcattagtactaaggaaatggggaaatggacaggcagcgttttaaaagagtgggcaaggtactaaaggtaggaaacacggatggcaaactgcatacttcaaaccataggctggccccaggatttccctttacaagggggagtgaggattgggattactcggggagggaaaccctgttaaggcatttgtggcggttcatgtggctttggaggctctttccagggtggcacttaccgtctttggggttttaaaagg

SEQ ID NO: 431586 - DNA, 2255 bp, Homo Sapiens
  misc_feature (136)..(144): n is a, c, g, or t
  misc_feature (200)..(252): n is a, c, g, or t
  misc_feature (254)..(254): n is a, c, g, or t
  misc_feature (256)..(257): n is a, c, g, or t
  misc_feature (259)..(261): n is a, c, g, or t
ggaggaaaaggttccttttccaaaaaattcccccagggtgggggttttttcccacgtcccagggggtttaaaaaaagggggcccaaggcccaagtttttaaatatcggtcccctttatggggcccccttttttacnnnnnnnnntggggtaccggaaaaactggggcccccttagggggatttttagggggggccccccnnnnnnnnnnnnnnnnnnnnnnnnnnnnnnnnnnnnnnnnnnnnnnnnnnnnntntnntnnnttttgccaatttcacacatattattttattactcatttgtttgctttccagggcaagtgaaaaaataatttaaaccaattgtatgtacagaggcttgattagttttcccaagaacttccagaaagtctcccagccctgtagacagcaaagcgtattacctttaacatctatacaaaagtccacctataaaagtttcatgtgtagaaaggttttctttattataagcatcacattttggggacaggaagggggtcagggtgggaggtggaggaaagtgcagggtgggggtccacacacacctgcccaggggtcatcctgggtggggaggctgtggctggtggggctcaggtgatctgcagcggggtctccaacatctccatgaggaaggtgtcaatgggggtgtccccgatgagcttgaagaagaagaggtgctccaggcatttcaagccaatggaacgcagagctgggaggcgcacagcagcttggcaaacctgcctggctgttccggatacttctgcttggtgtaggcctcaagggtggcataaaccttctctcgcagagtctccacctcagaggggttggacaggcccttggcatctgggttaaagagtacaatggctcgcaggcatcccagttccgacttgtccatctgcatgtctttcattttggaaaccagctcagttaggactctgtcaaagatggagccgaccccagcactgtgggcactgctccggtggacatgtaaacccgtggccagaaggatgccatcctgcacggaaactgagcggtgggagaaagaggcaatcagcaatttattccaccctgcccgaaggaaaatgacctggttttccaaggtgaggtcagagaagtggggaatacgcttggcccattcaacgagggtgaaaagctgcttgtcagcagcatgacatatgttggtaacagggtcatttgtcgagttctccatattcatgtcaccataggattctgtctttggttcaacagcaagttcagcttctagaatcctctccacaggcatgtcttcatgaccactggtagcacattctgcctcactctcagctcgctctcggctcctctgtctttcttcttgcacagcttccctcttcatgcccatgacaaggcacttctgatagcgacagtactggcagcggttgcgctgacgcttgtcaatgaggcagtctttattatcccgacacgtgtagatgaggtccttccttatcgtcctcttgaagaaccctttgcagccttcacaactgtataccccgtagtgctttcctgaggatctgtctccacagatggcacagatgtgtttaaccagagatccggggctggtggatgggtagttcatgtttccaatcccgggaagccctggtaagggcttgatgtcctctgaactgctgacactgttgaccacatttagctgagagctgggtggggcaaccaagttgattcctggaggcgctgcaagtgctcctgagggtgggcccatggcagaggtgatgactcgatatggagagcccagggcattgaggggggtccccactgcactcagagtccgtggggcactcactggggtatccgtgtagctggggtggctgtccattggcttccctgtggacaaggctgctgatgggctcatggatgtagagccagtgtggccaggggagcctccatagcctgcgggaaacttcatgaagtgagaataatttccatacatgtttactcgtcagttcatgttcctctcctgtgcagcttctaaatattaccgcctctctcggctcccaggcacagcccggctttcttcaacttgggctaacaagagtggtcatcgcttcctagcagcccggggagcacaggctgggccagccctctgggattagtcaggaatctgcctctagatcggagagtccacatagtgcgtttgagacggctgtggcggcagcagctggtgcctgtcagtaatcacgcataatgct

SEQ ID NO: 431587 - DNA, 684 bp, Homo Sapiens
tcctcccttttgctagtagcaagttttattctaagcaaccgcaaatcatccaaggggatgttcacatatgaccccagagcccactcccatccccccagacagcagcggggcacacattcaacactcctgagacaagccatctgtgtgctttttctgtaccctctctggaataggcaatcccagaatgcatttggaaactgtaatccgaaccacctcaagtaaggattggtgtaataggaacaaactcaaataaccactggtacaaggtgaacaaccttaagtaacaaagtagttttctactctgggaggctgcagaacatagccaggaggaggtgggaagaggagaggggtatgccgagacaccgcaagtcccagaccacagccataccatcagcaacttcactggaatctttcttctcaacagggctgcagggtctacccctccgactcttttcctcttggtccttttgagacaatttgagagcaccaggcactgcacgagggaacctagcaccgtgtcccctgctctccggcctaagtaagcatcagtgggctaaaagagccccattaacaactccctcctagagggtaggtccagtccccaagttaggaacaacttctacaactcttaaaatgtaaaaaacaagtgttgggctgtattctttaaaaaatcaactaaaaaaa

SEQ ID NO: 431588 - DNA, 839 bp, Homo Sapiens
aaagtttttatttttctttcactggttagaaagagccacagcctcttcacggttctgcacctctatcccattaatctggataatgcggtctccttctcggatgcgcccatccttggctgcaatgctgttagggtcaatctcactgatataaatcccaatgtcgtcttcatcgtccgtccggtagcacacagtgaggcccagcttgtcctggctgttcattctgtagaggtccacttcctccagctccagctcctccctgtccatctcctgatggatgtctccaatgtagtcatttggatcgtagtattcatgggctgagggatgctcctctggcaagagatagggatccagtacgggtgggctgggagaggacatcttagtgagggccatgatatgttcaaaggtgatgtcggtttgggttcccgtgtccaccagctgagactctgatggaggcgtgaacattttggtccttggtgttcttctcaacacctgcaccactatgggctccttggctgtcttgaaagcttccacagcctggtcatgagttgctctggataagtctctgccgttgacctgacaaacttcatagagtaatttgtactgctcctcttgcttctgcaggctgcacagactgcatcccatgtttagacaaacgtcaaaggaaggcttccgttctcgccaagcacccgggcaaagcagctcccttacagtgcaggcattgaaggtatccttggagagcctcaggtgagtcaagcgacatgcaacgcattcacatatggcgctgctctacagaggcatagacaacatactcctatcccccacttccacgactatccctt

SEQ ID NO: 431589 - DNA, 765 bp, Homo Sapiens
gtcgttcttctatcgttccgtccggttagcacaacattgaggcccagccttgtcctgcgtgttcattctgtagaggtccacttcctccagctccagctcctccctgtccatctcctgatggatgtctccaatgtagtcattttggatcgtagtattcatgggctgagggatgctcctctggcaagagatagggatccagtacgggtgggctgggagaggacatcttagtgagggccatgatatgttcaaaggtgatgtcggtttgggttcccgtgtccaccagctgagactctgatggaggcgtgaacattttggtccttggtgttcttctcaacacctgcaccactatgggctccttggctgtcttgaaagcttccacagcctggtcatgagttgctctggataagtctctgccgttgacctcaataatcctgtcatgaatttgcaggcctccttccttggctgcaggcccactgtcaactatcttggatacaaagattccttcactggatgatccatcgtggttatccacactcggccggccaccaataatattgaatcccagggagccggagtcccgatgcaggacaagagtcagacttttggtttcttcgcccttgccgccgggcggcgcggccacgcagcggctgagcgagtcgaggcgcgcgctgtattcggtgaatttcttctggtagcgcagcgcggtcatctgcagctcaagctgcgccgcggccagctgggccaccagcgacttctcaccccgct

SEQ ID NO: 431590 - DNA, 1083 bp, Homo Sapiens
  misc_feature (15)..(17): n is a, c, g, or t
  misc_feature (23)..(23): n is a, c, g, or t
  misc_feature (30)..(30): n is a, c, g, or t
  misc_feature (34)..(34): n is a, c, g, or t
  misc_feature (41)..(41): n is a, c, g, or t
cctttcctcttctcnnngccctntcctgangatntccaggncttgggtcggacctgaagatcgggggacacggagtcttcctggctcctttacttctttctgttcttttatcctccgtggcttgattctcttcctcccctgggcaagacacccaagtgctgggcttggatcctggagacaaggcagaagtagaggttctgtgagcttctttctttacagcttcttcatcgtcctcctcctccacggctggacaacactcccggtgtgatggtggataagagaacttgttaactccctcctcttcagcaactccctcttcctcggctttctcctcccctgggttcttatcagaaccttgcagtgtccttatcagaaggctgggagacaggggagcacgctggccatctgcaaattgacttccctgccctctagggacactggttgcctctcgctcaccatacatgccatcatcatcatccaaaagtccccaggcttcaggaagggaactgctggttttcagccccagtgtttctctgtcctctccagggcctccactgtcttcagcctcctcttcagggcgtctgccccaaggggtatgggggattgccagaggagtcctagcttctccctccaggccagcttctaccagagctgctccttttactgcttccaccagccagggctctagaggtcccaggcccctcaggcggctccaggcgcggctgaggaggcccatcactggggacaggaggaagaaagggtgggcatccctccacggggtagcctgatggggtgcttggcctggggccatgtgtctgggcggctgggagctgcgcgtcaccccgggggcaggagcgccggttcggtctgccagaagcgatcacaggtccggacggttagggaggccagcgcgttcatctcaccctcaggcgtcgggctccgagtaactcagagtatctccggctgcctcaagtgccgtggcgacaagcgggcgcggggtcgtgcagcgtcttgcataagatcaacaactgggcctcgtgccgaattcgacacccagcctcgctacctagccgtaaagttttt

SEQ ID NO: 431591 - DNA, 1112 bp, Homo Sapiens
  misc_feature (398)..(398): n is a, c, g, or t
  misc_feature (912)..(912): n is a, c, g, or t
cggcacacaaagaaactgggaaaggattgcggccctggggcagcttctcctttcccagtttctttgtgtgccttttcctccttctcctcggacgcctctcctgaacgatactcccaggacctggggtcggagcctgaagatcggggggacacggaggtcttcctggctcctttacttctttctgttcttttatcctccgtggcttgatcctcttcctcccctgggcaagacacccaagtgctgggcttggatcctggggacgaggcagaagtagaggttctgtgagcttctttctttacagcttcttcatcgtcctcctcctccacggctggacaacactcccggtgtgatggtggataagagaacttgttaactccctcctcttcagcaactccctnttcctcggctttctcctcccctgggttcttatcagaaccttgcagtgtccttatcagaaggctgggagacaggggagcacgctggccatctgcaaattgacttccctgccctctagggacactggttgcctctcgctcaccatacatgccatcatcatcatccaaaagtccccaggcttcaggaagggaactgctggttttcagccccagtgtttctctgtcctctccagggcctccactgtcttcagcctcctcttcagggcgtctgccccaaggggtatgggggattgccagaggagtcctagcttctccctccaggccagcttctaccagagctgctccttttactgcttccaccagccagggctctagaggtcccaggcccctcaggcggctccaggtgcggctgaggaggcccatcactggggacaggaggaagaaagggtgggcatccctccacggggtagcctgatggggtgcttggcctggggccatgtgtctgggcggctgggantgcgcgtcaccccgggggcaggagcgccggttcggtctgccagaagcgatcacaggtccggacggttagggaggccagcgcgttcatctcaccctcaggcgtcgggctccgagtaactcagagtatctccggctgcctcaagtgccgtggcgacaagcgggcgcggggtcgtgcagcgtcttgcataagatcaacaactg

SEQ ID NO: 431592 - DNA, 497 bp, Homo Sapiens
  misc_feature (363)..(453): n is a, c, g, or t
gaaagcagcagatcccggtacaagaacacatggaacaagtggagtgaatgtatgctgtttgcttaacattcagtgatattgcaatcttcccatttcctagaagagaagaaacatgcatgcaggcagtcctcactttataaaagtctttggtaactaaatttggtgttggttacccctgagtcatgcatatcaagaacatgattttatctcagttaccacagtgagaactaccctgcttctggttatacagacacgatcctgaatacagataatattgattcccttagctccctccacaaatgttctagggcagtgaactttacttacaataccatctaaaaattgttgatccttgttgatgannnnnnnnnnnnnnnnnnnnnnnnnnnnnnnnnnnnnnnnnnnnnnnnnnnnnnnnnnnnnnnnnnnnnnnnnnnnnnnnnnnnnnnnnnntaccactgctttccagccagggtgataaagcaagagacactatc

SEQ ID NO: 431593 - DNA, 1118 bp, Homo Sapiens
  misc_feature (108)..(108): n is a, c, g, or t
  misc_feature (111)..(111): n is a, c, g, or t
aagcttggcacgaggtggcacgagggtacggaaattcagcacaatgtcaaggatgaagaggacctccacggccaggtcacagacgctgggcgggccgcgggcggcacntgnggctcccgtgctgtgctcacacacacgctgtagggcacagtgacagccacatagagtgtggcgagcaggatgaagccatcccaggtggctctcagtgccccacagtgcaacaggatgaagggcgacttccggatggcggctactttgtactcaggcaagtttggtttctccccaaacacccccttattgagcttgtgcttgcccttgggttgcttctgcaggtgcccggacaggtggtagagcacggcccggctccggccgcggtttggcatttgaagcctttggatcgtgcccggccatatcggcgccggccaccacctgtctccttccatctgtcggggccccctcggttcttggtttcgctgatgtccttgtgagagactaggaagagagccacctcccctttctcattctttatgggtatcacatccaggagacaccagaacgggagcccgctcttccggtacaggatcagctcagccttgaactccttgtgctcgtccagggccttgcggatctgttggcggacgagctcactggtgtctggcccataaaggaaggagcaggcacagccccgctgcatgacctcagcccgggagaagcccgtgaggtcacagaagccatcagagcagtagaccacggggaagagccccgccacctgggcgttgcccagcacgaagttactgtgcgtgccgtcgaagcgcgtagcgatggtgtccaggaaggtgttctgcggcgccaggaggccccgcatggccggcatcttaggcgcccgcggctgcccgccccatccctccggggtgcggggactccgcgccgggggagggcgcccagctcggccgccccccgccgggccccgcgctccctagcgcagccgtcggggggcaatgcgcagaccgggatccggggtcgcgccggacgtggcgcgcgagggggcgtccgcgccgtcggggcccggagcatggcgcgcggcccctcgcgccctcgccgcccacaaatctccgggc

SEQ ID NO: 431594 - DNA, 679 bp, Homo Sapiens
gatggcacctggcctctcttacttccaaattagacgagaacatactacattttagctgggcacattactatcccaaaccaaactggggtgctattagtaaggaaggaaaagagtagatactgggcaggcaattagatatctttgcagcaagacattcgggaaaggtattatttagaaaagtaccaaagtctttttgtgtccttgatgtggattgaatagagtgagaaaaattgcctgtgtgccggtttcccagtggaggtacatggagaaataagaattgtttccttctgcatggtaagcagctctccttgtcccattgtcccctattactgaccatggtcccacagccatatagttctatttctaggaatggactaggaaaaaaatcccagaggagaaactcccacactgatttctacttctaaaattcaatgtatttgtacctcgcgtctctagaaaaattgtgttttagtatatcagcttttgaagacagctgtacctaaatccagccatcccaatgggaccaaggaagccgactttcaccttcagaagcagccatgagtttgtgtctgctgcattgcactttcatatctaggacagaatttcatacttattatataattaccagtaatacaatttgttacttaaatacgtgccgatgatacgcgagggatcctct

SEQ ID NO: 431595 - DNA, 291 bp, Homo Sapiens
  misc_feature (271)..(271): n is a, c, g, or t
tttacttgtttattttttaattgctgatacagatgcatccattaataaatatttggtttttgtgatgctgaaacacagtcccaattacaaggcaacttagaagttaaaactgaaactgaaatataaacagcttaacaccagaaggaagcaaaactatatatgttttttgcacagcgttccgaaattgttttatacactgtaccacaaggtaccacttcctatttcacaatttagttgggttatatattttattgacagggtactcatgtcncatcattccatctgcatcgt

SEQ ID NO: 431596 - DNA, 1185 bp, Homo Sapiens
aagtgcagggcccaacaaccccccacaggggaaccaacccaccatttatttggatttttggggggggacacacccaatttttcttgttacttaataactttacataataggaatgttcctccacattctttgattttacaatggtttataaagtgctttaaaaaactggccaaaggggaaaccctaaaataaatgcttttaaccagttttgagtcaggaaccagactgttcccagattaggtggaaaaccgaccccaggaacttcacgtgcgttaaatgctgaattttaactgagctaaaaatgtttaggccatccctttttagaattcgcatgactcattgtagtcaaaagctataagaacatattccttaatagttcagcaagctttagggaaagctagctcattgtcttgggttctaaagtccttttgtttgattatttttattataatgaaattaaacttatgactattacagtatgctcagcttaaaacatttatgagtactgcaaggactaacagaaacaggaaaaatcctactaaaaatatttgttgatgggaaatcattgtgaaagcaaacctccaaatattcatttgtaagccataagaggataagcacaaccatatgggaggagataaccagtctctcccttcatatatattcttttttatttcttgttataccttcccaaaacagagacattcaacagtagttagaatggccatctcccaacattttaaaaaaactgcaccccccaatgggtgaacaaagtaaagagtagtaacctagagttcagctgagtaagccactgtggagccttaagtggtgaggtcttccaatttcagagtgatgtgtcttcaacttgtatcatcattttagcggaaaaacataatttaattttggtgaaatgagattcatctcgtaacaggattagtaacagcattcactgaatttcacactcttcttttgtgaacagtgaagaaaatgaatggtagctagaagatcaatgggattccagctccagctgcagatggaatgacgatataccaggacaaaaaacacctatattttgatttacaaagctaacagcagttttaaatctgcaacttaattacagaccaactacaccacaaccgtttcaaatggcaaaaatacaaaaaagtgttacaaaaatatttcagaaaa

SEQ ID NO: 431597 - DNA, 965 bp, Homo Sapiens
  misc_feature (4)..(4): n is a, c, g, or t
  misc_feature (9)..(10): n is a, c, g, or t
  misc_feature (29)..(29): n is a, c, g, or t
  misc_feature (37)..(37): n is a, c, g, or t
  misc_feature (56)..(57): n is a, c, g, or t
ttgnaaaanntctcacaaacttcttgcancagccagnccttctggtttgggtgacnntgtaaatatacatagttcaaaagcttctcggccagatgctggctcaatgcagcctgaacctttgccccgcaggaagactttggcacctgtttcaatctgaatgtgctgcaaataggagcagcctggaccttccaccttctccttgacattaaaagtgggtacagcatgttctagacccacaaataatttatcttgaacataatgcatccctgactggaagggaggcttctggctaacagctggagacaactgagcgatgggtgctggctggtgatagacagttactgttgcaccattaaaagttggacttgttcctgtggcagcttttaccactccattggtgataatttctttgatccggtttacagctctgtccactaattcccgtgtctggccctgaacatgaagatataatggacgatcccctggtcccactttggctttttcctcagttgtcatgaacctccctcgagttgatactgcagccccactaagtcggctgatctcgtcttgagtctgtcctcgagtcagcaagttcctacatgtgagaggcacatcattaatttctacttcagctaccaccaggtcatccttgcttttattgctagttaggcctttgccaggagcctgaagcttctcagaagcattctgagttggtttcagcttcccttttgccatgagcatggcattaatcttggcagccacagcagcagcagcatccaaggctcctgaaggagcagctgtggtgcccccaggacttcccccactgctggtgacctccccacctggggccgctggcgggaggaagagaagtggggctggagctggttggtcccatttgctgcggcgcccgccagctccaggatgtgtcgcgctccccgcggacatggcgaccgcttccactcaac

SEQ ID NO: 431598 - DNA, 1250 bp, Homo Sapiens
  misc_feature (66)..(66): n is a, c, g, or t
  misc_feature (138)..(138): n is a, c, g, or t
  misc_feature (156)..(156): n is a, c, g, or t
  misc_feature (218)..(218): n is a, c, g, or t
  misc_feature (238)..(238): n is a, c, g, or t
  misc_feature (242)..(242): n is a, c, g, or t
  misc_feature (265)..(265): n is a, c, g, or t
tcccttgcccagcccttccttttgggacaagaattttgtgggaaaatttttgtgaaattctgaggngccaaagggaacctgaggtggtgggggtctcaccagaaagtgtggataaattctagaaaactagctgccaangggacccagatctgggcnccaaaccctgtgatgggcaggtgggcatgggctgcatgtagtggttctcctggtggcaatgncggctgacgggaggatgtgntgangcagagaagggggtgggaggtangagtggatggtcagtgtctggtcatttccgactgaagagtgagcccagcagaaccacgccggccacagtcatgcccgtcaggaaccagcggttgaagcgttcctggccctttcggctctcggctgctgcattgttcccatagagttccacaaaagtatcccagccgccgttctcctggatccaaggctctaggtggtcattcaggtaagtggccatccaagctgcgatccgactcaccaatacctgcatctccttgtctacgctttccacgcacagtgccccgccgaaggagaaaaaggccacaatgcgaccccagtttaccccatcccggaagagttcattcactacctgttcaaagctctgatatgctgtccctggggtgatgtggagctgggatgtcaggtcactgaatgcccgccggtaccgcagttcaaactcgtcgcctgcctccctcagcgcttgctttactgctgccatggggatcacctcccgggcatccaaactgctgctgtggccagtggctccattcaccgcggggctgtctgccaggtgccaggatgggttgccattgatggcactgggggtctccatctccgattcagtcccttctggggcctcagtcctgttctcttccacatcactaaactgactccagctgtatcctttctgggaaagcttgtaggagagaaagtcaaccaccagctcccggttgctctgagacatttttataatagggatgggctcaaccagtccattgtccaaaacacctgctcactcactgagtctcgtctctggttagtgattctcttctaagatccaaagccaagataagattattcaaatccgccttaggcaaaggcaggcaggtgcagcccccggaagatcttttgtatcacaggtcgggagaggaggtggctgcggggatgccggtaactcagccggcctcgcggtggctggcaaaaaaaccagctccggccggagggat

SEQ ID NO: 431599 - DNA, 2571 bp, Homo Sapiens
ggaccggtccggaattcccgggatccggaagtgactgagcttgcaagttcccctgtctcttcaggggaaactgaggccggcttgttcgggagagacggcgcgagcagtcagccaggtaggccggctagccaggtaggccggcccgggtccgcggcgcggaactcggccgcgaagagctcttgcgtctggaagctaccgggccgatgaagggggatgtggccccccacggctcgcggggctcgcagctctttctctcccttcagaatcttatcttggctttggatcttagaagagaatcactaaccagagacgagactcagtgagtgagcaggtgttttggacaatggactggttgagcccatccctattataaaaatgtctcagagcaaccgggagctggtggttgactttctctcctacaagctttcccagaaaggatacagctggagtcagtttagtgatgtggaagagaacaggactgaggccccagaagggactgaatcggagatggagacccccagtgccatcaatggcaacccatcctggcacctggcagacagccccgcggtgaatggagccactggccacagcagcagtttggatgcccgggaggtgatccccatggcagcagtaaagcaagcgctgagggaggcaggcgacgagtttgaactgcggtaccggcgggcattcagtgacctgacatcccagctccacatcaccccagggacagcatatcagagctttgaacaggtagtgaatgaactcttccgggatggggtaaactggggtcgcattgtggcctttttctccttcggcggggcactgtgcgtggaaagcgtagacaaggagatgcaggtattggtgagtcggatcgcagcttggatggccacttacctgaatgaccacctagagccttggatccaggagaacggcggctgggatacttttgtggaactctatgggaacaatgcagcagccgagagccgaaagggccaggaacgcttcaaccgctggttcctgacagggccatgactgtggccggcgtggttctgcctgggctcactcttcagtcggaaatgaccagacactgaccatccactctagcctcgcagccccttctctgctccagcacatcactccgtccagccgccattgccaccaggacgaaccactacatgcagcccatgcccacctgcccatcacagggttgggcccagatctggtcccttgcagctagttttctagaatttatcacacttctgtgagacccccacacctcagttcccttggcctcagaattcacaaaatttccacaaaatctgtccaaaggaggctggcaggtatggaagggtttgtggctgggggcaggagggccctacctgattggtgcaacccttaccccttagcctccctgaaaatgtttttctgccagggagcttgaaagttttcagaacctcttccccagaaaggagactagattgcctttgttttgatgtttgtggcctcagaattgatcattttccccccactctccccacactaacctgggttccctttccttccatccctaccccctaagagccatttaggggccacttttgactagggattcaggctgcttgggataaagatgcaaggaccaggactccctcctcacctctggactggctagagtcctcactcccagtccaaatgtcctccagaagcctctggctagaggccagccccacccaggagggagggggctatagctacaggaagcaccccatgccaaagctagggtggcccttgcagttcagcaccaccctagtcccttcccctccctggctcccatgaccatactgagggaccaactgggcccaagacagatgccccagagctgtttatggcctcagctgcctcacttcctacaagagcagcctgtggcatctttgccttgggctgctcctcatggtgggttcaggggactcagccctgaggtgaaagggagctatcaggaacagctatgggagccccagggtcttccctacctcaggcaggaagggcaggaaggagagcctgctgcatggggtggggtagggctgactagaagggccagtcctgcctggccaggcagatctgtgccccatgcctgtccagcctgggcagccaggctgccaaggccagagtggcctggccaggagctcttcaggcctccctctctcttctgctccacccttggcctgtctcatccccaggggtcccagccaccccgggctctctgctgtacatatttgagactagtttttattccttgtgaagatgatatactatttttgttaagcgtgtctgtatttatgtgtgaggagctgctggcttgcagtgcgcgtgcacgtggagagctggtgcccggagattggacggcctgatgctccctcccctgccctggtccagggaagctggccgagggtcctggctcctgaggggcatctgcccctcccccaacccccaccccacacttgttccagctctttgaaatagtctgtgtgaaggtgaaagtgcagttcagtaataaactgtgtttactcagtg

SEQ ID NO: 431600 - DNA, 839 bp, Homo Sapiens
gcatctgcctgttgtacgctttcaacgcacagtgccccgccgaaggagaaaagggccacgatgcgaccccaggtttaccccatccgcggaagagttcattcactacctgttcaaagctctgatatgctgtccctggggtgatgtggagctgggatgtcaggtcactgaatgcccgccggtaccgcagttcaaactcgtcgcctgcctccctcagcgcttgctttactgctgccatggggatcacctcccgggcatccaaactgctgctgtggccagtggctccattcaccgcggggctgtctgccaggtgccaggatgggttgccattgatggcactgggggtctccatctccgattcagtcccttctggggcctcagtcctgttctcttccacatcactaaactgactccagctgtatcctttctgggaaagcttgtaggagagaaagtcaaccaccagctcccggttgctctgagacatttttataatagggatgggctcaaccagtccattgtccaaaacacctgctcactcactgagtctcgtctctggttagtgattctcttctaagatccaaagctaagataagattctgaagggagagaaagagattcaaatccgccttaggcaaaggcaggcaggtgcagcccccggaagatcttttgtatcacaggtcgggagaggaggtggctgcggggatgccggtaactcagccggcctcgcggtggctggcaaaaaaaccagctccggccggagggatcatgcgacccggcaggctgggagcccagaaggcgacacaggaattgcgaagctcaggaaccagccccctcgcttgctt

SEQ ID NO: 431601 - DNA, 1070 bp, Homo Sapiens
atttttctaggcgtgaggtgcctggtgttttgccctatgaggaagtgcccacaaaatagtttttcccccaggccggctctttgttcctggagatcccaggggttttaagggtgtccattccaggggaaagtgggcccctccaagggtggggaatccggactcccccaaataccggcccttttcccttgtttaacgcttttccccggcaccggtgccccccccgaaggaggaaaaagggccccacaatgcggacccccagttttccccccatcccgggaagagttccattcactacctggttcaaagctttggattatgctgtccctgggggtgatggggagttggatggtcagttcacggaatgcccccccggtaccgcagttcaaactggtcgcctgccttccctcagcgcttgctttactgctgccatggggatcacctcccgggcaatccaaactgctgctgtggccagtggctccattcaccgcggggctgtctgccaggtgccaggatgggttgccattgatggcactgggggtctccatctccgattcagtcccttctggggcctcagtcctgttctcttccacatcactaaactgactccagctgtatcctttctgggaaagcttgtaggagagaaagtcaaccaccagctcccggttgctctgagacatttttataatagggatgggctcaaccagtccattgtccaaaacacctgctcactcactgagtctcgtctctggttagtgattctcttctaagatccaaagccaagataagattctgaagggagagaaagagattcaaatccgccttaggcaaaggcaggcaggtgcagcccccggaagatcttttgtatcacaggtcgggagaggaggtggctgcggggatgccggtaactcagccggcctcgcggtggctggcaaaaaaaccagctccggccggagggatcatgcgacccggcaggctgggagcccagaaggcgacacaggaattgcgaagctcaggaaccagccccctcgcttgcttcctcctccatcgcccggatcgagggcggccccgct

SEQ ID NO: 431602 - DNA, 986 bp, Homo Sapiens
  misc_feature (57)..(57): n is a, c, g, or t
  misc_feature (69)..(69): n is a, c, g, or t
gcatgggagtcccccaaaaagttcccccagccgccggtcttcttggatccaaagctntaggtgtcattncaggtaagtggccatcccagttggcgatcggactcacccaatacctggcatctccttgtctacgctttcccacgcacagtgccccgccgaaggagaaaaaggcccacaatgcgaccccagtttacccccatcccggaagagttcattcactacctgttcaaagctctgatatgctgtccctggggtgatgtggagctgggatgtcaggtcactgaatgcccgccggtaccgcagttcaaactcgtcgcctgcctccctcagcgcttgctttactgctgccatggggatcacctcccgggcatccaaactgctgctgtggccagtggctccattcaccgcggggctgtctgccaggtgccaggatgggttgccattgatggcactgggggtctccatctccgattcagtcccttctggggcctcagtcctgttctcttccacatcactaaactgactccagctgtatcctttctgggaaagcttgtaggagagaaagtcaaccaccagctcccggttgctctgagacatttttataatagggatgggctcaaccagtccattgtccaaaacacctgctcactcactgagtctcgtctctggttagtgattctcttctaagatccaaagccaagataagattattcaaatccgccttaggcaaaggcaggcaggtgcagcccccggaagatcttttgtatcacaggtcgggagaggaggtggctgcggggatgccggtaactcagccggcctcgcggtggctggcaaaaaaaccagctccggccggagggatcatgcgacccggcaggctgggagcccagaaggcgacacaggaattgcgaagctcaggaaccagccccctcgcttgcttcctcctccatcgccccctcgtgccgaattcgccacccaggcctcgctcc

SEQ ID NO: 431603 - DNA, 1503 bp, Homo Sapiens
cgcgcactccctttgcgtctcgggctcgcgcgcgttgcccgcaccggaagtgactgagcttgcaagttcccctgtctcttcaggggaaactgaggccggcttgttcgggagagacggcgcgagcagtcagccaggtaggccggcagccaggtaggccggcccgggtccgcggcgcggaactcggccgcgaagagctcttgcgtctggaagctaccgggccgatgaagggggatgtggccccccacggctcgcggggctcgcagaatcttatcttggctttggatcttagaagagaatcactaaccagagacgagactcagtgagtgagcaggtgttttggacaatggactggttgagcccatccctattataaaaatgtctcagagcaaccgggagctggtggttgactttctctcctacaagctttcccagaaaggatacagctggagtcagtttagtgatgtggaagagaacaggactgaggccccagaagggactgaatcggagatggagacccccagtgccatcaatggcaacccatcctggcacctggcagacagccccgcggtgaatggagccactggccacagcagcagtttggatgcccgggaggtgatccccatggcagcagtaaagcaagcgctgagggaggcaggcgacgagtttgaactgcggtaccggcgggcattcagtgacctgacatcccagctccacatcaccccagggacagcatatcagagctttgaacaggtagtgaatgaactcttccgggatggggtaaactggggtcgcattgtggcctttttctccttcggcggggcactgtgcgtggaaagcgtagacaaggagatgcaggtattggtgagtcggatcgcagcttggatggccacttacctgaatgaccacctagagccttggatccaggagaacggcggctgggatacttttgtggaactctatgggaacaatgcagcagccgagagccgaaagggccaggaacgcttcaaccgctggttcctgacgggcatgactgtggccggcgtggttctgctgggctcactcttcagtcggaaatgaccagacactgaccatccactctaccctcgcacccccttctctgctccaccacatcctccgtccagccgccattgccaccaggagaaccactacatgcagcccatgcccacctgcccatcacagggttggggccagatctggtcccttgcagctagttttctagaatttatcacacttctgtgagacccccacacctcagttcccttggcctcagaattcacaaaatttccacaaaatctgtcccaaaggaggctggcaggtatgggaagggttttgtggctggggggcaaggaaggcccctaacctgattggttgcaaaccctttacccctttaacccttccctggaaaatggtttttccttgccaggggaagctttgaaaagtttttccaaaaccctccttccccccgggaaagggaagaacttt

SEQ ID NO: 431604 - DNA, 444 bp, Homo Sapiens
  misc_feature (134)..(134): n is a, c, g, or t
aaacttcaaaaaacaaaaggcaaatcctaatcctccctttcctgggggaaaaaggtttctgaaaaactttcaaagctccccctggcaagaaaaaacatttttcagggaggcctaaggggttaagggttgcaccnaatcaggttaggccctcctgcccccagcccacaaacccttcccatacctgcccagcctcctttggacagattttgtggaaattttgtgaattctgaggcccaagggaactgaggtgtgggggtctcacagaagtgtgataaattctagaaaactaactgcaagggaccagatctgggcccaaccctgtgatgggcaggtgggcatgggctgcatgtagtggttctcctggtggcaatggcggctggacggaggatgtggtggagcagagaagggggtgggagggtagagtggatggtcagtgtctggtca

SEQ ID NO: 431605 - DNA, 844 bp, Homo Sapiens
ggtcttctcctcagtccagcaggccccaatcatgagagcaggctcccttcggggtgggtggatgaggccattgtcatggatgagggcagggtcgaaggagatgccgtcggtatagagtgtgactgtggggaactcgagtttcagagcgtagtggtgccactcatcatcacagacctgctccagcttccagaggaacttgactgggcgggcactctcaagcaggggccagtagaggaaggcaatcctacagccgtggacagtcagcgagtagtgagagaagccgtcctcattctggacagtgttacatacgatggtttcctcttccttcttgcccttgttgggagttacgccatgcttcatccagaaggacagggtgaagtggtcactgaggctgtcctggggcccagagcccagcccactggggccacccaggggcacctgcacagcctgggtgccattgaaccagtagatcaggctgctgtcctggctgtagtgcaccgagagtcctgctgtccagttggcattggggccaggcatgggcaacagatccacctccccagtggcagcaccacagagtttccgcagcgcccgctctgagtagttgtcacggtcacagcccttggccacatggctggtctgcagctctatggtggcctgaatgttccagagtggttcatcacaggtctccaggcggataccagggaacaaagccaagctcccagcacctggtgcatattcgatccttttgttccagccttgccagctgggtttacaggtgggcttcacctgaatctccacctcagcatcatctgctgcccgcttcttcccacagtcataagctgtc

SEQ ID NO: 431606 - DNA, 1827 bp, Homo Sapiens
ccccagggctttcccccattgcaaatggaggggctttaaatggaggtggagatggggggtggggacagcctacccacatggtgggacacagagaagttgactgggcaactgaaaacaagagtagcagcaaggaatcccattgcactctgacagcagtacgatcccacatgtcatgttggggataaagcacagaatcaaggcatatcacacttggcacttgcacctcacaaatgaagagaggggaagtgacctgttcacagtcacacactgggcagtgacagaggcgggacaagaagccagtttccccctctggctagtgcctggagggaaggctcaccattctggacagtgttacatacgatggtttcctcttccttcttgcccttgttgggagttacgccatgcttcatccagaaggacagggtgaagtggtcactgaggctgtcctggggcccagagcccagcccactggggccacccaggggcacctgcacagcctgggtgccattgaaccagtagatcaggctgctgtcctggctgtagtgcaccgaagagtcctgctgtccagttggcattggggccaggcatgggcaacagatccacctccccagtggcagcaccacagagtttccgcagcgcccgctctgagtagttgtcacggtcacagcccttggccacatggctggtctgcagctctatggtggcctgaatgttccagagtggttcatcacaggtctccaggcggataccagggaacaaagccaagctcccagcacctggtgcatattcgatccttttgttccagccttgccagctgggtttacaggtgggcttcacctgaatctccacctcagcatcatctgctgcccgcttcttcccccacagtccataagctgtcactgtaaactttatagagcctctcaccactgtactgcagcttctctgtgttctcaatgttcccgtcattgtcaatgaggaaaggggtgttgggtgtgagaatctcatagtagcagatctggctgtactggggggagcagtcaccgtcaatggcttccacccgcaggatgcgatcgtacagcttcccctctgtcacagccgcacgatacagccgttccacaaacactggggcaaactcgttcacatcgttgacccgcacatgcacagtggccttgtgggacttcttggtgtttgcccgtcggggccctcgccacagtcataggcctggatggtgaaggtgtgttccttctgggcctcgcagtccacaggctccttggcccggatcagcccctctcctgtcgccttgtcaaggatcacagcctcaaagggcaccccagacccatggagccggaagccgcagatctcacctgcatagcgcagcggggcatccttgtccaaggcaaagagtggtggattcagtaggaccgtgttgtcattctccatgacgatgccctggtactctgcctcaatccatggcttgtgcttgttggctttgttacaggagcaggacgcgagcagagaggccagcagaaggggcagcagcaggagggtcatggtgcggcgtggggcagggcagggccaggcgtttgcctcccctgggagcctccagcctgcggattccaccttgcgggagggatacagggggtctccaaggagcggggtacagcagggcagggacggaaaggagcctgccgcccacactagtccataaagcgggcctgggcagatcccaatctgggtagctgaggcggtggacttgcagcggcttcccgtttcccccagcccagcgtcctcactctctcactcccaccccaaccccgctactgcagg

SEQ ID NO: 431607 - DNA, 699 bp, Homo Sapiens
  misc_feature (449)..(449): n is a, c, g, or t
  misc_feature (581)..(581): n is a, c, g, or t
ccgccttctggctccagcctggcgggcgtagaacagcgccgtgcggccctgggcgtcacgggccgccacgtccgcgccgtaccacagcagcagttgcgtgatgacgacgtgggcgagctcggccgccaggtggagtggggagcgcagctgtgggtcctctacgctggtgtcgagcggcccgtgtcgcgcatgggccaaaagcaggagaacggtagccacgtcctgggcctgcacggcggcccacagctggcggcccagcggctcctccgaggtgctcagcggcgccaggaacagtagctgctcgtacttggcgcgaatccacgactcgcgctcctcccgcgaagagtcccgcgagggcttggcacggcctcgcgtgtcgctttcccacacgcggttggccgtgtcgttgccaatagccgtcagcaccagggtcagctcccgtaggccantcgtccaagtccagcgagcgaacgcgggacaggtgtgtgcccaggttgcggtggatgccagaacactcgatgcagatgagggcgcccaggttcaagctggcccacgtggggttgggggccccgcagtccacncagattgaattccccttggcgttccggatcgcctggatggccacggcctcgctttggctgtctgtgcgcagcttgaccttgctgctctcacagcattgcagactggctaggatctgac

SEQ ID NO: 431608 - DNA, 915 bp, Homo Sapiens
gggcttggagccaaagtcaggcccacccaaaccttctcgcactgcgcacagacagccaaagcgaggccgtgccatccagcgatccggaacgccaagggaattcaatctgccgtggactgcggggcccccagtgagtgccaggagcagcggaggggctagggagtgtagtgaattccggggtgcctgtgctgccccggctgggagccgacctctacgctccttccgcagaccccacgtgggccagcttgaacctgggcgccctcatctgcatcgagtgttctggcatccaccgcaacctgggcacacacctgtcccgcgttcgctcgctggacttggacgactggccacgggagctgaccctggtgctgacggctattggcaacgacacggccaaccgcgtgtgggaaagcgacacgcgaggccgtgccaagccctcgcgggactcttcgcggtaagcgtgagggaacagagcggggggagggttgctgagggtgtgcgaacctgagacggtcccgtgggtaggggcagaagtcctggctgggggtccctagagccttttccgttgatccctggtcttgcagggaggagcgcgagtcgtggattcgcgccaagtacgagcagctactgttcctggcgccgctgagcacctcggaggagccgctgggccgccagctgtgggccgccgtgcaggcccaggacgtggctaccgttctcctgcttttggcccatgcgcgacacgggccgctcgacaccagcgtagaggacccacagctgcgctccccactccacctggcggccgagctcgcccacgtcgtcatcacgcaactgctgctgtgggtacgtgagctccctctccccaacgaggcatggagaccccagctcaacacgccccctctccattgtttccacactcgg

SEQ ID NO: 431609 - DNA, 713 bp, Homo Sapiens
aaactttgatgtgatatttatttctgaccctgtcattcttcccattatccatgtaaaaagcagacgaaatattgccaagtaccagtcatcacatgccattatgttaacagcataaactattcacattcataataaatatctaatggtaataaaatgcaaaggtaatttggtgcctgtgtttaacatacatgtggcttccttccttaacctgagttatttttttatcaccatttattcactgtcgggatgtatatatgctctgaaaatatactgcaattagaaccactcaaggcaacttactttctattgggactccatttgttaaccagctaattctgggtttggggttgccattagctctgcagatcaaggtcccatcctctcctggggacagcacaagattttgaggggctgtgatccagtatggagccgctttaactctaacagaaatggtatggtggatggctcctaatgcgttttttgctatacattggtaatttccagagtctgcttctgaaacatgaatgatctgcaaggttttctcaaagttcttataaactgtcctgtttttgggtagcattccatcttcctttgcccagtaaataattggggtagcagtccttctgcaatgcacttcagtgaaagcacatttcctcttaattcctctttgtacttgcattgcctttctgagttaaaaatgtggtgcctctctc

SEQ ID NO: 431610 - DNA, 818 bp, Homo Sapiens
cctcgacgactgttgtagacttggtgctggactcgcagggccaactggtcaagtgaagaaggccgtcactgggcatttacgtttgacaactcttgatcgatggcctccagtgagtccatgcagttattgatcttcggggccctgggccgtgtctcctctttcacccctcctgccacctttttttccttctgcactaccttcttttcctccatcgccgcccctgcttctccctccttttccactgctgccgagatggcgcgttttttagtcgtcacttccttggccttcttccccggtatcatctgagaccccaagccccctgcgccacaggcttctagagccttctgcccagcagggccacggggctctccaagctgacagccatttttctggctgctgtcagcagcctcggcggcagaggctgcttccagacctttcgtagaaggtggagcatcctcctgcccggctttggtcgctgcaccgccgcgactcccggcaactgggacgcggagcgcggggccacagtcgacaggatcctgggatgcacccccctccgcaacggtctccaggctgcccccacctgtgttcgccatcacctgtgtcgcctcggtttcttcacggagcccttggcactggtctcggtccggatctcctgaggcatggtcgggagcagccaggccgccggtttgggcgagagggagcttgttgcccccatccaggccgctcattttggaagaagtcagactagtgggagagggagagttccttgtcctccgcagcggccgagctctgcccgaaacgtctagcaccacccctcc

SEQ ID NO: 431611 - DNA, 818 bp, Homo Sapiens
gacgcacctcagggaacagtaattcttcttttcaatgctcatgaccgagactccgggaagaatggtcaagttgtctgttctatccaggagaatctatcttttacattagaaaattcagaagaagattattacagattgttgacggcccaaattcttgaccgagaaaaagcctcagaatataatatcacggtgactgcaacagacagaggaactccgcccctgtccacagaaattcacatcaccctgcaagtgactgacatcaatgataatccacctgctttctctcaagcctcctactcagtctacctcccggaaaacaacgccagaggtacttccatcttctccgtgattgcctatgaccctgatagcaatgagaattctagagttatttactccttggccgaggataccatccaagggtctcctctctccacctatgtctctattaactcagacactggtgtgctgtatgctctgtgctcctttgactatgagcagtttagagatttgcaaatgcaggtgacggcaagtgacagtggaagcccaccacttagcggcaatgtgtcattgagactgtttgttttggaccagagtgacaatgccccagaaatcctgtaccctggcctccccactgatggttctactggtgtggagctggcaccccgctctgcagagcctgggtacctggtgcaccaggtggtggccgtggacagagactcaggccagaatgcttggctctcctaccggctattcaaggccagtgagccagggctcttctcggtggggctgcaccccggtgaagtgcgcaccgctcgggc

SEQ ID NO: 431612 - DNA, 743 bp, Homo Sapiens
ctgctgaacaacagggcagatgctttctttttggagagctcggaggcttttgctttctcttctctctgagcttgtagagacaatgtctgcttcttagcagctgtaccccccaaaagattatcctcttcatcttcatcatcaaaccgggaaaccgacgtggggagcttgccaggcagcagagatgcaccttttaagttactcgcactttgagaagaaaacaaatcctcagagtcctcctcatctgaaaataagcctttttgagtcttttgtttctgatgagggcttgagatttttgctgtaagataaggtaacctttttttctgctcttgctttattttcatctgtctgactcacagtggcttctggcgatgctacggctttttctttgaacagatctccttcttcgtcaccaaagatatcggcagtggattggactttgcgtgttttagaaggtttgctgtggggtgccgagaaaaagaagaggccagtgggagggggaccataggggcttttccttggagtgggctgctcaggcttctgtggctccttcagtgatggaacggaggcagcaccaaacacatccgtgtctcctaaaaatacagaaacagctcctgctgggattttctttccaggtttggatgatgaagactcctccttaacagaggctccagcttgccgatcctggggggcttccatgaagaggtcactctcctcgtcctcatcatcaaatagccccttgccgc

SEQ ID NO: 431613 - DNA, 1476 bp, Homo Sapiens
  misc_feature (232)..(232): n is a, c, g, or t
gtttcccgttccgccttcaagaacacggcctttgtggcaggttccgttcatgggcgtggcggtttcccctccattgacgggcttcttcaggctttcttccagaatctccttgggggcagttatccagacggcaggcttgtgaaggaatcccggatgcgcgtctagtgcaactgggtctgggtggacgggactctgctgcctagagtggctgctgctactgccgccacttttnttaagttcctcggcgtcactgtacggccggatccagtaattcattcttcccgttctgcttcttgacaccgccttagtacggtgagagatcgccttgttttttctaccatgtccattatgcagtttaacagatggtcaagatgtttccactcttctgcccattctctgtctgttagtctgtgatcaatcatttcttcttgacgtgtgccatgcaaccccataggtctgtttctgtccctgaggtccctgtggctggggtgtcgataggagtccctgtagtggtgggcaatggccatatcatccaaacggtaatgctgaggtggaggtggggtagggtgaggcaggccattgggctggtaggataagccgttatttggactgtaccgctggcctgggctaatagtgcatggtcgcttgcttggatgttctgagtgcaaaggctctctgtcaaagccattttctttggttctgtctggagttcgcctcttcccgttttcgttcacatcgagaagcagctctgaggagtcaacaggtgaggtggtgctggcatccagaagcagctgttcatgctgggcgaggtactgggcagggttctgtttggccagtcttgcgcagtggaggagctcacgctgcagcaggggcaagttggccttcaaaaatgggatgacaaaaggtctcagtgggaagttagtagcttcttgcagtttggaatgaaattcttcaattgtcaaagtggagttcactagtcccagaacgagggtgcgaactctttctcctatctcgggtgaaatgtcattgccaaactgctgcagggtagtaaggaaccttttcagcttgctgagttgcctggcaccacaggctgggggcagctgttgattagccagagaggaggaggaagaagaggaaggcccattgctgaagccattgggtggtgagggggcgccattcaaggctgtaggagaatggctcgtgccattagttaacgttgtcggtgtaaatgaactggttcttggagctccttgagtagttgggggaggtggcattgttggaggagtcagcctagattgcgtcttcacatccacaggtgagtctggcattgtggagtgcttctcagtacgatcttgacaatattcaaagttcccttttttccggcagtcacctattactaaactcagtgctctccaagtgtttcttttgacagatatcattctccaccaatcgctctgctaatttcggacgcgtggg

SEQ ID NO: 431614 - DNA, 2016 bp, Homo Sapiens
  misc_feature (1703)..(1703): n is a, c, g, or t
  misc_feature (1758)..(1758): n is a, c, g, or t
  misc_feature (1863)..(1863): n is a, c, g, or t
ccaggagaagtgaagatgtaacatgttatctgtcgctcctcttagctggcggagagaatttacatttaaagattagcagagtgagaaagagaaatctgccttttgttgtgtggggtgaggaggaggcatctacccctggccttgacgctatctcccatcacctctgctatccagacaggactcaccgagatcgtactgagaagcactccacaatgccagactcacctgtggatgtgaagacgcaatctaggctgactcctccaacaatgccacctcccccaactactcaaggagctccaagaaccagttcatttacaccgacaacgttaactaatggcacgagccattctcctacagccttgaatggcgccccctcaccacccaatggcttcagcaatgggccttcctcttcttcctcttcctctctggctaatcaacagctgcccccagctctgtggtgccaggcaactcagcaagctgaaaaggttccttactaccctgcagcagtttggcaatgacatttcacccgagataggagaaagagttcgcaccctcgttctgggactagtgaactccactttgacaattgaagaatttcattccaaactgcaagaagctactaacttcccactgagaccttttgtcatcccatttttgaaggtattgcacagttcactggtctgtaaagtattttaaaccatattgttgctaggtcataactgtgtgcttttttagtacatttaggggctctttgatttaatttaatggatgaaaactatctgaatcgattgtatttatgaccatttcctaagtagtctgaaaattacaaggagtgttttaaataattacctgaaaagaagtaaagtttgaagaagagtttagaagtctctttgaataaaggttttgttcatttttttggtcatatgagatatgttattttacattttgcttgtctttagagtgaacagaagattggttgagctttgtagttgttcaggatttttttatcctcctaattttatctttgtaacaacttaacgggaagatcagaccgtcatccttttgtgccagtgaagaagttgggagtaagtgacatgtccaaggtgtgcctggctgaggactgattgaggtgtgggattcgaaatggtttttaagtctctgctgtgagctttctgtctcctccaactgctgccgcttcagtaaagcaactggaaaacaaacaaacacaaagttcacaagagaaagaaggaacatttttattcagcatagcgggtagttaattcactgatggatactaaaataactggtagttttggtagaaaagcagattactaagatcccttttacttgggtaagcatattgcttgggcatagtggattctcaataagtttatactaacagtgggcttagcagattgataaatgtgaaagtttcatttgcactcccctttgaaggtcactttcaaaatgagcactcaaggaagcctctgatttaattatttgccagggaggatttacctttctgtctggttcctagaactttgtttgggagacaccagaaatataactgatcagatcctgtgtgaaatttcatctatttttaaaactgtatcagacacataaggttcaagtaagtatccagaagcctagaaaggtttgtctgaaatgagccccaattctgaactttctggatattagtcttncctgttgttattattaaggtgaaatgaaatattctgctttgtgagtacctacaanccagaaattagatctgtttgtgtggaaacccagattacaattatattcttttcgttcttttctaagttgtacatttaaggttaaaggtataatgtgttagtgttntctcccaaaatggcttatactataatactatattcttatttaaaagcaaattgtttgttgaacaatttgaacaagtttgttgagactagaatctttgcctttctcagaaagcgttgttttctgtaaagatttcatcatatgaatgccatttcc

SEQ ID NO: 431615 - DNA, 569 bp, Homo Sapiens
  misc_feature (549)..(549): n is a, c, g, or t
gtttaggtctcgacacaggtctcagtgaattcccgtatgttttctgggaagctgagtttagaaggtttctggccaataaaaaatattctgtttttattccaagctcaaatatgagtgactgaactgtgctggtttctgaatagatgatggaaacaaactcttgttttttccccctttagaaccaaagaaaatggctttgacagagagcctttgcactcagaacatccaagcaagcgacccatgcactattagccccaggccagcggtacagtccaaataacggcttatcctaccagcccaatggcctgcctcaccctaccccacctccacctcagcattaccgtttggatgatatggccattgcccaccactacagggactcctatcgacaccccagccacagggacctcagggacagaaacagacctatgggtaagactgaaggacctgttcacttcttacgggattgggtgcttgaagacttgcaccattatttctgaacttaacttgaggcttgaaatctgtgatagggatgaagattctcatatntttgctttatattgtctcct

SEQ ID NO: 431616 - DNA, 1447 bp, Homo Sapiens
  misc_feature (277)..(358): n is a, c, g, or t
  misc_feature (546)..(546): n is a, c, g, or t
cccagccccgccccccatgtcttccgcccggggccacagcacaggctgggcctgggtttttggaggcctgctctctatcagtgggccctcagctcctctgcatggcggacttacctgccccaagcctgaccagagggttggtctgcaggaggctggatatgaggagttgggcctccgtaggtagggcctcatccccctcgggccacaggatgtcatctgcaaaaccaaacggaacttaggggcgctttttgttgttgttgttgtttggacacaggannnnnnnnnnnnnnnnnnnnnnnnnnnnnnnnnnnnnnnnnnnnnnnnnnnnnnnnnnnnnnnnnnnnnnnnnnnnnnnnnntggggggtcgcttttgaaatccctggaaccctgagcctgtccatctctccgtgcacaccacactctacgccctgtacactgccaagccacgtaccactgatgacctgtccaaatagctcctctggtgtgtctccgaagaagggcacacagcccaccaggaactcgtagaggatgatccccatagcccnaccagtccactggcttgccgtagccttgacgcaggatgacctcgggcgcgatgtactctggggtcccacacacctgggggcaggctgtcagcccacgccccagccagaggagggccctcaagggagagctgtgccccccaccaggccctgggttcccgaggtcctgcagggtcactccaccctcagcgacccccatgcccgcacacacacctgtttgtccaggaactctcgggcgtccttctcgatgtggccttcatataagttggtggtgaggctcatgagccccatcttggagaggccgaaatctgtgagcttgatgtgacccatggaggtgataaggaggttgtcaggcttgaggtcgcggtgcacgatgccatagttgtgcaaatactccagggctagcaccgtctcagcaaagtacatgcgggccatctctacgggcagcgctccaatattcttcagcagggtggcacagtcgccgccttccacatattccatgaccatgcagaggtggcgccgagtctcaaaggagcagaacatgccgaccacaaacgggttctcggcgaaggtgaggatatcgcgctccacaaaggcctgctggatctggttgcggaggatcaagttctgcttgttgatctttttcatggcaaagcctgccgcgtgtcgcggtgccgcaccaggtagacagcgccgtaggcaccgttgcttatgagcttgatggtatcgaagtcattctcccccggcggtttcttggccttgctgctgcggccctcagagagatcgtcttgctcaggggtgttggaaccaccactgtcctgttcctccagatgcaccactgtctggaaaggggtcacgggtgaggcccagctggcggatgatgtagcgggggatgtccgtcatc

SEQ ID NO: 431617 - DNA, 1280 bp, Homo Sapiens
taacgcgggcccaaccagcccggagaacgcgcgggcgccaaaaggggacggcctcccctccaggaacggctcggacgcggagatcgctttgatctccggagacccccctctccagtcttctcacgcaggtcagccgcccagcccctcccgcttgccggccaccttctcctcggggcccttggtgctcggctcccgcttgctgctccctgcagctgctacttggggtcttgggctcgtgctgcgacagctgctccatgctgctatacaccttgctgaagcgcggagagcaggaagagaactggcggatttccacgggctcctcctccgtcgtgtcatcctcgtcataggagttcacgtggtgatacctgtctgagcgggtgtcaaagtagctagtgtcatcttccgactctaggtgggggatgaactcggccttctgcctcagcagccctgtccagtccaggtctcgaaagaaactgtgctgcttcacctcaaaagcgccgcctgccccaagcctgaccagagggttggtctgcaggaggctggatatgaggagttgggcctccgtaggtagggcctcatccccctcgggccacaggatgtcatcactgatgacctgtccaaatagctcctctggtgtgtctccgaagaagggcacacagcccaccaggaactcgtagaggatgatccccatagcccaccagtccactggcttgccgtagccttgacgcaggatgacctcgggcgcgatgtactctggggtcccacacacctgtttgtccaggaactctcgggcgtccttctcgatgtggccttcatataagttggtggtgaggctcatgagccccatcttggagaggccgaaatctgtgagcttgatgtgacccatggaggtgataaggaggttgtcaggcttgaggtcgcggtgcacgatgccatagttgtgcaaatactccagggctagcaccgtctcagcaaagtacatgcgggccatctctacgggcagcgctccaatattcttcagcagggtggcacagtcgccgccttccacatattccatgaccatgcagaggtggcgccgagtctcaaaggagcagaacatgccgaccacaaacgggttctcggcgaaggtgaggatatcgcgctccacaaaggcctgctggatctggttgcggaggatcaagcttctgcttgttgatctttttcacggcaagcgctgccgcgtgtcgcggtcccgcaccagctcgacgcctggtcgacatatcccatacgtcggccgacca

SEQ ID NO: 431618 - DNA, 635 bp, Homo Sapiens
  misc_feature (12)..(12): n is a, c, g, or t
  misc_feature (14)..(14): n is a, c, g, or t
  misc_feature (18)..(18): n is a, c, g, or t
  misc_feature (30)..(30): n is a, c, g, or t
  misc_feature (33)..(33): n is a, c, g, or t
aggacccccatncnaganattatttttttntantttttaacaacaatcagccttggatctcagaagtcaaacaaaactcttttagcaaaaggcttactgctgactgcatatagcaaaggcagagaaagacgctgcccacaacataatgaaagatcatctacattttgcccagcatcaatcttagtcatgcatatctagcaccgagagccactgcggggtcacactggggcagttacagaacacatctttctcggagtgcagatgctccttcttggttggacaccgtgggccaattcaatttagaagtgcacaggtgagctctgagaaggtgtggccaggagctgccagggcagaaactggggcgcactcgtccacaggcggcaaacgacgcagctggaggacttcttgcttcagccggagctctggcatgaacccccggggaactgtgctcactgagcgagggagccccagaggctcacacagagcgggctgggtcttaagacgaggggacgatcaccgatgtgagttccggacactttgtccactccacattggccatcagagggggaatcaatgcaacccagtgcgaatgaccacagaatcgcattccttttcgtagcaaggaccaaaaaaag

SEQ ID NO: 431619 - DNA, 1171 bp, Homo Sapiens
  misc_feature (138)..(138): n is a, c, g, or t
ggaggttcccgctcttctacttccggatagccccattggcttaaaaaggccaccaagctgtttaagttcttgacgagatttcagtcccagtttcctgtttacttagtagacgtctgagtctttggtagcaggtacttngtctcagtaaaatcaaaatttccctgatgggattcagccatcaccagtaggagttttgtagcagtacttcttatacctggactaggagttgaaaaaagcttgaaaataacttcatctaaaattgaatacagggcttttcttcctattctgagtaaatcaccacttttgatctgtagtatattctggtagcatcagtcatgactgcagatcctatttggacattgtcagcttgcagtaaatgtaagaaatgatcactttgtagtacattctgaataagttcaacatggcctcccaaaagccagaagagagaatcagtcacaatttggaaaaagtgtagtaattcatctttttcttcagccttagctgcattgataaaacatgtttgtaattgtctccccaaaactagaaaattttctgcagctgatggaagtaattcattgtaaaattcctctgcatcttctcctggctccaagcccacacagcaatggcttaatatctgtgtaagctgggaaattgtagtccaaccaccctggattcgagaataatcttgactgaggaccaagaggcaatattgaatgagatcataacaatatatatcttgtttgattttcttcaactctgagcttcctaaaggtgtgatgtttattatttcttttaacttcaacagtataacagggacattctgctcagggctttttgcaacttcagcagctatagataagatccttgggtctgtacctgttggcttcatttctcttattaccctgttgccaggccaccgggtccggcccagccttgattcttcgggaatcacttctccctcgccgcgcctgttactgcctccacggatcactcatcctcgcttcgcgttcttccactaaagaacctggggctcccacgccgcactacagcgccgcggccttccggggcagcgtgcgtcgcgacgcgggaagatcccgggaattccggaccggtaccagccgcccagccccctcctggccccctcgccgcgcttttttcttctgtttattgg

SEQ ID NO: 431620 - DNA, 717 bp, Homo Sapiens
tcgagctcggtccctctttatgcaagtgtctagacactgtagtttaaaagaatatttcctgtagaaaaacctaatctaataggacctactcataatttggcaaaatcatcctcataattccatgctactgaaatgggggtgtaataaagaaaaaatcatttgtttattcatttaacagggtttattaagcaccaatatatgcccagaactttgcagtgcactggaagttcagagataagaaaaccacagtttctgccatcaaaatgctaggaatctagaggtctcaaacatcagaggtcccttcaaactatgtctaccaggaaaataaaatacctgatttcatccctgcaaacaactctatacagacagaaatgcttcctagcttggaaactatagaaaattgaacatgaaaatgagagcaaagattctacatcaaaatggcaatgatccaatcagcccagtcaaggctgagtgggttgaatggggacttcgagtttggattcaatgctttgaacttcatagctccagagaagctgtgcaaaaaggggggattctagggaatctgaggaagattgttggagaaaccagctttcttcttgtctcctaatccctgctaagattgataccagtcaaggagctgagttactttcatttcattatgttgaccagagaagcttatgatacagacttgacacttgcatcaagagggaccgagcc

SEQ ID NO: 431621 - DNA, 858 bp, Homo Sapiens
gtggggaaatgagggttctcggggccccagtgggggaaccctctggaaaagtctcagggaagcccgaaccccgtcaacgcccacaaagttcgacccgggcgtacttccccaaccgcctcgcggtagccctgcaccagggcgtgacttggtgccagcgccgcagcctggagcgcccagcagcacgatgtcgaaggccaaggaagacgcaaggagacccgcggcccatccgccaccaccaggtacagagtgaggtccgaatcgttgggtttggcggagggctcgaggctgcccaggtcggccaggatttcggggatcctgtcggccacggccacggtgagtgtgacggtggcggagagagggggctggccgtggtcctggacggccaccacgaggctctgcttgagcgcgtctctgtccagcagggctcgcgccgtgcgcacctcgcccgtgtgcagccccaccgagaagagtcccggctcgctggccttgagcaggcggtaggacagccaggcgttctggcctgagtctctgtccaccgccaccaccttggtcaccaggtagccgggctctgcggagcggggtgccagctccacgccagtggaaccgtctgtggggagggccgggtacaggatctcgggcgcgttgtcattctggtccagcacgaacaggctcagtgacatgttgctgctgagaggcgggtccccgctgtcccgcgctatcacccacacttgcaagtctcgcaactgctcataatcaaaggagcgcagtgcatagagtactccagtgtcggagttgatagagatgtaagaggataagggtgccccctgaacagtgtcctccgcgaaagagtaagttacc

SEQ ID NO: 431622 - DNA, 2484 bp, Homo Sapiens
  misc_feature (1589)..(1589): n is a, c, g, or t
  misc_feature (1595)..(1595): n is a, c, g, or t
  misc_feature (1602)..(1603): n is a, c, g, or t
  misc_feature (1606)..(1606): n is a, c, g, or t
  misc_feature (1625)..(1625): n is a, c, g, or t
  misc_feature (1637)..(1638): n is a, c, g, or t
  misc_feature (1641)..(1641): n is a, c, g, or t
  misc_feature (1651)..(1652): n is a, c, g, or t
  misc_feature (1658)..(1658): n is a, c, g, or t
  misc_feature (1660)..(1660): n is a, c, g, or t
  misc_feature (1663)..(1663): n is a, c, g, or t
  misc_feature (1666)..(1667): n is a, c, g, or t
  misc_feature (1670)..(1670): n is a, c, g, or t
  misc_feature (1674)..(1674): n is a, c, g, or t
  misc_feature (1678)..(1678): n is a, c, g, or t
  misc_feature (1696)..(1696): n is a, c, g, or t
  misc_feature (1702)..(1702): n is a, c, g, or t
  misc_feature (1721)..(1721): n is a, c, g, or t
  misc_feature (1731)..(1731): n is a, c, g, or t
  misc_feature (1737)..(1738): n is a, c, g, or t
  misc_feature (1748)..(1748): n is a, c, g, or t
  misc_feature (1754)..(1754): n is a, c, g, or t
  misc_feature (1761)..(1761): n is a, c, g, or t
  misc_feature (1767)..(1768): n is a, c, g, or t
  misc_feature (1786)..(1786): n is a, c, g, or t
  misc_feature (1799)..(1799): n is a, c, g, or t
  misc_feature (1803)..(1803): n is a, c, g, or t
  misc_feature (1813)..(1813): n is a, c, g, or t
  misc_feature (1821)..(1821): n is a, c, g, or t
  misc_feature (1830)..(1830): n is a, c, g, or t
atagaaaataaaattaatacttgattttattaaggtggtttatcacaacaaataccaacaagaagagaaaaaaatctcaggaaaatcaacagcatgcatggatttggaatgacactatgtaaataaatgcaatgaaataaaattgacttttcaacacttggacagcatgaagttcaacagacaaatccattaaaaagggaaataaaagctcaatctcaaggtgaaatttttgtccatgacactctcgaattctagatctgaaaaagtttgggataaatggcagaaaacaacgcgtcatcacgagatctctaatttaatccaaagctattccggaaggcagcagttttccctatttcttcaccagcgccctggggcaaaaggttaggaataatcggcttcaggaacttgaactcgccggcccctgagtctccggtcaaacacacctcgtagtggtagctctgggatagggtcccggtgccgctcacgtccaccagatgccctggaaagggaccctcgggcaccgagcagcgacccaccgaggccgccctgctcctcctgcacagccgcaccgccacgaacaggagcaccgagaggaggaagagcgaagacaccgaggccaacgccaccaccaggtagacggtgagcaagtcggcctgggcctgggccggggccgcctccgggagaggcaggtagggctgggagaagccgtccaccaggagcacgtgcagcgtggcggtggccgagcgaggaggctcgccattgtccttgacaagcaccaccagcctgtgcttggctgcgtcgcgctcgctcagcagcctggcggtgcgcacctccccattgtgcgcccacacaccgaacagcccgggctccgtggccttgagcagctggtacgacagccaggcgttctggcccgagtcgccgtccaccgccaccacctttggtcaccagttagcccggctcggccgcccggggcaccagctcggtgcagggcgcggagctgttctgcagcgggtacagcacgaagggcgagttgtcgttggcgtccagcaccagcacgcgcaccagcgcctcgctgctcagcgcgggggagccgcggtctgtggcgcccacgcggaactcgaaagcctgcagggcctcgtagtccagcgacctgagggcgaacaggtggccgttgtccgcgttgatggagaccagggaggcgaggggcaggtgcgggtcctggggcggcagcagcgagtaggtgacctgggcgttggtgcccgagtctctgtctgtggcgctgacactgccgatgtgcagggcggggctgttgttctcgcggacgaacagggtgtaggaggtttgggtgaaggcgggggcgttgtcattgacgtccgacaccagcacggttatttctgctcggttttcagccttggagtccccaagtcggtgacggtgatggtgatgttgtactcagtgttcctctctcgatccaaaggtttctctgttcccagagtatagaagttttcgacagatggcttcaggatgaaggggagatcgtcctggatggagcacactgtctttccattgtccccggaatccctgtcccnaacccnaaaaacnnccncgactgtcccgggtgagtnctctgcaattgnnctngtaagtgaanncaggancngcncgnnccnattnccgnttatatctgttacatcanccactncagtgcatttcccagaaancccgccgccntctttnncctgaatagntaatgngtaagtntgaatnncctcatagcccaattgcnctttaagatgaanactnccagatgttngattgatntgaaacgtnttgagaattctttcagtggcgtaagaaaatgcataggctatttccccattacttccggtatctaaatctctggctgacacggagacaaccatggaaccaacggggctattttcgggcacctgcaccttgtagagcgaccgcacaaaatcaggggcgttgtcatttacgtctagaaccagaatgcgcacgagggcggtccctgatcttggaggagagccgccgtctaaagcggtgagggttaaactgaactctggtatctcttcccgatccagcacttgattcagcaccaattcgggatagatattcccctccccgctatcatgggcattaatatggaaataggcattggggctgatggtgtagttactcaggctgttggttccaacatctgaatcctgtgcactctctaggagaaatgccgcccctggagtggtactttctaatattttcaaggaaatctctctgtctagaaatactggagcgtgatcattgatgtctctgacccatagttcagcacggaaaatctgaaaaggtttttccaataacaactggaaaggcagcacacagggctctctggggccacacagttcctctcggtccaatttctcatttagaagtagatcaccagtaagcgaactgagcagtaaaatttgg

SEQ ID NO: 431623 - DNA, 827 bp, Homo Sapiens
  misc_feature (713)..(713): n is a, c, g, or t
  misc_feature (816)..(816): n is a, c, g, or t
ccctgcagcgttcggttccggtgggcgccacagcccgcggctcccccgcgctgagcagcgaggcgctggtgcgcgtgctggtgctggacgccaacgacaactcgcccttcgtgctgtacccgctgcagaacagctccgcgccctgcaccgagccgttgccccgggcggccgagccgggctacctggtgaccaaggtggtggccgtggacggcgactcgggccagaacgcctggctgtcgtaccagctgctcaaggccacggagcccgggctattcggcgtgtgggcgcacaatggcgaggtgcgtaccgccaggctgctgagcgagcgcgacgcagccaagcagaggctggtggtgctggtcaaggacaatggcgagcctccgcgctcggccaccgccacgctgcacgtgctcctggtggacggcttctcccagccctacctgcggctcccggaggcggccccggaccaggccaactcgctcaccgtctacctgttggtggcgttggcctcggtgtcttcgctcttcctcctctcggtgctcctgttcgtggcggtgcggctgtgcaggaggagcagggcggccccggtgggtcgctgctcggtgcctgagggccccttcccacgacatctggtggacttgagcggcaccgggaccctatcccagagctaccagtatgaggtgtgcctgactggagggtctcggacaaatgangtcaagtttctgaaaccaattatccccaacctgctaccccagagcacaggcagggaagtggaaagaaaatcgcccatttcagaataatttggggtttctgatnaaggatgaaac

SEQ ID NO: 431624 - DNA, 1753 bp, Homo Sapiens
  misc_feature (1613)..(1613): n is a, c, g, or t
ccagcgctggtaccgcccggagttacgggatatcgtcgacccacgcgtccggaagacacggacagatgaacttaaaagagaagctttaggctgccaaagattgggaaagggaaaggacaaaaaagacccctgggctacacggcgtaggtgcagggtttcctactgctgttcttttatgctgggagctgtggctgtaaccaactaggaaataacgtatgcagcagctatggctgtcagagagttgtgcttcccaagacaaaggcaagtcctgtttctttttcttttttggggagtgtccttggcaggttctgggtttggacgttattcggtgactgaggaaacagagaaaggatcctttgtggtcaatctggcaaaggatctgggactagcagagggggagctggctgcaaggggaaccagggtggtttccgatgataacaaacaatacctgctcctggattcacataccgggaatttgctcacaaatgagaaactggaccgagagaagctgtgtggccctaaagagccctgtatgctgtatttccaaattttaatggatgatccctttcagatttaccgggctgagctgagagtcagggatataaatgatcacgcgccagtatttcaggacaaagaaacagtcttaaaaatatcagaaaatacagctgaagggacagcatttagactagaaaagagcacaggatccagaatgggaggacttaacggtatccaaaactacacgatcagccccaactcttttttccatattaatattagtgggcggtgatgaaggcatgatatatccagagctagtgttggacaaagcactggattgggaggagcagggagagctcagcttaaccctcacagcgctggatggtgggtctccatccaggtctgggacctctactgtacgcatcgttgtcttggacgtcaatgacaatgccccacagtttgcccaggctctgtatgagacctaggctccagaaaacagccccattgggttccttattgttaaggtatgggcagaagatgtagactctggagtcaacgcggaagtatcctattcattttttgatgcctcagaaaatattcgaacaacctttcaaatcaatcctttttctggggaaatctttctcagagaattgcttgattatgagttagtaaattcttacaaaataaatatacaggcaatggacggtggaggcctttctgcaagatgtagggttttagtggaagtattggacaccaatgacaatccccctgaactgatcgtatcatcattttccaactctgttgctgagaattctcctgagacgccgctggctgtttttaagattaatgacagagactctggagaaaatggaaagatggtttgctacattcaagagaatctgccattcctactaaaaccttctgtggagaatttttacatcctaattacagaaggcgcgctggacagagagatcagagccgagtacaacatcactatcaccgtcactgacttggggacacccagtctgaaaaccgagcacaccataaccgtgctggtcttcgacgttaatgacaacggccccgactttacccaaaccttcttacacctgttcggtcgngagaacaaccagccccgccctggacattgggcagggtcagcgccacagacaggagacttggcaccaacgcccaggtcaactacttggtgttgccgccccaagaacccgaactgcccttggccctccttggttttcataaa

SEQ ID NO: 431625 - DNA, 960 bp, Homo Sapiens
  misc_feature (441)..(441): n is a, c, g, or t
  misc_feature (445)..(446): n is a, c, g, or t
  misc_feature (455)..(455): n is a, c, g, or t
  misc_feature (457)..(457): n is a, c, g, or t
  misc_feature (459)..(460): n is a, c, g, or t
  misc_feature (463)..(464): n is a, c, g, or t
  misc_feature (468)..(468): n is a, c, g, or t
  misc_feature (474)..(475): n is a, c, g, or t
  misc_feature (494)..(495): n is a, c, g, or t
  misc_feature (497)..(497): n is a, c, g, or t
  misc_feature (500)..(500): n is a, c, g, or t
  misc_feature (511)..(512): n is a, c, g, or t
  misc_feature (515)..(515): n is a, c, g, or t
  misc_feature (540)..(541): n is a, c, g, or t
  misc_feature (582)..(582): n is a, c, g, or t
  misc_feature (584)..(584): n is a, c, g, or t
  misc_feature (586)..(586): n is a, c, g, or t
  misc_feature (626)..(626): n is a, c, g, or t
  misc_feature (641)..(641): n is a, c, g, or t
  misc_feature (644)..(644): n is a, c, g, or t
  misc_feature (665)..(665): n is a, c, g, or t
  misc_feature (678)..(678): n is a, c, g, or t
  misc_feature (681)..(681): n is a, c, g, or t
  misc_feature (864)..(864): n is a, c, g, or t
  misc_feature (877)..(878): n is a, c, g, or t
taaatttcaaaatgttttatttttattcattttcaggcagattataattttatttcaattataaggcatagtctgttttatacatcagcaaaagttaacataagaaaatattggccaagtaaaagtagcatgcttaaagataaaataataagtatataaactaagggtattattgatgttcagtattgctcacaatatgctttgtttcattttgtcatgagcctatagtagtagagaaatatttctttttaaatacatgatgtagaaataaatgacatggttttcaaacacgaatatatagaatgttagaatgagtttggaaatgtagatatgccttcttaaatagagcaagtacactatagacagaagtgattagactcatggggtgcaggctctgaaatggatcaaaacctcagatttctgtaatgagatataatagtnattnnttccttggncngnnggnngganttaggnncttagcactatcatttagnnanggnatactcattannttnggcccagttgttattaatgccaaannatgatgaaacattgtaaaaccccaggggtatactacttganantnatgcttgaggttgcataataacttaaatttgagatttaanagtaaactaataganacntggctatgtaacacaccaccngtatatgacactnacnacagactttactgaatattacctccaaagctatttcggaaggtggaattttcttcacccttcctcccagggccctgtgcctgaatatccgaaataactggtttcaagaacttgaactcactggtcccggggcctcccgtcagacacacctcatactggtagctctgggacagggtctcagcgnccctcacgtccannaaatgccctggaaaaggaccctcgggcacgagcagcgacccaccgaggccgccctgctcctcctgcacagccgcaccgccac

SEQ ID NO: 431626 - DNA, 972 bp, Homo Sapiens
  misc_feature (81)..(81): n is a, c, g, or t
  misc_feature (152)..(153): n is a, c, g, or t
  misc_feature (161)..(161): n is a, c, g, or t
  misc_feature (190)..(228): n is a, c, g, or t
atgagatgacatatgtgagaatgaaaatctaatgcacaagtgtgacctgaaaagagtagcttaacttatccatgtgctccntattgaaaaaccaaaactcaaaatatgagcttggaagaaatacacatggataaatatgaaatgattacacnncaaacttntgtcaaaaagtcaagctgtgtgaataagnnnnnnnnnnnnnnnnnnnnnnnnnnnnnnnnnnnnnnncatacattcttatgtagtgtcatatagtgtgaaaggtaatttcagaattagagttatgtttattaggtggggttaactttcatatcacccttcaggaatgaatactattaatttattcagaaatatgaactttcctgatataaaatatttataataatacaataatttgaaaactaacaatcagacaaaggaaatgagtaacattactaaagacaacagtagaaatttaaaaaaaagtagaattcaagattactaaagggttaaaaaaaactaaggtgaaaagtgaggaagacaaaattaacagacggtcggaaagctacagatacctacattattctagaaattctgatttcctcctagagtcctggcttacaatatttgggaatataggcttcaagaacttgaaatcattactttcagagcctcccgtcagacacacctcgtactggtagctctgggaaagggtcccggtgccgctcacgtccaccagatgccctggaaaggggccctcgggcaccgagcagcgacccactgaggccgccctgctcctcctgcacagccgcactgccacgaacaggaacaccgagaagaggaagagcgaagacaccgaggccaatgccaccaccaggtagacggtaagcgagtcggcctgggcttgggccggggccgcctctgggagcggcaggtagggctgagagaagccgtccaccaggagcacttgcagcgtggcggtggccgagcgcg

SEQ ID NO: 431627 - DNA, 1007 bp, Homo Sapiens
aaagctatagcgtatataacttgtttaaacaggctggtacggccgaattccgggatatcgtcgaccacgcgtcgcggacgcgtgggcgggctgttcggcgtgtgggcgcacaatggcgaggtgcgcaccgccaggctgctgagcgagcgcgacgcggccaagcacaggctggtggtgctggtcaaggacaatggcgagcctcctcgctcggccaccgccacgctgcacgtgctcctggtggacggcttctcccagccctacctgccgctccctgaggcggccccgtgccaggcccaggccgactccctcaccgtctacctggtggtggcattggcctcggtgtcgtcgctcttcctcttctcggtgctcctgttcgtggcggtgcggctgtgcaggaggagcagggcggcctcggtgggtcgctgctcggtgcccgagggtccctttccagggcatctggtggacgtgagcggcaccgggaccctgtcccagagctacccatacgaggtgtgtctgacaggaggttccgggacaaatgagttcaaatttctgaagccgattatcccccattttcaagttcatgacactggtaggaatatgggggaaatcgagaactttcgaaatagctttggacttaacattccatacaaccatttattttacatgtctaatttttggttattcttggcaagctgatggtactttttgcataatcttttgtggattcttggttgtactgtagttgcatgcatgattatagctcttgtttttctcgcagtttctttaaaaatctttattagtggctataatgacgtggaaatgtaatctgtgttttctggtttttcatttatttggccaaaatgttatattaatggagttattgctatttttgctgtgataatggtattatgcaagaccatattctcaattatttggatatgcaaactaaagtattaagagctaatgtcattatatatgtaacttaaatctagacaccatcaaagcat

SEQ ID NO: 431628 - DNA, 294 bp, Homo Sapiens
  misc_feature (214)..(214): n is a, c, g, or t
  misc_feature (261)..(261): n is a, c, g, or t
  misc_feature (271)..(271): n is a, c, g, or t
  misc_feature (284)..(284): n is a, c, g, or t
agactccggggacaacggtaggatgatttgctccatccagaatgatctcccctttcttttgaagcccacattaaaaaacttttacaccctagtgacacagagaacactggacagagagagccaagccgagtacaacatcaccatcactgtcaccgacatggggacacccaggctgaaaaccgtgcacatcatatcggtcctggtctccgacgtncaatgacagcgagccccgtcttcacccaaacctcctacaccctgttngtccgagagnacaacagccctgncctgcacatc

SEQ ID NO: 431629 - DNA, 439 bp, Homo Sapiens
  misc_feature (39)..(39): n is a, c, g, or t
  misc_feature (51)..(51): n is a, c, g, or t
ctggtcctggatgccgaacgactgcccaatgtgtcaggncggggctgttgntctcgcgaacgaaacagggtgtaaggaggtttgggtgaaggcgggggccgttgtcattgaacgtcggagaccaggaccgttatgttgtgctcggttttcagccctgggtgtccccaagtcagtgacggtgatagtgatgttgtactcggctctgatctctctgtccagcgcgccttctgtaattaggatgtaaaaattctccacagaaggttttagtaggaatggcagattctcttgaatgtagcaaaccatctttccattttctccagagtctctgtcattaatcttaaaaacaccagcggcgtctcaggagaattctcagcaacagagttggaaaatgatgatacgatcagttcagggggattgtcattggtgtccaatacttcca

SEQ ID NO: 431630 - DNA, 350 bp, Homo Sapiens
  misc_feature (277)..(277): n is a, c, g, or t
gcaaatgaacttttaatacttgaaaatcacatggccatggcagtatatgtatttggttctatctagattcttctgtgaatctaaaagcattacaggggtaaatgctttgctatttgacgtatagatcccgtcactaacaatagtacacttggatgtgattaatgtttgagcttcaatatatttcatatcatacagttttctaaaacaacttcagcaaatggtaaaatgaacatgtgcagtgttaaaggcaggccttaggctccttcatgtttgttgngaggttgtgtgtgggaagtagtctttggcttataagggatagaacttgagacagtagcagatgggacatggtg

SEQ ID NO: 431631 - DNA, 679 bp, Homo Sapiens
aattgctttaaacacccatccactgtatgtaattctaattaccttataacagtattaagacagcttgtttgtactgtgcaatttgaacaaggaatgcaatgttattttttacaaaaaacaaacttgtttatttttataataacgatgtatttgatgtggaccaaattcgtaccactatctaaaatagcctcttttctcatagtgcagttgtagtttagaaacaaaacttggtcctctctccttgctttttaaagtaaatggctagatttagttgtcttagccaggtttcctttgaagagaaactcaaaaccattttgaaactgcttagttcagaatacatcgaagtatttaaaattactgagttgggtaatttactatcatttactttttacattacaagtgcaataatatttcacaaaatgaaactcccgaatgggtggagtatgtgattattggtacctggtccttctggtgctatttttatttaagtctttgtttcaaaccacctttccctgaatcttaaagataatgttttgcatgtgagtacatgcagcccagcaagaaactaaactgaactctcttctcctatcctagtccattaaggagaagaaccagcattgcttttgtgtttggtgtgaatattcagtcaataaaaatgatttaccattataaagagctg

SEQ ID NO: 431632 - DNA, 1111 bp, Homo Sapiens
  misc_feature (149)..(149): n is a, c, g, or t
tggttgcccaggccaaagtgacccccaaccccggaagaaagtcctcccatcatcatttgagacacgacgtcaaaggaggtgaaagccgcccattggcgaagctctcccttgtactgccccatcttgatggctcccagccattggtccanccgtgtaaagcctggtgtagtcggggatcgtgcggtccagcagcggcaggttgatgccagaggagaggggcgccatggctttgaggctgttgggattgcggatcatcttgtctagcgtgttgacaatttggccgaacttgggcaggtggttgcggtccttctgccaacagtccagcatgagttggtgcagggcgctcgggcagtccatgggcggtggcagccgatagtcctgctcaatggcattgattacatcctggttggtcatgtcccagtagggccgctccccataggacatcacctcccacatgacaatgccgtagctccacacatcactggccgaggtgaacttccggtactggatggcttccggggctgtccagcggatggggatctttccgcccagggcactggtgtaggtggggtctgaggtatcgtcctctagaaagcgtgagagcccaaagtccgacaccttgcagaccaggttgctgttgacgaggatgttgcgggcagccaggtcacggtgaacatagttcatgtctgccaggtacttcatgccagctgcgatgccccgaagcatgcccaccagctggatgacttgtgaactgcccatcgttttgccggagaaaggagtccagggagccattctccatgaactcggtgatgatcatcacaggtgtgctcttggtcacgacaccctccaggtggatgacgttgggatggtcgaactggcccatgatggaggcttcgctcaggaagtcccggcgctgcttctccgtgtagcccgacttgagcgtcttgatggccacaaagatctctctcttgcctggcagcttcaggtggccactgcagacctcgccaaactcccctgctccgatcacctgctcaattttgacacaggagatgtcaatttccttggcaaactcccgcactgcctcgttggggtcccggcacggtccttccat

SEQ ID NO: 431633 - DNA, 2207 bp, Homo Sapiens
  misc_feature (75)..(75): n is a, c, g, or t
  misc_feature (77)..(77): n is a, c, g, or t
  misc_feature (149)..(149): n is a, c, g, or t
  misc_feature (185)..(185): n is a, c, g, or t
  misc_feature (440)..(440): n is a, c, g, or t
  misc_feature (517)..(517): n is a, c, g, or t
gtattctgggccggatgggggcttccaggcccctgtcggagggttcagatgggggatcccccaccagtgtttcancnggtcccttgagtccccagcaggctgtaggcgatgcgcttctggtggccgggcagcccgcaccccaatccttnttgatgtcgtcgttggtcatctgcaccactttctcngatggcagtgtagccggccgccatgaagtgctccgtatactgctgcatcttgatggactccagccactcggacaccgtgcggaagggcaccccctccgagccgctcgtgctggggagccggatagacacgcgggggtcaaagtcagccagggtcttgagggagtcagggggcacgaatgagcttgtccagggatgctgacgatgtccagcgaacttggggcggcggggcacgctcctggtggccagcactgcatncatgagctggtagatggcggaggggcagtccatgggtgtggggagccggaagccatcattgatggctttcatcaccntcgtggttggacaactcccagtaagggccgctcgccataggtcatcacctcccacatgacaatgccaaagctccacacgtcgctggcagaggtgaacttccggtaggaaatggcctccggggcggtccagcggatggggatcttgccgccactggtggtgtaggtggcctcggggtcgtcctccagcacgcgggacaggccaaagtcagacaccttgcagaccaggttgctgttgacgaggatgttgcgggcagccaggtcacggtgcacatagttcatgttggccaggtacttcatgccagctgcgatgccccgcagcatgcccaccagctgcagcacgctgaactcgccatccttctcccgaaggaacttgtccagggccccattctccatgtactcagtgatgatcatcatgggcttgtatttggagatgacgccctctaggcggatgatgttgtggtggctgaactggcccatgatgccggcctcgccgaggaagtccactcgctgcttctctgtgtagccggctttcagcgtcttgatggccaccggcacctccttcttccccgaggatgtcttcagcatgcccttgtacacctccccaaactctcctgctccgatcactttctgccgagtgacacaggatggatggatctcggtagtgaacttcaaacacaggcttggttggggtcctcatatgtgtgggggtccacgtatgtcttcaggggcttcagttgttctgacttggagaagtaaacgtcttccggggactggcgggcacgctggttcttcctcctgcggtggataaagaagccaactcctgccagcaccagaagcaggaccacaccgacagccacgccgccaatcaccgccaagttgccagatccctccggggccagcgtctggaattcgtgccccttgctgccggccccctggccctcctgcgtcagtgcctgcacctggacccaggtaggtggttttctggggccagttcgtccagggtcacggagaaaccctcggtgcggcgcacattgtagctgttggagtctcccttcttgcggtaagtgaccctcgtacttccacactcggctctgctgcggcggggggatgctccaggagaccgctaagcgacggtggtgctgcggccctccagcctcaccttggggggctctgtctggttgatgctgacacctggcagtacggaagctgcggctggttaccaggcctgagacgccattgcgggcctccacggtgaaggtgtagttcatgtggggctccaggtcgctcactgtcacactggtggcgggtcagtccgtgaggaggctccgagtagcgcacactggcctcacacggcccgcattccccagactcgggccagcactgttcgcaggtgacgctgtagacaatgtcctcgcggcccccgctgtcctgagggggcgtccagcgcagctccaccttggcacccatgcccacggctgtgaggtagtgtgggccggagggggttcgtgtgcaaggcatcgacgctgggtcctgaggtgcccggaagaagccttcctcacactcgcatggaggtggcaccctcaggggatggcagcgtgtgctcagggcactccaagcaggggctctcagatgcctcaaacttataaaatccaggcgagcaggcagcctgtggaaagttttcagctgcccc

SEQ ID NO: 431634 - DNA, 480 bp, Homo Sapiens
tgtcgaggagaagaaaccacttgataacaccccgcgacatcgtggggctgcttgtcacaggaaagcaccatgtttgcaatggattgctgcaggtgctgccgttgcctcctcagggtctgctgaaagtcatcttctagggtctgaacgacataacgcaggaaaaggactcgcccaggcagagtttgtccctcttccttcatgacataggtgagcagtttccagtcccactccactgtcttggcattggctggatgtagctgttgaattttcatgagaagcatgtaggcctcctttaggacatccacagtctcagagccactgagcaagattttctggatgatgtgagccacgatttctcttggtgggtaatgctggggtgacacaaagtccatcaaaaactgcacagtccccagaggaaaattctcttcaatggtatttgttaccattcttagtcttcgatgagggatgggttctaatttt

SEQ ID NO: 431635 - DNA, 1699 bp, Homo Sapiens
gccccacccatttcgttggaaattggaaaaagaatggtttaaaacccattgtggattggcaacaaggagttatttaaacgtggtttccaaaaaaaagtattagaataaagtaattttatttaaaaaataatatatacctttgtatattttaagcccatatttgagaaacaggctaggataggattatttaaaaaaagatatttactagagttagaaattacaacctactgattaaataatgcaggtttggtcctgtaagattttaaccacttttcatgcttttagagcttctgagcagttggagagagagttcaggaggtaattcttggcattcagtgcttggcaggccctcaggagccgctccagcccttttgaaagggctctgcatcagggttcaagtccgcagcatagaagagcaggagcttcaacaagtgcactttgtcttggagttgggggacaagaggctcccccagcatctggatcaggcggctgcggaaggcctcaatctgcttctctacgtctaccactgtgatgtcatctccttgctggggtttgggcttaatccttttgattattaagtcctttcggtcgatcacggaactccttaagtgttctcttaaaacatgttgataactggacagcagaaactgcagatgctcaaccaattcgtcccaagtctgccactggcttttatctgactgacacttgagcagtgacgtagaattattcaggaaagtagaggggcctgggccagagacagaggcaggcgggtgggtgtctcacagctgtggaggaatatgatttctaacactttgcagcgcagaaggtggctttccatggtagtaaagaacatttctctctggctcctctcaggaatgtccagcacaaacccaaacatcatctcggcaattttattggagctgcaggtgggggtcctgtccacctctacggctatggagagcatcctctgaagctggcacacaatcagctgattggtgttctttgtcaggttgggctgggaagaagggtggctactgctggctttcaagattcctgttcctgaagacgtttgatttccatttgggggctgagtcaatccatcttcagttactgctttgaccagccacttgataacatccctgacattgtggggctgcttgtcacaggaaagcaccatgtttgcaatggattgctgcaggtgctgccgttgcctcctcagggtctgctgaaagtcatcttctagggtctgaacgacataacgcaggaaaaggactcgcccaggcagagtttgtcccttataaggtttcagaaaccattttttaagtattattacttgttcaaaggatctaggcatctgcagataattataattttctaacacctaagctgcaatcagatatctactggaatctctaggattgtagatcatttgatttaagaggcagccatgggaagtcaatctctccctctcactgaacctatcaacctcaggatatacccaaaactacagatggcaaaacagagaaagagaaactggttctttaatgactcctgtgctgctagatcaaaccgccatgatgtccactctactgatgaacttccagtcatgcgagctgattgagccaagtctgttggcttggctcaacttgactgttgggccaagcctgagttgggtattctgttacaggtgaaatgatcc

SEQ ID NO: 431636 - DNA, 372 bp, Homo Sapiens
  misc_feature (117)..(139): n is a, c, g, or t
  misc_feature (198)..(211): n is a, c, g, or t
  misc_feature (265)..(306): n is a, c, g, or t
tccagatccaaaattagcattttattcagaacgctggggtcagaggtgtatcatttatattctggtacacaatacagaggcaaagctgttgtcagaagtctctccagtttaaaagcnnnnnnnnnnnnnnnnnnnnnnnaaaaaaacacacacttagtagtgccaccagtgtcaggccacccctttctttcctttccnnnnnnnnnnnnnnggtacaaattatgtaaaacatttgtgctaagaacttttctccctccccaaaccnnnnnnnnnnnnnnnnnnnnnnnnnnnnnnnnnnnnnnnnnntgagtattctaactacagctcaacaattgaatcaaatgtcactgttttgcatgtttatatctttcg

SEQ ID NO: 431637 - DNA, 1020 bp, Homo Sapiens
  misc_feature (9)..(9): n is a, c, g, or t
  misc_feature (22)..(22): n is a, c, g, or t
  misc_feature (34)..(36): n is a, c, g, or t
  misc_feature (55)..(55): n is a, c, g, or t
  misc_feature (82)..(82): n is a, c, g, or t
  misc_feature (94)..(94): n is a, c, g, or t
  misc_feature (97)..(97): n is a, c, g, or t
  misc_feature (100)..(100): n is a, c, g, or t
  misc_feature (143)..(144): n is a, c, g, or t
  misc_feature (146)..(146): n is a, c, g, or t
  misc_feature (153)..(153): n is a, c, g, or t
  misc_feature (202)..(202): n is a, c, g, or t
  misc_feature (205)..(205): n is a, c, g, or t
  misc_feature (207)..(207): n is a, c, g, or t
  misc_feature (219)..(220): n is a, c, g, or t
  misc_feature (243)..(244): n is a, c, g, or t
  misc_feature (261)..(275): n is a, c, g, or t
  misc_feature (285)..(285): n is a, c, g, or t
  misc_feature (342)..(343): n is a, c, g, or t
  misc_feature (351)..(351): n is a, c, g, or t
  misc_feature (362)..(362): n is a, c, g, or t
  misc_feature (448)..(448): n is a, c, g, or t
  misc_feature (488)..(488): n is a, c, g, or t
  misc_feature (498)..(498): n is a, c, g, or t
  misc_feature (503)..(503): n is a, c, g, or t
  misc_feature (515)..(515): n is a, c, g, or t
  misc_feature (518)..(519): n is a, c, g, or t
  misc_feature (527)..(527): n is a, c, g, or t
  misc_feature (530)..(549): n is a, c, g, or t
  misc_feature (567)..(567): n is a, c, g, or t
  misc_feature (990)..(991): n is a, c, g, or t
ttttttctnttgcgatggttgnttgcccccagannnatatatctctgctcatgtntcacccagtaaaagaaagaaccagaangcactgtttttngcnttncgtatctgtgtgttactgctgtgttattaacactgttttgtannanaaaaaanatatgctcagcactgcccccttctctgtttgcttattgaaaaacaaaangangnacattactgtgnntttttataccactcatttttaanngggctgtcttttcattnnnnnnnnnnnnnnntgtggtggtntacacaggatagaacacccttttttaaaacacagtctttccccttgctcattgtatnntgaatganatgatataaanctcaacagatacatcaagaactccatagctatataattatagagaacatttgaaaataatccattaatgtgaatctcacctgaatncagtctgtttggtgtctgcacagactggaattcaatctgncaaatttgtnttaanctcaagtggagnacnnctcccccntannnnnnnnnnnnnnnnnnnntttaatttatgagaattntggacaattggaaaggtagaaaagaaaagccaagatcatactaaggactggaaatattttgttctatggaatcaaatttctcacaatgctgtatgatactatttaaatttggaggacaacttatcttcactaagatgaatcaggtggagaaagtaatctccttgcaatcatgtggacaccaatcacaaaagtaaagccctggtgttgtgttttcatgtcttttttcagccctctcagatccaaatgttattatgcactttttaatgtttgtaaacttttactaataattagtgtgaattgcattctgatacaataatgattatcattagaagctaacaaaattctcattaatactgtgtttgatggcctctgctgtgttttaacatcgtgcttcttatatggaaagtttttgtgagctgtttnntccctctggtcagtattatgaaatcattt

SEQ ID NO: 431638 - DNA, 1786 bp, Homo Sapiens
  misc_feature (499)..(499): n is a, c, g, or t
  misc_feature (501)..(501): n is a, c, g, or t
atttattaccactgcaaatgatttcataatactgaccagagggattacacagctcacaaaaactttccatataagaagcacgatgttaaaacacagcagaggccatcaaacacagtattaatgagaattttgttagcttctaatgataatcattattgtatcagaatgcaattcacactaattattagtaaaagtttacaaacattaaaaagtgcataataacatttggatctgagagggctgaaaaaagacatgaaaacacaacaccagggctttacttttgtgattggtgtccacatgattgcaaggagattactttctccacctgattcagcttagtgaagataagttgtcctccaaatttaaatagtatcatacagcattgtgagaaatttgattccatagaacaaaatatttccagtccttagtatgatcttggcttttcttttctacctttccaattgtccaaaattctcataaattaaaatatatatttttntntatattatgtgggagaagttctccacttgagaataaaacaaatttgacagattgaattccagtctgtgcagacaccaaacagactgaattcaggtgatattcacattaatggatattttcaaatgtctctataataaagcaatggagtcttgatgaatctgttagacttaatcaactcatcaacatacaatgagcaaggggaaagactgtgttttaaaaaagggtgttctatcctgtgtacaccaccacagtatggaaaactaaaatgaaaagacagcccttttaaaaatgagtggtataaaaattcacagtaatgtacatcattttgtttttcataagcaatcagagaagggggcagtgctgagcatatatattgtacaatacaaaacagtgtaaataacacagcagtaacacacagatacgtaatgctaaaaacagtgctttctggatctttcttttactgggtgaacacttgagccagagatatttaaactctggggttcaatcaacccttcgcaattagacacaattaaatcctctgacattgtgaggggccagatgctacaggaagaatcatcatctaggtcggagctactctctataagcatttcgtcatatgatcaagtgaaaggatccatacaaaaatgacgcccaaacacaagccacatgatttcaaccattgctaatgacagaggtagggaaaagtctgcctgcagccacagcctctgccctcatttttaacatgataatgagcaggttcctgcaatgcagcacagccattttctttttcctcttttcactcatggaaacaaatgcattccagatactcctggagatttgagacattttcaggtgtggtcgagggtcaaagtggggtgttagctttcagattttgctgcttctccctgggcttccccactttgttctgtagaacttcgttgtgcatcttcttcaccttctgtcttgttgatatcaagacctgctaatttcaaggctaattcattgctgttgccacttgcagaggaaaccaggatatcatgtattgcatttcttctacctgttcttcctgaagcaataaaatctgcatatgtagtttccacatcagtcattgctaccaaatatccacatagcagggacttccccggacctagtcagcgcaggtccccgcgcacgccgccacgggccgcagtcccgccgcgcccgccgagtgctcggtcagctcgcgccggcccgcgccccacctgccagcagcagcctccgctcccgccgcgatccggagaattcc

SEQ ID NO: 431639 - DNA, 1186 bp, Homo Sapiens
  misc_feature (1)..(1): n is a, c, g, or t
  misc_feature (3)..(3): n is a, c, g, or t
  misc_feature (11)..(12): n is a, c, g, or t
  misc_feature (16)..(16): n is a, c, g, or t
  misc_feature (21)..(22): n is a, c, g, or t
  misc_feature (62)..(62): n is a, c, g, or t
  misc_feature (65)..(67): n is a, c, g, or t
  misc_feature (72)..(72): n is a, c, g, or t
  misc_feature (87)..(87): n is a, c, g, or t
  misc_feature (89)..(89): n is a, c, g, or t
  misc_feature (103)..(103): n is a, c, g, or t
ngntgggaaannaaangaaanncccccctttaaaaaggggggtaaaaaatcccccgtaatgnccnnnttttntttttcataagcaancngagaggggggcagngctgagcatatatattgtacaatacaaaacagtgtaaataacacagcagtaacacacagatacgtaatgctaaaaacagtgctttctggatctttcttttactgggtgaacacttgagccagagatatttaaactctggggttcaatcaacccttcgcaattagacacaattaaatcctctgacattgtgaggggccagatgctacaggaagaatcatcatctaggtcggagctactctctataagcatttcgtcatatgatcaagtgaaaggatccatacaaaaatgacgcccaaacacaagccacatgatttcaaccattgctaatgacagaggtagggaaaagtctgcctgcagccacagcctctgccctcatttttaacatgataatgagcaggttcctgcaatgcagcacagccattttctttttcctcttttcactcatggaaacaaatgcattccagatactcctggagatttgagacattttcaggtgtggtcgagggtcaaagtggggtgttagctttcagattttgctgcttctccctgggcttccccactttgttctgtagaacttcgttgtgcatcttcttcaccttctgtcttgttgatatcaagacctgctaatttcaaggctaattcattgctgttgccacttgcagaggaaaccaggatatcatgtattgcatttcttctacctgttcttcctgaagcaataaaatctgcatatgtagtttccacatcagtcattgctaccaaatatccacatagcagggactgattggaaaccttcttgtctttaattcattgactatactagatctcttttttcttggagatgaccttcagatttctatcagaaatcacttctttggggaaaccagggcttctcagaaagtcaggaaacttccccggacctagtcagcgcaggtccccgcgcacgccgccacgggccgcagtcccgccgcgcccgccgagtgctcggtcagctcgcgccggcccgcgccccacctgccagcagcagcctccgctcccgccgcggagctccggctgcatgaagtcatccccgccccgggacccgct

SEQ ID NO: 431640 - DNA, 591 bp, Homo Sapiens
  misc_feature (518)..(537): n is a, c, g, or t
catgaaccattggcatattactggttccttatttattaccactgacaaatgatttcataatactgaccagagggattacacagctcacaaaaactttccatataagaagcacgatgttaaaacacagcagaggccatcaaacacagtattaatgagaattttgttagcttctaatgataatcattattgtatcagaatgcaattcacactaattattagtaaaagtttacaaacattaaaaagtgcataataacatttggatctgagagggctgaaaaaagacatgaaaacacaacaccagggctttacttttgtgattggtgtccacatgattgcaaggagattactttctccacctgattcagcttagtgaagataagttgtcctccaaatttaaatagtatcatacagcattgtgagaaatttgattccatagaacaaaatatttccagtccttagtatgatcttggcttttcttttctacctttccaattgtccaaaattctcataaattaaannnnnnnnnnnnnnnnnnnntatgtgggagaagttctccacttgagaataaaacaaatttgacagattgaattc

SEQ ID NO: 431641 - DNA, 894 bp, Homo Sapiens
cgggcccaaagcaccaggagaatcatcatttagtcggagcacttctctatagcatttcgtcatagatcacaggtaaaggatccatacctataattacgcccctaacacaagccacaggatttcaaccattgctaatgacagaggcagggaaaaagttctgccctgcacccacaggcctctgccctcatgtttgaacatgataatggagccaggttccttgcaatgcagcacagccatgttcggtttccctctgtgtcactccatggaaacaaatgcattccagatactcctggagatttgagacattttcagggtgtgctcgagggtcaaagtgcgggtgttagcttttcagattttgctgcttctccctgggcttccccactttgttctgtagaacttcgttgtgcatcgttcttcaccttctgtcttgttgatatcaagacctgctaatttcaaggctaattcattgctgttgccacttgcagaggaaaccaggatatcatgtattgcatttcttctacctgttcttcctgaagcaataaaatctgcatatgtagtttccacatcagtcattgctaccaaatatccacatagcagggactgattggaaaccttcttgtctttaattcattgactatactagatctcttttttcttggagatgaccttcagatttctatcagaaatcacttctttggggaaaccagggcttctcagaaagtcaggaaacttccccggacctagtcagcgcaggtccccgcgcacgccgccacgggccgcagtcccgccgcgcccgccgagtgctgggtcagctcgcgccggcccgcgccccacctgccagcagcagcctccgcccccccgctctcgagtcatcgctgtctggaacagcgatga

SEQ ID NO: 431642 - DNA, 457 bp, Homo Sapiens
  misc_feature (401)..(401): n is a, c, g, or t
  misc_feature (442)..(442): n is a, c, g, or t
ggcatattactggttccttatttattaccactgacaaatgatttcataatactgaccagagggattacacagctcacaaaaactttccatataagaagcacgatgttaaaacacagcagaggccatcaaacacagtattaatgagaattttgttagcttctaatgataatcattattgtatcagaatgcaattcacactaattattaggtaaaagtttacaaacattaaaaagtgcataataacatttgggatctgagaggggctgaaaaaaggacatggaaaacacaacaccgggggctttacttttgtggattgggtgtccacatggattgccagggggtttactttctccacctggattcggcttaggtggagggtaggttgtcctcccaattttaantggtatccttacggcttgtgggggatttggtttccttgggncaatttttccgtcct

SEQ ID NO: 431643 - DNA, 597 bp, Homo Sapiens
ggggaatggcgtagaagttggcctcaggtataaaaattgagctgccccaaggtagaaatggaaaatgtctcgcccggctgaattattccaggcaaggtgaagatgaccggttctccccactaagaaatgtctcttatatgttgggttcgcccttatatgttgggttcagagtaagtactttcttcccctgcgcgggagttagggatagcagaactgtatttaactaaacgaagactgaaatggggccaggatgcagtgagtagatccagtaggttacatggtcctgagagataagagactcaaagagccacccagcagtgaagacacaaactaccaccccctccaccaccaccagtgggcttccgtggagtctggggtacagatcagactgcactgtatttgtttccagaatggtcaattcttagtaatcctacccgagactgtctttttctctgccctcccagttcgtgagtggaattctatgcctacatttgcctgatgcaagtttttaaatatttccaaactgaccaacccagtttctcttaacttcttccttccccaatttttctttcatttttaccaagttaacttcacatt

SEQ ID NO: 431644 - DNA, 902 bp, Homo Sapiens
agtggcgtgcacagcgcgaaggaacagcctgggaagtctgggattctcagcaatggatggtaagtaagactgtcatcttgcgagtcttcagaaggctaagtaaactttcaatagggtaaccaacaacaatttcatcatctacagccagtatctgatctccgactttgagtcgtccatccgtggctgctaccccatgctctgttaagctctttatgatgactggagaaaggtcatagtggtttgggcctaagtcttgctgggaacaaagaccgatccaggatgagtgtcttcatagtggggattgatccaaatggagctgcaggaaaagatggtcgattgcaaattgcagatgagcttctagagatcaatggtcagattttatatggcaagaagtcatcagaatgcctcatcaatcattaaatgtgccccttctaaagtgacactaatttttatcagaaataaagatgcagtgaatcagatggccgtatgtcctggaaatgcagtagaacctttgccttctaactcagaaaatcttcaaaataaggagacagagccaactgttactacttctgatgcagctgtggacctcagttcatttaaaaatgtgcaacatctggagcttcccaaggatcaggggggtttgggtattgctatcagcgaagaagatacactcagtggagtcatcataaagagcttaacagagcatggggtagcagccacggatggacgactcaaagtcggagatcagatactggctgtagatgatgaaattgttgttggttaccctattgaaaagtttattagccttctgaagacagcaaagatgacagtaaaacttaccatccatgctgagaatccagattcccaggctgttccttcagcagctggtgcagccagtggag

SEQ ID NO: 431645 - DNA, 2263 bp, Homo Sapiens
  misc_feature (2184)..(2184): n is a, c, g, or t
  misc_feature (2242)..(2242): n is a, c, g, or t
gccaggtgcaaatcataaggaagtttttattgggtcctgtacagaagagaaatgctccgttgtcaaaaaactacaaagggatccctggctctgggtgtgctatgaagacaactccctccccagtgagcccagggaacaggctggatgctggacaaagtttgggagggagctccaggcccagggtcctccacttggggtctccccctttatgtttgtaaaaaccgcaggattggagtatttagaggactctgtccccctgcaagtattgccgttggatatgaaacacacagagcaaaaccccaaggtgacaaatgagtgaaaacctaaggtgacaagtggacagacgccccccagatggaggagacactggctagctggcgacctctgcccctacgtaacttgtcagtccttgaaggcacagcagcattggccagagatggcccctcccgcggccagggctggattgcagttccctgccttgctcacctgtggccacagctcatacccccagttaccccacagccagggactggaggggcctctgaagcacagacaggcttaggcagcctcccacccccaccccagcagcttcttctgggagtgggaccctatctgaaggatgaagagatgggcttggccacctgagggccagaaggaactgggcacaggcaggctctatgctcaccttggaattaccccaggtcttcatattgtggggccactgtgtaggggtaggggtctggaggagacagccttctcatctaccctatttcactagctcaaggttatagctgttcctggttctccttagcctgggaagacccagggcccatggcaatgcccaggcctgtaaggggtctgcccaggatggaaggcaaagaaatacattgctcccaggggttggacgcctgcccgggaccaggccttgagctgagaacctggaagcccctgccaggatcccttcctggccaggcctgcacgggtggggagtgaggctggggatgacgcagggacacggaaggccaggccctgctgccctcgtgctctccgcttgcacctgccagcgtcatggtgggagccatggagggagatgatgtggtggggaacaggcaacgacggcagagtaatgagggtggggacactaatggtggtcaaggtggctcaggtgccattggtggtggtccacagtgttgtgcttagctggggtggagtgtgggttcccaagggggcagggggcactgagagtgggaggcctcaggcctagggagccacaccaggccacatgctgagaacggacctccacaaaggccgcagagggctctagactacctctcacacctgggccactcagtggcgagggcctacaaccaagagacttcaaacagccctgagagttaacgtggtcacctgctcatcacagatggggaaactgaggcaggacaggtcggaagcagggaaacctgatcaaagcttgttcgggctctgaacacccctgtgcttagagaccctctgtaccctcccccaccccgaagggtgtggcggttatggtgcagtgtgggtggaaagcccctggggaggccaatggctccagctcagcctctccaaagcggggctttgtccgatcccgcagtggccctgtctcaggttccctgctcccgacgtcctgttgcgcagggctggtgatggcgcagctggacgtgtgcacatgtcactcactacccaagcccaagcttgggatgtcactcagctccccaggcccgacctcactcggcccgggacatgcggtgcccagcgcagtcgtccggggcagccgtcgcccctgggacaaggccagctgggaggagccggaagacaaacgctgaggccaacgccccctcacccctgggaggggtggcgcatgtctgcgcgcgggggggaggcgggcgtctttggtgctgcggccccggagagcggcctggcctgcctggcgtccgtggggaggcgccggcggtcctaggacgcggagcccagcgagtccgagtgcagcgtggcgtagcccgaggactcggagggggaactcaggaagctgctggtgctgccgccgccgcccgccgcgcgcagccccccgggctcgccccacgacgcgctcaggccggggcgcagagagccggcgtgcgagtgcgcagaggggcgtggccctggctnccgctgggcgctgcttgggggcgtcggggcctctccgggatctgcgccgtcgggggcngcgggcgcagcggggaagggc

SEQ ID NO: 431646 - DNA, 482 bp, Homo Sapiens
ttttttttgcaaatcataaggaagtttttattgggtcctgtacagaagagaaatgctccgttgtcaaaaaactacaaagggatccctggctctgggtgtgctatgaagacaactccctccccagtgagcccagggaacaggctggatgctggacaaagtttgggagggagctccaggcccagggtcctccacttggggtctccccctttatgtttgtaaaaaccgcagattggagtatttagaggactctgtccccctgcaagtattgccgttggatatgaaacacacagaggcaaaaccccaaggtgacaaatgagtgaaaaccttaaggtgacaagtgggacagacgccccccagatgggagggagacactgggcttagctgggcgaccttttgcccttacgttaactttgttcagttcctttgaagggcacagcagcttttggccagagttggccctttccccgcgggccagggtttgg

SEQ ID NO: 431647 - DNA, 502 bp, Homo Sapiens
gtctaaattccatatcctttcttccataccctggtgtttcctatgaacagatagatactttagggctgcaaggtttggattgcatggcactgctcagaagataagttacaggtctgggctaggctgtagctgcccctccaggtggctagacctttcctttctgtgtcaccagttaacactggccaacagttccttccattaactgttcactgctttctcctgtgtctaactgatgcagtttatgacccataactaagagcagtaccaggtatggctctgtttcctgttcatgtcccctgtcctctgggctgcatgcattccgttcttacagaaagaatacctttaacctagtacatcctgccacacatctgcttctactgtgaaattgatgagggggtattaccgattcttccctcacccatcatttactgagatgctggtgattgcattataatcctctaaagcttacattgtctttctgattcttggtcttatctgagca

SEQ ID NO: 431648 - DNA, 2255 bp, Homo Sapiens
  misc_feature (15)..(15): n is a, c, g, or t
  misc_feature (43)..(43): n is a, c, g, or t
  misc_feature (52)..(52): n is a, c, g, or t
  misc_feature (85)..(85): n is a, c, g, or t
  misc_feature (91)..(91): n is a, c, g, or t
  misc_feature (1441)..(1476): n is a, c, g, or t
aaaagttggagttanacccctttaccctttaagttaaccaaanggtttagtnggaaaggcaaagaacttttaaagttattacccnaagaantcctaaccttatctccccataatttcttttccatatattccatttgccttaacttgtgaacacagagtcccccactaactcaagaagcaattcctcctaagctggccctcctcactggctctgaagactgttgctgcccccacagttcctaattccccatttggaaaggaaagaggaagtacaggagaaggagggtcatgcagggccacatccagtcaaaactctcacaaaaccttgagaaacagggcaagatatcccttccaggcaagatatcctttacagaagaaaagttctggagaacttaaggcagctctagaagggaagggagcaagggttaaggcggccctcacagcacagcctgagaacaaattacaatgcactcatccatgaacagaggtcacggcaatacagatcctcttcaacgcgcatgcacacgacacccctcctagcacccatcaacactacggcatgcacacactgcagtgcccacggacaaactgacttgtatatggcctgcccagtgacagccctcggaaggcacccagtgacttgggctcccctgtgctgaggacctaaactgggaaggtggcctatagctgcaggcctgtccaggctgcacagctcacctggtggctccaataaagactctgatgggtgtggggagagtaactttcctcttaatttcagagaggcttttgctgtttcctgtctttttggttgagacaacctgctaccaattaatgcccaaacagagtattgcatcctcccagagagcactgattcatgacagaagtcaagctgagttatagcaagtaactatgacaaaaaagaaaaccacctggcgctgagcacttggtctccttaaaacaagtaacttggtacgcagcacttgctcggttcccacatgccagctgccaactctgataaaaaagcaccccttgctggccaggggcattccacacgtaccaggaggggcagcacgtgacctcacgacatttttaaagtctcctgcatcacaggtgcccacaccaccactgctccatatgggaaagcaggacagccggagggctgtgcgacatcaggcaagtcactgcccctatctctattcccaagctatcatcagaaatgattgtagaagcgaccccacctaccgtccatgctgctgtgaggatgaaacgaggtaacagaggaaagcgccgcaggaaagcatatctggacccaggtactgtttctgcattactttcaacaggatgcactagttttggctctgttttatcactaagcagctgacattacccagaggatccttgactatgcctgctaaggaactctatgaattagtgacggggnnnnnnnnnnnnnnnnnnnnnnnnnnnnnnnnnnnnaagagagaaagggcattgtgtgaggacttctcaggatggtggcaggtgcccattttcctagggttaccatgaaagttatttctcacaacaatcactgcactgaaattataataatatagtattttcatagcctcccctaacatgtagctgtaaccttagtaaaagatttgatctatattacacataattactcacccagaaagagccaactatgagctatccatggaaatgaagaaataccccagcaaattctccaaactgacaataatccccaaattccctatcagttggcttcggaatatgtttttgtgcttctgcacctgacaaaagaagcatcagatatgtggaaattttttaaacttccaaaggaattagaagctacactttgtggattttatcccatatttatcttccctccttttagagttactctcaggcagatcaaagccttaacctgaggaaaagctgcaaaaagggaaattacttttaaattttcagcttcaagttgtaagggtgtgaggtgagtctgcatgtagtaaggtgaatggggaggggattattaagataaagaactgttgtgacttttaagatctcttcctttgaattcccattgtgtgtcacagaggaattaagaaaaagttgatgactgatcttctgaaggaatgcatgcagagaagtaagaacaacaaggactgtgcaaagattgggctgatggtaagcaccaggaaggccagcaggggcaactgaggactgactccatccaccttacgaatcaacgt

SEQ ID NO: 431649 - DNA, 1643 bp, Homo Sapiens
  misc_feature (649)..(649): n is a, c, g, or t
tttttatatccatatctttatttaaacaagtttccataatagctaggagaatacagcattaatgacacacatttactaagcacaacaatggacaactacaaatttagagcataaatgtaattctgatattgttttggtttttatcttagcactaggtgatatctagtgaaaacccatgtttcaaaggcttttgttgatatgagatgaattattaacttatttttaaaaattgcacgtgagatatgctagaatgggttctagagtctagagttagttgataatgcctttcatgtctcagtatttctgcttcctttttaatgggtaaatgtttcaccctaggaactttcaaaaaattgtatcaaaattttctatgcagatcaaagtagaattccttttccagacccaacaaggaaaaatatttgaaaactgcaatgttcaattccattttagttaaaaggatgtccatttcatagtaaattaatacagttaataattaaaatacaatatgttaaatggcatgaactcatttttgcgcaacactgttagcgcaatttaaatctcccaaagacacaaaaaagtcaattttactgcaggatcccacaaaaatacataaccaggaatcataaattacaacatatatatccacatntaaagaaaaaattcaccatttgttgggaaaaaataatggctcaaatgatttacggagcctgaaatgtgggctaaaattttataacatgataacaataagatttgaaactgctgactctgaaaaatgcataaaaatatactaacctgccaagcactgaattatatataccagtttcaactaaaaaacaacattttttctttcaaatatttcaagcattacaatactgaggaaacgttagtcatatgaatccaataacgcccattaagttaagctaacgaacattttagatagaccaaattacaaataaaaaaagtataaaaagcattttggaagatattttacatagtatttttcagttcctcatctattgagaaatctactataattcaggttggtttatctaatttagggtaatacaacagatttgaacttatagcacgctttcctgtttttactcaaccttttatagtacagggttcttaaaaaattttgaaaagaatgtccacaaaaagtttgagttataccctttacctttagtaacaaaaggttagtagaaagcaagacatttaagtattaccaagaatctaacttatctccataatttctttcatatattcatttgcttacttgtgacacagagtcccactaactcagaagcattctctaagctggcctctcactggctctgagactgttgctgccccacagttctaattcccatttggaaaggaaagaggaagtacaggagaaggagggtcatgcagggccacatccagtcaaaactctcacaaaaccttgagaaacagggcaagatatcccttccaggcaagatatcctttacagaagaaaagttctggagaacttaaggcagctctagaagggaagggagcaagggttaaggcggccctcacagcacagcctgagaacaaattacaatgcactcatccatgaacagaggtcacggcaatacagatcctcttcaacgcgcagcaca

SEQ ID NO: 431650 - DNA, 3366 bp, Homo Sapiens
  misc_feature (3286)..(3322): n is a, c, g, or t
atattcttaaatctcaaatgagatttatatatttttattaattaacacacttgttttgaatacatactatgtgccaggctctctgctagctactagaaaacaaattacaaaaacaccattcacttttctttaaccgtaacttattgaatgctataattggaagtgagtgtaaaagtgagtgtatatgaaataaaccatatgggcagaataaaaatgattataagccagtatattgtaagtgtattcaaaaaatctgcttaacacttccttgttaaccgaacttatttttaaactgacatgtttgctgacggttgatattaccttttgaactgaaccaccctgattttaggcctctaggtggtatattgtgcaaacatttgaaatgacggtgccaaaccatctttgggagatttgtaccctagtttctataggtgccgtcccagccaggaagtaactatgtgtcactggcgcagtgtgtggtgtggccacgccccctgagaaaggggcctgggatttaggcacctgcggtatgccagtggcactcccaggcataacactggtgtgacgactctctgggaatctcacacatcactctttcctagcaccgaagagaatcaggtttaatagtggtccattatctcactgccacagacacacaactgccattaacgctaaaaagtgacacagagttggaaccatgcttgagagaagacagcccttgatcatcagttatttacaagtcactccttgcagtgataggtttctgctttacttctaatagcttttgtttagtgaaattgacatttgcacttctttgtctaagttaacggctagactagacagttaagatgacagaaactggggtttctggagaacattctagtgacaaaaggcaaagcaggacagaaaaaccaattattttgacaagtaagtgagtcagtaacaaaaatagtttaaaaatgtgttgggttagctacaatatatccagaaatgaaagattgttcgtctagtaagctttgaatacagagtgatctgatgtcctcacccttttattctgcaaccatgttgtaccttgtctgtcatgcattttaattcactcaaatatcattacacttgcagtaaagattatcaacaaatgtcacgagaagtgagagagcagagattgggacagggcctttacaccttctagagtgaacacagcttaataatcaacaaaaagccaggactcaactagctaagttcttgttatcaaaaatatgtctcatctaatgtttaaatatagataaccaaagttacaaacaaaatccccagttttgccaataaattttttaaaaataagcaaagtggtaaaggggttaaaagcttagatcgtaaaactggtgtggtgcatttgagggtgtgcactgaaaacagatcaaccgtttgatacccgaatacagatctcctttttgtttgtgatttttgtatgatgataactttgcctctgcctctacaagattttacgagtctgcttgtcttgaatctcaataggtgcccttatgatttgggaaggatttctgaatattcttttcaaatttctgggctttagtcccacatttccttgggcattgaggaggaagaaataccatgaaatgaagttagaattgaaacttgggtatttgtgatataaatggaaggaagtaactgatgagcagtgacacttgctaatgctcttttgccaaggtagtctatgcataagggattgctcataaaagaacttgttatattttctctcttgaatgtgcatgactgtgacatactgtattttgccattgttaaactcagtttaatagaataaatattcaaataagaattgactataccaatattccagtagagaaggaataagctgatagacgtgtctttgagttctgtcaggcaagacttaaccaaatcttgacacacggttaaaattggttgttaatgaaaggtaactagataaaataggtatatatttgcttaagaacattttaaaaatatttctttttttagatttggaattcacaataggtttcttccgttcctcctttgtaaattatgaaatatttattgtttagactgagtaatatgacatgaaacaacaaacctgcacatttctaatttataacaaatctgtttccttaatgggtggaaggaaatctgaggacagttctaaggagtcttgtctgctttcagtgcgatcttctagtcatactgaagacaatacctctccagattggtctttccccttcttctcctctccccggtcaacgtcaatcacatgcaccactccaggttttagaatcaggtcatccgtctctacctgactcctgttgtcctccacctccatgtagcttccttttgtttgctgggcagctttgctgaaggcttctttaaaacgacgtttgaattcaacatctggacagaagacatactcataaaggccaccagcgaggacagctcctatgatgggcccaacccaatatatccaatggttttcccaatttcccatgataactgcaggtccaaaggatcgggcgggattcatgctggcaccagtataattgattgcaaataaatgtccaattgcaacagaaaatccaattgctaaagctattgagccagtgacatcagtccgtttggaatcacagctggcaaagatagtaaacaccaattgaaatgtgattatcaactcaaccaggagaccatgaccagcggtaagatttccatgaaccatggtgactcccaggcctcccaccacactgggaggtgtgaccagatagaggattcctgctccaatgatggcccccaggcactgggctgcgatgtagaagacagacttggcgatgctgatcttcctggtgcacaccatggccacagtcactgcagggttgatgtggccaccgctgatatggccaaagcactgcaccatggttgcaatgctgagtccaaagcaaagggagatgagaaccatgtcgaccggtaaaggcttttctgttccaccccagttgatggtggatcccaggctgaggagaacaaaaataagcatggccagaaattccgctgtgactgctttccagaaagcttgagtccagacccctttgaaagccaccatgatgttctctctggtacacaaaggtccacacttaccccaccgccttgctgtgggtctgtcactcatgccttccccagccagagtgcagctctcattgcctgccctgcagctccctctctcgacgaattcgagctcggccgatttggcctgatnnnnnnnnnnnnnnnnnnnnnnnnnnnnnnnnnnnnncgccgccaccgcgtagagcgcgagttcccctatatgagtctata

SEQ ID NO: 431651 - DNA, 2469 bp, Homo Sapiens
  misc_feature (2347)..(2403): n is a, c, g, or t
agaactactatgaacctcgataatagggcgaaaccttggacggcgttatcggcgggtggcggcgatactcgtatttcatacatatacgaagtatggatcagcaatcggcgagctcaatcgtcagagcggagggggccgcgagctcccggctgtgcagacggcgcgcgcggcgggagggcgcggaccagcgtccccagcccggccccgggcggaaggcgagcggagcgcggcgcgcgggcagcagacggcagacggtgcccggcgcccacgggggctgcccctgatggggcctggcaatgactgagcaggcccagccccagaggacaaggaagagaaggcatattgaggagggcaagaagtgacgcccggtgtagaatgactgccctgggagggtggttccttgggccctggcagggttgctgacccttaccctgcaaaacacaaagagcaggactccagactcttcttgtgaatggtcccctgccctgcagctccaccatgaggcttctcgtggccccactcttgctagcttgggtggctggtgccactgccgctgtgcccgtggtaccctggcatgttccctgcccccctcagtgtgcctgccagatccggccctggtatacgccccgctcgtcctaccgcgaggctaccactgtggactgcaatgacctattcctgacggcagtccccccggcactccccgcaggcacacagaccctgctcctgcagagcaacagcattgtccgtgtggaccagagtgagctgggctacctggccaatctcacagagctggacctgtcccagaacagcttttcggatgcccgagactgtgatttccatgccctgccccagctgctgagcctgcacctagaggagaaccagctgacccggctggaggaccacagctttgcagggctggccagcctacaggaactctatctcaaccacaaccagctctaccgcatcgacccccagggccttttctggcctcagcaacttgctgcggctgcacctcaactccaacctcctgagggccattgacagccgctggtttgaaatgctgcccaacttggagatactcatgattggcggcaacaaggtaagatgccatcctggacatgaacttccggcccctggccaacctgcgtagcctggtgctagcaggcatgaacctgcgggagatctccgactatgccctggaggggctgcaaagcctggagagcctctccttctatgacaaccagctggcccgggtgcccaggcgggcactggaacaggtgcccgggctcaagttcctagacctcaacaagaacccgctccagcgggtagggccgggggactttgccaacatgctgcaccttaaggagctgggactgaacaacatggaggagctggtctccatcgacaagtttgccctggtgaacctccccgagctgaccaagctggacatcaccaataacccacggctgtccttcatccacccccgcgccttccaccacctgccccagatggagaccctcatgctcaacaacaacgctctcagtgccttgcaccagcagacggtggagtccctgcccaacctgcaggaggtaggtctccacggcaaccccatccgctgtgactgtgtcatccgctgggccaatgccacgggcacccgtgtccgcttcatcgagccgcaatccaccctgtgtgcggagcctccggacctccagcgcctcccggtccgtgaggtgcccttccgggagatgacggaccactgtttgcccctcatctccccacgaagcttccccccaagcctccaggtagccagtggagagagcatggtgctgcattgccgggcactggccgaacccgaacccgagatctacctgggtcactccagctgggcttcgactgacacctgcccatgcaggcaggaggtaccgggtgtaccccgaggggaccctggcagctgccgcagggtgacaccacaaaaggcaaggcttatacacctggcgtggcccagaacctggtggggggctgaaactaacgacggttaatgtgggccggggggccgggctcttccttcaagccaggcagggaaccaaggatagggggcttgcaaccccccgttgcaaggaaaaccctcccccaaatcacaagaatggctatccacggggtttatcccattgtcaaaatttatgcccccctcaatcctaaccgttgggtcaggggcctctcctccccctcctgtacccacagagcggctccaccattatttgccccgcgtctctcaccgaggaggcagacccgcgcaaacagccgcccattaacccctgcaacccgcctattccgcaaccatcgtgcnnnnnnnnnnnnnnnnnnnnnnnnnnnnnnnnnnnnnnnnnnnnnnnnnnnnnnnnnatttgccgccctggcgccacacctaaccttttccctgagaatgcagggcgcaccccccgtcgcgtt

SEQ ID NO: 431652 - DNA, 1276 bp, Homo Sapiens
  misc_feature (19)..(19): n is a, c, g, or t
  misc_feature (27)..(27): n is a, c, g, or t
  misc_feature (33)..(33): n is a, c, g, or t
  misc_feature (45)..(45): n is a, c, g, or t
  misc_feature (1090)..(1131): n is a, c, g, or t
  misc_feature (1134)..(1134): n is a, c, g, or t
  misc_feature (1227)..(1229): n is a, c, g, or t
  misc_feature (1231)..(1231): n is a, c, g, or t
  misc_feature (1236)..(1236): n is a, c, g, or t
  misc_feature (1238)..(1238): n is a, c, g, or t
ggttaaccgtcaaaaattntgcccaanttgatnccaagtaacacnggccccggcttggtaagggaatcctggaattggtccctgaggggcccttacggtaaatgcaagccggagcttgttttccgtagctggggacaatcttcttgtccttgctgttcatgtactcctggaaccaggttttaaacctcttccagctggtgctgggctcgattaactacctgtgaagcggcaagcaggtctccacagcgcatgcagtagtaaattagcgcccacacaggatggccttccacctctccatcctgtagtccaggcaagggagctggcagtttaatgttcaggaaacttcgaaccaattggtaagtcccaggcaccccgcccagctgggcctgatgcaaatttccaaagacagtcacaagggtgtaattcttataactctgctcaaggtacgccaaggcctgcctgacaaactccatgcgcacttccacgctgctgcggttcttcagggcatccgttgccggtgtcaacaacacgtctgtcatttgttttaccatggtccacatgtcggaaatgctcttatcatccagctctgcgacggaagcacaaaggtccaccaggttaggctgcaggtgtccatttacaattttctcattatagatataaatttgccgcgcataggccatctcgatgttatccagagagcttcgaccagggggtcccacatcactgatgtagcttggctcgctttcttgagtaaagtcaagggcgtcttctcctgatgccagcagtgtgtgcagaattcgctgtttcacttgctcccactcaaccaacattgactcccgatggtactcctcagccatgccgaaggtcctcttccgggactcttcgatggcagacagcagggcattgtccttctcattcttcaggaagccctgcagctcttaaatttaaggagttacagaacggtcgatgctgtcgatcactgcagctcttccaaaccttcttatatgagatgagctctgtcggaaccagtgctcaagtttttcccaccccaaactgcctgaattgagggatgggggtggggagaaggacnnnnnnnnnnnnnnnnnnnnnnnnnnnnnnnnnnnnnnnnnncancccctctggaagtgctgatgtgactgaagcactaaagagtcaaattaaacaatgagattgcagggtccctttaaaaagggtgcactgcagccnnngnagcanancatcaccattcgttgtgcgctacacaaattcagagaag

SEQ ID NO: 431653 - DNA, 578 bp, Homo Sapiens
  misc_feature (19)..(19): n is a, c, g, or t
  misc_feature (24)..(24): n is a, c, g, or t
  misc_feature (32)..(32): n is a, c, g, or t
  misc_feature (45)..(45): n is a, c, g, or t
  misc_feature (63)..(63): n is a, c, g, or t
ccaggggtccacataactntgtanttgctcgntttcttgagaaantcaaggcgtcttctcctntgcaacagtgtgtgagaattcgctttttcacttgctcccactcaaccaacattgactcccgatggtactcctcagccatgccgaaggtcctcttccgggactcttcgatggcagacagcagggcattgtccttctcattcttcaggaagccctgaatgtcagtgtccttcacaggctcaagaggctcaaaggtggtggctgcactcagactctccaatcgctgggagatgtgggatatgtcaagtccccgagacccgaggagaactgacgccttgacatctgccgtctcctgggacgtgcgtgttagggtacgggacaccaggcgctctcccgcctgctggatctcctgtaagttccgttccacatggggaagctctgagatgccctcagtctcaagcagcaagctgttcagcttgctgaaggagctcaccaaacccctcagtatccattggagatgcagatccttgtgctacaagcctctccgccgctcaggtgccggcttgaggacgcggccg

SEQ ID NO: 431654 - DNA, 1750 bp, Homo Sapiens
agatcactccagcctgggtgacagactgagactccgtctcagaaacaaaaccaaaaaactacagaatagagtaggggtggagggaagtcatgcatttccagtggctagcactttgcgctctgccttggcgagtatctgcaaacttcctgaccatcaagtgcgcttgcagccatcctggatgtcaactggccacagaccctttgctatggggagtccctggctacatccattagcaagtcagaggtttccttttgtccccatgatgccactctccagcaagctcaaactgctgtcacaattgttttactgtacctaaaaaggaacagataaggcaagagccacagtcaatgttttctgtgaaatggtcttggcaaatagcattaagaaatcttgttgaatttcaaagaaaaggtctgattagaggtgcctgttggaagcagaagcctcaagaaatgaggaaggaaagttaatttgagggtctgtttcatttctgatacagaataatcacaaaaacaagtatatgccgctggctgtagctccccttaggatttggataaccagctggatttccagatggccactcccgttctctatgcttccctcctccgggctatatcctgcagagcttcagcgggaagttctccgtgatgaggtggtcagggtgaagcagcaccacgatgttaacctcaaattccactttgaagttggtggtctccagtgtagggcaggtgaacagcctagggaagaccatgtagatggggacagagaggcccctgcacacatccccgtcggcgatctgaatgttctgaatctccgtggcgtcgcgggcatagccttctgcacacccgcacgtctccacgcgcaccagctgcagctccacgcttctgatggcggcttccgagctctccaccaccagctctcccgttagtggctgcgtgatgacacagtttgttgagttgagatgtcctcgaaggagaaatttgggaagcaaagctctctctttgacgttctgtaaggtttcaggtgtaatcgtgaagtccacgggactgggagtaaacttccccttctgaggagcggagtgaacgataaattcacaggtctttgtcaagtccttggccaacagagaccgcttcatgtcacagcgcagtgtatactgaatgttgacaaacacgccatgatacgtctcatacagaactttgttacccttcaagtgcagaggaaattcaaaagggatttctgttttgccgctgggaaatttccccggcttcaccatttctatggtgctgttgataatctggataggcttaacagaattataaaaagcttcaaacacacccacacttttggcactgagctggaggtttacagttccttccatggtcaaagacactccctggtgttggactgaatccttactcgatatgaccaccacgccagagagcacttccccggcgtgataaactttattcgctcttttaatcttgatgtccagggcggtccccatctccaattctccgcagcaagccgccactgtccggctgcgcgtgaccccagggaaacaaggggcgcactccccgcttcgttctgggccccgcccctgttccctctctgccggcagtggctcacgtgacctcgcagcggcgtcgcacacactccctagctccgaggggcgaatgccccacgccttcctccttccggcacaagagccggccttagtgcgggccgaagcgctgtcacggttcaccccgcc

SEQ ID NO: 431655 - DNA, 1153 bp, Homo Sapiens
  misc_feature (536)..(565): n is a, c, g, or t
ccactggaggtgggctttattactgtcgccatgatgtgaaaagaggaagacagcacccattcccacgcctcctagacactgtgcaccaacaactgtctgctggggttagcacggagctgtccccacccccagggtcagagcacccacaggtgccgagctggcccaggagacccccacgctgctgacgctgtttgccttgtgtctgcacaggcctttactaaactctcccacacaattagtgtcttaaatatatgtacacgtatatattttgtcccaactgtgtcagttataaaatgaaaactgaccacttctccttacgttatcttcacagtagctgtgcagaagacaacaaatccagtgttgatagctcagggcaggctgcccaccccagcaaagggaagttcttcccccatgggacccactgggggacccagtgccgcggccacatctccgtgcttgggtggcagtgtagctgcccatctacggggtgccgggttggcttgggccttgccatgtgccagacgcatgcatacatnnnnnnnnnnnnnnnnnnnnnnnnnnnnnncccacccgattatggagcacatcacaccgatcccttgcagaggtgggggctggggcccaggacaatcagaagcagggcccctcccccagctgtctcgagaccaaagccatccagggcctctgagccctggggcatcacccagaagcgctgggctcccaggctggcacccagcacaccaggagcccagggcgcgtgggagatgcgctagggacggtctttcactccagaccaggctgactaataaatatgacatccagtgttgtcaggagatgagaaaataacgtagacttggctggactctgttgtcaaggccattcccagtcacagaggaaacatcccaggtggtctccaggcgtccaggtggctctgcacctgccgacccccagaggccagtgaggttctggcagcaagatgtgctccattaggcaggcaaagcagggcgacctgaaccaacgacatgtgtgggggttgtggtctccacattctattcatgttcgaggagcgtcagtctcccaaggctgcggatggaggcccctagggtgctgcgactcccactcctcacctgcccctaaccctgccgccatggcc

SEQ ID NO: 431656 - DNA, 210 bp, Homo Sapiens
cacttgaggctgtccttaacccctccatctcccttacctcccatgttaacttaactcataatctttatatggccttttcttttcacctctattgccataaccttgtttgaatccttgcagtctttcatctttactactgctacattctctctttcaacagctagtccccactgcctctcaccctccacagtctccagctttatattcctt

SEQ ID NO: 431657 - DNA, 418 bp, Homo Sapiens
cagatttaaattgagtctggttttggtgtggcttatgcattatgtggattacttgtgtgccattcattgctgtgtatttgggtatggcattttgacaacgaaagtaacagaaaaccatatgccacagaatagaacattaaaagcaatgaagataatcggctttctggaaggttggagtactggtgctttaccaaacaaagttactttctctccttttctcttttttgaatgattgagtaaacattttctgtgtgtagcctggctggctttgaaagactgaaactagtatcttaaaatgcacagcctgtacaacttgatctcgaaccactgtgtcaggatgaagaccactgaatgcacgacacatacaaagtatacactgtttttattagacagtacaaatcattgtgcatctataagg

SEQ ID NO: 431658 - DNA, 509 bp, Homo Sapiens
  misc_feature (44)..(156): n is a, c, g, or t
  misc_feature (262)..(262): n is a, c, g, or t
  misc_feature (393)..(409): n is a, c, g, or t
cgagtggctgagatgacaggcatgcactaccacacccagataannnnnnnnnnnnnnnnnnnnnnnnnnnnnnnnnnnnnnnnnnnnnnnnnnnnnnnnnnnnnnnnnnnnnnnnnnnnnnnnnnnnnnnnnnnnnnnnnnnnnnnnnnnnnnnnnatgagccactgcacctggcctacaaattttaaatgagttgaaatgttatccatattttaaaaattattttacactagaaagcacagaatagcaacttcattccagngagaaagaaaaacatatttttgagtcctgaagaattaagacaccatcagagatgaaacaggaacattacaaggtcttgttcaaatagcactgcccccataaattcttccccaattttctgtgcccgcaacnnnnnnnnnnnnnnnnnttagggggaaataattgttctttcctatgaacatcagcctcatgttagtagaatatttttatggcccatatcacaccttatgatcctgtttttctacccc

SEQ ID NO: 431659 - DNA, 799 bp, Homo Sapiens
ctggtaaatgttggaaagaaacctttaaggaacacccaagaaaatgctacgatatattacagttcgagttttctaggcactggtgatgacattatctgtaagctctggcatttggaccaactgtgatactatagggtagtgttgagaataacgtctatatgttatctactgtttacataacgagaaggactgaaaatcctgcaacgtaacacttaaatggcttttgaggcatttcagcttctgccacccctctctctccatgctgcagttggtatttaaaggctttggaaatatgtgtgtagactttagacagttcccaggtaaatctttctagtgataggaaaaagatattctccaaaagctcattatctgaatattgttgggtaataagctaggagagggattttctacttaagtcttaaaaccaaagcctttatgatctgcatgtagtacatcaccttatactataattctgtcaccacttgcttatcatatttatagacccagcaatgcgcagaacacaaattctgactgccattgaacatggcctcctagtccggacagcagccaaattaacattctaatcttctgccagcccttagtcaccttctctgggctgtcagtggctgctgtttcctggtcctgccaagtcacaaaccagcccctgacatgctttcccttcctttgacctttcttctttgggttttagccagagctgggctatttgaggaagttaaacttctgctcctctcatttgagatgaggggtggaagagcaagtagctcttccagacacttag

SEQ ID NO: 431660 - DNA, 1826 bp, Homo Sapiens
  misc_feature (131)..(140): n is a, c, g, or t
  misc_feature (164)..(178): n is a, c, g, or t
  misc_feature (197)..(197): n is a, c, g, or t
  misc_feature (257)..(257): n is a, c, g, or t
  misc_feature (259)..(259): n is a, c, g, or t
  misc_feature (1511)..(1522): n is a, c, g, or t
  misc_feature (1721)..(1739): n is a, c, g, or t
ggtgggggagaaaattctccaaggcccctttgttttctttgagcccagggaatttttctctatggggaaacacagggttttggggccacgtgttgtccattttccgttaacggggggcccgcggggggccnnnnnnnnnntggttttttggaaagattttttcnnnnnnnnnnnnnnncggccacaacattaaaaanaattggagtcgtgaattgtggggggtgagatctgtctgggtgggggttgtgtcgtgttgngngaggttcaatttttgggtttattaaaacaaaactacattttctgtgtttcttgcaatacactaacaagcataaaaatcaatcagcatttccaagtatgttttgctcacaaaatcgcagttatttcacagtaccttatagtaattcttttcacgagtcttaacatttctttgtacaacaggcaaatagtttaataccttccatcaagacatttcagagctctagacgtttagaaataaggtcaagaatctctttcaaatgcaatcattagtttgtattaaactaaaatgccagacggcaagtctcaggtttctaaaatagttttaaaaaacaggtttacagcccatagtaagtcttagaaacctcaacgataggtcctgtcatgtctaaacactacaactatctgtggataaaaatctgcattcaaacgtacaatactttcttctagatctgaattaaaaccttatttaccccaattcatccatgtattctgatacgttcagtgaaaaagccaggatcattggggctgttctctctatcaaaggaaagagctccgatcacctacattataattttctgtgcttattttctgcaggggaggaaatacacatctattcaacgccacactggacgttacaaaatgcatgcatattctgccccagtgctatctgttcattaccgttttgtctccttaaagaactatctaacatagtgtttcccaaaatgttctccacaggacattagtgagaggttcataagtatcccaaaggagaaaaaggtcttggtttctaaatagtttgggcaattttggtttagacagtttttcatttaccggatgccaagcccttactgcgttaaagtgcattgtaagtttccaggtgcaaacttggtttcccagcaacaccatttctataaaacactgatgaacatctcacagagcactcatattacatggagtgctatgggaaatgcttttccccatccaggttactggcaattccacaatttgggcttacattcattgtaatcccagaaatattttctccatttaccctcatgactttgtgaaatttaacagattccagaaggaagactcgaagccgtctcagttaacagttctacacatttcccactagtttttgcctttgtttttcatgcattttcagagtgcacaacttccctcctctcttctgaatcacttaggacattctcattttcaaaaacagactgcagtttcatgttgtttaatattgnnnnnnnnnnnnaacttgaccacagtcttcccctgaagaagggcatgcatttcatgttacagaaatgcgatagagtaaactgtaataaattatttacaagcacctagtttgtttaaccttatgtggaagccatcactgttggaaaacaatgagaatgtatcttttagcaaaacggtgctatctggaagcttcattgtgaagatgctttcgnnnnnnnnnnnnnnnnnnncagtcatgaggcactgaagaatgagttgtgctgaaattaactcaaaggtcagcttgtctggatgagcataactttggttgagatttt

SEQ ID NO: 431661 - DNA, 2357 bp, Homo Sapiens
  misc_feature (199)..(217): n is a, c, g, or t
  misc_feature (1615)..(1615): n is a, c, g, or t
aacttgaccacagtcttcccctgaagaagggcatgcatttcatgttacagaaatgcgatagagtaaactgtaataaattatttacaagcacctagtttgtttaaccttatgtggaagccatcactgttggaaaacaatgagaatgtatcttttagcaaaacggtgctatctggaagcttcattgtgaagatgctttcgnnnnnnnnnnnnnnnnnnncagtcatgaggcactgaagaatgagttgtgctgaaattaactcaaaggtcagcttgtctggatgagcataactttggttgagatttttctcccttaaaaaagattttcaaagcaccagttaattacaaaaagcatgcatatttatcctcacagtgagttaagtggtgagagagctagcaaatcatacattgcattccccaaagcatctgaacgtacttctagaaaacaaaccaaccaaaagggaaaataatgcaagagaagccgtattttctttgcttaggttggcaaagcagcagctctttgcagcaatgacaggcagggcagagtgtcgactgggaagcgagtcccaatcttgaataatggtgagcttgagtaatccttaatttacaatttaaaggatgaaaaaaagagactagtgaaatgtttgcttccccagataaggaacacccaagactccctgggtatcctccaaatgtagccaagaaaagtgttcttctaccctagtcagtaaaatggaatgctaaaacatgatatctcattcaacatcagagctactacaactgacaatgacttcatggtatacatcaattcctataaagaaaaaatatattttaaatgcagaacttgagagggatcacaacagcatagcattattgctatgagtttcaaacatggtatttcatacaatgtgaaatatcaatcagcatccctccctctcccaaaacacacattactcatgagatactatcagtgtttaaaatccaagcttatggaagtacaaacttaattctcagtacttttatactaaattcaaagaatctatgtaacactcatctggaaaaattcttaattccataatatcttggagataagcaacagtaaactgttagaaaacgttttaacattacatgatatttaaaaaatcaccataattaccataataaagcagtaattatgctccctgctcacaaaaggcacctaccaattatgaacagaccatttttcataattatttaccactatgtggcataagggtttaggcatataacccataaaaatttgttaaaagtcatggtttttcctcaaagctaaaaatccataaatgcctctaaccattaccagtcagtagggccaccacatgcatatactggacaggttgtgcacggcacaactcgagtgggtaccagtcacctggactggggtgcagtacacaatctgtgtgcagtacagaaagccctcatcagctgtggccagagaactgtattctaacagtctgtcagctcaagctaatcaagttaggaaaactgctatttggttggaggattttccaagaaacagctgtacctgtgagaggcaggtattacctgaggggtggacgaggtacagacataaaacagngaagggttctaaatatatttgctggtcatttgaaactcaatggcacttgtttatatgagcaaaagccttcaacaccagttttctggccaagtttccctagaattttgccagcccaaattaacttcctgatgttaactatttgattacaatatctcagttccccgacctaaactaatattgtctgttttcacatagctcttaaaaacatttctaaatctgacagcaaaggacagcacagtgatacctgggtgtgatatatatcagtccactcaatttataaagcactttgggataaaaggtgctcccattaaaaatgtagctactattgacagataaaactgaaaaagagtgaatggatgactcaattatttttaaaggaagcattaaccactaaccagataatataccaacaaattacccagcagcactaagtataccatgtaagattcagttccagaacacagctacatttctgtgtccatcacagtaattagtccttaaaagttgtacttaaaatgtcaatctttaataaactcaaaaataatttattgagatttcatcttgtagtctacggattatgagttgcgaatagaggctgaggtccccccaagtgttatctgcaggctgctgtgttgatgcagagctgggaagatcacagatccatggagggagaaggcacttgtcttccaggagatcacttcgggacagggcaggcctgaccctgcgacggcaccttcaaccc

SEQ ID NO: 431662 - DNA, 562 bp, Homo Sapiens
caatgtgtattctgcatgcttttttccataccatttcatccacttcatgaactcgcgatccatggtctccgcatacttggccgagatgtctgctttctcgacgccatagtgatgtttgcagttggtggcagcagcaacctggagcacgacctggcacacaccgctccccaagtccacaaacaggtcgtcgtcggtcatcttgatctcatcaatcatctgggccaccaggtcgaaggaggtctccccgtacacctcgggggagaagggctcgtagttgttgagcttctcggggtcggtcaccgagtggttgtagacctgctacaggatatggcgcaggagtccagtggacggccgcgtgttcagcttcatgggctgcgtggtgcccttccacagctggtggatgctgtcgatggcacggtagtacttgtcgcagagcctctgcatgctctcgaagcttttggtgtcatagtcaattaaaacgtaattctccatagcgagcttgagatccgggatttcttcacagacccatctgaaacacagcagcagaaacgatcaggaaggg

SEQ ID NO: 431663 - DNA, 367 bp, Homo Sapiens
  misc_feature (24)..(24): n is a, c, g, or t
ggtagacccgtgcttgtttccttnctctttttgtttggcttctaacgcgttgggactgagtcgccgccgtgagctccccgaagactgcacaaactaccgcgggctcctccgccccgtctgcgattcggaagccggcctgggggtcgcgtcgggagccctggcgctgcagctccgcaccttagcagcccgggtactcatccagatccacgccggggacacacacacagagtaactaaaagtgcggcgattctgcacatcgccgattgttttggggtaacaaaaagacccgagttgcctgccgaccgaggaccccctggagccgggctcggagcagacgaggtatccggcggcgcccatttgggggctt

SEQ ID NO: 431664 - DNA, 1362 bp, Homo Sapiens
  misc_feature (360)..(382): n is a, c, g, or t
  misc_feature (829)..(829): n is a, c, g, or t
  misc_feature (990)..(1044): n is a, c, g, or t
  misc_feature (1107)..(1266): n is a, c, g, or t
ttttttgttgtctatcaaatgcttttgattatttattagacagccgcactgtaccaaatccacttggctgttggtggtttgagaaacttgttacatgctttcattgaagtaataagatcctgctcttcataatcgcagactctcaacagctggtgagtgggagaacctcatgtaaacaacctcctctgagttcattcttcagggctcatgagaccagtcaccttttcttcagctgaaaaaacacatcaagaaaatgaatgcttctgtcctaggggaacatgacacaatgagaagtaatcaataactagaaatagtgtgggatcgtctttaaagaaaacattatgaaatgtaagaaggctnnnnnnnnnnnnnnnnnnnnnnngattaacaaatttaaaaagatatctgggagatccccttatcaactgtgtattcatgcacaagttatttaaaatctgtgcctacatttcccaatgtataaaattgagataattatggtttccttaaggttgttgtaaggattaaatgcattggtaaatacaaagtacttaaaacactgtctgacacatatcaaggaaggctagattagtgtttgccactgttggcattagtattgttctttgacaaagaggtttttagaacagttgaactgaatcaaacaaacccatggtgagtcaaattcaaagctgatttgcaaaacttgattctatggtactctcaaagacaaaacctgaaatgcaaatgaaactttgaatttttcactcctgtaattccgttagcagtgggtcagatcagaccaggataatgggtgttctaatagtttggttcnattcaagaaatagtgactaagtaaatgaactgaagataagaagtataacatgattcttttaaatggatattcttattcctaggaaatacacattgaagtatttaggactaaagggcaatgacgtatatacattattctcaagtgatccaaaagtattaggnnnnnnnnnnnnnnnnnnnnnnnnnnnnnnnnnnnnnnnnnnnnnnnnnnnnnnntatggacctaatattctctgtatatatctatatcaatctgtctagatacttatctagacaacnnnnnnnnnnnnnnnnnnnnnnnnnnnnnnnnnnnnnnnnnnnnnnnnnnnnnnnnnnnnnnnnnnnnnnnnnnnnnnnnnnnnnnnnnnnnnnnnnnnnnnnnnnnnnnnnnnnnnnnnnnnnnnnnnnnnnnnnnnnnnnnnnnnnnnnnnnnnnnnnatggatgagcatatggggtaaaatacatgtttaacagaggtgtaacaatatgtagcatggtgttcctcgagccgaattcgtgaagcccggaagatc

SEQ ID NO: 431665 - DNA, 1025 bp, Homo Sapiens
tttttctatcaaatgcttttgattatttattagacagccgcactgtaccaaatccacttggctgttggtggtttgagaaacttgttacatgctttcattgaagtaataagatcctgctcttcataatcgcagactctcaacagctggtgagtgggagaacctcatgtaaacaacctcctctgagttcattcttcagggctcatgagaccagtcaccttttcttcagcatcggctttagctctctggaatcagcgacgcctcccttaccagcttctttcattgctttcctactgttttccacaaactccatcagcactttatccatatagaattctctgccagggctcccatcattgtattttgtatcaatggcaaaacacaagaataatacatccactaccatttcataaatagacaggaagcaatgagcgactaggaaagcaaagaggcagacgatgatcagaggcagcacccatactgtgtagtcctgctggtagttgagcagcataatcccagctaaacctgtgctgcagactatcagcaccttgccaaggaataacataaaatctcctactgtgttgatggtagccactcgcaaagcattctccaccagaatgacaaaggcatcctttgctgaggtgcagaagttggtgctgttgatagctgtggctgtgtatgcattctgatttaaataatttaggcacttttcaagacaccaaaggcaacaaatgcaagatttcagcacacatcgtggcacgagcattttcctttcctttgagctgactgtgaatatacatcaggatcttcgcggaatttgactactgtgataatgaccgatcttttgccccgtacctagtggtaacgaatacgcgacttctgctgcacatggtgtcctggccctccttttcctgctacatcttgttccccgcctgcccgctctctgctgctatatcctgccatcggccccggtcccctgtttcggcccttgtcccagcttcctcgagcccttgcaaagtttcccccac

SEQ ID NO: 431666 - DNA, 795 bp, Homo Sapiens
  misc_feature (513)..(580): n is a, c, g, or t
tggagctgacacaaaggtgaagtgagagcttatttaatgggaaatattttccccatttgtgggcccccaatttgttatgtttcttaaaagtaaaaaggccatggcttttttgagttgggggaaaacctgattggaggtatttccttattattcggaaagcatatgcctagtctggacccgctaggatttatgcatcagtaaaaataagatcttgattttatacagacatcagggaaattacccctgaataaactttagacataattaggtacaataattttacctatttttaaataaagttaaattctcctctaagttattaaaaatgttaatcagatatgaattttaacatttccattaagacaattacagttgaaaacattaaatgacggaagttgccttgtaaaagccacccgtatgaaaggagtacatgtttgacaaaaataagcataaaaaaggtattaaatccctgttccttttctctgattttggctgatttatgtgtgtgtgtgnnnnnnnnnnnnnnnnnnnnnnnnnnnnnnnnnnnnnnnnnnnnnnnnnnnnnnnnnnnnnnnnnnnngttatgtgtatatattgttttggaatgtcaatgggtttccataaccgtcggctaggttcaagcagaacttgctcccgaagccatcggctttagctctctggaatcagcgacgcctcccttaccagcttctttcattgctttcctactgttttccacaaactccatcagcactttatccatatagaattctctgccagggctcccatcattgtacc

SEQ ID NO: 431667 - DNA, 890 bp, Homo Sapiens
  misc_feature (127)..(135): n is a, c, g, or t
gggaattagatcggtattatggaaatgcatacaagtaatgtcactagggcttaataagcagccgtttgctaatgtgcttcctttcaaagggttggacctttaaattgctgcaaaaggtaaattgtannnnnnnnnaagtattggtgttctttactctagctaggctaaaatttgctaaatgccttggtttcttttaaaagttcatgtaatatttctgatttttcagaatatttgcaataagagtctggattttaaaaaacacgtgcatacacacaattaagagctcatgtcttagcaagatctgggaaaccaacattgcgagagtagctattttgaaagaataattctccagaagttaacatctaatatctagtatcaccaaacagtatcgctgttctcttttattcatttgaaatgaatataattatataactaacaattgtccaaatagatgagagagcaaatcatgtgagaaaattcagaataccatctgtttcatagccgcacagattttggactttcacaaacattgggaactaaatttagaattggcaaaagtctagaagatgggtatcaaaacagaagacattccaggagctagcaattttaagaggtgtccctccaaagtgacctgatggaagtcctgaacttggaaattaggttctactcacttggacatccctgcatcatggactgttgctgctccctgttccatatgctcgcaatctcagctatttggaagctaccaggaatgctttctaattatcatttgcaactagaactgtaatcagaaagaaattttgtatttttgtataacttgattgtgtgccattttatataacaggtcctgttttacaaataaattttgttttactaacattgtgtttaga

SEQ ID NO: 431668 - DNA, 1191 bp, Homo Sapiens
  misc_feature (29)..(29): n is a, c, g, or t
  misc_feature (46)..(46): n is a, c, g, or t
  misc_feature (59)..(59): n is a, c, g, or t
  misc_feature (80)..(80): n is a, c, g, or t
  misc_feature (99)..(99): n is a, c, g, or t
  misc_feature (139)..(384): n is a, c, g, or t
  misc_feature (392)..(392): n is a, c, g, or t
  misc_feature (402)..(414): n is a, c, g, or t
  misc_feature (443)..(443): n is a, c, g, or t
  misc_feature (510)..(511): n is a, c, g, or t
cctttcccccctaaaactgggggttgggnctaactgcttccaaccnaaataaccaactnagaaatttgaaattgctgaanccccaaggaaaagaaaaancaaaaacaggcccaaggtggacccaggcacatggctcatnnnnnnnnnnnnnnnnnnnnnnnnnnnnnnnnnnnnnnnnnnnnnnnnnnnnnnnnnnnnnnnnnnnnnnnnnnnnnnnnnnnnnnnnnnnnnnnnnnnnnnnnnnnnnnnnnnnnnnnnnnnnnnnnnnnnnnnnnnnnnnnnnnnnnnnnnnnnnnnnnnnnnnnnnnnnnnnnnnnnnnnnnnnnnnnnnnnnnnnnnnnnnnnnnnnnnnnnnnnnnnnnnnnnnnnnnnnnnnnnnnnnnnggatgtanctccgtctcnnnnnnnnnnnnngaacaggccaagataggagggagagaaangctgtgacgccccccattagcctggtgatccctattttgtctcccacattaggcactctcccccagnncatgtacatagagttgttttctcctttatgcaagcaaggcctgaccccaaagtcctttagccctagtttctgtatcccctgtctcaggggctccaacacccacctccctcctcctgaggccccctagacttgatccacagggcatgctgacaagcaggctgctcggctgggcctcagaagcctttctccaagagccaggctttaagctcctggtcaaagtagcccttgatccgtagggtacctgtcacctcattgacctgggtgacaggtgtcttccccagcagcgggctcagaaaatcttccacgtctttctgcagggcccagatgtccccttccactttccggatcacagtcatctgccggttgccatgcgtgatgtccttgtagacggggatgttgtgcatccgagagcgtcgtacaaagtaaggcaggttgggtggggggtctctgggaggctgccagccactaggggtaggataatgttcatgctttgggggatctgggatcctggtagccggtaacaggcgctccacaaactgatattcatccacagactccacaaacctggggtaatctggagggccctgggtctggctctgctacgccagccttctgtgcgcgcaactgtctggtcccgccccgtcctgcgcgagctgcctgcccaggcaggttcgccggtg

SEQ ID NO: 431669 - DNA, 1163 bp, Homo Sapiens
  misc_feature (50)..(50): n is a, c, g, or t
  misc_feature (241)..(254): n is a, c, g, or t
caaggccttggggcccaaccagtggggagaaaaccccccattcttttttntttaaaaaattccaaaaaatttagccaggcgctgtgggtggttgggccgccctgtaattccccagcttactcaagaagggttgaaggcaggaagaatcccttgattcccaagagggtggaaagttgcagtgagccaaagatcattgccactgcattccaacctggggcaacagagtgagactcccgtctcnnnnnnnnnnnnnngaacaggccaagataggagggagagaaagctgctgacgccccccattagcctggtgatccctatttggtctcccacattaggcactctcccccagcatgtacatagagttgttttctcctttatgcaagcaaggcctgaccccaaagtcctttagccctagtttctgtatcccctgtctcaggggctccaacacccacctccctcctcctgaggccccctagacttgatccacagggcatgctgacaagcaggctgctcggctgggcctcagaagcctttctccaagagccaggctttaagctcctggtcaaagtagcccttgatccgtagggtacctgtcacctcattgacctgggtgacaggtgtcttccccagcagcgggctcagaaaatcttccacgtctttctgcagggcccagatgtccccttccactttccggatcacagtcatctgccggttgccatgcgtgatgtccttgtagacggggatgttgtgcatccgagagcgtcgtacaaagtaaggcaggttgggtggggggtctctgggaggctgccagccactaggggtaggataatgttcatgctttgggggatctgggatcctggtagccggtaacaggcgctccacaaactgatattcatccacagactccacaaacctggggtaatctggagggccctgggtctggctcaacagccgtagcccgcagccccgctggacaccggttctccatccccgcagcgtagcccggaacatggtagctgccatctttacctgctacgccagccttctgtgcgcgcaactgtctggtcccgccccgtcctgcgcgagctgcctgcccaggcaggttcgccggtgccgcacgcgtgggtcgacgatatcccgaaacttccggaccgtaccagcct

SEQ ID NO: 431670 - DNA, 445 bp, Homo Sapiens
cctcctgaggccccctagacttgatccacagggcatgctgacaagcaggctgctcggctgggcctcagaagcctttctccaagagccaggctttaagctcctggtcaaagtagcccttgatccgtagggtacctgtcacctcattgacctgggtgacaggtgtcttccccagcagcgggctcagaaaatcttccacgtctttctgcagggcccagatgtccccttccactttccggatcacagtcatttgccggttgccatgcgtgatgtccttgtagacggggatgttgtgcatccgagagcgtcgtacaaagtaaggcaggttgggtggggggtcaacagccgtagcccgcagccccgctggacaccggttctccatccccgcagcgtagcccggaacatggtagctgccatctttacctgctacgccagccttctgtgcgcg

SEQ ID NO: 431671 - DNA, 802 bp, Homo Sapiens
ggctggagataaaaggagaaatatattttgatccctggatcaaagttacttacagtctaatggagtagagagtgatataaaaatgtaatacaatgttttaagtgctttaatactactatgagttctttgcattatacctaaggaacacagggaaagagagaagctattgggagtgtgtgtgtgcatatatacatgcacatttgggtctgagtttggggttaagaagatagtggtgttcaagtaatacttgttagagaaagcaaagcttatgctttttaatgaatgtgcagaactagtgctccaggtagacaagagattttaaaaactgccacgtatagagattaagagagcatgcaagttcagcaaatgtcgagtacttccgtgtcgtagggtagtggagggcatttttatgagaggtaggaaatgagtctaaagatgtagccaggaggagattttaagaacctgcttacaagaacctgctgtactgaaaactttgtgttttatctcctagatcaaaaagaactcttaaaatatcttaaacaggctgcaacgtgtgtttgctgcattatttaagattattcgattttgtcatagcaagcaacaaaaagttggatggaacttatagaatggattaaagcgtagggagcaaattgataatctctgagagctgtgagacatagagaaaataaaaagagcacgtgtgtgctgaacaaagataaaaggatgaaataagagagttacttccccatagaaagggatgaaagtacagagtaaaccttaaatatttatgaagctagacctt

SEQ ID NO: 431672 - DNA, 2137 bp, Homo Sapiens
  misc_feature (145)..(211): n is a, c, g, or t
  misc_feature (341)..(387): n is a, c, g, or t
  misc_feature (402)..(437): n is a, c, g, or t
  misc_feature (439)..(439): n is a, c, g, or t
  misc_feature (623)..(665): n is a, c, g, or t
gaagtcaatagggggtgtatatacggttgaggtggggtgctcgtgagaaagagaagaggtgtttgcggagttagacgagatccagacggcgcaaaaggagtggaagaaaacgtggttaaaccgaggggaacggggtcacaattannnnnnnnnnnnnnnnnnnnnnnnnnnnnnnnnnnnnnnnnnnnnnnnnnnnnnnnnnnnnnnnnnngtgaaaactgcggtacggggggtccaatgggaggtggttgacacgtatgaaatctggtagaatggggggggaaagatcgaacgttaaattgggaggcgggttaggagaaaagttgtacagggacaatttnnnnnnnnnnnnnnnnnnnnnnnnnnnnnnnnnnnnnnnnnnnnnnncggatgaattgaatnnnnnnnnnnnnnnnnnnnnnnnnnnnnnnnnnnnntngtatatcatagaacctttattatttatcctctaaattcttagaaacttacataacgcccgtgctctagttatgacaccatttatagacatttaaaatgcatcttcatttataaatattttacatttggtccatagaacagataattttactaaataatactgtattttttaaaacaggctctgnnnnnnnnnnnnnnnnnnnnnnnnnnnnnnnnnnnnnnnnnnngagatagatttacttggtgttctgagaataaatccttattgcaaaaaagcatatatgataatacaatatctttttccccccgggcaaatactaaaaaaaagttacacatattcacagttctcacagtaattgtacaacacttaatattgtgctctataaggtaggtttggatggaaatcagttaggggatttcttgccaaacatctcacttagaattgcttacaaacattaaatacactgcatttgtcttagagagacttggtctcagtttcacattgaagaacaaagagaaagctggaagtcttcctgcccttagtctaaaggaattcacacacagatggggaagtgggaccatgagacacagtgatgggttcctgtcattctaaaccttatcatttaacaatacgtatgcattttgatcatggattcaccagctggcactggggatgccttggcaatgagactattttacagatgacctcaggaaaaggcttcagatttcctacacaatatcaaatgagaccttacgtgccacatgtgaggatgaatgtgcatgttgtgcgttcatatgtgtacacatatgttgtgttctctacaataatgtgcttaatattctgagggtaatatcttattgcaagaactggtatgctggtcacttttggatgagaatgacaagagattaaaaaccccacagtcacagttatttaccatagttattaaggattagtcataaaacacggcttgtgagctaactagctaaggagctacagggcacaatgtacgatttgctacgtgggaacccatcttcctggcaaatgagacacgcggagctactggagcttgcaagaaactgtctttgcttgaagtgccgccgccaccacggagcccaattccagaaaggaacaaatcatacttcccaatgaagcagtctgaatctcggaagcacattgcggggggttctctggattaacactagctcctcagttagtgggctgggtgggttttagtggcagtgaggagactcccgctgagaaatttcaaggaaggtgaggcggcagcagcttggggtgggtggcagcgagggtggtagtttaaggagaccgaaagattactgtggatccgtcttgactgtcggacagatccttcaccttgatttcccctacaactattttgtactctgtgaaattgggcagcttaagagaaactggagctccggtataggaagtttccccagtaggacctgaggcccctggaatggcgataaaaagagatcaattgtgcttgtggcagttttccagcaagcagggcttgtctggacagattgcactgggccaggtccaatcagaatggcccggcgaggaggggacagggacatcgggctgcagaatgctcattcattccggcggcggggacaaggacgctccacagactgcaggagaagcggccctgggaatatcgactgacgccccggg

SEQ ID NO: 431673 - DNA, 603 bp, Homo Sapiens
  misc_feature (463)..(463): n is a, c, g, or t
  misc_feature (542)..(542): n is a, c, g, or t
  misc_feature (551)..(551): n is a, c, g, or t
  misc_feature (555)..(555): n is a, c, g, or t
  misc_feature (560)..(560): n is a, c, g, or t
  misc_feature (569)..(569): n is a, c, g, or t
tttttttgttgtatatcatagaacctttattatttatcctctaaattcttagaaacttacataacgcccgtgctctagttatgacaccatttatagacatttaaaatgcatcttcatttataaatattttacatttggtccatagaacagataattttactaaataatactgtattttttaaaacaggctctgtatatactttgaatatgtatatattacatatattttttatatagagatagatttacttggtgttctgagaataaatccttattgcaaaaaagcatatatgataatacaatatctttttccccccggggcaaatactaaaaaaaagttacacatattcacagttcctcacagtaattgtacaacacttaatattgtggctctataaggtagggtttgggtgggaaatcagttaggggatttccttggccaaacatcctcacttagaattgncttacaaacattaaatacactgcatttgtccttagagagacttggtcctcagtttcacattgaagaacaaagagaaagnctggaagtncttncctgncccttagtnctaaaggaattccacacacagatggggaagtggg

SEQ ID NO: 431674 - DNA, 744 bp, Homo Sapiens
tgcccagagagaacattacagcatggatgaatgccattggtttgatcatcactgccctaccagtgagttaataattgtgatttgtacttagtgatgaaatacagccagctgttccatgtcagcaaaaagaaaaagatgcatataggatgcccttgtacgggacgtcatgcaaattaatgaagtattttatgtttttaaagttttttcatattattactgctttaaaaatctacagtgactagtttttgcttttctgtattagatctaaatatatctatgtgacttacgggtctctgcattttctggtaccaccttacctatccaactttagtttttacataatagcttgatctactcttggccacttaacgtgttgtatatctacagcctttgttccttcagatagtgcttaagacatgttttaggtacttctgaatgtgagggaataagacatttttcttattccagaagcttcttctttccatcaccttctctaacgcctattcattctttgctagcttagagcctcctttctcagtgaatgaagccttccctgacttttccagctcacatgaagactcctttctctgacctccacacatatttttttaaagtttattatttttaaataagtaataaagctatagatttattgtttgataaattaattgatttactgcatagtgtatatcaggtacctaaatgagctggacagatacatgtatggagccccttaactcacag

SEQ ID NO: 431675 - DNA, 1176 bp, Homo Sapiens
cggattctaatgccattttatatccatctttggcatcaaatgcttctaatcataatagtcatgtggtggatatgctaaggaaaaatgaaggtcctcacacttcagcaaatgtaggtgttctaagtagttgcctggatgtaagaacagtaattcctgaaacatctgtatccagtactgtttccagcacacaaactatggtaacccagtagaccattaaaactgaatcatccagtacaaatggggcagttgttaaagatgaaacttcactaacaacattcagtaccaaatctgaagttgatgaaacatatgcactgcctgcaacgaagatcagccgtgtagagacacatgctacagcaacgccgttttctaaagagactccttcaaatccagtggccacagtgaaagcggtagaacgacaatggtgtgatgtgggaatttttaaaaataatacagctttggtgagccagttttatttgctgccaaaagggaagcaaagcatctcaaaggtaggaaatgcagatgtacctgactacagcttgcttaagaaacaagatcttgttccaggcacaggatacagattcagggttgctgcaatcaatggttgcgggataggtcctttcagcaaaatcagcgaatttaaaacttgtattcctggttttcctggagctccctctgcagtcacaatttcccacaatgctgaaggcatccaccctttcctgggaacctccaacctcatcttctggaaatattctgcaatattcaccctacttggctatccgcatccgccccatcccagataattccagttcaacttgcggttcatgaggacccattgcggtccctaacacttcccgcttcaccacctgcccgcgcaaacttgcaaaacggaccctaattgatttcttcctcccacgccttggccccttcggtttcagggcaacttttccaaacaatgcaaccccgcatttggcccccccttaccccaagtttgcgggggctttccagggccacctcctcagtaaagccctcctttcaccactgtacttggcttttttcttactggaaccccctttgttggctcgccgccttcatctatttctgcaccactgggccccgcaaacatattcctcctttgtaacaaaaggattctcccttggcccgttactctccccaaac

SEQ ID NO: 431676 - DNA, 1110 bp, Homo Sapiens
  misc_feature (1045)..(1045): n is a, c, g, or t
ttttacagagagtctttgcttcttttcttttatttggatctataattcagcaaatacattttaagaacaatttacaaactcaagttcataactgctggaaatacagccagagaatactcttttaaatgacaaatcttcataaccagttactaataaataatcatcatcacaatagcttcagtaaaaaaaccaattcaatttaaaggtgctttcttattgttaccttgaagccaccgaacttgtgtagctggtccatatcccttttcattctttgctgatatcctgaacacaatggcaggcctggatgtataatcaatatgtgcatttgcaagttgcccagcagttactatacatgatgtcttaagaccacaataaatcctcatgaacacaagttgacttggattatcttgtatctgtgctgtgcggatagccaagtaggctgaatattccaagatatttccagaaggtgaggttggaggttcccaggaaaggtggataccttcaacattctttgagatgctttgcttcccttttggcagcaaataaaactggctcaccaaagctgtattatttttaaaaattcccacatcacaccattgtcgttctcccgctttcactgtggccactggatttgaaggagtctctttagaaaacggcgttgctgtagcatgtgtctctacacggctgatcttcgttgcaggcagtgcatatgtttcatcaacttcagatttggtactgaatgttgttagtgaagtttcatctttaacaactgccccatttgtactggatgattcagttttaatggtctgctgggttaccatagtttgtgtgctggaaacagtactggatacagatgtttcaggaattactgttcttacatccaggcaactacttagaacacctacatttgctgaagtgtgaggaccttcatttttccttagcatatccaccacatgactattatgattagaagcatttgatgccaaagatggatataaaatggcattagaatccgtcagtgctttaaagtctggtttgtttttcnctctgaagtttcttttgtggctggctgttcagtttttgtgctgtttattgtatcattgatatttg

SEQ ID NO: 431677 - DNA, 608 bp, Homo Sapiens
  misc_feature (321)..(329): n is a, c, g, or t
  misc_feature (335)..(381): n is a, c, g, or t
  misc_feature (438)..(546): n is a, c, g, or t
gcccagttattcaaagttttattcaaagagcaaagatttgacaatgcatagaattaacattggtttgtgggccaccttctgggccagcaccaaagactgaaaaaatattttgccccctaaaagttgttattgagtcttgtcaaatcacattgctctgtcagaaggtaagacaaatcagtgtggactgagagcaaggtcagcaccgtgaacagccattgcggttcctttaacccactgggaattcatgcagtgaagaagcaacacaccatgaggcaaatggctcaaacccaaagaccagaggttcaggggatacatatatannnnnnnnnaatctnnnnnnnnnnnnnnnnnnnnnnnnnnnnnnnnnnnnnnnnnnnnnnngggctcatgctgtcctacctcagacttccaagtagctgggttttctttgggctaatnnnnnnnnnnnnnnnnnnnnnnnnnnnnnnnnnnnnnnnnnnnnnnnnnnnnnnnnnnnnnnnnnnnnnnnnnnnnnnnnnnnnnnnnnnnnnnnnnnnnnnnnnnnnnatgagccatgtgcccagtctagaagatctttgacttcaaagaacagataatctagagacctt

SEQ ID NO: 431678 - DNA, 2044 bp, Homo Sapiens
  misc_feature (273)..(273): n is a, c, g, or t
gtggcaaaaaaagggttatcggaaatttttccggggggaggccttcccccacaaccaagtttgtggaccaaaataaattttgggggcgggttccaaaccccccccattttttgaaaagttcacgttggtctttggaggacaatttaacaatcttgtttttgcagtttttttcactctcttgggttcctttgagccccgtttctctctgtgaccatagccagggcagcaatgcaggagaaggcagaaatgtcgatgttcatattctgcaagtgngaggagaattcaacaatggaatcaatccattccccaaagccacgaacgcattgcaacctgtatgctaatcgaaggacaaacagttctaagaaagctgattcaaaaagcaggtcttggtcggctttgggcaggtctgcgaagcccagggatcttctctgcccagccccggatgatctccatggagccagtcaggagatcatagaattgctggatatgctgggtgtcatctccactcatttgatagtcagggttcgcctggaacctggaatagtccaggctggtcatagccgggttggagtcgacatgggccctgacgagggcactgatcagactcaccgggggcgaagggggagagggctcctgtgggctcttcggtttcgagggcaaacgacctctccggccttttaaactgtctgtgcgaaccacttctttgaccatcccaacagccaggcacttctgaaatcggcagtactgacagcgattccggcgacgcttgtccactgggcagtttttatttgctaaacacacgtattttgcatttttttgcactgtgcgcttaaagaagcctttgcagccctcacaggtgcgcacgccgtagtgttggcaggccgcgttttccccacacacagcgcacagccccttgttggaggggggagccccccgcgacgggcggtgagggcacctgcgtgtcgagcagctgagacgcgtggccgatctgcaggcccgggaagcccatggacgcgggcttgcgaatggggttgggcacagcgaaggtctgcccgtccaccacgtggtggctgccggcgggctccgggttcatggggacgtgcaggggcccgtcgaagcgcatctggcaactagacaccggggtgccagggggcgattgcttaaaggagaagagggagaggcgggagactggcgttttcctctgctcgatcatgtgcgtagtggccacgtagttctggtggaagttgtggagagatcccgggtcgtcccacatggggctgtgctgcacctggaagcccggggtggtgggcgtcgggggcgaggagggcttgtagtaaaccgacccggagtgcggcatcatctcctcagactgggggggcaggtggctgtgttgctggtagttgtgcatctgaatgtcttctaccttaatggaggactgctgtccggacaggggcatttggtacaagcaaggtggcttgacgtcgtagcctgtgctgtagttgtccataaaggtactgaagctggggagagaagtggtggcagtgatttcagtgttggtgaggtccatgctaaacttgacaaactctggagttaagaaatcggagctgtattctcccgaagagtggtaactgtagctctgagaagcggggctggctccttgaggcgaggacccatactgcgcctgaacacaaggcatggcttcagccgagttacaggcgttttcgaggaaattaaaggtggacagtgtcgtaattcaatgaaggacaaagtttccaagatttttagaaaagcaatggggagtccagcctgtccaatctcctccttaggagttctccgcgtctctcttcattcattcaactctgccgaagtgcagttccctctgggagcccgggcgccggggtcgggtaggggtgggagagctgggcgaagggaacccggacacctcacggagggagggagcagggacaggcggccggctggacaggcaaaagggaccgcggagccgtgcgcgagccgccgggcggactggccctggccgccaatc

SEQ ID NO: 431679 - DNA, 1271 bp, Homo Sapiens
  misc_feature (773)..(799): n is a, c, g, or t
  misc_feature (1013)..(1051): n is a, c, g, or t
tgactatcaaatgagtggagatgacacccagcatatccagcaattctatgatctcctgactggctccatggagatcatccggggctgggcagagaagatccctggcttcgcagacctgcccaaagccgaccaagacctgctttttgaatcagctttcttagaactgtttgtccttcgattagcatacaggtccaacccagtggagggtaaactcatcttttgcaatggggtggtcttgcacaggttgcaatgcgttcgtggctttggggaatggattgattccattgttgaattctcctccaacttgcagaatatgaacatcgacatttctgccttctcctgcattgctgccctggctatggtcacagagagacacgggctcaaggaacccaagagagtggaagaactgcaaaacaagattgtaaattgtctcaaagaccacgtgactttcaacaatggggggttgaaccgccccaattatttgtccaaactgttggggaagctcccagaacttcgtaccctttgcacacaggggctacagcgcattttctacctgaaattggaagacttggtgccaccgccagcaataattgacaaacttttcctggacactttacctttctaagacctcctcccaagcacttcaaaggaactggaatgataatggaaactgtcaagagggggcaagtcacatgggcagagatagccgtgtgagcagtctcagctcaagctgccccccatttctgtaaccctcctagcccccttgatccctnnnnnnnnnnnnnnnnnnnnnnnnnnntgttgctatttcctaacctgcaggcagaacctgaaagggcattttggctccggggcatcctggatttagaacatggactacacacaatacagtggtataaactttttattctcagtttaaaaatcagtttgttgttcagaagaaagattgctataaggtataatgggaaatgtttggccatgcttggttgttgcagttcagacaaatgtaaccnnnnnnnnnnnnnnnnnnnnnnnnnnnnnnnnnnnnnnntcttaaggggacccacaagtattgccctttaacaagacttcaaagttttctgctgtaaagaaagctgtaatatatagtaaaactaaatgttgcgtgggtggcatgagttgaagaaggcaaaggcttgtaaatttacccaatgcagtttggctttttaaattattttgtgcctatttatgaataaatattacaaattctaaaagataagtgtgtttgcaaa

SEQ ID NO: 431680 - DNA, 533 bp, Homo Sapiens
  misc_feature (226)..(268): n is a, c, g, or t
  misc_feature (500)..(500): n is a, c, g, or t
ttttttttgcaaacacacttatcttttagaatttgtaatatttattcataaataggcacaaaataatttaaaaagccaaactgcattgggtaaatttacaagcctttgccttcttcaactcatgccacccacgcaacatttagttttactatatattacagctttctttacagcagaaaactttgaagtcttgttaaagggcaatacttgtgggtccccttaagannnnnnnnnnnnnnnnnnnnnnnnnnnnnnnnnnnnnnnnnnntacatttgtctgaactgcaacaaccaagcatggccaaacatttcccattatacattatagcaatctttcttctgaacaacaaactgatttttaaactgaggattaaaaagtttataccactgtattgtgtgtagtccatgttctaaatccgggatgccccggaggccaaaatgccctttcaggttctgcctgcaggttagggattaggcacagtttttgtttgtttgtttgntttctttagggatcaagggggctaggagggtta

SEQ ID NO: 431681 - DNA, 660 bp, Homo Sapiens
catttgtgaggatgatatgcaatacatcggaccgccgattataacttctgcctcggtggtaactgtcacttctctggcttctacttcgactccgactcctgctatagtagctatcgtaggtgtaggacctgctggatcgactgtggggatcatatgagctgctcctggatctgctcctgctggacgtcctgtgacttttgtaactccggtaggaactgctccggcttctggttcggcctctgctgtaccatcctctgctccgacttctagagtagcttcttgatcgataagatgatgtggaacttctcgatcgacttcttgagtgactataggagacagaccttgttctgtgtcttgatttggtttcagatttacttcgagatctacttggactcctggactggctatcatcatcccgactaggcgtctgctcatcacttgaactctcctgatttcttggtctacggtttaagcgtgctgtctttcttacttcatcaaagagagacccaggccgaactttatttttgcttttaatttctattctcaagccttgtggtttcatttcaggcacagtggtcaacaccttaacttccacagcactggatgtggcagcattaggtgctgccaggttccccacaccttgcaggggcttccatttcc

SEQ ID NO: 431682 - DNA, 2015 bp, Homo Sapiens
cagcagccgctcgccacgaggggactcaagggactcagagcggaaaaggcccctgggcagggtgggcagggccatcccactgccaccatcctcttcggcctggaaatgggtcatctcagcaaacagcccgaccttctctcgcagcagctccaccagtgcccggtccttctgctgcaactccatcttaattcgccgcaggtaagcctcatcctctgtctcaatcagggggaagtcctccctggatgggcatgtgcgcacgctctgctgaatgacccggatccaggtgctccggtcatcccgggatgctgtgtgcacctcgtacatctcaggtggggctgcgctgatcagaaacatccctttctcctggttggcaatgtctcgtacgattagattctgcagcgataccactgaaggcttgtccagggtaggaaagatgtacttctggtccttttcctggagaaacaccagtacatctgtcatcagcagcactagcacatctttgaagcgccccgtcgctgtcttccagagcaggcagccatcgtggatgagtttgcgcctcagaagttcctctcggccaaaggggcccttgccaggcactggggtttgggcccgagggtccatgcggttgtagatctcctgcagacgggcccctttctccagctgataaataccctcgtccacattggacagcagctccttcactagccccagtgctgtggtcaggtcctggcgctcctcctcgatcccgtgggaatgctgcaggatgcggctgatgagtaacgggtacttggtgatgcgctgagtcaccagcaggatgcactcctgtaccccgtgccgcttgagcacggcggggcgggtcactttccggatgaattgctggaagcgtttgtctcgggcgtacagctccttatagagctttaaggccttgctgtggcggctgcagaactccgagtaggtcttacacatctgctccgcactaggacctgagaactggctgatgagcagatcacccaagcgatggatgacaaagttccgggtgctgccagggcacagggcctggcgtcggcgttctaatagctggctgaggaagcgtgtatggatgtcactgagctcgtccacgcaggggaacagggccctggaccactcctggctccagagtgtagctcttccagcatccccgtgcggaagaggcgggtcatgatcgttcagtgtcctcacatggtgcagctctgtctggattagctcatagatgacatcttgctgcttcatcacctcctttttagtgctgctgcaggaagctgctgtccacagcaagactccaagagtcagctgcaaagtccttctcatccatctcaaagtcactcatcagctcactgtagattacctctgcttcgtcaatgagggattccacggatagggttcggttccgcatgttgagggagtctgtggactgtgagaggatccggcgcagccccaggggagactcatcattgaaatgtccagcaatgttggtggtagaaacactcttggctaaagacaaggaggagcggccacggcgggagcccaggagggactgccggaagctgtcggaggggtagatggccgagcttggccgctcccggatggttgtcttacttcgaagagaaacggactgcaaggcggtgttgttcttcagcagggccgctttctgttgcttctgcttgaccttggtacagttggcgagggtgtctttacagcggttgtggatagtcacattgcaggttgggcagatgagggcttccttggctgtgatgctcttgttacaggcatagcacatggtcatgcctgaaactgaaatggtggtgaagaggtgcccattggtatagcgggcatccttggcttccttcatcttctccttttcccgggtcggagcaactttcttgtcgagtcggcctaaagcatctcggtcaccgccggcttggaggcgaccaagcccaggtccgctccgctccctcccgggatcccagcaccccgct

SEQ ID NO: 431683 - DNA, 2129 bp, Homo Sapiens
ctggaccggtccggaattcccgggataacggtgatggcgggcaagcggtccggctggagccgggcggctctcctccagctccttctcggcgtgaacctggtggtgatgccgcccacccgggcccggagtctgcgcttcgttaccttgctgtaccgccatggagaccgttcaccagtgaagacatatcccaaggacccctatcaggaagaagaatggccccaggggtttggtcagttaaccaaggaggggatgctacagcactgggaactgggccaggccctgcggcagcgctatcacggcttcctaaacacctcttatcaccggcaagaggtttatgtgcgaagcacagactttgaccggactctcatgagtgctgaggccaacctggctggactcttccctcccaacgggatgcagcgcttcaacccgaacatctcgtggcagcctattcctgtgcacactgtgcccatcactgaggacaggctgctgaagttcccgttgggcccatgtccccgttatgagcagctgcagaacgagacccggcagacaccagagtatcagaatgagagttctcggaatgcacaatttctggacatggtggccaacgagacagggcttacagacctgacactggagaccgtctggaatgtctatgacacactcttctgtgagcaaacgcacgggctgcgcctgccgccctgggcctcaccccaaaccatgcagcgtctcagccggctaaaggacttcagcttccgcttcctcttcggaatctaccagcaggcggagaaggcccggcttcaggggggagtcctgctggctcagataaggaagaacctgaccctaatggcgaccacctcccagctccccaagctgctggtttactctgcgcacgacactaccctggttgccctgcaaatggcactggatgtctacaatggtgaacaagccccctacgcctcctgccacatatttgaactgtaccaggaagattctgggaatttctcagtggagatgtactttcggaacgagagtgacaaggccccctggccgctcagcctgcctggctgccctcaccgctgcccactggcaggacttccttcgcctcacagagcccgtcgtgccccaaggattggcagcaggagtggccagctggcaagccggtcctgcagacacagaggtgattgtggccttggctgtatgtggctccatcctcttcctcctcatagtgctgctcctcaccgtcctcttccggatgcaggcccagcctcctggctaccgccacgtcgcagatggggaggaccacgcctgacaaccactcagcccccttccctccacctcctaggggaggtgggctgggccctcggctcctgactgttgctgctccccagcccaatggacaggagatcctggggttgggcctccctctgaatgaccccagccagatgagcgagtggggctcaagcgtggcccatggtgcctgtcactcagcattcccatgcctgatgtttaccaagtgctgtgttggacactggctttctccaaacaggatttgcctcctccacgctccctacacacctgagatgtaaactggcagtcagtgttcactcaggacctaggattagaaaatggcagagttggtgctggatccaccttgcacttctatcaagccctgttctttttcctccagcctgaagtcttcggcaaatagctcagagggacacggtcttgcctctcagtgcttattttagtgggaaaaacagctaataccaggggtacaaacattggctcccaaggaactggatcacccaacagccagccagccacatttccctgtgtctggctagagccaccattagactcagacagaatgcttcaggaatcgttgtcaccccttcaactggagcaggacggaaggttgtctgtacttgggagggagtggggagtggtgggaagggagttgcttgtcacacgaatcaggaaactgctctccctcagctgggctggggtctccagggacctgagctacatgcaggttgtgagctggaaaagaaagttctagactgtggcccagaatagggctggggcagctcccagagaatgaatagtgctgtttcctattggactgataa

SEQ ID NO: 431684 - DNA, 1146 bp, Homo Sapiens
gggtccggaattcccgggatcggtgatggcgggcaagcggtccggctggagccgggcggctctcctccagctccttctcggcgtgaacctggtggtgatgccgcccacccaggcccggagtctgcgcttcgttaccttgctgtaccgccatggagaccgttcaccagtgaagacatatcccaaggacccctatcaggaagaagaatggccccaggggtttggtcagttaaccaaggaggggatgctacagcactgggaactgggccaggccctgcggcagcgctatcacggcttcctaaacacctcttatcaccggcaagaggtttatgtgcgaagcacagactttgaccggactctcatgagtgctgaggccaacctggctggactcttccctcccaacgggatgcagcgcttcaacccgaacatctcgtggcagcctattcctgtgcacactgtgcccatcactgaggacaggctgctgaagttcccgttgggcccatgtccccgttatgagcagctgcagaacgagacccggcagacaccagagtatcagaatgagagttctcggaatgcacaatttctggacatggtggccaacgagacagggcttacagacctgacactggagaccgtctggaatgtctatgacacactcttctgtgagcaaacgcacggggctgcgcctggcgcccctgggcctcaccccaaaccatgcagcggtctcagcccggctaaagggacttcagctttccggcttcctcttcgggaatctaaccagcaaggcgggagaaaggccccggctttcagggggggagtccctgcctggctccggataaggaaggaaccctggacccctaatgggggaccaccctccccagctcccccagggtggcggggtttactctggggcacgaacataacccctggttggccctggaaaatgggcactgggaggtcctcacaaggggggaaaaaacccccctacgccctccttggccaatattttggaatggtaccccgggaagatttctggggaatttcctcccaggggaaaaagaacctttccgggaacccaaaatggacaaagggccccccgggggcgcgtttaaacctgggcgtggggtgggccctctaacccggtgtgcc

SEQ ID NO: 431685 - DNA, 1032 bp, Homo Sapiens
  misc_feature (51)..(51): n is a, c, g, or t
  misc_feature (80)..(80): n is a, c, g, or t
  misc_feature (85)..(85): n is a, c, g, or t
  misc_feature (87)..(87): n is a, c, g, or t
  misc_feature (410)..(436): n is a, c, g, or t
  misc_feature (452)..(452): n is a, c, g, or t
  misc_feature (968)..(968): n is a, c, g, or t
cggtatgcaagcttaaatccttggacccttttgtttcaaagaaaagttttnaggctccatgcagggtttggccatggttnaggtnantggtgctccgttttataaaaaagccaaatttttttccaatccaaacggttcacctgtttcctttcctcaagctataccagtgtaataccagttaccctgtggatccatttaatatgttatccccactaattaattttcgtatattatttccaatatttggaaagctctttatagccatttggtatttcctattacccacctcctattttaaatatttatcagtctaaacttgtgcagtgtagtaaacatgcaagttgttatgattgagctgtattaccataagtagaattttaagtaaactggtgaatttgggccatagatgnnnnnnnnnnnnnnnnnnnnnnnnnnnacaagctaactgttanaggtatacatttatttatctgttgtacagatttgattatgattttaatgtttgaaagattgcacttgtttgcttttactatatgtggggtaaaatatattttctgttcacagtatatgaaaatatggagtaatttaaacagtaaataaacattctgtggatgcttatttttgtattggcaaagtatcaattaaactatatgtgttctttttcaaaaatgctggatccattcatgattggttcaaatatctaattatttcctcaacttaaatttgctttttaaattgcttaatatgtaggggtaggttaccaaatgatagttggataaggaatcatttagttatcagagcttcagagggtcatctgctttccaccaaggaagtttaagcattatggttcattagtgattttgcttgaagattttaaaaatgtacttattatttatttagcactggatttatgtgctactgatatacctccattaatagaggaatatttcttggacagagatgtgtgntctttccttttctctcttcttttgcccttacttaatcttttgacatttcccagatagacaattg

SEQ ID NO: 431686 - DNA, 551 bp, Homo Sapiens
agaagccagacggagctcggagatgtggagggcagacgcaggcgcattttggaaaagggactggcggtgggaggcgcagagggaaaaaggaacgacacaatcgggcttcctagccgctggcggacccgatggggcgtcctgcgagggttcggcgagggttctgccaggatagtagcattgcgcccaaggagtgagaggcacccggggctactggagccagaccctcaacccgccctagtgggaggcgaagaacaacgaaagccttcgtattcccatttctcttaatggctaaatgacatttaaaggttttcatatggttatttgccatctgcatatcttcagtgaagtgtctgtttatgtcttctgactattttctaattggatttttaaaaataattgatttttgagttatttacatattctagatactggttgtatgccagatatatggcttgtaaatattttctcctaggtaaaccttttcagtatcgttacagggtctttcacaaagcaaaagttttaaatttatggagtctaattcatcaacattt

SEQ ID NO: 431687 - DNA, 1030 bp, Homo Sapiens
tttgcatgcaggaaaagctttattaagtcaataagctgttacacttttacaaactgctatgcagaatactcaaacatttttaaatgacatgagaaactactaacatctttagtgagagtcactttcacaattttctctgctcccacacccctaatgatcaacatattcatttttttatttagtatatgtcacgcagcaatttatcaaaagcttttgttgtgaaaacacttttcttaaatacacaattaaaagatatgattaagcacttacaggatgtgaaatatttaaaggtaatacacaataatcgggttaccaaaaggacgccttccaatttttctttctattcattttgatgttttgttcttttcaaaacattttctctcattacattcattactaaaggccttactttaaatacatcatgctacattttgttctcctcttcaaatgccaatgttttaacaatttgaattctctggcctgggaaaaagaaaagttatccacttacaaggtatacgtattgacaacatggatgttacagtccaaacaacagcacaaaatcaaccatgtacatgtaacatagtgaaatgagtccacgttttctacacgctacaggataggaagagctggctcttaaggcccagggctcacatgattatgcacttgtcaagcagcttctcagtggtgttgggccatcttgggatttcttcctcgggcttcctggaggccggtggtgggcttttcttgtattcagcagcatgtggaaacagctcctgcactttcccatcggtctgggtgaattttcctgagagccgatccctcctcgacgtgcccttcttcgggcccccgggtgtctccctttttgccccggccatgggactttgcggtgtcttgtttgcaacagatgaggcagctccgtccttttgacgtgacgaaggtgcgtaaggcggcggtcccctttgtttggacgtgccggttttgggcgggcccgtccgcacattttgtgaggttttcttctcttctttcttgg

SEQ ID NO: 431688 - DNA, 3288 bp, Homo Sapiens
cagctttcctgtgctcaccaaccaggcactgcaggaatttgggcagaagcactcaccaggcagtgcccaggaccaaacatctccccccccacttcccagaacataccctcagaacctgggtcttttacctaactatgggggctacgtgccagggtataagttccagtttggccacacatttggccatctcacccatgatgctctgggcctcagcaccttccagaagcagctcttggcttaggccactggacatcaagttcccttcccttttcatcctatcccagccatccttttggaagggagagaggtgggtgggagggtgggagggtgggggacacaaagagaaaatggtttggaggctgagcaccttttttattaataggtataataaataaataaataaatacataaacagacgcctgggctcctcctccctcttctgatgaccaggcactggccacagcctatttacagctggggggcttagggatctggccccaatactgttacccatcctcatctccacctggcctagggaaccctgtagatggctttctgggccacccgcctccagggggacttgcttgtcttcacccatggaagggttggcccagacgggccaggggaatcctggcagcccagtgctgtgtcccatccctctcctgggtggaggtctggacaaggtcactgggacagttaagggggcgtaattaatactgagcacagggagcaggtgccagcacagggatacgtggccccagctctcagtctactctgcagccaagccaatggcttgggaagggctctcgggctctgagtctgggggttatgagggtccctgaggccaccagcatgcacagggcctcagttttggctgcttccaggggttggacttggagttggggtcaatgtcacgtaggccaggggcaccaggccagagtcggggccacggctgcagcgcagccagtctcctccagctcgccccagcactcgtaggatgtctcctttgtggaagctcagctgtccagggccggtggccaggtggtggcacagtgcctgcacctcacacggaggactggagggcagggctggggagtgtggctcctgcaggctctccttgggctctggctcccggcgggaacccactgtctgcgccactagttggaacatggacttgtccaggctcagccagtccgaggggagcctatttgtgggccgggcctcccgctgggcttttcgggagccaaagaggtgtccccacttgatgcctccaggtgaaggctctgaggccctttcctcattttctgctggcgaggcagcgggcccttccctctcccgactgcgcctcagctcggccagcacagagtcaggggggctccccatccagaagggccagcccctttcccggcccagggcctcctcagaggcagggcaggcctcagccccctccactactccctctcggggtggtggagcctggggaggtcccccacctcctgcccctttctttttctcgctgctgctgttgctgctaccacgagggaacctggaaccctcaatggagccatcgatgtagacctgggagctctgcatgagctggtaccaccagccggcctgcccacctcgggcccacctggcacgccctgagcccccggctgcctctgccacctcttctgtctcctcttcttcctcttcctcttctccaccttctgaggcacccacacccttcacccgctccccttgggctgccctgtccacgtctccagggccctcctggccccgggcccgggccagctgcagcgtggagtgggcagacagcagcaggtcctgggacacccgcagcagttccttgtgctgccgctgctgctgcccactttgcagcagccggtgctggaacagcaagtcgaggctgaagggcagcagggccaggggctgtagcagcagcagcagctcttcaaagaggccgggacacacggtatgagctgcactcaggaagccccagggctggtagtgggtctggatgatgtcttcgtggttatagaggtgattaaaccagaactccagggaccggatgttgagcaggccgaggatgaaggcgttgaagcgcatggtatgactggtgagctctgggaattggctgactttgttgtagaggccatgcaggaccttggtggatgggcctagctgtgtggaagcctcaaccacactccatggcatgttcttacgctgcccgatgatgacgtccagtacaaaggccttgagcccatcctccagcccggcgcggacggcagggcacaagtacttcagaaccaggtggcccacattggggctcacagaactgtttcccagctttgccttcaccccgggatccccggcttgtgccaaaatgagccacaatgaggtccacagcgatgttaacagcttttaccagcccttttttctgaagcaggtcaatggaaatggcctctgagctgccatctggggacagacaaaactcagctggaggcttctccgtcaaggaaaaggggtcctggaagtcagggcaggtcagtggtaacggcttcactgcttggccattcagccggcagttcagatggctggcagcactgagggagccagggaactcaaagatagggtttcttcgggccagccgagcttcttgtgatcttcggtctaggctccctgacaaaccaggtggccctagtgggttcttcctcctgtattcccgccacttgagggcttgaggggataggtggttggcattactgggcctggtggccatgctgccctcaccacctccccgggccaggctctctgctcggctgaggccagatcgccaggagcccagaggcggcaagcttcctgttccatggagccggtactcagtcaaggtcagtatcttctgatcctccttctgcggctgctgggaggtggcaggccggacagcagaaggacaggagtggctccatgggggcaggctttctgtggctgtgggctgctctgggggaggggagcacgaagtggaggcagaagagtcagtgctgggcccaaaggggccaacactccggatgggggagtagctgcccaggggcgatggccgagaggtctctggctcagacccagctttcctggcacctctgccagtggctcggggagtggatgcctgcggttcccctgagggagctgggactgagacttgagcagcaggggcagccagtggggcaggctgctgtgtacggctgcagcctgagaggctgtagagctgcctcgtgccgaattcgccaccca

SEQ ID NO: 431689 - DNA, 1878 bp, Homo Sapiens
ctggggtcgctcagtttattggtaaaacgggcactgagcgtggcgagcgctgggcgcggaagcctggggcgggggcgcctttcctcttgaagaacttccactggaccttgatggcgagcatccagtcgctgaccgagggcctctggcaagcggaggtgcagacatgcgcctggaggggggtgcggggcgccggaggcgggcggtcgcgggggcgggtttttttccggttcggggttcggagcgcggcgccgccggggagggtcgcgccgcgggcgcccgcgcttcacttgcccgccttctgcgccttctgcgccgacttggtgaccttgccggcgccgccgctcttcttctccacgttcttgatgacgcctacggccaccgtctgcctcatgtcgcgcacggcgaagggccgagaggcgggtactgggagaagctctccacacacatgggctttcccggcaccatctccacgatggccgcgtctccagacttcagggacttggggttgtcctccagcttcttgccagagcgccggtcaatcttctccttcagctccgcaaacttgcaggcgatgtgggctgtgtggcagtcgatgaccggggagtagccggcgctaatctgccccgggtggttcaggatgatgacctgggaggtgaactgagcagcctcctgcggcgggtcagacttgctgtccccacacacgttgccccgccggatgtccttcaccgacacgttcttcacattgaagccgacgttgtcgccgggcagagcttcgctcagagcctcgtggtgcatctccactgacttcacctcagtggtgatgttcactggcgcaaaggtcaccaccatgcccggccgcaggatgccggtctccacccggcccacgggcaccgtgccaatgccgccaatcttgtacacgtcctgcagcggcaggcgcaggggcttgtccgtggggcgcgtggggggcaggatggtgtccagggcctccagcagggacacgccgcttgcgttgccctccttacgctccaccttccagcccttgaaccacggcatgttgggggagggctccagcatgttgtcgccgtgccagccggagatgggcacaaagggcacggtggccgggttgtagccgatcttcttgatgtaggcgctgacttccttgacgatctcgtcgtagcgcttctcgctgtaggccggctctgtggagtccattttgttcacgcccacgatgagctgcttcacacccagcgtgtaggccagcagggcatgctcccgcgtctgcccattcttggagatgcccgcctcgaactcgcccacgcccgccgccacgatcagcactgcgcagtccgcctgggatgtacccgtgatcatgttcttgatgaagtcgcggtggccgggggcatcgatgatggtgatgtagtacttggtggtctcgaacttccagagggagatgtcgatggtgatgccgcgctcacgctccgccttcagcttgtccagcacccaggcatacttgaaggatcccttccccatctcagccgcctccttctcgaacttctcaatggtccttttgtcaatacctccgcatttgtagatgaggtggcccgtggtggtggactttccggagtccacgtggccgatgaccacgatgttgatgtgggtcttctccttgcccattttgctgggagtgtgaggggctggcgggacccggggtgctctggctcagggcgaggggggctgcagtgattccggagccgaggtctcagccagagggactggcggcgccggcgccggcggttttatctccgggagggggtccacctattgacggtggcggcgcagtgcaccgcgccctgcagcacgccaatgcggaaccgcgcg

SEQ ID NO: 431690 - DNA, 942 bp, Homo Sapiens
  misc_feature (920)..(920): n is a, c, g, or t
gaatcactgcagcccccctcgccctgagccagagcaccccgggtcccgccagcccctcacactcccagcaaaatgggcaaggagaagacccacatcaacatcgtggtcatcggccacgtggactccggaaagtccaccaccacgggccacctcatctacaaatgcggaggtattgacaaaaggaccattgagaagttcgagaaggaggcggctgagatggggaagggatccttcaagtatgcctgggtgctggacaagctgaaggcggagcgtgagcgcggcatcaccatcgacatctccctctggaagttcgagaccaccaagtactacatcaccatcatcgatgcccccggccaccgcgacttcatcaagaacatgatcacgggtacatcccaggcggactgcgcagtgctgatcgtggcggcgggcgtgggcgagttcgaggcgggcatctccaagaatgggcagacgcgggagcatgccctgctggcctacacgctgggtgtgaagcagctcatcgtgggcgtgaacaaaatggactccacagagccggcctacagcgagaagcgctacgacgagatcgtcaaggaagtcagcgcctacatcaagaagatcggctacaacccggccaccgtgccctttgtgcccatctccggctggcacggcgacaacatgctggagccctcccccaacatgccgtggttcaagggctggaaggtggagcgtaaggagggcaacgcaagcggcgtgtccctgctggaggccctggacaccatcctgccccccacgcgccccacggacaaagcccctgcgcctgccgctgaaggaagtgtacaagattggcgggcattggcacggtgccgtgggccgggtggagacggcatctgcggcgggcatggtggtgactttgcgccagtganatcacactgaggtgagtcagtg

SEQ ID NO: 431691 - DNA, 805 bp, Homo Sapiens
  misc_feature (14)..(14): n is a, c, g, or t
  misc_feature (40)..(40): n is a, c, g, or t
  misc_feature (42)..(42): n is a, c, g, or t
  misc_feature (46)..(46): n is a, c, g, or t
  misc_feature (57)..(58): n is a, c, g, or t
  misc_feature (164)..(256): n is a, c, g, or t
  misc_feature (258)..(258): n is a, c, g, or t
  misc_feature (389)..(389): n is a, c, g, or t
  misc_feature (519)..(519): n is a, c, g, or t
tttattggtaaaangggcatgagcgtggcgagcatgggcngnaacntggaagagggnncgcctttcctcttgaagaacttccactggaccttgatggcgagcatccagtcgctgaccgagggcctctggcaagcggaggtgcagacatgcgcctggcgggggtnnnnnnnnnnnnnnnnnnnnnnnnnnnnnnnnnnnnnnnnnnnnnnnnnnnnnnnnnnnnnnnnnnnnnnnnnnnnnnnnnnnnnnnnnnnnncnccgcgcttcacttgcccgccttctgcgccttctgcgccgacttggtgaccttgccggcgccgccgctcttcttctccacgttcttgatgacgcctacggccaccgtctgcctcatgtcgcgcacggcgaanggccgagaggcgggtactgggagaagctctccacacacatgggctttcccggcaccatctccacgatggccgcgtctccagacttcagggacttggggttgtcctccagcttcttgccagagcgccggtnaatcttctccttcagctccgcaaacttgcaggcgatgtgggctgtgtggcagtcgatgaccggggagtagccggcgctaatctgccccgggtggttcaggatgatgacctgggaggtgaactgagcagcctcctgcggcgggtcagacttgctgtccccacacacgttgccccgccggatgtccttcaccgacacgttcttcacattgaagccgacgttgtcgccgggcagagcttcgctcagagcctcgtggtgcatctccactgacttcacctcagtggtgatg

SEQ ID NO: 431692 - DNA, 1081 bp, Homo Sapiens
  misc_feature (5)..(5): n is a, c, g, or t
  misc_feature (21)..(21): n is a, c, g, or t
  misc_feature (27)..(27): n is a, c, g, or t
  misc_feature (29)..(29): n is a, c, g, or t
  misc_feature (34)..(34): n is a, c, g, or t
  misc_feature (47)..(47): n is a, c, g, or t
  misc_feature (53)..(53): n is a, c, g, or t
  misc_feature (55)..(55): n is a, c, g, or t
  misc_feature (61)..(62): n is a, c, g, or t
  misc_feature (64)..(64): n is a, c, g, or t
  misc_feature (75)..(75): n is a, c, g, or t
  misc_feature (87)..(87): n is a, c, g, or t
  misc_feature (96)..(96): n is a, c, g, or t
  misc_feature (107)..(107): n is a, c, g, or t
  misc_feature (163)..(163): n is a, c, g, or t
  misc_feature (175)..(175): n is a, c, g, or t
  misc_feature (215)..(215): n is a, c, g, or t
  misc_feature (256)..(256): n is a, c, g, or t
  misc_feature (474)..(474): n is a, c, g, or t
  misc_feature (915)..(977): n is a, c, g, or t
atctnaagaatcagccctaancaaaanancgcanaacccgccacctncctttntncccatnncngctgcacagcnacacatgctgancctcccccnacatccgttgntcaagggctggaaggtgagcgtaaggaggcaacgcaagcggcgtgtccctgctgangccctggacacnatcctgccccccacgcgccccacggacaagcccctgcgcntgccgctgcaggacgtgtacaagattggcggcattggcacngtgcccgtgggccgggtggagaccggcatcctgcggccgggcatggtggtgacctttgcgccagtgaacatcaccactgaggtgaagtcagtggagatgcaccacgaggctctgagcgaagctctgcccggcgacaacgtcggcttcaatgtgaagaacgtgtcggtgaaggacatccggcggggcaacgtgtgtggggacagcaagtctgacccgcngcaggaggctgctcagttcacctcccaggtcatcatcctgaaccacccggggcagattagcgccggctactccccggtcatcgactgccacacagcccacatcgcctgcaagtttgcggagctgaaggagaagattgaccggcgctctggcaagaagctggaggacaaccccaagtccctgaagtctggagacgcggccatcgtggagatggtgccgggaaagcccatgtgtgtggagagcttctcccagtacccgcctctcggccgcttcgctgtgcgcgacatgaggcagacggtggccgtaggcgtcatcaagaacgtggagaagaagagcggcggcgccggcaaggtcaccaagtcggtgcagaaggcgcagaaggcgggcaagtgaagcgcgggcgcccgcggcgcgaccctccccggcggcgccgcgctccgaannnnnnnnnnnnnnnnnnnnnnnnnnnnnnnnnnnnnnnnnnnnnnnnnnnnnnnnnnnnnnnaggcgcatgtctgcacctccgcttgccagaggccctcggtcagcgactggatgctcgccatcaaggtccagtggaagttcttcaagaggaaaggcgcccccgcc

SEQ ID NO: 431693 - DNA, 919 bp, Homo Sapiens
  misc_feature (15)..(15): n is a, c, g, or t
  misc_feature (26)..(26): n is a, c, g, or t
  misc_feature (663)..(742): n is a, c, g, or t
  misc_feature (749)..(749): n is a, c, g, or t
  misc_feature (751)..(751): n is a, c, g, or t
  misc_feature (879)..(879): n is a, c, g, or t
  misc_feature (907)..(908): n is a, c, g, or t
  misc_feature (914)..(915): n is a, c, g, or t
gcctgccgctgcagnacgtgtacaanattggcggcattggcacggtgcccgtgggccgggtggagacccggcatcctgcggccgggcatggtggtgacctttgcgccagtgaacatcaccactgaggtgaagtcagtggagatgcaccacgaggctctgagcgaagctctgcccggcgacaacgtcggcttcaatgtgaagaacgtgtcggtgaagaacatccggcggggcaacgtgtgtggggacagcaagtctgacccgccgcaggaggctgctcagttcacctcccaggtcatcatcctgaaccacccggggcagattagcgccggctactccccggtcatcgactgccacacagcccacatcgcctgcaagtttgcggagctgaaggagaagattgaccggcgctctggcaagaagctggaggacaaccccaagtccctgaagtctggagacgcggccatcgtggagatggtgccgggaaagcccatgtgtgtggagagcttctcccagtacccgcctctcggccgcttcgccgtgcgcgacatgaggcagacggtggccgtaggcgtcatcaagaacgtggagaagaagagcggcggcgccggcaaggtcaccaagtcgcgcagaaggcgcagaagcgggcaagtgaagcgcgggcgnnnnnnnnnnnnnnnnnnnnnnnnnnnnnnnnnnnnnnnnnnnnnnnnnnnnnnnnnnnnnnnnnnnnnnnnnnnnnnnntccggcncnccgcacccccgccaggcgcatgtctgcacctccgcttgccagagggccgctcggtcagcgactggatgctcgccatcaaggtccagtggaagttcttcaagaggaaaggcgcccccgcgcccaggttncgcgcccagcgctgcgacgctcagtgcnngtttannaata

SEQ ID NO: 431694 - DNA, 2486 bp, Homo Sapiens
caatagcggaaagtaaaggctttcctagttgggacagcatatagggaaacgttaaggattataggcaccggagaggtaacccggcttgaggggttggttaaagggaaaggcgagacttagggcgagaccgagcggggctaattgaggcgacccggggaggggcgggaccgcggactggatttcgacttccaaattcccacgagggtataggagtctgagggttgcacaggaccttatgcattgtttgactcctccagagcctttagagaaacttctatcaggcccgcctgctaggcactagtcggggagataatgtagccagggagatgtggcggacagaaagggcagagaggctctctgaggagcggatggaggatcgtgggccgctttactgagaaggaagagaccctgcgagaaggagtagtgtcgacttggtcccgtcagccggaccccacctggacggctggggccacttgtggtcgccgggagggcaggctgctgggtactaggagacatgggcaagtgtggcctcctgctttggtgagcagattgggtccggcttggggcaggcactaatgatagctctgccttctccaagtccctccatcgactggtgggtgtgaagatcctcctctccacatcctcccctagctgctctggctctctccgtgggctctcctgctccttttttagctggacccatctccgctgttgctccctggccaggtcttccagattccactgccgcagcttctcctgatgctcctgctccagcagggcccacttcttctgccgctgctgccacatctcctcctcctccagccacagctgcctccgcatctcccggccgaattcctcctcccagggctcctcttggctctcagaggtcacctgcctggagctctctagagacagctgcttgctacagtggaacttaatttggagtcctcccttctggaagtagtcctcctggtctttgtctttgtggcctaagctttctgccaccggtctttcccatttcttaggaaacctgcgatctactaagggtaaaagcacaggctcaaggctctcagtgtccttgctgccgaacacatctgcgaccctcgagcgcacagtcatggtggaaagtggctggtgccctgcagctatagcaccactgtcccgtatcatggccatgggacttgggggaagtggcgagaacaactgctcctccttcatcggttcctgttggctttcctccatgactgtttctttccttgggagggtctctctctcagagggacctggggagtcaacagaaacctcagccaggtcttctgcctgacctgtagcattctgagccttcttcagctggaactccaaggcctgcttcatcaggagaaggtcatggtaccttccccctaagatctctacctgcttcagcagagcatccctcctgctctcaaggacctccatgaactgctggaagtgcagcctctggctgctgagctctttggtcgcctgcatttgcaggtgcctgtatttggtctccaggctcctgttctccttgtgttggaggatcaaggccttgttgaggttctccaccacagtggccatgtacctgatggccctgacctcctttttgctgaacatggtagagtccaggagctcctgcagcatggacgtcacctccgaggccttcgtgttcatggtatgctggtccctggagcatctgttctgggcttagtggctgaggatgggatggagatgtctgtgggcttcttccctgccagccctgccagaaggtgcgtttggacacttgtgaccttttcttttgtccttcaatgagagtggagcaaagggcagtgagtgactcgatgcctcttttggtggcaatgagggacagcggtaacactttctccgtcacttcaatccattcgtccagagctgctgcttcctcttcactcttcctgggcccaatctcataggtcagagtgtcaccccagtcacccagccagcggagaatgtcatacaggtgcttctccttcatcatagcatctttggagaaggaggcaattttttccagcaagatgaatctcttcttgccctttggatctctctgctgagatttggcattttcttttaaatcatatcctaattcttcctggaagcggttgatgacacaattgacattgtccaaaatgtctgagagctgggtagaaatatcctcttgagcccgagttagctgggcagcctcaatcctcaggatgatggctttcactgatgtgggagtcaccaactgtggggggtcatccttctccattttggatcactctgtcagtcacaaaacatcctgtgtttctggtccacaggcctggacacacaatgttgcctgctttggaggttaagggcaccagggtgtctcctgggtaccctctgcccaggcacagctcctgatggtaacatgccaaacatccgtaaattcgggccggtacagcctggattta

SEQ ID NO: 431695 - DNA, 420 bp, Homo Sapiens
caccgtgcctcccctcaagaagattttcgtatgtgcaaaaacactgccaggctaggaaaacaaagtccttaaatagcttaatttgaagttagggttattccctatgactgctaacaggtggccatatttttcagtagaaagttagtcacaagatatttgttgagcacattcgatctctttcccattgggtatggttgtatcgtctccatctctgaagcttgcttgctgaaaaccatttgtcaatggtttattctttctattcaggtgcagtttcagtttgttctgctgactgacacactgtactcccctttgcctcctgaattacttcccactgagatggaaaaaactcatgaggacaggcctttccctcgcacagtggtagcagtagaagtccaggatttgaagaatggagcaacacac

SEQ ID NO: 431696 - DNA, 470 bp, Homo Sapiens
tttttttcagttttactaataactttatttaaataagacacaggaacttctatactgaaaaaatacaaaacaaaagccacacatttccttgtgtaaagccatattatatggtaactcaaatactgttcagcgcaatggctagaattaaacagtacaattatatacaaaatttaaacaatttctgacaaatttctacagctggatgtaggatacatttgagctcaacaacttctgggaaatttacatggcaaagcgtaagctttaacacatttggttcaaaactttaatatatgctaagaacaaatgtacaacacaattaatatttaagtatctcatggagaaaataaaagcacatcactataaatatcgtacatgagatttcatcaccaaaaaagcatattcagtccatttttctgaaattgatattgatactattgcattttatttggacaaaagcagagtgtaagatc

SEQ ID NO: 431697 - DNA, 512 bp, Homo Sapiens
caaatcgctctcttacagtgtaaaaacaacaaaagacaaactttaattttacaaagcaggttttccataagatcaaaatgtgtgtgtgtggggggatggttccatgttcatcttttcttcactctctttttttgcgtcatcatctctgtgtcgtactctccttccttcccatttgcccttcccgttctatcttttctgtggtctctcttcctttactggccatcacatagaactggaggaattttttctaattacttccttcatttgtgaagtcattttatgttctctgttctccattttaaaagcaaacaagcggaacacttcatttctgcattaaaaaatctaaactaaattgcttgtttgtttgttccctctgtagcctttgacgcatctccctgggttctcactgggaagccccgtctcactttcctccaagtgggtgcagttcaggtttcgtgagtgccttcagttgggaacaagaggctccgctacccctaaactcaaactcatcc

SEQ ID NO: 431698 - DNA, 641 bp, Homo Sapiens
ctgttttaggagaaaacagcatttcagcttgatattttaaatgccaattatgcacatttataatagtaagatttcccattaagtgaaacgttatagttacctataaacgttcatttttcactatttacaatttgaattatgtaatacttgcatactgcaactaattgttatagaagagtcacatagacaatataaatctgatgtccaatcctttacaaatacgaaatttgtttcactgggttttcaaactatcaagtataaataggaaaaggtcagcaatacttaggatgaggcactttaacaattactcagaaaggttaagtgtacaaaactgtaaaccaaaaccctgcatattaatcttatccttaatttcagatgtgattaatctgagatggtctatttaaggagtgttaagatcatcacagaccagttaatgtgcccatatacaaatgaactaaactatctaatggacacttgggtttcagaaagggactctttcaacactaaaacttctgtagaattttttcataaacaagtataaacacactgctctcacaaaggcaaatggtatctctaccatattcctagacaagaatgccctcaaatgtttaactgaatcacaattttacagtcttatgtac

SEQ ID NO: 431699 - DNA, 393 bp, Homo Sapiens
ccggtccggaattcccgggatcgcttgccgaggccactcatcgggtcacctccgccgggggcgcccgccagcacgggcatgattctgcattttttcctgacaggctaggtgtggagccgccctccgcagcccaccccggcccaggatgtggctgggccgccgggccctgtgcgctctggtccttctgctcgcctgcgcctcgctggggctcctgtacgcgagcacccgggacgcgcccggcctccgggtacctcttgcgccgtgggcgcccccgcaaagcccccgcaggcccgagctgccagatcttgctcctgagccccgctacgcacacatcccggtcaggatcaaggagcaagtagtggggctgctggcttggaacaactgcagttgtga

SEQ ID NO: 431700 - DNA, 1405 bp, Homo Sapiens
  misc_feature (62)..(122): n is a, c, g, or t
agggcttcgggggtttccccttatgggcctggctcccaagccccccagatgagaccaaaagnnnnnnnnnnnnnnnnnnnnnnnnnnnnnnnnnnnnnnnnnnnnnnnnnnnnnnnnnnnnngggcggggacagtttcggcccctaagccccgaatgccctccccaatcccttgtgccatttgccccttcccacccttttcgggttcttctccgtttgcccaagcctgcccgtttttcccacccagggcctggccccgggtctgctgtgttggtctggtagcttcggctgctgtaagtgaccagttgtagttgcctgttgagttggtccagccctgggctgacaagggtgagatctgcctgaccctctccagtgagagtaactccagtcacttcccctgccacgtcccaggtgcctagggaggcagtcaggttcacctggtatacctcctgaccagaagctgcctgaaggctcagccctggcaccaagatgctcctgaggggctgaacttccacaccctgtagggggtactggagcggggagttggcaggggctatgagcagctggtcagctggggactggctcctcgacagaaaggcctggaactcctgctctcttgtggcagaggcagccctcagctctgcagggtcaaaggccttggtgaggtcaatagctcggacttgtttctggaaggggagggggaggccccccccactggactcacaactgcagttgttccaagccagcagccccactacttgctccttgatcctgaccgggatgtgtgcgtagcggggctcaggagcaagatctggcagctcgggcctgcgggggctttgcgggggcgcccacggcgcaagaggtagccggaggccgggcgcgtcccgggtgctcgcgtacaggagccccagcgaggcgcaggcgagcagaaggaccagagcgcacagggcccggcggcccagccacatcctgtctaacgctctaaggcagcggcaaaatttcggtccgggctgtgccgggctctcgccccggcctgagggtcctcatggggctgggggctgcccgatgggggagctgggcatgagcctgagggtgtgggggaccctcctgcctctggagcgcgcccgatccctcccgtcttggaactcccggggcttttgtggagcgcggcgcggtggtggttctgggcgtttcctgcccgggggcggttggcggggcgcgaggaccaagttaagagtctgttgcaccccagccccggggcaaagccggggatcctggctccgcgtcccactggcagcgcggggagggctctggccgccgcccggctcttcgcaccgcagcgcagcgcggctcagctcccggctcgttgcggctgcttcggctccgcgcggggaatgcgagcgccc

SEQ ID NO: 431701 - DNA, 1134 bp, Homo Sapiens
  misc_feature (356)..(388): n is a, c, g, or t
  misc_feature (405)..(513): n is a, c, g, or t
tccccccttttcctgtcggtataaaagaaatgggtaaatatttaacatacataatgtgtacacacatgtttccaagtggggtcattcttacttggggggtggggcagaggtaccctcagattttttgggaagcatgtatgttgaaaagagtatatttaatatcattttatgttggaaaaatgaaaactaaaaaccacttttataatacaaactacagaaaacaaaattcacatatcctgttgatggaataaatgattgaaaaccattattttattttaaaggatccaagtgtatcctgtaatatcagagtgggaagggtactttgagattagattattcagtgtggttcttcaagnnnnnnnnnnnnnnnnnnnnnnnnnnnnnnnnnaagtaaattttcactannnnnnnnnnnnnnnnnnnnnnnnnnnnnnnnnnnnnnnnnnnnnnnnnnnnnnnnnnnnnnnnnnnnnnnnnnnnnnnnnnnnnnnnnnnnnnnnnnnnnnnnnnnnnatattcctttttgataaataaataagatatgctggcccacccccaaacacattctgaaattctccgcagggcccctttctccccacctgtcacccccccagttgaaaatcatagatctaatcttatcccttttatagatgaagagtttgaagccacaagaaattagagccacgtgccaagggtgatggaggagaggagagaagcaagcaggaacaggaaattaatatatattgagcatctgttatatgatatgcagttggctaagtactttacatgaactaatcaatttaaattatcttgtattctcttatgtccactttacaaatgaggaaagtgaagctcaaagaagttaaataactttcttaagatcctacctagtaggtactaggtagaagtaccaggttggaattcaggtctcctggccactagagcctacattctctgtactacctcttatagcttcttaaatgtgagaatggatgctgcagggagaggattatttttactgctcttgtttttgacactcacagattgtgtgtagaactgcatttgacaaatatcactttattgaacactgtgtttttttccctctttctccggccaccttactgttcagtgcct

SEQ ID NO: 431702 - DNA, 855 bp, Homo Sapiens
gcagatacaagggaagtgcaagggctcaggatgaaagaaaatctattgggaagagttttaggggcttgatcattatggggcttccttctatatctgagaactgctctgggtggtgagatgtggactctgatccttaattggaatgttcagagaatgagtgtctggtggccttgaagtgttggacagaaaagtatcagtataaaagcctggagctcagggtaattaatgtagttcatggttccttagtgagcaggactcttggatgtggaggagaaagggtcataggaagtaaaccaccaaaattacaaaattgagtctctgtacaattacttcagtgcctttgggcttatgaatacaaatcagtgggccttctctatgatggtccaacaaactctcagtgtccaccctgtccctgtatctcccatggaagatgaataatgtcaggtgttctttgggtcaaaggtcccagggcagtctggaggcttagagggcagagtggtgtcattccatgtaaagttaggcttctgaggggtcaggcagaatatggtgtccatatcttccatagctctgcagattcttggatgaagtcaagcacagtttgctagacccaggtcactcctctgagtataactaggacccatgagtgaaacttaatagctgtaaggaagaacctgctgtctgccagagaggataagctgcccatctcagcagctgtctaaaagaaggcaggtgtctctttaaagggaagagaagcattggtgaaatggatttcaggtcacttccattccagatgggtgagatcttgtggagctgggatcatgtttgaactcattcatacctgtagagcacgaatcc

SEQ ID NO: 431703 - DNA, 1800 bp, Homo Sapiens
  misc_feature (207)..(255): n is a, c, g, or t
  misc_feature (538)..(538): n is a, c, g, or t
  misc_feature (610)..(610): n is a, c, g, or t
  misc_feature (811)..(845): n is a, c, g, or t
aggaatgatcatcaacaggggtggagtctgacaagcctgcttctccccagccccacttttctcaagcctctcaagctgtcttcacatgacaggatttcttatcctttcctggcccaggcaaataccacagtcctggggcccattccaagtagatggctggtgtttagacagagttccagagatgcattgggctatatacaaatcatnnnnnnnnnnnnnnnnnnnnnnnnnnnnnnnnnnnnnnnnnnnnnnnnngaagggttttacatagaccttatgctgtccccctactgcctgtgaccctgaaggccagaacctcttggaacattgagaatacatcaggtacatctgctcacaagactggcaaaaattcactcagacggaaaaacaaccaactaaccaataggaacccggcacctctatgaggatgcagggccaggctcaggaagcagcacagtgcatggggttcagggttgattttgtttttactgttttgtgatgatgtctctataatgccaaagtttcttcttccacaatngaaaactgttgggagtcatgatgaatgaatggggtccatccccagggggctgctccttggatctggagctgnccactggaggtggcaccccaccccagcaaggtatatatgactgcatctatacatcatgcctcaaggcaccttgttccattgtccatgacctaatccttccttccaggccaccagcttccactgtggtggtccaatatggaagggacagaaggtccatttccaagaaagggaacaatatacagcatcctgtccatccctctnnnnnnnnnnnnnnnnnnnnnnnnnnnnnnnnnnntatattcatctaaacctgatatgaggcacaatgatgaatgcccttttacctgtcttgactttgaactggaaaaatcacttacgtgcagggcctagagaagcattggaagttgcctcatctcacaaatgggaaaactggagcccagaacaaggagcatcgtgtccacagtcacagcagtctgaacccaactgggatagagtctagttccctgaaccctaggccatggctccttccaagcagcccagaccccctagcagtgcccaaaatgcaagatgtccacaggacccttgcttcagtaatgcacaccagtgcaggtggaggggatcatgaggtcaggtgcagggtagaagggccactgcacactccaagatcaatctgagtcaccaagcatgcccaggaaagggcaggtagctcctttcttcctctggctttgccaaagatccaggaacttacttgactggccaaggacacagagctcctctctaaattacagcaacaagagccttttccagccactctgaaagcctctccagaaacattttcccaagtctcccaggccccttcctctttataaaatgaagtaacatcctcctccacccaaagtccccaagcattccagagcatcatcatgaaacaagtctgcaaacagaatttggacaggagtaacaccaaatgctgacatggaatgagctaggccacacacggaccatgtactctagcactttcctctacctccccagctgggcactggcctattttacattctcaggctgagggtgtgcaaacctgaagctggggagccagggcgggtggtcagggagcagctgccacatcagcagcagcctctgctaatgggcatgttgggtgtggcttctcccgatcacccagcagaccatggtgagtccaggtcaagggcatcaaagggccctctttgcagaggtctcagagactcggt

SEQ ID NO: 431704 - DNA, 2238 bp, Homo Sapiens
  misc_feature (557)..(557): n is a, c, g, or t
  misc_feature (695)..(738): n is a, c, g, or t
  misc_feature (830)..(830): n is a, c, g, or t
  misc_feature (1332)..(1348): n is a, c, g, or t
  misc_feature (2108)..(2156): n is a, c, g, or t
ttttttttaaaaatggcaaaacatttattgagtcatctacagcagtctgacatccttaaaatcctggacaagatagtgagcacagcattaatggcagcagcagtagcagtaaggtctgtggggcttacttagctttactgtgggagatgaaacccaggctggtccagctcccacaagtgaggcaggaaccatgtctgagatgccaggggctgcaccactccagccctgatagaggcaaagctacagaagacagacatcagacaagacacacatagccaagtgcagaaacaccccaagactgtgagttcaggaaaagaaggaatgggcacaccaaaatgtcccagatccttgaagttgactcccaggggcatggctgctatcacccatatggaagtatcctcactctgatcccaacagaaaactgaatcagcggatgcaggtaaagctagaattctgtgtccatctgagccctctggcctcccccttactcctgatgctggtggttttacaaatgaggcacaggttaacttaggagggctcaaagcagtagataaacnagcaaggagtcccttccagcagtcttcatcccaataacaagcccacatctgtgtaatttccaaaatcttttcacacacaagccgtctcatttcaaccttatccttggcctgtgggactaacaatgccaatgaagtccnnnnnnnnnnnnnnnnnnnnnnnnnnnnnnnnnnnnnnnnnnnnccctggatcacagagcaggtggctaagcccaggttaaaaagtaggtctccccacacccacacctgactccattgcttctcctgcaagagtcnctggacaactttcggtcaccagagccccactcctgtgcaaggttacatgcgtactgcatggatgctttgagtgtcacattctgctcatgtgcagggctatgcataaattggtgagccatttactcattcagatttataaaacatactggatcccaccatggtggcaggcaccatgctaggcctgcgtgtattttctcatcagcccaatggggaggtttgacctatagatctccaagtttcctcccagctttagtattttgtgagcctcctcaaagacatatggggaatgagtcaaggtcaaacaagccaggagcaaagcgtggagaagcccaagtccttgctccttgctcagggctcttctagctgacttccatggtccctgggctcaaggaggactttatgacaaagtattaatactttatgataatactaaatgataaagtattatcactttgctggcttcactttgaagtggccatgaagagggcaagggtactactcnnnnnnnnnnnnnnnnngagagagagagagagtccctttgagctttcccttccacaaagagtgaggatcagatgagagaggtgagtgggcatccttggcggggattatagatgcaggtgtctctcaagcctagggcttggctctagctccctgtccttcttccacaaagaacccagcttggagggggtggggttagagaagagtcgctgtaggccactggatgtgtcaagcagggtgacagagctacacactgggatagacaatgtgacttggacttaagtggggagtcatgaagtctgcagtgctaggaactaccacagagccactgaaccacagagccacccacatcccgcacttggacccccctctctggctccctgacagcctcagcatccttgacttggaatcccatttcctccaggatgagagtccctccctgacactgcctccctgctccctggctggacactcatgacagggaaagagaaatttcttcatcccaaggagaattcggcctcccatgggtgagtttcgtcctttaggattgcatagaacgagaaaccccttcccaggaatgatcatcaacaggggtggagtctgacaagcctgcttctccccagccccacttttctcaagcctctcaagctgtcttcacatgacaggatttcttatcctttcctggcccaggcaaataccacagtcctggggcccattcccagtagatggctggtgtttagacagagttccagagatgcattgggctatatacaaatcatnnnnnnnnnnnnnnnnnnnnnnnnnnnnnnnnnnnnnnnnnnnnnnnnngaagggttttacatagaccttatgctgtccccctactgcctgtgaccctgaaggccagaacctcttggaacattgagaatac

SEQ ID NO: 431705 - DNA, 493 bp, Homo Sapiens
  misc_feature (384)..(384): n is a, c, g, or t
  misc_feature (432)..(432): n is a, c, g, or t
aaaaatggcaaaacatttattgagtcatctacagcagtctgacatccttaaaatcctggacaagatagtgagcacagcattaatggcagcagcagtagcagtaaggtctgtggggcttacttagctttactgtgggagatgaaacccaggctggtccagctcccacaagtgaggcaggaaccatgtctgagatgccaggggctgcaccactccagccctgatagaggcaaagctacagaagacagacatcagacaagacacacatagccaagtgcagaaacaccccaaggactgtgagtttcagggaaaagaagggattggggcacaccaaaattttcccagattccttggaagtttgactccccgggggcatgggcttgcttnttcacccttatgggaagttttcctcattctgtttccccaacagaaaantgattcaggcgggttgcaggttaaagttagatttttgtgttccttttgaggcctttttggc

SEQ ID NO: 431706 - DNA, 1356 bp, Homo Sapiens
  misc_feature (226)..(273): n is a, c, g, or t
  misc_feature (812)..(820): n is a, c, g, or t
  misc_feature (1037)..(1079): n is a, c, g, or t
gggtccctggtactaaatgtaaggccccaatgagtttcgcctccattttgaaggaaacccaaccaaaggccataaccaaagtttcaggaatgaaagccacggtaaaaccgggcggggttagcaagcaagggccaacttacaaccctgaatgcaaccaaatctcaaatgaaaagaaaagaaactttttctgagttaggagacatttgtggagatgctcagtactggnnnnnnnnnnnnnnnnnnnnnnnnnnnnnnnnnnnnnnnnnnnnnnnntaagttacatttgcattttataatcttacaactatctgtttctaaagtactgtcttccagctattttagttgatcatctaataaaagcatcttatgttttaagattacaatgatgttctggctaggctaccccctccaaccccccaaaaaagtaaagataataaaacatgcttttgcggacattttcctcattctaccattaagggcaccatctaccaactggtagcaaatacttcccatattttttgtcacttgccaacaaggcagaaaataccctgctgaatgaaatcactgggaacattccaagttcaaaataaaatgtttaacttacacataatacaagttatgtacaagattaggaggggggaaaaacctgaacaaatcctggaacacacctatgtatttacgtcatgggaaaaggggagagaacacttcaaatatcaacaagttctgcgccattaactcattaatagctaaatggccacaccaaattgcatgtgaatgttagaacctctcagataaccacaataagtccatannnnnnnnnaaaaaaaggaaaacacagaaataactaccaacagtgtctgagaagagagactaagttaacatacattgcatgtattgcaggcaaggcagaggcatttttttaaagcttttgcacagacttcatataatcttaaaaaaaatatgcaggcctttgcaagatttgacttgctgaaatccaaacaattttgactcatgaaaagtcataagacttcagctgnnnnnnnnnnnnnnnnnnnnnnnnnnnnnnnnnnnnnnnnnnncctggaagagtatgatagattaaacaaggatggtcaggcttggaacctgaatgtattttagagcaaaagctcaaaggtgggtggggaagagaacaacctatttggtaacaaggtgtactataataccgtgatataaaaaaaggtatggtgaaaatgtaccttttactaaagcttatacaatatacaagttccttggtccataaaaactatgttagatttgtgtcttctagtttgttcaacttgtattccagccacattatttacttcttgcccattt

SEQ ID NO: 431707 - DNA, 1070 bp, Homo Sapiens
gagatcccctatgacgtgtggaataaatgacgacgtaaacgtagctgcacaggggtgttcctgtataatgcttgaatcaattgtgtgtgaaagcatcatgcaaatggctaattaaattgggtgatgactgaaaggttataaatccttcattccagctccacgagcagatccccttctccaactgtgtctccagcttgacagtgcacagatttcaccgtgccagttttcccagctgtcatactattctgcattttcatggcttcaatcacacaaatttcttgaccttctgctaccgcgtctccaggcttgacagagacggccaccaccactccgggcatcggggaacgcagaacactgcttgtgtcctcagtcactttttccagcataaatttgttcaattctgcggcaagtctggttaagatattcaccttgtacactgtaccaagaaactgaatgctcatgtttccacctgcttctcgagaaagacactggacagtcctctgagtgccatcaacgctgacagacaataagggcgaagccaggttccacgtgctggtcacatttagtttcgacccatcaacttccaccgagaacactgacccattgtttgatgctactacggtatgaactttatcatgcaattttactgagagctcccagttggctatgtctggtttaataacaggcattcttgaattttcttgaaaatgttgtgctcttaactggaatgccacaaacaatgatgatgctattgccaataactggttcttctcactcttggttagcatgtgtcctttgaagccatcaggatacacatcggagagacatttcgtgctgatgtctccttttacaaagcgtgagttgattatcacctctcgaagtaatgcaatattatgtgtaacacctcgaacaacatagttatccagtgcatctgccattctcttcagtgcctcagttctatcagagccatatgtgattagttttgaaatcataggatcataataaatgctaatatcacttcctggttggatgccactgtccactcggacaccaggtagatgtaacggttc

SEQ ID NO: 431708 - DNA, 1663 bp, Homo Sapiens
  misc_feature (1550)..(1586): n is a, c, g, or t
tttgaaagaaaatgtaaacattttatttggcagttgtttctgtacacatgaataaataaatggaaaagtacatattaatatttctttttggagtaacagataccattaaacgcttatttacacatcttcactgcaaagaacagttacacaattaaattttgtcttataaaaggtaacttcccacatcactggactggacagttaaggatggagatactggtagtgcttggttctagcagtctcaatgtttgaaaggcattcatttgcaagtgtgataagaagagtcatcatgcattgagttcatccgggtcatgtactgtagaaaatttctgatggcagccacagaatttggtgtctcatgcgcttaagtcaactatgacatgtttgtaaatctgtgtatttcccttaaaactgtaatgttgtcataattccggaaggtcttttccacatggtcccattcaaggaaaatgcattttccagtaaaaggctgagcgatgactacatactcatcattcaaataagaaaaagtgtctatggacaatgattgataaggcaggtcttgagactttgcaaattctgtaatgatgcaatcgaaatccttcgaggagagactattgattttgcgcttcttgtattctggggggccttcgcagtagatgtcttcaacagttgcattggtgtggccaagccattccactagccatttcagtttacagtcacaattaaatgaattacccctcaggtccacatttgttaaagaatccaggcctttgaaaatatcttttgggagtgtctggagattgttgtttgcaaggctcaagtgaattaatgactttagtccccggaaagtatgtcttgaaattgacttgatgttgttgttttctatgaataaatactctagatgtggaagaccaataaaagcatcatcactgatcacatcaaaggagttcgatgtgaataacaagagctgcagcgatggcgtgaataaaaaactcccttctgagatttcagtaaaaccagatctcacaaaggataatgagataacatcaggaggaacggtgcgtggaatggatctggcattctcacataaagcattatctttggtacaagtacacacggcagggcattttggcttcgctggtttcttcccctcagtcagcaaaagcgcagataagagacataggaaataagcaattcttttcaggggaatgcaggcatttcccatccttttgcttctttctgattccatgcagtcgagaaaatatccccaaccatgaacagggcttctggaattcagatggtgattgtcttgctctaagaacaggtcacataggagtccacccttttcctctgcctctgtatctctgctttttcaaaacagagacctgcagctgattcgtgagcttctcctcgctccagcaatgcactgctcgggggaagagacctgtgaggtactgtgagatgggagggatccaactgctggaggagagagccgacttgcatcaccacccgctctcgacgaattcgagctcggccgatttggcctgatnnnnnnnnnnnnnnnnnnnnnnnnnnnnnnnnnnnnncgccgccaccgcgtagagctccattcgccctatagtagtctatcactcccggcctgttttcttttgtgttgttctta

SEQ ID NO: 431709 - DNA, 418 bp, Homo Sapiens
  misc_feature (311)..(311): n is a, c, g, or t
tatgaaagaaaatgtaaacattttatttggcagttgtttctgtacacatgaataaataaatggaaaagtacatattaatatttctttttggagtaacagataccattaaacgcttatttacacatcttcactgcaaagaacagttacacaattaaattttgtcttataaaaggtaacttcccacatcactgggactgggacagttaaggatggaggatactgggtagtgcttgggttctaggcagtctcaatgtttgaaagggcattcatttgcaagtgtgataaggaagggtcatcatggcattgagttncatccgggtcatgtactgtaggaaaatttctggatgggcggccccagaatttgggtgtctcatggcggcttaaggtccaactttggacatgtttgtaaatcccgtgt

SEQ ID NO: 431710 - DNA, 1947 bp, Homo Sapiens
  misc_feature (652)..(652): n is a, c, g, or t
  misc_feature (668)..(668): n is a, c, g, or t
  misc_feature (676)..(676): n is a, c, g, or t
  misc_feature (1428)..(1428): n is a, c, g, or t
ctttggagcggctacttaatgccggtcccggggccgcggtagctcagagaagcgccgtcgggcgggggggcggcaagaggcgctggcagggcccccgagctgggggcagagagccgcagggggtgggagcaacttcttccagaaccttcctctggcccgggctgcgctctgagccaggcaccacatacttattcggaggaggcgcccccggggtcgcgagatggaagcgcgcgtccgggaggccgtgtaacgggaagctgcgggactcagcgggccagagagcgcggcgggccacccccggctcagcccgtggatgcttgaccgccccctcggagagtccccgcagacatggcggagagctggctgcgcctctcgggagccgggccggcggaggaggccgggccggagggcgtgctggaggagcccgacgccctggatgacagcctgaccagcctgcagtggctgcaggaattctccattctcaaggccaaggcccccgccctgcccccggggggcaccgagccccacgggtacgaccaggtgccaggttcagcggcgcccgggtcccccctggcgggcgaccccgcctgcctggggcaggcacagacgccgggcaagcccacgtcgtcgtgcacgtcgcggagcgcccccngggctgcagagcccancccccgangacgtggactaagccacacaatccgcacgtgaagcctccctactcgtatgccacgctcatctgcatggccatgcagggccagcaaggccaccaagatcaccctgtcggccatctacaagtggatcacggacaacttctgctacttccgccacgcagatcccacctggcagaattcaatccgccacaacctgtctctgaacaagtgcttcatcaaagtgcctcgggagaaggacgcaccaggcaaggggggcttctggcgcattgacccccagtacgcggagggcgtactgagcggcgctttcaagaagcggcgactgccccctgtccacatccacccagcctttgcccgccaggccgcgcaggagcccagcgctgtcccccgggccgggccgctgacggtgaataccgaggcccagcagctgctgcgggagttcgaggaggccaccggggaggcgggctggggtgcaggcgagggcaggctggggcataagcgcaaacagccgctgcccaagcgggtggccaaggtcccgcggccccccagcaccctgctgcccaccccggaggagcagggtgagctggaacccctcaaaggcaactttgactgggaggccatcttcgacgccggcactcttgggcggggagctgggtgcactggaggccctggagctgagcccgcctctgagccccgcctcacacgtggaccgtggaccttaccattcacgggcgccacatcgactgccctgccacctggngggccttcgggtggagcaaggctgccgacagccttggacttcgatgagaaccttcctggccacatccttgctgcagcaccccctgggacgaggaagcggagtgggctgccctgccccccgggacccctttttttgggctgtgggaagcccaccctgggccttcgaacctggtgagattgggtccagccgggggggcccctttcttgaagaaaggccaaggccctggcgcccaactttttgacaagggtcccaagtgaagggtcccaaatctgccccccaaccacagttcccagggaaccctacccccttaagcgtgtggctgggccggacctacaaggatttgcgccaaaggctcatagggcacccagcgccaggtggctttaatattaacccctgaggctttaaagtaggccccggaccaagatagtgtgtcgtttgcccacccacctcttgtcacaagggtcatttgtccgtgtttcccgaccgaaataccggtatagagccctcgccgagagcggg

SEQ ID NO: 431711 - DNA, 787 bp, Homo Sapiens
  misc_feature (585)..(585): n is a, c, g, or t
gtcagcagatcctggatgaaaagcccaagctgcaggtggagctggagcaagaataccaagacaaattcaaaagactgcccctcgagattttggaattcgtgcaggaagccatgaaaggaaagatcagtgaagacagcaatcacggttctgcccctctctccctgtcctcagaccctggaaaagtgaaccacaagactccctccagtgaggagctgggaggagacatcccaggaaaagaatttgatactcctctgtgaatgctcctgccaggccttcagaaattgcatggccactccagcgtcatcggactctctcttattacaaagatcactgcccaggaccatcttcccgagaagcatcccttagcctaaaatccacaccaaagggagagttccagaggaatccatgaagaattcccatgcccaggctccatgtgtcatgtggaaacctccacaggtctgctagtgaagaatgcatgtatgtgagatttttgttttctttccaatagcaaatttcaaaggcaagcaacttgcaggctccatgggaactttttaatgaaggacagtgtcttcttttgaaggaaantcaagctcgtgtttttattcgaagctctggtgtaaaatatttcaaagtcatagaaatagtttgagaaatgcatagcattatttaacactattgaacagccgactttgagcattgtttcttctaactgcccctcaactaccattatcttcaagtcaacatgcatattacattttcatcctttgctttgcaagcactggtggct

SEQ ID NO: 431712 - DNA, 1715 bp, Homo Sapiens
  misc_feature (41)..(45): n is a, c, g, or t
  misc_feature (54)..(54): n is a, c, g, or t
  misc_feature (63)..(63): n is a, c, g, or t
  misc_feature (65)..(66): n is a, c, g, or t
  misc_feature (1516)..(1592): n is a, c, g, or t
gaaaggttttttgaggggccgaaggcggccgaacaagggannnnntttatgttngcagggggngnntcccaaaacatatttctttatttcctccagagaacaggctttagtactgaggtccttgtaaacatttaacaaaactggtttaagaacaaactaaaagcatctatatccttgccctgtgttgctggggtgagtttatacaaggagaagttggaacaaatgcagtgggcacaatgaccttcttactcagttcaaagtaggtcttgggatgagagttccacacggccagtacagctgactttctgtgatttccaaggggtgcccaagacattaaacgccatggtccttgggaaggactgatgatgtttctgctcattgttgatcagggtcaaaccttttcactaaccgggactgctctttccaagaagtcagaggtcagaaagctggtagcgtcgtacaagaccgtctcgacagcatgtgtagatctgcttctcccatgtggctaccttgtacacagggtcacagtcagccccagtgagctcagtgacatagtctaagtcttgctggacaataaaacagcttccatcaccttggctagcaatgaatccatctctgacacttagcagggatagaactggtgctcctgatctgtggatgacttgtaccggagccccttggactcctcacatccagctgataaatgtttccatcttgagtcccagccaatagcaagaagccagagagaaaagtacagcagttgaaagcgtctgagccaataaagaggaacaccagctgcctgctctgtagtcccaagcactgaagtttcttatcttcccgggccaagagcagcattttggcctctgttccaacctcccgttcactgggcatctgctcaggggagccaaggtttatggagttgtcagcagcacccaccgccactccattgatagaagaaccacaatctgcaaggactcccaagcaggctgagcgcccacaatcccaaagtcgtgctgtcccatctcgagaagcagacaccacattcctcccccgatcaacgatggctgtatccaggatacctcctttgtgacctttgaaggtcaccacgcagctagcatcttcagctgaccatatcttcagctgggcatccattcccccactcaggaccacaaggcctgatgggaaaaacctgcaacaattcacatcaaacacatgtccttccaatactctcctgagttctccattggaagcctgccagattttcatggtcccgtcagtactagaagacacaccaagacctcctctgctggaaatgtccaggcatgttatactctttgtatgaattctggaaaaagtagtatatggtgccaaaaacttagaagatgcattttcctttggacatgaaatatgaatgcttttcttgtttatttcattcacagtaaatccttctgaagctgtaacctctgggatgccatctaggccaattccttgacaagtcaggctgccatacaaagannnnnnnnnnnnnnnnnnnnnnnnnnnnnnnnnnnnnnnnnnnnnnnnnnnnnnnnnnnnnnnnnnnnnnnnnnnnnctgggggatgacagctcagccaggcctccccttcatccttcctgagggcttgcgcccagtcgctctgaatcctcaaaggcgccgccatctcgaccccgcatcccaggaattccggaccggtcc

SEQ ID NO: 431713 - DNA, 956 bp, Homo Sapiens
  misc_feature (549)..(549): n is a, c, g, or t
gggaacgcaagagggtttaatggaaggttgtccaagcaagcacgccacctggcccacgtccagtcgataggggagcacccacgaattctgcaagggatttccccagaccaggcatgagcgcccgacagatccccaaagtcggtgcgtggccgcaatcttcgagagagtcaagacaaccacgagttcctccggacggatccaacgagtggctgtatccaggatacctcctgtcgtgacctttgaaggtcaccagcgcagctagcatcttcagcgtgaccatatccttcagctgggcatcccattcccccactcaggaccacaaggccatgatgggaaggaccctgcaacaattcacatcaaacacagtgtcctctccgagtactactcctgagttcatccagttggaagcctcgaccagactctttcatgcgtgcctcgtcgagctacctgagaagatcacgaccaatgaccgtcctctggctggaacatggtgccagggccatcgtgtatgacctccttcttgtattgagagtctctgggacagacaangtcagtcatactcggtcgccatactactcttaggaatgattgcacttttccctcttgggaccatcgaaatagtggaatcgcttttatcttggtttatttgtcattgcacacgtaaatgccttccgtgaacgcatgtaaccctacctagggacagccatcatacgacctaatttccctctgacaaagtcatggctagcacataacaaagatgcgtttcccgagttctagcagaactcgtacaatgaatgcatcggcacacagcatactagcttcttgatgagagcctacaggctgcgtgggatgacagctcagccaggcctccccttcatccttcctgagggcttgcgcccagtcgctctgaatcctcaaaggcgccgccatctcgaccccgcttccaccagcccgct

SEQ ID NO: 431714 - DNA, 765 bp, Homo Sapiens
  misc_feature (408)..(418): n is a, c, g, or t
gcctgacaaaaagatccatgtcctaatccccagaacctgtgaatattttaggctacatagtaaaggggcaataagcttgcagatggaattactgttgttaatcaactgaccttaaaggaagactagcctagattatccaggtggatccaatttaataataaccatccttaagtggaagaaggaagcagaagagtcagagaggtagatatggctactgaagaaggatgagaaaaacgcaatgttactgactttaaagattgaagaaaggtgccataagtcatgggaatgtggtaagcctctagatcatgggtgtccaatcttttggcttccctgggccacattagaaaaagaagaattgtcttgggccatacataaaatacactaacactaatgatagctgatgagctnnnnnnnnnnntctcataacactttaagaaagtttacaaatttgtgttgcgccgcattcaaagccatcctgggctgcatgcgtcccacaggccttgggttggacaagcttgggttacatgaaggttgctcaggtgagggctgttaggaggagggtgctaaatgaaaatgctgcgtaaactgcatgatgtttcgcaggcggttgcagttgtggttttcttgcccagtctgccaccaccggactgtaggaaggtggatatgttgtccagcctgccatccactggaccgtttctgaacattaaggcagttctcctgtccagcctgccaccactagaccgtttctgtatgttaagacagttc

SEQ ID NO: 431715 - DNA, 697 bp, Homo Sapiens
aagaagggaggtagatgtcttttctgagtgccccttccaggaggatggacactgaaaaaaaggaaaagggatagacaggaaaatctgctttccctacagtggtgtctccccatcatccacttggaatcattcacactaaatctttaccttcctatcaaggccttaatgtgacccacagagacaatgcttccctggaacagaactgccctataggcatatttcactaagatgattgatgcttcttgctgtgaggagctactgagacataagttaagtgtggcaacacctaatctccatttcaaagtggtcagtacccattatcaaggctgcaatacctgcactgactttgcatagagggaaatgatgacccacagaggatggtcattctgaatcttggctctcccactcattacctataacctctatgtgtttcagttccttcagtgtaaagtgggaataatgatccctacctcactggcttattgcaaagattaatagagaaaatacttacaagtgcctacaatggtacttgacagaatactatgaatgctgggagttctcagtatgactgagtgatccaggccatatttcagattgaacaggttgaagggaatccccactttacctccagaaaaggtggcttttagtagtcactcacccgtgaactgggattgtccaatacaacaaagatgacaaa

SEQ ID NO: 431716 - DNA, 1240 bp, Homo Sapiens
  misc_feature (1035)..(1035): n is a, c, g, or t
  misc_feature (1217)..(1217): n is a, c, g, or t
ctgagccaccgcgcccggcctatttttcactttaatttggcagctgagaatgcccaaaaagtgccagaaggcatcgtggcatttccagaaccatggattctgcctttggacccctactctattaatatttaaaactctggggccttcagatgtcaccctaatccactgccctaagacagaatttctggacaagatgggtaagggcttcattccttcaacaagtcaagtcatacttggcctctccctgagaatctgagcaggagccttataacctgtggtcattattttttctttctgtacagaaatagaaaagcattagaaataacttctaaccatcctctgaaaaaacagaaaaaatatcgaatccctctttcatgagaagtcttttggataattggaaaccttcatcactgaggttggccagcccctgccaagtgttgtgtaggcaaagcacttgttagtggcttcctatgaaatgttttagagatctcttcaccatactggtttcttctctttggttgatgtgggtaaaagaaaacaaaacatttcctataagctgaaagctgaccagcattctcttcttggtaacatctactactccaatctagaaaatttggattctagaccaaaaatcaggaaacatggctccttataaatctgtgcagctgccttatagtaccatcaaaggaatttcaggtgggctgggcggggccccgatcccagaattttcaactccacccatcatcatttggtcatgaagcatcctttcattcttcttcttcttattttttgggggggcggcgcggggcgagggatctcaaagttttagtcttccagaatccaaattaaaggttgcccctgatgggggccaggttccgccacagaacatcttagatgtcagccttgacctcacttagcagggattacagaaatgagatacattttgaaggagagttgtctgttatgttcactgtattctaagtgcctgggataaagctgtctcatgggtgctccatatatattcatatatatttnttgagtgaattaatgaattaagagtggctggcagagtaggcagaaaaagacactgcaaatggcataaaaattaaagtcctagctgagttctcaatggtaaaggcatcagatgtcttaggcagtcaagctaggaaattcatgacatgagtattactatttgcctaatgaccactccttgctcntcctgtaatgttatccacagtgg

SEQ ID NO: 431717 - DNA, 1696 bp, Homo Sapiens
  misc_feature (53)..(65): n is a, c, g, or t
  misc_feature (69)..(69): n is a, c, g, or t
  misc_feature (71)..(71): n is a, c, g, or t
  misc_feature (102)..(102): n is a, c, g, or t
  misc_feature (110)..(253): n is a, c, g, or t
gggccgggtttccctggggaccccgggttggccctcgttgcccgttgttgttnnnnnnnnnnnnncctngngggtggtttttaaaggtttttttgggggtgngggggggnnnnnnnnnnnnnnnnnnnnnnnnnnnnnnnnnnnnnnnnnnnnnnnnnnnnnnnnnnnnnnnnnnnnnnnnnnnnnnnnnnnnnnnnnnnnnnnnnnnnnnnnnnnnnnnnnnnnnnnnnnnnnnnnnnnnnnnnnnnnnnnnatgttccaaatgtgatgggtttattttattttactatgatgcaaaaccaaagattccactatagcacagagaccagtatattacaaggtcatgaaaaaatggtgtgggacatgcaggacgtgatgtacaaactggtgggtcagatcgtctcctctaacatgacgctacactgtcgctgaggaacacatttaataacacttcagaactgaactgaaacgtggcacaaacatgacaacttccaggcatgccttcaagcatctccctcaggagggattcgcaacccctagacttcagtgtggggaggattacaattctttggaagaataaaaagttcacacttttgaaatttcacagaagaattttaaggccaaaacatagtgggttcatttctcttcacttccagggacaaatctgatgctttcctcaaaccacattaagcttccagttcaaatcccaagccaaccttgtgacctcctgcactgaagttcttcccatcgattaaagctgataaagtcaatttgactcctggtcgaagggtctgagtataacccagtccaatcaggctggcattatttactttagcagagagagaagttctacaatccagcatgtacttagcagcaatgccaaaacgggtgttgttactcccagctgtccaagcaaggtttatggatgtttcaatcttctcattcaccttctggtagatagaacctccaaattcagtgccatcgttcacatgtgtgtgcagctggaagtccgcagccttgtaacccagggcgaaattattctgtgacagtttggatttggctgtgtcaaaactcatctgatagccagcaagccacccttcgaaggccaacacagcccagccatagatggttggtccagaaaaatctatatcaacattactgccaacactaaaacaatcccgtttataggaggccttcaatttcccactcttctttcctgtgttcggtacaaatatggtatcaagagtcagtttcaacccttcagccaacttattctcccaagagatttctgtccctagagtattgtctgtgttccatttctgggtgaaggtaagtccatagttacagaccttatatttggtttctaggttgcctgatgctttccctgtatcagtgtaagcatgaccagaagtagaaaattccatcactccactacaagacttggttttcaggtctatcttgaccatgccaaagccatatcctttgttgaagacatccttagcagcctttcctaggtcacagtacgttggtgtgttacacatatcttagaaaaatctctctcaggctcttatgaaaccaaagacctccaccccgagggcctgtctctgctccgccagggcaacgctgaaggtcttcaaaccaacgccgtccgcccctccgctctcgacgaattcgagctcggccgatttggcctgat

SEQ ID NO: 431718 - DNA, 2611 bp, Homo Sapiens
  misc_feature (1264)..(1276): n is a, c, g, or t
  misc_feature (1534)..(1547): n is a, c, g, or t
  misc_feature (2568)..(2568): n is a, c, g, or t
  misc_feature (2572)..(2572): n is a, c, g, or t
gttgtcaataaataattccactttaatggcaaagtaataatttagacagatacagggtgcacatttgcaaaaaaatatatgcaagctggtttacaagctagaggaacaataaaccaatagaaaatacatcatccagttaagtccattgacaccaagtacttattgttggggctttacaaagactacaaaacttttcagatgatttatttcactgtttctgcctatttacatgatatgttacatcaaaatgtacaaaatataaaatgtatacagacaaatgtttcacaaactagtttaagttgtaaactaggtggacctactgggatgtattgcaggaaattctgtttatgctcatgtttggactgtgtttctcaaaatggcagggaaagattagcaattttcttagatcacatattatacaagggaaactagtcactcatccagctacatatattgatgtttcacaacagatttgatccatgtttgaggcttcaaagtcagggtgacaattctatgtgcataaattcagttcggatttcccttagggcaatagcaccgtgtaaggacctattgactttgtgacactctgaaaactgcacagatgtttcgtggtgttgttgttctatagcaactgacccattggtggtcacagagagtagcaccaaatacacgtcctaaaagtaacacattttcacacactcatagaagaagtctataccatggcctagcccttgggtttcataaacttaaaacctgtcctttgtgtgtggtggtaacttctccaatgactgatcagttttcatgcactctctttaaagcctgccatgacagatgtactttcagacagttttacttatccaaaaatatattggcttcatgtacagttttgaagcatgctcactctagcactgatagctcctgcatagtcaaaaacaactgtaaatacaggacaaacacaccagataatacagctttgagggtttgcattctgtatttgtttgcaatgtacaggaaatctcagcaagtgaaacacctcttaacaccaacaggataaaatacaattttgtttgtgtttgttttgatttgtgcaagttttaaaaattattatttacaatacctacccagtagactgtgcaaatctaaccttcttttacagtataaacgcttcctcttccacagtgaccttaccgcttcagtgttctttaatgctgaatttctcatgtacaacaatagcaatcaaaacaacatgcgtcaaaactcattnnnnnnnnnnnnncaatagggaaggaaagccgaatagttgtgctcatgctgcatcctagtgctttccagccctgctggataataattcaaaatctcctgccttctgaaactctttcacttagaactggatggaatttcgccaccatgtcttaggttttaagtgaccggtccaagagcctttctgggttattttaatattttggaggataggccaagccgatctattcaccaggcgttaaaatactgatctttctcctatccctttcttccnnnnnnnnnnnnnngagaaagatatatagagatgaggctactatgttaactggtgttgcttggttgtaaatgaaaagacagtggaaattaccaatggtttaggatttaaaccaactgttaaactgtcatagaaatctgttttaaggcagtgagacagcaccataggaaatgttccttctttcactgaaaaggctcaaacaaataaagccctaaaaaagccttttatcagtgttgactaataattggtataaaactcttgttaagggagtgggcaggtggtttaaaaagaccactgtggtaaaaacaaccttataaaaccagtgactcatatactaaaaagttggtggagcacatcatgagaacgtggcagttagaattaaattggcacttctccagtttgccacagtagtgtttttctggtggttgcacaattccatttgtgcttatggaggactggcctcttggatttgttctggaatggggtgagcgcacaacacaaacactactgaagccctgtgaccagcaccgtgtggcacaaaggaggttggacagatcagaaagatggaccctgcctggggcgaacagcccctcagaggaaacaaaaggaagggacaaaaaatggtctgcattgtaaacttttaaagaggaaacaaagaaagtccagtttggctatcccatgtgcaatctgttcagttgccctgtcattagggtcctttccagttgagtaatggagctttctattactccacagatataaaaaatgcttagaaataaactaaagttaagcttccattgcaatttagcatcttggcggttcagacttagttctgctgcctccttggagaccacaactctgggtcagggcccttgacagggtgcttttatactggcagtggtttagtgaaaatacctttcttttgaaacatttttttaaaagcaaagtcttttcccttaacttttttcaccatgaagacattttggattcatctcttgaatctaccttctagagggtggattcatggtggcttggtgctnttcntgtcgcagctttgtgtgctcgagtaattggctgcttctt

SEQ ID NO: 431719 - DNA, 3735 bp, Homo Sapiens
  misc_feature (3150)..(3167): n is a, c, g, or t
  misc_feature (3636)..(3672): n is a, c, g, or t
ttttttttataaggtaagagaaatatttatttaattttgcacaagaacgagcttatactgaacaaattcaaccaaataatattaagtgcagtaaaacaaggaaatagggatgacttttcctgttagaaaatattaagtaaccatgcctgtgcattatttttatcattacaataacttgtttcagatttcttttcagagtgtactgtacataacatgttatagcttctttgctttacttctgaaaatataattcattcactgcctgacattttatttcttgcagtgaggaacctaactgattcttgaagattctgatctagaggaaaattttctgcaccagtgaagctagaggctttcacagatccaatgggctcaggctttctatccagggttcaggatgtcacggtatatactgtacgcccattcttctacatggtgatgtgagacacagtagaggcagacttgaggtctaattttgccccagtaattttccttttgtgattttgtcaagctccacaaatttcataattgaaagttcactcagctattaacaaagctgcatttagctgcccacaaatcacccaatttaagttttaacttctttttggtcttttaatgaaagaacattcttttaacagaaatctcccatgagacagttaacttcacagttcctgaaggcactgtggatccactgagcaacagatgtggccattcttgcactggcagagagtacactcagtgccatgtttgatccaagaggacccggtgaagcgaaccacattcatttcgtccaggcaagtcttggtgatgtcattgcggatggtgtcagcctggcaagggtctgtgacacagcgcgggcagcactcattctctgggagaatgctgaattcacactccacatctgggcaaggcaggggccaacaatcaacttccccttgcaagcagcggcactgttgacaattctggacccaggtgtcaccactgttatacaaagtttccccattttgatggaggcactgactactaagccttgggtcacattcagggcagcaaaaaagatcaactgtgggattctcacagtcacagaccatccgtcgacacataacgaatccattctgacatgagcacacagagcacctgtcattttccaacacccaaatctgaccattgtgcttaacttttccatcatggatgcagtcccctgtgcaattctttccatgaggacatcgacaatcatatccgccatccaaattgaagcaaatggtatcattggcacagctgtgcctcccggtcccacactcatcaatatcttcacacgattctccacttggtgaaaacatcccattgtcatggtagccatctctgcactcacagtggtaccatccaggcaggttaatgcaattagcacgactgtcacattgaacaaaaccatcagagcattcatcaatgtccgtttcacagctgggtccagtgaagccttgtgggcaggcacacacattagcggcaatacaggctcctccattcctacagccatctttgcaaaatgctttgcatgtcgttccattccctgtatagcccggcttgcaaacacagttgtgtcctccaacagtgttgaagcataaagcattttcatcacagttgtgctgatttgtgatacactcatcatgttctgtacatgaataatcatcaattctgatgtatccagttttgcagatgcacataaaagaacccggggtgttgacacacattgtattttcacgacagtaatggcgcccttcagcacactcatcgatgtcttcacagtaggcattatcctctcgaagagccctaaaaccatctcgacagctacaaacagccctgtcattcagatttctgcagatggaattctccatgcagttatgcctttcagaacaaaagtcataacctttacaaactttgcaacagctgtgagacaaggttatctgatgagactctggacaatccaaagctggacagcctgaactctcaacaagtttcatggtctggtccttgcactcatagagaacacatactccagaagaggaatagactgtatttctttctccttcaaagtaggttcgtccttgaaattggcatatcgatttgcattccttacagcatttgccatccacatacgcaagagccgacttaagtgggcagtcaggaatttgggcagattagagtttcacactggatggttccattcaggcatgtgcagttcttacagccgtctatccaggactcaaattctcggtaggtggttcccttcatggtgcaagtcctttcacaatagcactgatccaatctattcattcgctgttcagctcgagacagcttggctgatgttttggctaaaatatcctgtagctccatgattttctgcacaagtccatggaagtcattgcaagttggacaggtgcgattaagatctgggcactgagcaataaatccctggggcatgacaagtaattggacatcttgcattatacccttaaaatattcatgcgcattatttctctgtcctagccaaaatgttgtgcctagaggcaagtctgtggagggcttttctactaccctttcataaattttattgcagtcaatgtgtaaaatcaaatgggaagcactgatggctaaggagagcttgtgccacttgtcatcagccaaaatgtaaggaaacacttctgtgtgagggcggtgactgcctgagcggtaatgcagtctgacttcattccgatggccactactttccagttccaggtacctgtgatccaagtggtgaattgagagaataactcctgaatttaagtgggtctgttttagggtcaccaaaatagtaaattcatgtttatttctcagcttctgaaaaaactgttcagctgtagcagtggatgcttttatgcttctgggagtatcttgaaagagaaaggctttcgtcccattatgcagccccgggacctgacgcactccggtcgtggactccccaagttctaactctgttaagacgtcaatctgtagggaagggtccacaccaagcccccaaactgctccgagaccgaagatcaaacagaatgttctcagtaagacccgagactccatggtgcggatcagctcagtccatcgtctccctctttnnnnnnnnnnnnnnnnnncgaagaggttcttggaatcaagcgggaaaataacgtttgtctctcctgctgctgcctcggatttactgatcagtaggattaatacgctttggttgcctaagaaagaaaagggaggcctccccaggcgcgtgaagaacttagaccctccaatgcgcacatcattcccacacgcagggccgaggcggcagcgcggcccggagggggcccggagggaggggtcggactcgccccggcgcggctccgtcggggaattagctcccgagccgaataaaagcagccaaagactcgcacacccggtagaaggggggcggccccaagaaagcccgggctggggcggccccgcacccccccgtcttccccgccgcccgaacctgttgtaaaggcagagacaatggagaaagctccgggagacgcgcggagagaccgctccgctctcgacgaattcgagctcggccgatttggcctgatnnnnnnnnnnnnnnnnnnnnnnnnnnnnnnnnnnnnncgccgccaccgcgttagagctccagttcgccctatagtggggtttcgagttaattcacgcgtg

SEQ ID NO: 431720 - DNA, 539 bp, Homo Sapiens
tgttatacaaagtttccccattttgatggaggcactgactactaagccttgggtcacattcagggcagcaaaaaagatcaactgtgggattctcacagtcacagaccatccgtcgacacataacgaatccattctgacatgagcacacagagcacctgtcattttccaacacccaaatctgaccattgtgcttaacttttccatcatggatgcagtcccctgtgcaattctttccatgaggacatcgacaatcatatccgccatccaaattgaagcaaatggtatcattggcacagctgtgcctcccggtcccacactcatcaatatcttcacacgattctccacattggtgaaaacatcccattgtcatggtagccatctctgcactcacagtggtaccatccaggcaggttaatgcaattagcacgactgtcacattgaacaaaaccatcagagcattcatcaatgtccgtttcacagctgggtccagtgaagccttgtgacatgggcgtgagggatcctctagaacagctatatca

SEQ ID NO: 431721 - DNA, 1413 bp, Homo Sapiens
  misc_feature (11)..(11): n is a, c, g, or t
  misc_feature (1087)..(1087): n is a, c, g, or t
  misc_feature (1293)..(1293): n is a, c, g, or t
ttttttttatnagggagtgttctctttatttctctttggtttcttaacacaaaagacatgcattctataaataaaaggaactaagattttctgggaaaccataaattgggaggaattcccacagtcacacctctgtggtcaagaggatggtcttcagcccccatctggctgtaatctctgatgaaatccagaagagaaggcccgtgtgttatccaagaaggtgaaacactcaaggacagtgaatgccacagtcctctgctcagagctgggctaggcccaaggcccactgagtacaatgtctaccctatctccttgttacatcctttttacaatatccttgggtgatgcttcttttcatggggctattgggaaaggctccaacaccaaagagccagaccagccatttacgaatagccattcaccatcggactgaggaacctactgggagagtgtgaatatgttggtgtttcctgacttgtgctcagagcccagatcaaaacactggcttgatcttactttgaaacatcgacctcaggtgcagcagtgtaaattctacaccaggaggtgggattggactcaggaagtccactacaagagcagcaggccatggtagaaaatgatctgccatacccagtggcaaaatctgggccagtatcctaaggacccactcagtagcccacagaccgattcttaataccttcacaatccaggcttgttggtgctacttcaaattcacaaaagaaaggggcttataataagacaagcactgatacactcctaacaggaaatgcacaccccacccaccttccgagtctacccctacaggcaaaccaggaaggagggagaaatgctggagccctaccacgagcccaggttaaacgacatccgatatcagattgttgagacgttaaaaataaaaatatcattttcaagtgcttgtagcagaggcctagctcctaagttgtaggtaacaaaggtacttccctctgaatacatggcgattgcacacactggtaaacctgacggtcctggggtgggggaagacacccccaggctcccacattgtgcctttctgaacaggcttccnaggccacccccaggcaggcagcaaaggataggaaaccaagcaggtggagactggagccctaagactcagtcttgggttacaggaattgaatcttcttttagtctctactggaagaattttagaaaaccaattttggcagcagcagttgaaggacagccccactgcccagtgcactggcaagagaaaatgtcctcctctttgagtcncgctgtgctacattaggtcctatccagggaggaggaagcaatatgaaatctttccaaaaggtaaaggtcatttgccaagattagaggaagaaatataaaatctgttctttgcagcagcaa

SEQ ID NO: 431722 - DNA, 606 bp, Homo Sapiens
  misc_feature (218)..(351): n is a, c, g, or t
tttctgatgctattttctatctaaaattctctttgtccctttcaaaggtcaagagaggctctggttccctacatataaaaggggggaaaaaagccaaaataagagtcacaataatttgtagtatattttatagtttaatgtctttaatacacatacaaaaaaacacaagtgtatataaaaactgaataggggatatttaaaaatttttgtttaattannnnnnnnnnnnnnnnnnnnnnnnnnnnnnnnnnnnnnnnnnnnnnnnnnnnnnnnnnnnnnnnnnnnnnnnnnnnnnnnnnnnnnnnnnnnnnnnnnnnnnnnnnnnnnnnnnnnnnnnnnnnnnnnnnnnnnaaaaacctaaatttaaggcacatcatgaatttaaggcccaacctaaatgactcacctaccccatcccattataagcccaaattctctctcattttctatcctctacttacctccttccccaaattggtaaactaatggtttaccaattcgtttacaatggtaaactaatagtttcctttgacctgataactatctaattttcactaagagttgtaataatagtaggtattaagaggtggtaagaacaccaaaaac

SEQ ID NO: 431723 - DNA, 552 bp, Homo Sapiens
  misc_feature (2)..(2): n is a, c, g, or t
  misc_feature (447)..(447): n is a, c, g, or t
  misc_feature (480)..(480): n is a, c, g, or t
  misc_feature (514)..(514): n is a, c, g, or t
  misc_feature (527)..(527): n is a, c, g, or t
  misc_feature (542)..(542): n is a, c, g, or t
cngggggagagaagtttattcatacacaaaggggcacgccaagggcgccagtctagggttacaccacgtgaaacagtagaaaattcaaccaggaaagcaggaaattcagtgaagctactacaaagtggggcgagtggactgaaaactaggattttccttgcaagtttcttttcataaaatttttactttatgaattaaatacattgagaaacagtgaaaatatatttacagtcatttgaagtgggcactactaacatatttaatttaaaaaaatctttgctgtttctttgcctgtttctttcaaagagaattttaaatatgactttagcttttaaaaaatacaatagggaaataattacattcttaatatgaaaacattttacaacgtattcaccatggtcaattaattctgaatatcacttaaaagttgatgttaaaatgtaaagngaatatttcccttcttgttaggaaaatcaaaanggattatctcattaaaaacacctttgggccctangggcttatggatnccgaaggatggtccnttttggaaag

SEQ ID NO: 431724 - DNA, 1821 bp, Homo Sapiens
ttttttttgtcgatgagcaaactgaactttaatttgcttacctgaaaggcttgctcttcattattggcataggccacagctatttacacagaatcattgtacaggatttacagcaagatgctacacatagcatcattctggataagcgacaaaggagtaagaacagactggggaataaagctctgaaatcaaagtgtaagcagaaatctgaaggtaggtgtacaaggaaggataagggccaaatgatgagcgaggttggtgaggtagacataagggaggaagaggaaacatccaacaacttgtggtgcagagatataagggaagagtccactggcacatagtcttaaaaattatgtttggagtttgaaggaggaaaaatctgccataagccacctctgtgagaaaaaagaaggcagttagaaccttacaggccaaaccttatacctcccctatcaaaaagtaattctgctgattaaatccctggataggagaatgagaaggttgaaaaaagaaagagagagatgcatagacacagaaccttaaacagagttaagagacacaaagtaaatatattcaagagagacacaaagaaagaggaaaagaacagaagctcaggcacatctagaaattagagacatcctattaacttcacgagtcatctttccttacctcatcttccccaaagctcttcctccacccctaaatctctgaatttctaactttaaccaaagagtagaattcgaatgaggctggcacatgggggacgatctaagattccatcttaccaattcaggtcccctccttatcctgtaccggaaggtcagggcttgagtcgtagccagggatagattagggtgagaatagacaggatggagacacgaggccacaaagccccacaatcccagggccacagcgccagaggcctagtttgtccagaggaatgaagagatcacaggcatttctgaccacgtctagcagaagtgggggatgacctctaaggactcgagccaggagcaggacttgcagccgaagtttcagagccagttggggcagacctcctcctggagtgcctggtcccccaagtcccccagtttcacttcctcctgggactcctcctccagaacctttcagtcgccggctacaagcagaagactcttgctccatcagtaggcgaatctcataagcatcacggctcaaattcatgatgagggaaaacaaatagtacctgaatgaacgctgggcccacttctcctgatccacacggggagccagtccagactttccagcccacaggacattgtcacaggcgaagtacaaggctcgattgaggtgactaacagtgatgcagaatctcaggacaacatctgataggtgaacagctcttttggctgactcaagggcatctgctgagttacccaggcgtagaagctttcttccaaggctcaggtggctctccagttgtcgaatctgtttctgtaactcaggactggctccatgcctctgcagcgcatggccaagaagagagcaagcatactgggcggccctacacagccgctcccgggcttggctctgagcactgaagcggacccaggcgtccatgacagccgcagcccaggctccgcggccctgctcccgccccacttcccgcccctagtcacgcctactgcgcgacccaacggtgcctcgcgagggacaaacagtatcagaaaagaaagcttggccctggaagcggaatttcaggacgcgaaactcgtgtcttttgagcctccatctgtgtattactgtgcgtgtctgcgtcacagcttccccttatcagacgac

SEQ ID NO: 431725 - DNA, 991 bp, Homo Sapiens
tttttattagaggtttccaacacactttattttgcagaccactggtttgtagcttttgaggaccaacatctctatcaattcctataaaatgtccaatcactttcagttccgtagcaggctcttccatactgcacaccatgcttatggctggaggtccagttacacatgcatgaaggctgccctgcccactggttcctggaggagggcgcgtccgagttaaagcctcttccaggagcttgaacttcccaggggtcatttcctttggcaagaagtcagtttacatgtgcagctttggtgcctgtgagcagaaagcaccagaaatgggcaggatgtgctgctttttctctcacgaagatgggcacttgaggatccagcgcccttgtgcttaatgacaggaatccctcctcattgcttagtaggttaaaatataaggaagcctccactttacataacacagagaacacctttttagattgcctatttattctagaactacaaaatttaattcaagaaaatataggtcccatgaaagacttaaaagttttataaaactaaaaatctagtttttcccgataaattgtactttaggcaaaaccctcccaacgcttctaaaataatactaaaaggggcatctgattatacaagagcaatttaaaaaattacaatatttatttggaataacaagtttaagttcgagctgcactgttggcaatgcaggttttctaacacagatcaacaaacaagcgtgcacgaaaagtactggcgccaaggacacaagttaatgctaagaaataagggccaacacgctgctgcattttagaacaccaacagcctgaaatccctgtcagaatacgagagtgcttcgaccctcccatccccagaacagtcttacctttggatatatctcagaacttctcgggtcctcctctgagctctagtggtatagtgtgaccccttgagcagtcttgttcctgacttcatatgcacagag

SEQ ID NO: 431726 - DNA, 903 bp, Homo Sapiens
aggatttcgagtgggttttaagtgtgtgaggtgtatgcacgttcggccgatcctaaggtcaccccgatgggtagacaccatgagattttggttgcttataggtcgttaaattgaagtgataagggaaatagatctatgtgtgggtcgttccgacagctatttctgtctagattaagaggtggccccgggtgtgggattcacagttttgagtgtccacttgtggtgcgacctcgatgatccggggtttgtctatgattctggctgtgcggttgcccttctctacaatcccaataatccatgcttggtggccttcaccatatttgggggactttatctctgcacagaaccgagctgcttgctcacgtggtaaacagatcagaaggccgcctgaagtctccgggcaggtcccgtgcatgaggccgaacatgtttccgcaggccttgctcaccgcagccatcttggccagcaccgggaggttgtgaattacaaacgacacctcgttcctctgctgcttggccaggttctgcgcatggcccaaaatcccgaagcccgtgatgtcagtggcggcgtgggcattgaacgtgtgcatgagtcctgcagctgtcctgttgagcctcgccatgttcatcatcgcctcctggtaggccagctctacatcttcttgggtgaccactagtttaatcttattccatttctcagggatatccagccactggtgcacagccactgccacctgtgtccccaggggttttgtcagcaccagcacgtccctggcactgcattgtctggcatgataaattcattgggttggcagacagtggtagccactcctcccaggacaatccaggggtttagtactgtttggccgcctgttacagacgttcctgcttcctcagctgcgtc

SEQ ID NO: 431727 - DNA, 2472 bp, Homo Sapiens
  misc_feature (709)..(719): n is a, c, g, or t
cgcttctaaaataatactaaaaggggcatctgattatacaagagcaatttaaaaaattaaatatttatttgaataacaagtttaagttcgagctgcaatgttggcaatgcaggtttttaacacagatcacaaaaagcgtgcacaaaaaagtactggcgcaaaggacaaaataatgctaagaattaggccaaacagctgctgattttaagaaaacaaaaggcctgaaatcactgtacaaaatagaaaatgtattaaacactaccatccacagaacagtctttactattgattatatttaaaaattatttgtgtaattatatattgaattgtaaatgagtattatacatgaacctccattcggaaggcaattccttgtagcactatagaacatctaataacattgcaaaaagtatccttttttgctatcgataaaacagttaatggtattactgtaaatatcaggaaggctacaaaaaaagaaataagatttcttttttgtcttcaaagtgttttccatgcaatgaagcacttgctgtgttgaactgaatgcactactggagaatgttctgggtccgagatgctcttgagagacaagactaggcttttcaaatcaaacactcaaaggaatcatgcaaccctcttatgactgggataccgtcatgtgccacttaccaatgctgtctctccagaaaaccattcaagacgcttnnnnnnnnnnntcagacttatatgataaatatacataaaatgaagacaccaactgctatttgacacgactacgggtaatgcctgtgctatgtgaaagcacctttaaaaagcctatgcggcaagagataagtgtctaaagattcaaaatgaatcaacagtattggataacaatataattctcaactcagaaactgcctcaagattaggtgcatcttcagttaatgtaacaggaaaaaaaggcaatggattttattttattaattgtatccacttacaaaccgacctaaggtcaccccgatgtgtagacacaatgagatttttgttgtttatagtctttaattgaagtgataagggaaatagatctatttaaaaacaaaaccaaacagctatttctgtctagattaagaggtggccccgggtgtgggattcacattttgagtggccacttgtggtgcgacctcgatgatccggggtttgtctatgattctggctgtgcggttgcccttctctacaatcccaataatccatgcttggtggccttcaccatatttgggggactttatctctgcacagaaccgagctgcttgctcacgtggtaaacagatcagaaggccgcctgaagtctccgggcaggtcccgtgcatgaggccgaacatgtttccgcaggccttgctcaccgcagccatcttggccagcaccgggaggttgtgaattacaaacgacacctcgttcctctgctgcttggccaggttctgcgcatggcccaaaatcccgaagcccgtgatgtcagtggcggcgtgggcattgaacgtgtgcatgagtcctgcagctgtcctgttgagcctcgccatgttcatcatcgcctcctggtaggccagctctacatcttcttgggtgaccactagtttaatcttattccatttctcagggatatccagccactggtgcacagccactgccacctgtgtccccaggggttttgtcagcaccagcacgtcccctggcactgcattgtctggcatgataaattcattgggttggcagacagtggtagccactcctcccaggacaatccaggggtttagtactgtttggccgcctgttacagatgttcctgcttcctcagctgcgtctttaaaaccttggataatcagaggcatcactttatccctttccctgtcggtcattttattactgactccaaggagcatcagcatattgtcacattccgtgacccccattgcatagaggtcactgaggacattggcacacgctatcctgcccatcatgtaagggtcgtctacgatcgggtaaatgtaatctgtggtttgaaccaaggaaagcccaccgtgcctcaaaggaatgacacaagtatccattccaatgccaagccttggcataacggctcccagaaactgctcatcttcttggaagtggttctcctgtaaagattccagcaatttttgcaggacatcttggggcactttgcagcctgtgcccttcagttcagtgaatctggttagccggaagcttttgtccaattcgtaactttccgggttaaaggactcccgcgtagacatggttcttgggccccgctctcctcacagctcagcccctcccctccctctgcgggttggctgggttctttatggatccaccggctcgctttgcgccctccgcctcctcccgaaaacgggccgcgggccgctcccacaatgcaccgggcgcggccgggctcccttaagcgtcgcctgaataaaaatg

SEQ ID NO: 431728 - DNA, 965 bp, Homo Sapiens
gtctaagaagggatgccaccaagaaactatacatgggtgcaggtttatgaggaatccttgcatgacggccttctacaaggaattatagaaaagtagggctacttggtaatatacaactgagagggtaactgtgtccctcaacaaactactccttagtgcctctttcaaaggcagaatgttgatctgaatggatcactggtcaagtatggcatctctaatgttcttgaagggggaggaaggagatctggtagctggaaaatataattattccacgttaggctcacctgaattggtttaaaatcatattctgattctcttctcatcccttcctcccctcacccaccatatacctctggcatccctccatgcaaagaaatgtcgaataggcatttcttggtataatttacctacacttgtgcttgtggggtgggagtaaaaacatatccagtaagtaccaaggctaacctcctaatggctggagctcagttaggtctctgggctctctaaaggagtccagagctcttgtccatgtcacaaatggagccttagaatttctgtctttccttatgtggcagctttggccattgtgtcttgaaattctccctcaggaaatgtgataggggatattatcccatgggattttagtaaaaatcagcttgcctaatttcatattcgtgttcataatgaagaatgcgaagtggtggtagtcctcaggattaagtgtaaaggaaatatgcaaggaaaagtagcagtgtcagcccttttggactgcttatgatttctgccttagagctacaagacttggaacaagaaataacaatacctcaagaaaatgtctggagagatagcaccactgtccctcaaagacttcagccactgcacattaccaattcagctgtgaagcatttacaactgtattatctgtgactgtctgcatttcctgtttacatgcatgtgctggggat

SEQ ID NO: 431729 - DNA, 952 bp, Homo Sapiens
  misc_feature (98)..(114): n is a, c, g, or t
acagggggggttttttcccacaccacatgtttttgggcccccaggggagaagggggtctctttggaattcttctccctgggcccctttcaataaaatnnnnnnnnnnnnnnnnnttggggcctttccccaaaaaggggcgtgggggttttccaaggatatttccccaacattgatttcccagttccatttaaaggctgtttctccgggggctgtgttttcattttttattagggacattaagatagttttaattatatgacatccagtataatcaacttgagtaagatagtttgcaacgtatatattacattttataaaatggactaaaaggcatatttggaaagatgagaacaccatatttatcaacaagtttttgcatctgcccagtgatataaagtaactcaggatcacaaagcaacaatatacataaattacagtaatcaaaatttatgttaagcacaggcagtgaattgtgtaagaataaagtatttttcatcagctgaacagttaccaagaatttagattcacagccttggctaaatgacccttccccacaggaagggttctgtggggttcctttattgccattcagtggtgcttgcttgagtagtttgaatctgcccatatgataggcaccttttttattgtataatgatcctggccaagtcatgcgattgggttgccaccttatgtctctagtaaagcaagacactaggatttgtgctgaaaggaaaagagatgcagaaagggcacactggaacttaaagattgctctgtgtgtgccagacacagacattgtaagggctgtggctttcccatcactcactatacttttccaatcaatatcgtcgtgaggtgactgcagtgatattatttcactgtgtcaaaaaatgaagtgacacctaataaaaatgcaaaggaaaaagctggaaaccaaaagaaaatggtttc

SEQ ID NO: 431730 - DNA, 1293 bp, Homo Sapiens
ttaatatggcgtcggtttgatgggtattcttggtctggattttctttatagaaattataccgctagcagtttcctcaaaatattacaagggctcttaacaacactttggggaaaaatttctttaaaggaccaacggactgtcgttttcaaaattttaaaacgttttgcaaggtttcccagcttctctcacttagggcacaatttttcccattcccttttcagggcattcatttgttaaatggcgaagaagggaaaagaatggtgagacgacccaagaaagtgattgaacaaagggcctccaacaagtcaggcagaaaaacaggaccccacagcaattctttcagagagctcgaggggggcgccctggggcacacagggaaggcttgcatagattgacgccgttgccgagaatgcataatagtgtttccctatggacaatctcacagcacagggctgattgagcggcaaaacgctgccaggccagggccacatgggacaacgaccatcaagctacacatattgcaccaaggtaactgcttttcttttcacacctcaatttaactttttattctgagcaaaaaataaaactttgcggaaagtataaatatgtatatatacacacaaacgaaattgcagcaatcgggttaaagataaaataacctaaagtgcttttttattttattatttctttaatataccaatatgaggttctgcaaacttgtccctctggacacattcagcattatacaaagtctctcaggaaaaacccacccaccctccaatatccccatcagtccacagccttgaccctgaaaataaaactctccgatctaccaactatcccagaggtgaagaagagaagccccttgccttttactcagagagatcttcacatcttaaggcccctcctgggctttgtaccatgatctccttctaaacggaggtggaattcaataaatgacaccacttctgtcaccaaactggtggtgcccccatgagactggccagaccctgccagcaaagactgggccaccttccctcaatgcccaacctacctgcctgggaagggccaagttcactaaggcagtttggtggtgccagccagtttccttaccacctcctaagtccatgaaccccaatccctgtgctaagcaccctttgaagcggttgtctaattggagatgttagtaggagctagaagataacgtacagggtgaaaatggttaagtttactatgggaggggaaaaaggcttgatttttacctgctagaattctacaaatcctccctaacc

SEQ ID NO: 431731 - DNA, 1251 bp, Homo Sapiens
gaaggcaaataaaataagtttattgggatgtaaccccatcataaattgaggagcatccatacaggcaagctataaaatctggaaaatttaaatcaaattaaattctgcttttaaaaaggtgccttaagttaaccaagcattttgataacacattcaaatttaatatataaaaatagatgtatcctggaagatataatgaagaacatgccatgtgtataaattcagaatacgctttttacacaaagaactacaaaaagttacaaagacagccttcaggaaccacacttaggaaaagtgagccgagcagccttcacgcaaagcctccttcaaagaagtctcacaaagactccagaaccagccgagtccgtcctcggggctccgtgtactttcaacacaccgtggacaggggaggaaatgggttctgcttgctgaccaccagcttctgatgctgatgcgatatgtagcctttgacgtgtcccatgtatatcaagttagccagaatacactgaacttcgtcaatgtccacgtcctccacctgcatgaacttcaaggcaaccagaaaagcatccagagacagctggtgtgttttcagtaacaaatacactttcttaaagaggttcctgtaggtgatgatcttcagcttctccaggatgaggaagattccgcagcgaatgaacgaaggcctcgtgcttcgccagcgcctcgtgcagcagcagcaggttgcctcgctcacagctctggttacttccgcaaactgcatcaggtgatactttttcaaggaagctccacaatggggcatgttgacccaataagctttttactggcaagcaattgattagaatctccctttgtacttctgactaaaccggtgacaatgccaaaggccaatgaccggaatcccacacttgtttaatcgcttcaacaatagcttagtcaagcagtatagaatcaacatctccgtgacggcgatatgcttcagactgaacacaagaaccaaagaggcaacaaaaacgagttcataccagcagcattaaaaacgtgcgcacaaaaagaccaactaaaaacattacaaagatatgaaaacagaagacactacaacacaccactattggcgagcaaaaaaaccagatgttccaaaaacagtacgaccatacaggttcttctcgatacccgcaagccactctcgcgtccttcatgatgcatacgacaaaaacaactacacaatatatgaatatacttaattttttcaga

SEQ ID NO: 431732 - DNA, 998 bp, Homo Sapiens
gcaaaggcaaataaaataagtttattgggatgtaaccccatcataaattgaggagcatccatacaggcaagctataaaatctggaaaatttaaatcaaattaaattctgcttttaaaaaggtgccttaagttaaccaagcattttgataacacattcaaatttaatatataaaaatagatgtatcctggaagatataatgaagaacatgccatgtgtataaattcagaatacgctttttacacaaagaactacaaaaagttacaaagacagccttcaggaaccacacttaggaaaagtgagccgagcagccttcacgcaaagcctccttcaaagaagtctcacaaagactccagaaccagccgagtctgtgaaaaaggaattccaggttttcatcaggctgaaattagttacaaatgaaggagattaactcgggtgtgctgaaaatctcagcctcagcatccctgggaaaagcgcctccaagagttccggcttcagggagccttgttgcagtaccggaccggtctcatcagcacaaccaaagtggaaagaaacaactgctcacccgtcctcggggctccgtgtactttcaacacaccgtggacaggggaggaaatgggttctgcttgctgaccaccagcttctgatgctgatgcgatatgtagcctttgacgtgtcccatgtaatatgaagttagccagaatacactgaacttcgtcaatgtccacgtcctccacctgcatgaacttcaaggcaaccagaaaagcatccagagacagctggtgtgttttcagtaacaaatacactttcttaaagaggttcctgtaggtgatgatcttcagcttctccaggatgaggaagattccgcagcgaatgaagaaggcctcgtgcttcgccagcgcctcgtgcagagcagcaggttgccctcgctcacagctctggttacttccgcaaactgcatcaggtgatactttttcaggagctccacagtgggcatgtg

SEQ ID NO: 431733 - DNA, 1424 bp, Homo Sapiens
  misc_feature (4)..(4): n is a, c, g, or t
  misc_feature (8)..(8): n is a, c, g, or t
  misc_feature (40)..(40): n is a, c, g, or t
  misc_feature (263)..(263): n is a, c, g, or t
  misc_feature (338)..(338): n is a, c, g, or t
aaanagangagatccatacaggcaatctataaaatctggnaaatttaaatcaaattaaattctgcttttaaaaaggtgccttatgttaaccaagcattttgataacacattcaaatttaatatataaaaatagatgtatcctggaagatataatgaagaacatgccatgtgtataaattcagaatacgctttttacacaaagaactacaaaaagttacaaagacagccttcaggaaccacacttaggaaaagtgagccgagcngccttcacgcaaagcctccttcaaagaagtctcacaaagactccagaaccagccgagtctgtgaaaaaggaattnccaggttttcatcaggccgtccctcgggggctccgtgtactttcaacaccaccgtggacaggggaggaaatgggttctgcttgctgaccaccagcttctgatgctgatgcgatatgtagcctttgacgtgtcccatgtatatcaagttagccagaatacactgaacttcgtcaatgtccacgtcctccacctgcatgaacttcaaggcaaccagaaaagcatccagagacagctggtgtgttttcagtaacaaatacactttcttaaagaggttcctgtaggtgatgatcttcagcttctccaggatgaggaagattccgcagcgaatgaagaaggcctcgtgcttcgccagcgcctcgtgcagcagcagcaggttgccctcgctcacagctctggttacttccgcaaactgcatcaggtgatactttttcaggagctccacagtgggcatgtgacccaatagcatttttactggaagcaaatagatcagaatcatccttttgttcttctgactagaacggtgacaatgctcaaaggcaaatgacaggtactcctcagcttgcttaaaatcgctgtcaaacatagccttgcgtccaacgtagtatttgtatgttactctctgtgcagtgctgtaatcgtctttcaggtttgagctgtcaattgctctaattaggggtttacataaatggagtttgttgatcttgaagtagattttaaacagctggttcaccagaaacagcatgccccacttcttagagtcctctataccagcacggctatggggaaataattttttttaagttacatagggaaataaaaatttttatttataaatcagcaaaataaactgcctaaagcaaattaatatcttgaggtaagtcccaaagctcaagtcatattcatatcaacttattcatatcaagtcatattcatcaaacaaaataacattatgaaaaaagatgtcttacctgatgggtaaaaataaaagagaaaacaaaccaggaaaatcccaattaactacttgagtaacatccttcctccgcggcaccagctaaaaactgcctcattgcagcaacaatgcaggga

SEQ ID NO: 431734 - DNA, 1572 bp, Homo Sapiens
  misc_feature (191)..(191): n is a, c, g, or t
  misc_feature (193)..(193): n is a, c, g, or t
agggaccggagccagccttttccgggaaaacccctctttaaaaggaagttttccacaaagtttccaggaaccacaacccgagtttgttgaaaaagggaatttcccaggttttcattcaggcggaaatttagttcccaaatgaagggaggattacctcggggggtgctgaaaaatttcaagccttcagcatncnttgggaaaagcgccttcccaggagtttccgggctccagggaagccttggttgcagtacccggaccggttctcattcaggcacaacccaaagtgggaaaggaaacaactgctccacccgtcctcggggctccgtgtactttcaacacaccgtggacaggggaggaaatgggttctgcttgctgaccaccagcttctgatgctgatgcgatatgtagcctttgacgtgtcccatgtatatcaagttagccagaatacactgaacttcgtcaatgtccacgtcctccacctgcatgaacttcaaggcaaccagaaaagcatccagagacagctggtgtgttttcagtaacaaatacactttcttaaagaggttcctgtaggtgatgatcttcagcttctccaggatgaggaagattccgcagcgaatgaagaaggcctcgtgcttcgccagcgcctcgtgcagcagcagcaggttgccctcgctcacagctctggttacttccgcaaactgcatcaggtgatactttttcaggagctccacagtgggcatgtgacccaatagcatttttactggaagcaaatagatcagaatcatccttttgttcttctgactagaacggtgacaatgctcaaaggcaaatgacaggtactcctcagcttgcttaaaatcgctgtcaaacatagccttgcgtccaacgtagtatttgtatgttactctctgtgcagtgctgtaatcgtctttcaggtttgagctgtcaattgctctaattaggggtttacataaatggagtttgttgatcttgaagtagattttaaacagctggttcaccagaaacagcatgccccacttcttagagtcctctataccagcacgggtgtcgctggcacagacccggaaacagctcatcagtaactctgctgctttttccaacatgtccccaactttgctttttcctttctttaccaactgttgatctgcattattggcaaacactcgaaggtcaagcgctactgcatacatgacaggcagagcccagttttcttctttgtgggcctggaatgctcgcaagaatgattggactatcacggtctggcacttgtatgcctctatgaagtcatgattccccactgcataagtgcaccttaaatgagctgcaaacatttcatcataagggggttccaagacttgttgacacttctcctctggagaggccatttgaagtcgtgggtttgcaacatgaggatgtttaaaagacaccaactctgcacaagatgctccatctctgctgtcgatggcttcgtacacctgctgcaggtactggttaatggtaatgtgcgccatgggagcgccgccgaacggagagcgccaccccctccccgct

SEQ ID NO: 431735 - DNA, 1886 bp, Homo Sapiens
gagtgtaaagaaaggtttacttttttgtatcatcccctccccgtggactgcttcaattctatcggggacaggccagtccctggaggctgcaaggagccacaaacctttcccagctcacactctgcacccctcagtctctgctgctaaagaatcagactcaggtagatggggtgtccacagtctgtcctcattacccagtcataccgggtagcatggcccgagagagcccttatctctccccaccttaaaaccctcagcatcacacagcaggaaccagtccacagggcttaccaaggatacgcagtgaaaacagaataatgtctgttacaaaccccctaaacctgagatggctgaagagccagattcctgcaccccatctgactcccccaggcagtgggagatgacccaaagcccccattccctgggcagagtggtgtgcctggggaggcctggcagtggtgctgtgccatgccagaccttgtcctgccagtcagtcagtcctgttggttgggttgagccaggagcacccacaagtcatcaggggctgtggatttgttgcttgccgcgtaccgctgaagttcaaggtagctaaagggtggagtccatcagtgggtggccgttctcgggaagcatgatgcgagtgctggcacctccctgggcagaggatgtatagtggacagactcgcgggtggactggcggaggcacgcgcagcagagaaggcggcggaaggtgcggcgcatctcagcatctcggcaagagtacacagcagcattgaccagtgagttggcctcggccaacagtaggaagtacttttctacagccaggacattgcaggactcacagcctaaaccatccaggagcagtaccacctggcctggtgtccagcagaccacgaacgcccccaggatgatgacaacagtcttgaccaggctgagcgtggtctctcggtagcgggggtggcagctgacatgctctgccattgcgctgcacttcgccgccgcaacgtagaaggaaatgcgggtgtacaccagccagtcatgagcaggtaagacaagcaggctcgacagagcccagacggccaaataggagcggctgagcaggggtgccatgcgtgagcaggggtccagggcacagatggcagtgccaggagtgggcatggcagcagccccaggcccagggtcagccacccacacgcccacaatgagcatgaccacgcggccacggggcaggcggctgtgcagctgtacggccatcacactgcggtgccgctccacggcgatggccagcagtgtggccaccgacgcagtgaggcttgtgtccagcaagccctgccgcaggaaccagccctcaagtgaaagtcgggctgtgcggggaccagtgtggaacatgaggaagaggtaggccacgcccgcgaagaggtcatgccgcggcctagattgccgagcaggtagtagatgggctggtggaagcggcggttggaggcgatggctgctatgaccagcagattggtcagcagcaccagcacgctgacggtcagccccagtgccaccacgaccacatccttgggccgccagtgggagctgagctctttgccactgttgttatagaagaagccgatggtctcgttgtagtagcactggcccatgatgaccatctcgaagcaaagtggcagtggtgaggactacggtggcctggaaaaacgcaagctccatggggctggggtggaggtggaggagcagctgtttcttacctactaataagacctcatgcgcccgcagtttcgagcctgcggggctgagtcactcggcgacccgaaaattcccgccgtgaccccgcgctgcccgggcggagctccaggtggtcttgggtccgcgcccccgctccg

SEQ ID NO: 431736 - DNA, 1145 bp, Homo Sapiens
tgtgcatgcatcatctccagtctcctgggcagccatccccactgcctccactatgtgaatgtctactctggtcactggggcatggcgtcttgtgcacctgactggcccatcagcacttgcggtgccgctccacggcgatgggccatgcagtgtggccaccgacgcagtgaggcttgtgtccagcaagccctgccgcaggaaccagccctcaagtgaaagtcgggctgtgcggggtaccagctgtggaacatgaggaagaggtaggccacgcccgcgaagaggtcagccgcggccagattgccgagcaggtagtagatgggctggtggaagcggcggttggatggcgatggctgctatgaccagcagattggtcagcagcaccagcacgctgacggtcagccccagtgccaccacgaccacatccttgggccgccagtgggagctgagctctttgccacatgttgttatagaagaagccgatggtctcgttgtagtagcactggcccatgatgaccatctgggcctccagtcacgccgcagacaaggcgggctcgcgggggttcggggtgggcatcgaggcccatggcccggcgactgcggcagggagcggtagagcgtccagggtgcagccactagtgcgggcttgcatgagagggcgcgggaggcaggggtctccccaggcgcccacagcccccaccacctgggggagccctgccccgccccgccacctgggggagccccgcctccacggccgcgtcgggggcggtgtcgcccggaaccgcagcccccctgtttcctccccgcctcgcggcccctcagtcgcccctatttccggcgcgggacccccaccccggtacctgcacacctcatgcgcccgcagtttcgagcctgcggggctgagtcactcggcgacccgaaaattcccgccgtgaccccgcgctgcccgggcggagctccaggtggtcttgggtccgcgcccccgctccggacccccaaccctcccagccccaccccgctctcttcttcgtgtccaatcggccgccgagttacaagccactccctgatccgacttggctcccaccgcccggacccccgcccagcttcggctttgccagctcgcagtatcagcgagccgcggcctcctg

SEQ ID NO: 431737 - DNA, 2112 bp, Homo Sapiens
  misc_feature (701)..(701): n is a, c, g, or t
  misc_feature (2009)..(2009): n is a, c, g, or t
  misc_feature (2026)..(2026): n is a, c, g, or t
  misc_feature (2043)..(2043): n is a, c, g, or t
  misc_feature (2102)..(2102): n is a, c, g, or t
ccgtctttcatttattgctttcctgggcctctatctgggccctaccttgagcttctccagttttattcaagccaccagagtaagaattgggtgtagatgtcacaactaccttctactcaattcaccaattcatttactgctatggcacgtctcaggaataactctagaaacctctaaatcgaaatattataaaatcttgagcacttagtcctgctggttttagttagaaaggcatccaggaattgttttcctacgcccccttgagtggaaagatcttagttagaagataaagtcaagttgtgttcaggggatgggaggaagactataaataagatgaagaaatcaaaagtaggaaacatgatgtaaacgaagcatggcagatctgtccagcactgatattgctctataaattgagcttactcagttttggccttatttttttacccaggccccatgtcacccagtcctaaaacagtaaccgtgtctacataacgggttggcccctggtgcatccctggaaaagtcaaaggacgcacacttcgaaattctgcagaacgtatttatacatggttcagaaatcttgcgtatctgacttatagccaaatctgcttgctcgaatagcctcagaggaagtcttgtttaataaaaaccttttgatttcctagtcaagtcttttatgggttgtctcgagggggtgtgtnggctactttaatgaaaggctttcctgctctaaatctctttgctgggctgggcctcttcagactatctggtgaaactcctttccttagaacaaactcagtccgtccatgctctgtggcattttgctagatgataaccaaagccttattcctgtagccagtgtcagcagtcagagaggtggagggtgtgttctgctgtggttatgcatacctatctgctgttcttgaggtgtaaaaggaaaggtgaaaatcgggccaggccaagtactcagctgtcttaataggatgaagccttaagcagtgggaaatttcagttattttccacagtattccattttgggaggatttgggggtgtttacttttttaaattctttgaacaacttaacctccatgaggctttgtgaagtcagctgtgaccaccctcctcttactgtgttctcagtattcattcacttccagggaagaatgacagccacagggagatggtggtgggcaagaatgagagtcccaggatccagatttagcctcagatcttccccatttatgaagggtttttccttttaacaagagcactagtatgaaaacattagggacaaatctcccatgtctttgaaattcgggattctcctcttgagatccccttcctcacctgccaatcaactttataagggccacaagtggtcactggttttccttccacaggtttgaggttctcagctttccttaagcgaccctgcagctccgctgttttcagagtgaatatgttaagctttgatgagattctattttcagtaagttagtgcttctgggacacttggagaaagctgtgagagtcattgtctacgcaaagaacaacgaagctgatcctaaaagtgatccaatctaagaaaatggtaaaacgagctctggccacagcacagaattttatgtgaggaactcagatttttgaagacttaacaattgcagagaaaggttgcagcctgcacaccatagcccacctctctgagcagactttggttttgtgtggtgacgtggcacatgtttgtacactgggatttttcaaaggacgctacgcgagcagactgacttgcctcttctgtgagcactgtggcttttgtcagatggagtgccggtctgcagaggactgctctttcgaatccacagtgttatctgtgtaaatagctttaatttttcttctgtgtcttaggtgaagttttgttcatgtagcaaccaggtagacagtgaccaaataagggctgtaaatgtgctgtagttttctactgtgatgtacttgaaggagaacctgtgtnctctacttttctgatcntccccacagtattttgngtttgtttcctgagtcctgaggtattattttacctctgttttgccccccgtttcttggnttttttctgg

SEQ ID NO: 431738 - DNA, 687 bp, Homo Sapiens
tttgtttaaaacttcactccttttaaaatgatatagagttgtgataatagatggaaaatgtcctaaagggcaccagatggacttcctagaacttgatttaagagcccttttgggaaggaatgttacggtcctgagtaagggatgagtgaggctctgtgggttctgccaccatttcccatcctttcctttagtttcacctaaatgtgattgctttctctgctgtactccttcctctgtgcttccttctgtctatccttgctgctgccaccactgcttgctgcgggtacctataaaatggctatgtggtatctcaacagcaagttgagcagtggaccattagtgagaacattccattcatcctgggcacagccctagtaggtttattactatagtaggaggtctgtcttgtagcccttgagtatcttatctgaattggaagctagagaagaataaaacgtagatgactgaaacataaccagaagcaggatggtcttatttcagttgaagctctttagagccagtcaggagaggcattttggaagagatgaggtttttctatctgaggagggttagaatgggattaatagacctttaaaaactggaattgggagtgagaatcagttagtcaacaatattctgctgtttactttgtgccgaaatgactctaggcactggcaccatcatgga

SEQ ID NO: 431739 - DNA, 1103 bp, Homo Sapiens
  misc_feature (497)..(516): n is a, c, g, or t
  misc_feature (537)..(779): n is a, c, g, or t
gagatattaacttggagacctaatgctctgtaaatagtcatttaaactgttggttttagtggttttgtttctaaaatgttttcttttacccgtgatgcaccagtatgagatggtgctgacactttctatgaagtggttatgagcaggtttaataaatcctctatacaagtgtttgaatcaattttaaaacataaaaagtggaaatttccttttttgtagacagtaggaacaaggaattatatgcatttttactaagtagtaattttacactgaattgtaaatgtttttacagtgagttttattaatagaatgcttcaccttaaattggaaaacaataatagtcttggactaagtctttgtactaaagcatttgctataattatttttaaaaaaacaaacagatgaaaacctcagagaaggcatgtggattataagatttgtctagtaaaaattgtaattgaatatgtttaaatatttaatttctcattttggggggnnnnnnnnnnnnnnnnnnnnagatggtgtctcacgctatcnnnnnnnnnnnnnnnnnnnnnnnnnnnnnnnnnnnnnnnnnnnnnnnnnnnnnnnnnnnnnnnnnnnnnnnnnnnnnnnnnnnnnnnnnnnnnnnnnnnnnnnnnnnnnnnnnnnnnnnnnnnnnnnnnnnnnnnnnnnnnnnnnnnnnnnnnnnnnnnnnnnnnnnnnnnnnnnnnnnnnnnnnnnnnnnnnnnnnnnnnnnnnnnnnnnnnnnnnnnnnnnnnnnnnnnnnnnnnnnnnnnatgagccaccatgcctggcctttggggggattttaattacagtattaattatagttctaggatttcccacattttatagtagtagtttgcaggatattatgtgccctaattagcagatatagacattatcaaattataatgatagtataattatccctttttaatattggggaaagaaaaatgaaaattcattagttaattactgctttgtgttgtgtgaatttattaacaaataacattattacatataggtcattgttaacaaacaaacatccctgaaaacctctgtgaaaatttaattttttatatcctgattaatatatt

SEQ ID NO: 431740 - DNA, 925 bp, Homo Sapiens
  misc_feature (589)..(831): n is a, c, g, or t
  misc_feature (852)..(871): n is a, c, g, or t
ttcccaggcattaaccagatttaattgtttttggcaggtaagtacaggctctggcagagttaccaactattctggtcaacaaaagtaaagacaagtggatatttatttttagtggagctttaaaaacctgtgagaagctcaccattgactttttggcctccagtccacaaattaatacttcatttgataagctaaagtaaagagcaattttatggattaccttctatcaaagtgaggcacatgaaaaatgggcctaaagtcacaatatattaatcagggatataaaaaattaaattttcacagaggttttcagggatgtttgtttgttaacaatgacctatatgtaataatgttatttgttaataaattcacacaacacaaagcagtaattaactaatgaattttcatttttctttccccaatattaaaaagggataattatactatcattataatttgataatgtctatatctgctaattagggcacataatatcctgcaaactactactataaaatgtgggaaatcctagaactataattaatactgtaattaaaatccccccaaaggccaggcatggtggctcatnnnnnnnnnnnnnnnnnnnnnnnnnnnnnnnnnnnnnnnnnnnnnnnnnnnnnnnnnnnnnnnnnnnnnnnnnnnnnnnnnnnnnnnnnnnnnnnnnnnnnnnnnnnnnnnnnnnnnnnnnnnnnnnnnnnnnnnnnnnnnnnnnnnnnnnnnnnnnnnnnnnnnnnnnnnnnnnnnnnnnnnnnnnnnnnnnnnnnnnnnnnnnnnnnnnnnnnnnnnnnnnnnnnnnnnnnnnnnnnnnnngatagcgtgagacaccatctnnnnnnnnnnnnnnnnnnnnccccccaaaatgagaaattaaatatttaaacatattcaattacaatttttaccc

SEQ ID NO: 431741 - DNA, 1943 bp, Homo Sapiens
gctgtggtttgtgctttatttttaggctcaattcagctagaggcacacaacaaagcagaagacaggagtaggcctggacccaagtgaagcgcaggtggggtgtgaatcctaggcagctggcttctcaggcataggtggtgacatactggggccccatgttcccgaagtaggaacgttcccactcactcatgagctcaaagtgtacaggacggcgacagaaattgcaggcagccacagacacatcctggaggggcagccccaccgcagtccaagccagcagcagcttctccacaaaatcttccatcatctgagggctgtggtggggggagggtgccaagcgcaggagctcttcaccccgggggacagttgggtagttgatggcctgcacatagatgccatgcttggagagcaggagatcacagagcttgctgttgagtgctgcattgcccacccggatggggatgatgtggctggggcaggggatgacaggaaggcccctgtccatgagtagctggcgcatgtgcttgacattgcgctggtgggctcgcctcagggcttggccctcctctcccttgagcagccgcacagattctagagctccagagagcaccatggggggcagagaagtggtaaagatgaagcctgcagcataggagcgcaccatgtccaccaagtcacgggtgctggcaatgtagccgcccacacagccaaaggccttgccaagagttccagagatgatgtcaatcttatgcataattccatcacgctccccaatcccagcgccccgggacccatacagtcctacagcatggacctcatccacgaaggtcagggccccatactggtgggacacatcacacaactcctcgaggggacagatggcaccatccatggagtggacagtctcaaaggccacaattttgggtatcttagggttagacttctctagaagtttctttaggtggtcagggtcattgtgcctgaagacaaacttggctgctccactgttacggataccttggatcatggaagcatggttgcctgcgtctgagtaaatctcgcaccctggcaggatcttggccaaggtgaagagagtagagtcattggcaacaaagcaggaggagaagagcagggctgagtccttctggtgcagctcagccagctcctgctcaagctccacatgaaacttactggtgcctgagatgttgcgggtgccaccagctccagcaccatgacgctgcagggtctcctgtgtggcttgcaagacctgagggtgtcggctcatgcccaggtaatcattactacaccagacggacacatcctttgaggccacagatgcctcagagaaatgttgggcaaagggatatgcatcagcccagcggttcacagtcttgaacacacggtaggtgtgatcctgtttcttctccatgatcttgtccctgaaaaactggtcataactgaagacatagtttccaggcatattgttctgaatcaggtgtgtgaccttcccagagatctgctcctgctcctggggaccggaaaatggcttccttaggctgactgagaccagggagctaggcagatctgtcttgaaagccttcacatcttcctggacttctggggctgccttctgcacaatcttgctcttcccatcctggagttccgacagcatgaagggacagtggcccttcgcccaagatggagaatctcctccagcctttgttgccttaaggtggatttgagaacagtttggtccttgggtagccaggatgggacagcgtccaataccaaacaggaactggtgagtcttaaccaccttgcctaggaggcttgtggggccccgggcaagcactgggcagcactgtagcagcatggctgcagtcaccatcttgaacctaaagtcctgttgccctgcactgaggacgaacgaatgacaggtcccc

SEQ ID NO: 431742 - DNA, 969 bp, Homo Sapiens
ggttagacttctctagaagtttctttaggtggtcagggtcattgtgcctgaagacaaacttggctgctccactgttacggataccttggatcatggaagcatggttgcctgcgtctgagtaaatctcgcaccctggcaggatcttggccaaggtgaagagagtagagtcattggcaacaaagcaggaggagaagagcagggctgagtccttctggtgcagctcagccagctcctgctcaagctccacatgaaacttactggtgcctgagatgttgcgggtgccaccagctccagcaccatgacgctgcagggtctcctgtgtggcttgcaagacctgagggtgtcggctcatgcccaggtaatcattactacaccagacggacacatcctttgaggccacagatgcctcagagaaatgttgggcaaagggatatgcatcagcccagcggttcacagtcttgaacacacggtaggtgtgatcctgtttcttctccatgatcttgtccctgaaaaactggtcataactgaagacatagtttcctgtcttgaaagccttcacatcttcctggacttctggggctgccttctgcacaatcttgctcttcccatcctggagttccgacagcatgaagggacagtggcccttcgcccaagatggagaatctcctccagcctttgttgccttaaggtggatttgagaacagtttggtccttgggtagccaggatgggacagcgtccaataccaaacaggaactggtgagtcttaaccaccttgcctaggaggcttgtggggccccgggcaagcactgggcagcactgtagcagcatggctgcagtcaccatcttgaacctaaagtcctcacaaaacaacctctttttcttgttccatcccagagcaacctctccccctctcatgggctgtcacagcagcctgggttggtatgtggggccaaggcatgtgggccctg

SEQ ID NO: 431743 - DNA, 2190 bp, Homo Sapiens
  misc_feature (176)..(176): n is a, c, g, or t
  misc_feature (178)..(178): n is a, c, g, or t
  misc_feature (183)..(183): n is a, c, g, or t
  misc_feature (192)..(192): n is a, c, g, or t
  misc_feature (200)..(200): n is a, c, g, or t
  misc_feature (204)..(204): n is a, c, g, or t
  misc_feature (228)..(228): n is a, c, g, or t
  misc_feature (240)..(242): n is a, c, g, or t
  misc_feature (248)..(249): n is a, c, g, or t
  misc_feature (266)..(266): n is a, c, g, or t
  misc_feature (268)..(268): n is a, c, g, or t
  misc_feature (274)..(274): n is a, c, g, or t
  misc_feature (286)..(286): n is a, c, g, or t
  misc_feature (293)..(293): n is a, c, g, or t
  misc_feature (333)..(333): n is a, c, g, or t
  misc_feature (350)..(350): n is a, c, g, or t
  misc_feature (368)..(368): n is a, c, g, or t
  misc_feature (397)..(397): n is a, c, g, or t
  misc_feature (401)..(401): n is a, c, g, or t
  misc_feature (403)..(404): n is a, c, g, or t
  misc_feature (408)..(408): n is a, c, g, or t
  misc_feature (410)..(410): n is a, c, g, or t
  misc_feature (412)..(412): n is a, c, g, or t
  misc_feature (422)..(422): n is a, c, g, or t
  misc_feature (424)..(424): n is a, c, g, or t
  misc_feature (428)..(428): n is a, c, g, or t
  misc_feature (432)..(432): n is a, c, g, or t
  misc_feature (434)..(434): n is a, c, g, or t
  misc_feature (443)..(443): n is a, c, g, or t
  misc_feature (446)..(446): n is a, c, g, or t
  misc_feature (448)..(449): n is a, c, g, or t
  misc_feature (454)..(455): n is a, c, g, or t
  misc_feature (460)..(460): n is a, c, g, or t
  misc_feature (468)..(468): n is a, c, g, or t
  misc_feature (471)..(471): n is a, c, g, or t
  misc_feature (479)..(479): n is a, c, g, or t
  misc_feature (481)..(481): n is a, c, g, or t
  misc_feature (483)..(483): n is a, c, g, or t
  misc_feature (485)..(485): n is a, c, g, or t
  misc_feature (492)..(494): n is a, c, g, or t
  misc_feature (496)..(497): n is a, c, g, or t
  misc_feature (499)..(499): n is a, c, g, or t
  misc_feature (502)..(502): n is a, c, g, or t
  misc_feature (509)..(510): n is a, c, g, or t
  misc_feature (513)..(514): n is a, c, g, or t
  misc_feature (518)..(520): n is a, c, g, or t
  misc_feature (526)..(526): n is a, c, g, or t
  misc_feature (528)..(530): n is a, c, g, or t
  misc_feature (534)..(535): n is a, c, g, or t
  misc_feature (559)..(559): n is a, c, g, or t
  misc_feature (566)..(566): n is a, c, g, or t
  misc_feature (582)..(582): n is a, c, g, or t
  misc_feature (589)..(589): n is a, c, g, or t
  misc_feature (601)..(601): n is a, c, g, or t
  misc_feature (649)..(649): n is a, c, g, or t
  misc_feature (1216)..(1216): n is a, c, g, or t
ctccacgtgtaagttagatgagggctacggtaaaaacatttttgatgactgaaatcttacttttccttctaacgatctggagcaaatcacatattcattgatcatgacgaatcacaaatgatttctgctacaatgttgagaaaaaatgtgttcattaatatgaacacatgtctacngngatgntttacacgntgcgggtnatgnaagagttcttccttaactagtctnctatcaacctgnnnagatgnntcttaaaattcccttgnanataccntatgattggtcntgtgtcngtaaaagaaagacgcgctccccatcaccaggccaccaccntaagggagctatattanatacttgggaccaaaatntgggaacccccgcgtggtaggtggttacnttgntnnttcntngntaccctgccntnatgntacntntttgttctntgntnngtganntccanaatccgcnccntttggttntngncnttccttnnngnncnccnccccttnnttnnttcnnnctgggncnnncccnngccctgtcgccgccccccctccgncagcacnggctaaaagcaaagcnatctggntacaccaatgtngtcagcatgccttgtgcttgtctgttaaccctctgagtacatctctgncattcaggatcttggtaggcttaatgttagaaaggattgcattcccatctgattactcaagatttctacttgactggtcacattccactgtttattcagcatagatcactcaaattctacagtgatgtgctgggatccccatgctgaatgggccctgcattcttctgagctgcccttctgcagtgtgctgagaaacaccccctagcttcacacggtccagagtccccctagacgtcgatgggaaaaggcctgagccatgcaccgcaggctcagtacactagatgctgtagcaatatagttaatgcccacagaaaaagcagtaattcagagaaagaaaggaaaatgacagtccactgcaggtaggtctctgcccattgcattcttcacacttttagagttgaggccaggctgtagagctactccatagccttggaatagtgctttgctttatatttctagagaaagcagtaatttccaactagttcagtgttcctcattaatatggaatctacctacacaccaacactctttctggtgttctgtgccccctacccccacctccggccnaaaaacaactcaactaatttactgatttatgctactttgtgattttgcgtgttatcacttccggatgctctaaaagggggggaaaaaaacctcaataaacgatatgctttttacatgtcaggacaacacagaccacagagatgaacctaaatgtaaaagagcaaaaaattttggtgatggtgttgcaaaagtaatgacatgtgatttaaaaatccatattaatgtagaccatagtttcagggttgaagagtaaaaatgcagcaagtgaagatcaacgtgcatttgaaaataaaggactatagaaacgttgttcacaaattttaagactctcaggtattaaagtatattcaaaacagagaacataggtactgttcagccaccagatgcaaatttcatgagatatccctctctggttgtctcgtggatcccagagcccagcaaaccttgggaatacatttgagttgggcacctgcctctaagacaccccaggagaatcctctctgagcactgtggtgatgcacagaacctgtgaatccccattctaaaatggaatctgttccagaagaaactcaggcctggagacactgcactagggagatagatttggtaacaagagtgaaaatacaggtctcagacaggacttggcccaaagacagaaaaaacactctgacctcctggacagctaaagacagtggtatttaaaaaaaatcattttaggggatggaggttttatcctcaggggtatcatctaggtctttcatcctgatcttcctaggagactatataggtaacctaaaggtgcacatggaattgtcttgccagtggtttattcactgaaaacttattgttagaacattctggattgtgttcccagtgtgctttctcctcagccatcttgcaaagcaactgcctccagtccccttgtgccccagctctcctatgtgtggatttcatactagatgtagattgcacag

SEQ ID NO: 431744 - DNA, 620 bp, Homo Sapiens
ctctgcttattttaatatgcaccacgtgtaagttagatgagggctacggtaaaaacatttttgatgactgaaatcttacttttccttctaacgatctggagcaaatcacatattcattgatcatgacgaataaaatgatttctgctacaatgttgagaaaaaatgtgttcattaatatgaacacatgtctacagagatgatttacacgatgcaagtaatgaaagagttcttccttaactagtctactatcaaactgaaaagatgaatcttaaaattcccttgaaaataccatatgattggtcatgtgttagtaaaagaaagacggtccccatcaccaggccaccaccataagagagctatattaaatacttgggaaaaaatatggaaacaccggtggtgatgattaaattgataattacatagatacactgccataatgatacatatttgttctatgataagtgaaatcaaaaataagatcaatttggttatagaaattccttaaagaacaccaccacttaattatttcaaacttgaactatcccaagaatgtcgagaaaaaaattagaaagcactggctaaaagcaaagcaatctggatacaccaatgtagtcagcatg

SEQ ID NO: 431745 - DNA, 402 bp, Homo Sapiens
ctctgcttattttaatatgcaccacgtgtaagttagatgagggctacggtaaaaacatttttgatgactgaaatcttacttttccttctaacgatctggagcaaatcacatattcattgatcatgacgaataaaatgatttctgctacaatgttgagaaaaaatgtgttcattaatatgaacacatgtctacagaggatgatttacacgatgcaagtaatgaaagagttcttccttaactagtctactatcaaactgaaaagatggaatcttaaaattcccttggaaaataccatatggattgggtcatgtgttaggtaaaaggaaaggacgggtcccccatcaccggggccaccacccttagggggagctatttttaaatacttggggggaaaatttgggg

SEQ ID NO: 431746 - DNA, 1082 bp, Homo Sapiens
gcccgggccttactgagttggggcacccacgcaaacggggccggggggaggtagacgctgtgactgggaagccaaagcgcaagagacggtcccggaagaatgggactctgttcccagagcaggtgcccagtggcccaggctttggggaggcaggtgctgagtgggccggggataagggtggtggctgggcccctcaccatgggcacccaggcggacaagctggccgaaactgtgggtttcaggggaccgaggcccgggcctttgcctccactgggctggagagtggagcctcaggccgtggcagctactacagcacgggtgcaccctcaggccagaccgagctcagccaggagcgccaaaacctcttcaccggctactttcgctcgctgctcgattcggatgactcctccgatctcttggactttgccctctcagcctctcgcccagagtcccggaaggcatcgggcacctatgcagggccacccaccagtgccctgcctgcccagcggggcctggccaccttgcctagccggggagccaaggccagcccagtggcagtgggtagcagcggggctggggcggacccctcctttcagcctgtcctgtccgcgcgccagaccttcccaccaggacgagcagcaagctatgggctaactccagccacttcagactgccgggcagccgagacctttcccaagctggtgcccccgccctcagccatggcccgctcacctaccacccacccgcctgccaacacctacctgccccagtacggcggctatggggccggacaaagcgtattcgccccaactaagccctttacaggccaggactgcgctaacagcaaggactgcagcttcgcctatggcagtggcaacagcctccctgcctcacccagcagcgcccacagcgccggctatgccccaccgcctaccgggggcccctgcctgccaccaagcaaggcctccttcttcagcagctctgagggggcccccttctctggttcagccccacgcccctgcgctgtgacagccgggccagcacagtctcgcccggtggctacatggtacccaagggcacca

SEQ ID NO: 431747 - DNA, 944 bp, Homo Sapiens
  misc_feature (613)..(621): n is a, c, g, or t
agcggcaaaggagctcattaccatgatgctgtggtcgatgtagatcagcgattttctgctgttcaagtacttgagcatccctgggttaatgatgatggcctcccagaaaatgaacatcagctgtcagtagctggaaagataaagaagcatttcaacacaggccccaagccgaatagcacagcagctggagtttctgtcatagcaaccaccgctcttgataaggagaggcaggttttccgacgaagacgcaaccaggatgtgaggagccggtacaaggcgcagccagctcctcccgaactcaactcggaatcggaagactactccccaagctcctccgagactgttcgctcccctaactcgcccttttaataagacccttttactcaaagtcctagcttaaccctttgagactctgagatttttttcccccaaatttgtgtaaaacagtttcatctgatctatctagcgctcaatgcttgaatggcagaactgaaagtgttttcaggtatctttgtagcggtttccctttactgaataagatgacacgtggtgattgtgaagatggtaatttgctgctaatagagtcctcaaagggttaaggccaatttgcaannnnnnnnnaaacttagaagcaatgaatgttttcatcagtcaagctaggatctgcagtatgtaatatagcacttgttaaccctctgagtgcatagaattttattgagaattcttgtttgggaatttttcaggcctttggatgtatacacacatgtttcttgattttactgcagatcaaggggtgttgttagatgctgaaatgtccagaaaagaaggacatttagaatgatatcttgtttgtccttttctgtgggtttagaacgtggcaggtttataacttcgacacacgcacggttctttcttcttcacaatcctattcagaaacagatttt

SEQ ID NO: 431748 - DNA, 1013 bp, Homo Sapiens
  misc_feature (351)..(363): n is a, c, g, or t
  misc_feature (392)..(400): n is a, c, g, or t
ctgggcatgcagcaactgtcagccttgctgccccagcttgcgcactggtgagggccaggctgctctctgtaccttggcttcctgcctcctaggccggggtccccttgtggccttggtgttggctggggtagctgttgaggatgggcctgggaggccagagccgcagccccacccggggggcaggcaggggttcctgagctcagccggcacgcaggtggggcacgtccccagggagggattggtcccgaaccagagaggtgtcccgtgggggagaggattggcagaaagaagaggatgtgttggttttgatagaagagaagctacaaatagattattttcaaaatcaggatnnnnnnnnnnnnngtttatgctgtgagtcccttcttcctgtnnnnnnnnngtggatactctcttctcggatccccgtttatggctccactgcccagatgggaggctcccggaggaggcccagggtgccagagcctgccagactctgttgtgcctgagctggggaagggaccctgtctcgggaagagcaaagttctatgagtgacttacagaccctgtgaagtgagggttggttttgtgattaacctttttctgtttttctttttaaaatgtaattgcccttgaatgcgagacctgggaagagccctgggctggctggtagagatgcagccctcggaccctgcaggagccggcccacactggaggcgggagagctggtggccgtgcccaggaagtgcttctttggctggttctgattgtgtttggagtttggccttgggtgaggcccgagcaaggggtctgtggctacagcgtggcacgtggcatgcgggcagcgtgcatgcgagggtgcaggcatgcgagacgacattggcagcagacaaaataaagaacctggacgaagcttaagaggagatacagagagtacacgaacccggtcctcatactaacccacgggttacaaactcggttgtccctcgtgccgaattcgccacccagcctcgcta

SEQ ID NO: 431749 - DNA, 479 bp, Homo Sapiens
tttttttaaaatgtaattgcccttgaatgcgagaccctgggaagagccctgggctggctggtagagatgcagccctcggaccctgcaggagccggcccacactggaggcgggagagctggtggccgtgcccaggaagtgcttctttggctggttctgattgtgtttggagtttggccttgggtgaggcccgagcaaggggtctgtggctacagcgtggcacgtggcatgcgggcagcgtgcatgcgagggtgcaggcatgcgagacgacattggcagcagacaaaaataaagaaccctggacgaagcttaagaggagatacagagagtacacgaacccggtcctcatactaacccacgggttacaaactcggttgtgctgtagatttgtagaaaatcgtgttgtgaaagaatggcactggttaggcagctggaggctcctggggcgggcctgactcctctgtccacagtgaggcccaga

SEQ ID NO: 431750 - DNA, 727 bp, Homo Sapiens
  misc_feature (638)..(638): n is a, c, g, or t
  misc_feature (692)..(692): n is a, c, g, or t
  misc_feature (699)..(699): n is a, c, g, or t
  misc_feature (707)..(707): n is a, c, g, or t
ggccttgcttctctcacacactaacccccctttggttatgtcccagctctcagaaggtaacagcagacaccacgtgagagaacccagtggcctctggctcgcagcttagaaggtgaggcttgtgccaggccagccgagccgcctgtatgagcagagttccggtgtcctcggattcagggcagacttgggcagtgcctgtcctgcagttgggggcaggaactccctcccctgcccccaggcgtgcccctgaggcctggccccagcttgtcgctgaaataagtggagaacaccagccttgagcctcacagttttattttctcctcgttatccatccttcctttcagcaccagtaaggaaaaagaacacctctcttcgcaaaatattttatcaggtgtaaagacttgtttttcttctagggaagaaccgtctggatatatatttgataatgtttttaccaaaaccataggtgtgcttaccatagaaaacccctaatgtcccatgaagatacaatacagaaaaaaatacagaaattaaaaaagtttttataacagtatttctaaatctcaggcaagttaaaaagcaatagttaaaaagcatcaagatttaatatacttaaaacttaaggtgggttttggggncaaatggaaattggaacatttccttcctcggtggggcccccgcggcttgtgggnctttccnttggggangggggccggggcagggaacg

SEQ ID NO: 431751 - DNA, 502 bp, Homo Sapiens
  misc_feature (432)..(432): n is a, c, g, or t
ttttttttacaatgcataatgatatgtctttatttcatcaacagaaatggtgtctagacaaaattcagttaacactagcaattcaattgagtgaaaactttttttgcacaatagtgtatttacaatgagtaaatgaagtttcaattcattagttcatagcaatgcttttttcccccaaaaggtaaaaattcttagttacagagaataagcatcaacagcctttcattttttacaataaaaaccacgagaaaaaccacaatcacttagaaaaaaataaggacaagcctaagaactagtacaataaaatgatgcattgaattaaattacattaatcgcatagaatctgtgtaaaaagtatgtagaaaaacacctggatggtaacctggttacagtccgttggaccagttatgagaggtacagaggggttatacngggtagatatgtgtgaaacctgtccgtattgttcaacctggggaggaagagaagaggggctgcagcccct

SEQ ID NO: 431752 - DNA, 1597 bp, Homo Sapiens
  misc_feature (53)..(53): n is a, c, g, or t
  misc_feature (77)..(80): n is a, c, g, or t
  misc_feature (97)..(98): n is a, c, g, or t
  misc_feature (116)..(116): n is a, c, g, or t
tcggcagcggtggcggcggcggctgcagctccggtcgagccgcgcgcgctgcnaccccgctccgcagcccgctagtnnnncccgacccagcccaggnntccggcgtaaaacccganccggcccccgcacccgccccgccgccgaccctatggagctgctggccgctgccttcagcgccgcctgcgccgtggaccacgacagttccacctcggaaagcgacgcgcgcgactcggcggcgggacacctgcccggcagtgagtcgtcctccaccccgggaaatggggccacgcccgaggagtggccggccctggccgacagccccaccacgctcaccgaggccctgcggatgatccaccccattcccgccgactcctggagaaacctcattgaacaaatagggctcctgtatcaggaataccgagataaatcgactctccaagaaatcgaaaccaggaggcaacaggatgcagaaatagaagacaataccaatgggtccccggccagtgaggacaccccggaggaggaagaagaagaggaggaggaggaggagccggccagcccaccagagaggaagactctgccccagatctgcctgctcagtaacccccactcaaggttcaacctctggcaggatcttcccgagatccggagcagcggggtgcttgagatcctacagcctgaggagattaagctgcaggaggccatgttcgagctggtcacttccgaggcgtcctactacaagagtctgaacctgctcgtgtcccacttcatggagaacgagcggataaggaagatcctgcacccgtccgaggcgcacatcctcttctccaacgtcctggacgtgctggctgtcagtgagcggttcctcctggagctggagcaccggatggaggagaacatcgtcatctctgacgtgtgtgacatcgtgtaccgttatgcggccgaccacttctctgtctacatcacctacgtcagcaatcagacctaccaggagcggacctataagcagctgctccaggagaaggcagctttccgggagctgatcgcgcagctagagctcgaccccaagtgcagggggctgcccttctcctccttcctcatcctgcctttccagaggatcacacgcctcaagctgttggtccagaacatcctgaagagggtagaagagaggtctgagcgggagtgcactgctttggatgctcacaaggagctggaaatggtggtgaaggcatgcaacgagggcgtcaggaaaatgagccgcacggaacagatgatcagcattcagaagaagatggagttcaagatcaagtcggtgcccatcatctgccactcccgctggctgctgaagcagggtgagctgcagcagatgtcaggccccaagaccttccgtaccctgaggaccaagaagctcttgcacgaaatttacctcttcctgttcaacgacctgctggtgatctgccgggagattccaggagacaagtaccaggtatttgactcagctccgccgggactgctgcgtgtgcaggagctgtaggaccaggccagacgctgtacaagtgattatacttgcgctgctgcacacgcatatgacggtagc

SEQ ID NO: 431753 - DNA, 1772 bp, Homo Sapiens
  misc_feature (738)..(738): n is a, c, g, or t
agaccttcatcttctttattttatatatgatgcttcttttaatgcagccaaaagtgatatttgcttttctcagaaccataatcgatacaagatgcagtgaccaattcattccttaaaacacctgggctccttaaggggctagaagacacaagttacatccagcccatcagggagccagaggcgggaggggtccccagccaagctctggcaggcctgccatggggcagggcctgaccgtgcagccagaggctggcagaggcctggggaagggtgggcagaggcagctgggctctcagtcctggaaccggagaccaagggctgctcatcaagctccgtcaggcaagggcggcctcatctgtgcctggtagattctaactgcttccaaggtagaggaggacgcgtgcaggaaatcgtgtcaattgtcaccttctgcctgcctcccacagggacactctgggttgggagcctcttccagtccctgggggccaggggcatggggggccctggagtgtgcccacccccttccaccccctcggaggcatgagggaggtggtgtaatactgctgaaaccttcttgtttacaaatgcatcaggagaggcttgggcaccctttatccagtttgcgagcaaggggccaagacacatgagcactcactgcgtgggcagggatgagggcccgggcaccccaagccagatcctgccacctggggaggtgctggcctgtgcttcccagagccnccccccccaccttctgtcggggtctcatgcaggccctgctcccgctggccccctgggtgggggtcattgccgattccggctgcccagcttcctgcggtccttgttctggctgcgctgagggtcatccatcttgtggacacggaaacattccttgaggttctgggaccggatcttgggattcaagatctcctcagtcatggagctggggaaccagcctctctcctggtcgtgcagacgctcgccaaagatccacccgtcgtcagtcttgtccaggatgttgaggatgtcggcgagctccagcgtcagctcgtctggctgctgagccacgtatgggtgcacgcactggacctgggggcagtccagcagccgggatgtgaacgaaacaaacttggtcctcctgttgggggccagtgaggtcatccaacgcttcatctcactctgagaggacgcctttagcatgtaggtggcctcccggtcatctgcgttctccagcagccgcaggatgaacacgttggccagcgtctggccctggtcctccagctcctccacacgcagcagtccccgcggagctgagtcaaatacctggtacttgtctcctggaatctgccggcagatcaccagcaggtcgttgaacaggaagaggtaaatttcgtggaagagcttcttggtcctcagggtccgggaggtcttggggcctgacatctgctgcagctcaccctgcttcagcagccagcgggagtgggagatgatgggcaccgacttgatcttgaactccatcttcttctgaatgctgatcatctgttccgtgcggctcattttcctgacgccctcgttgcatgcctttaccaccatttccagctccttgtgagcatccaaagcagtgcactcccgctcagacctctcttctaccctcttcaggatgttctggaccaacagcttgaggcgtgtgatcctctggaaaggcaggatgaggaaggaggagaagggcagccccccctcgtgccgaattcgccacccaggcctcgctaccttag

SEQ ID NO: 431754 - DNA, 729 bp, Homo Sapiens
gcctggtgccctatcctactgtagctgagctggaacaagttccaagacaaagttttctttattcttccctctcctctcctcaagtggagggaaggagtctctcttggagctgtaagctgtgcggcctggagttgggagaggggtatacattcatctaccatgtgagttgggcactgcacaccaaggcattcaaacaagagaaatgaaaccttatctatatgaagaattgcattcaaatgtgcttaacaagcagttttattcctaacagacaaaaataagaagcaataacatatccataagcagatgaattcgtatacagtgatttccatagcatgtcatattctaagataaaaagaatgaactactcatatatcatgattgatgaatgtcaaaatatgcatccctgctatgtgaaataaaaataataataaagagaaaagaagaacatctaaataaatagggctcaggagagtactcaggtatgaaaagaggaaacatgttatatcagtcatataaaattccagaaaattgacattaatctactgttaagcaaatattgtaattcagtgattgtctggaggatggagaggccagagagaaagatagtatttattttttaagagacagggtcttactatgggacccaggctagtctcaaacttcttacctcaagcaatactcccaccctggactcccaaagtgttgggataacaggcatgagtcaccatg

SEQ ID NO: 431755 - DNA, 1297 bp, Homo Sapiens
  misc_feature (41)..(53): n is a, c, g, or t
  misc_feature (72)..(175): n is a, c, g, or t
  misc_feature (832)..(964): n is a, c, g, or t
  misc_feature (1110)..(1154): n is a, c, g, or t
ctacgttataagcctggagaaagaaatcataattctttaannnnnnnnnnnnnagggaaatgatgtcactcnnnnnnnnnnnnnnnnnnnnnnnnnnnnnnnnnnnnnnnnnnnnnnnnnnnnnnnnnnnnnnnnnnnnnnnnnnnnnnnnnnnnnnnnnnnnnnnnnnnnnnnnagcccaggtaatttaagaattttttgtggagatagggttttgctattttaccctgactgatgttcaactcctggcctcaagtaatcctctagcatacgcccttgaaagcactaggattacaggtgtgagccaccatgcccagcccaaaaataattttgtagaattagcatttctaggtagtgaagcagactgcaacagaatagttgggatatactttttttaaaaaggcatccacaatgattcagtcactatgtctgtgatggacaagcaggtacagaaattttcaggacctccataattatgaatctagtgtagcttaggtcattgtcagactaaatctaaaggtttgtggatttctgtagcctatctgggctgcataccaaaaagccatccctgaattagtaggaggaagaggatagggagaaaggaaatctcttagtccagtgatgtggcctttgcaaccagccagcattccaatttaatcaggtggaaatgatcttcctggctcataagtatttggtatcactcaggctaattgccccccttagggcgtgatgagagttaggagagtcaatgtaaaatcacataacctatttgtcaaaaataatgttaaatccagatagttctttcaaattacatttttaaagctgtaataannnnnnnnnnnnnnnnnnnnnnnnnnnnnnnnnnnnnnnnnnnnnnnnnnnnnnnnnnnnnnnnnnnnnnnnnnnnnnnnnnnnnnnnnnnnnnnnnnnnnnnnnnnnnnnnnnnnnnnnnnnnnnnnnnnnntctttctctctggcctctccatgctccagacaatcactgaattacaatatttgcttaacagtagattaatgtcaattttctggaattttatatgactgatataacatgtttcctcttttcatacctgagtactctcctgagccctnnnnnnnnnnnnnnnnnnnnnnnnnnnnnnnnnnnnnnnnnnnnncacatagcagggatgcatattttgacattcatcaatcatgatatatgagtagttcattctttttatcttagaatatgacatgctatggaaatcactgtatacgaattcatctgcttatggatatgttattgcttcttattttt

SEQ ID NO: 431756 - DNA, 507 bp, Homo Sapiens
  misc_feature (406)..(406): n is a, c, g, or t
acacatagatttaggggtgtattttttattgccctgtgctagacagtggacacatggaaatcaatcagatatgatcactgtcctcaggaacccaacagcatagtgacagagatagtctatcacatcattctgacatatgcaagtaaatatagtaatagcagtaatcactgagccacagaagtgtggagagtgctgccaactaagcttgagggaaacacccattgacatgatgcctgaggcttgtcttgaaccatgattcagagttaattagctgagaagagacccttcaacaagaacaaaggcgagagaggtaggaagccacgtggagcacagggaagatgaagcagtcggtgttgctgcagcattaaccgtgtggcaggaagtcaggcagtgggaggcagggctncaggacgcaggaggccttagggcacacgatgggaggcctggagttcctcctcaggacaacagggaaatggctcggggttcatacacgagttacctttcttc

SEQ ID NO: 431757 - DNA, 473 bp, Homo Sapiens
cataactgcacaatcctcactttatccccgggaatcctcccaccagagggccatggagggtcccactgggcaccaggcctggtccatggggagcgacaaagaaccttctgctgtcattaaccgcgatggtttatcacaatgatgaccctccccgaggcctctcctacggtaacagcaacatctacggttccacacccacagggaaaacggattcagagcaacaccaaggggcggtcaggctgtggtgccgacagtgaacatggaggcaggctggtggctgggagggctccatgtgggcctggctgaggagccagggatctggagtcaaaaccgggggaaggcagctggaacccagtagtggacttggaattccgcaaatcgtcctcaaacgtcttcagccagaagcgacggcggcagcggcgcctgcagacaggcgtcaggaagcttcgctgctgagggtatttctcaggctg

SEQ ID NO: 431758 - DNA, 1028 bp, Homo Sapiens
  misc_feature (19)..(19): n is a, c, g, or t
  misc_feature (44)..(44): n is a, c, g, or t
  misc_feature (79)..(79): n is a, c, g, or t
  misc_feature (94)..(94): n is a, c, g, or t
  misc_feature (99)..(99): n is a, c, g, or t
  misc_feature (111)..(111): n is a, c, g, or t
  misc_feature (118)..(118): n is a, c, g, or t
  misc_feature (141)..(141): n is a, c, g, or t
  misc_feature (166)..(166): n is a, c, g, or t
gaggttttaaatatccaanccacaaacggatcgctatgtggagncctttttaaaaggctttttggggtttaacctctgnacgcaaaacatcttncttcnaaatggccatgntttggantttggtgctccaattaattaatncagaatggagtgggaaaatgtttanccatctttccttcttttcagtgtttctctcttttctcttaccatccccccaccccacacacacatacacacaactatcaaaaactccctttttttaaaattttggtacaaagattccaaaaagcttaataaaatgtaataagcacttagcacttaggacactgtagaactttctttggaagtttaattgcaatgaactttaaaacttgaaacttcaattcacttttctaaatgtgaatgcatacatttcatttgagctttatgctttcccagctaccaaagtaattgccatcttaaaaaacacaactgacctcatctccactgtcttttccaaacagcttccaagactatcttctgattctgactttccaaaaagcaggcattaatgttaactttcaaaaaatcatctagaagagaaacttggtcagttgtaatgggagttctgtccccaactcttgtcacctcgtaaaaagaacatccaggtaattcatggcattttccattattcattgggcagacacagcttagatttctctgccttccacaggagaatgttcagatttccactaacttcaactggaactcaataatcagaatggctttaaaatttagttaaaatttaagcatgccatgaatttggaattttaatatattaattaggttattttcaaaacaagattctgtattataaatagaatttcaataaagatgttataaaaataagaacacatcttaggatctaattttgagattcgccaaaatttgagtgaagaaaagaaaccctgcttcatttccatgtcaaaaataggtggttgatttaatcaagctcatttttagcacacttggttgcgttagttgtactt

SEQ ID NO: 431759 - DNA, 1836 bp, Homo Sapiens
ttttaaagaaatatgtttatttaaaacttacactgagacaattagtagctttaacagagaacaagatagcttcaggaacataaaacaagctattttacaatgtcatgtctcaaggtgttctaaatgctacatctcctctgacttaaggggagatagtgaagattatattttcagtagagtagggacctggatactactagtccaaaaaacttactgcatcaactcaaactaaatgtttattttacaaataactcaacgagcccaagcacacggatcataaaatcttcaaacacctagcaagcactacttttcacgagtgcattatgcaggaggactaagttaacaagtgctctgcagtctgtgcttcaatgtaagacattcgtagtgatggtcactgagtaagacaaaaagccctacaagtgtaataaacaaaccgcagtgattttgctatctaattaaattacttgaagcaaaatgactactaggttatattactgttattatattacatcacccaactatgagctgttctgtttccaatgaccagaacatacggtataataacaaaaacaaaaaatggactattctcaagaaagtaacaaactggagtgatgaactgtgccaaaatgtttgagagactgaattgtttctcaaatattttgcagttaaagcaccctctggtgtagacagagtacttggtttacagtaatgtacaacactttcaagacatgaaatgtggcccgtatactatatttaaacttaatttgagaaaagtatcaaaaaagaagtccctttagttatgcttgattagaccatataactaaaatatacaaatcagctctcctgtctacatacagtatagtgttgaccttagaattacgaagcagaaaatgaaatattttaaagataccacatgctacactagtcaagaggtaaggaggaaaagtgagccctagaaactgccttaccagcagcctgacgggctttaaaaaacacaaaagcacacaattttccataaacactatctttccagcttcaaacttctgttttatattaaaaaggtatatttactttttttggtgccagaaatactatataaagccgggtgatcactaccaaaccttatgtcatgaattttaagagtttttagcaaaaaagatatttttggaactggcacagcaaaagcaaagttgaacatcatgatacacaagactaatcatgcaaacaactgtaagtgggatgtgttacttaaacactaagctcatgactgacattctcaatatataccactgatttttttaagccatggtggggtagatatagttcaaggatacccattctaagatataagtagcctcactcaaagttacatatactattactttttggtataataacttcctctctcttctacaaacaaaagcaaaagcaacaaaacaaaggtttgcttgaatacgcattaagctgtctttctaaagtcatgtttttaactgcttacattaccaaaaacagtattttaagttttctcatcaaaaaggaaatttctttcccaaggagctattttaggcctgatccttgtacttagaacctttccaaatactctgggaagttatttccagtttagaatttcagaatgtcagccttgaacagatttaagcaaatctggtttctttccttattaacaagttagttaggatatttcagaaacacaagttattgatgtgaaattacacatgtgaattcaaaaataaaaattagaaaatcaggaaaacctgcacacatcatcatgcaatgaaggacttaccccttcttttcagccatggcctaggctgcctg

SEQ ID NO: 431760 - DNA, 1169 bp, Homo Sapiens
gcccagctgcccttcccacatcaatctgaaggcattcaagcttgaacctttttgggttgaaaatctgggttgcaagcttctccagctttgccccacaaagctccagatgacaagaggctgagccccagctttgacagtgaggggagtacctggaggtatcagcgtgccagagctggatgagggctgggggctcctcccaaaatactcagatgggggtttccattttccttctataaatcaaagttgctggtgctcgcagcccccgtgcagggtggctggggctgtgtatcacaaggcagcccaagaccccctggtccccagatcctcccaggtcagaatcacttgaagttttggggtgcaagacacaggaaagaacgtgtgtgtatattgctagaaacagtctggaagtgccccaccaggtaaatcctccagcccaggaggagtcctaacttcaaccccaagctacctgtgtctcgtgcagatgagctcaaagctggagggtaaccctgtcacctgtgtccgaggaggtgggcttgcagggcctggctgtggaggagacaggagagctgggctcggaggggaggccttcggagcctcttgggacacttccgggggaaggtgggtaggactcggtctggagcaatatcattggcccagctgacctctttagtgcaaaacccaatcaagggtgccgaggagaggcaaccgcggggtgggatgggcactcaggaactgggttgattcccaggctggaactggtgccattccccagggccagacatcagagatgggcagtgtggaggggaggagggggcagcagagaggggtcccatcccttcccaccagcagaacctgggcagagagagagtggcgggggagcctcggaaccgcagcagtggacggaccctcgggcctcggtgcatcccccaccctcagggcccggctcactcgaaggtctcccactgcttcctgagctgctccaccgagtctggggccggggccagggccggactcgggctcacgtcttgcttggttttctgtaacaaatcctcaaaggggtctctggcctgttgaggagcagagggctgcagtagttggctcacaggccttgagggggcctgggaggcagaagcggggggtctccaggcctcagggccagccctgcttgt

SEQ ID NO: 431761 - DNA, 562 bp, Homo Sapiens
gggagtccaattctgcaaaattgtttattatcctaggaggaggcccccctggggctcacatcccaataaataagtgtctgacaataaataaaagtggtccataaataacgccccctagctgggagctaaggctcaggcttatcttggagatggggtaggagccagcgaagacaagccgcccccaactccagtaaagctggtccctgattccctgggggattcggcccaaagcccccagtgaggcaccaaaggaagggggaaggccacaaaggcaagggccagagcctgacaggcacaggcctcaggcctcagggcttgggtcctaggctgggctgcggtcccggagcaggcgcagagcatagcggagtcgctgccgcaggtctggagagcagcccagctgccgaaggtgggaagcgaggtaagtacaagcactacgatttcgggccacaaaagtcacaaggaggggctcccagccactgagaatcagacttggtgtggtcccccgtagaagttcacctggacagtgccatcactaaacagcatgaggagagcctgatccgtc

SEQ ID NO: 431762 - DNA, 364 bp, Homo Sapiens
  misc_feature (276)..(276): n is a, c, g, or t
ctgccaaaattgtttattatcctaggaggaggcccccctgggttcaacatcccaataaataagtgtctgacaataaataaaagtggtccataaataacgccccctagctgggagctaaggctcaggcttatcttggagatggggtaggagccagcgaagacaagccgcccccaactccagtaaagctgggtccctgattccctgggggattcggcccaaagcccccagtgagggcaccaaaggaagggggaaggccacaaaggcaagggccagagnctttacaggcacagggcttcaggcttcaggggttttgggtcctagggcttgggctttcggttccccgagcagggcgcagagcattagc

SEQ ID NO: 431763 - DNA, 526 bp, Homo Sapiens
cagcagtgggttatataatattctgtaaatttaaaaaatatagaaagattaatttgaaatctgaagtcttacacctttagcgttaatattcaaattttggaaaaagtggaagaagttagtaatgatattgaaagatcacttgaactttcccaaacaatagttctctcatatttttcttttctctcaagacagttaacagtaagtattagtgaaacagtatttttacaaatgtttactgactagaaaaataagactgggttagaaaactctgaaaaatgctccatatggaagtatttgttgtttttatatttttcttgactagtgattgaagagatgaaaaatttgagactgtcagatttaatggggtatccaatatctgcaaagccaattatttgaaggtactaaatgccataaacacaagttgtgtttttcagcaagttttcaagctagctgttttccctgttgaagaattcattgtttagacttgtgacccttatactttcttggcttttgcattgttgcaatt

SEQ ID NO: 431764 - DNA, 537 bp, Homo Sapiens
  misc_feature (345)..(345): n is a, c, g, or t
taactctaatgtggtatttattactgtataataaacttactttcatttcttccttaatgagtacattagatttccttaatcaatgaggaaattagtatagcactaaagttgttatttcagctaaaaagcaaaacaaaaactcccttgactcctcagatggcctatgtagacccatgatgtccttgagtaagtcatggtggttcctgttgaattcttggaagcaatgataaaagcttgtgctgtcactttcttacagggccctcaggttcatggtggggccaagtcctctgtcagcacctcccaggtagcttttctcacccgcaatattgtccctttctcatcagngtgtcaccctctcaccagcgtcggaaagctgcctcttttcagaacctccattctctgctgagcagcaagggggaccggtccagcctctacctggtagcagggccaggggaccacagtgcagctggcaggtatgaggggcacacatggtttggaggataaactcagagagtgaccagcggagccaaaagctta

SEQ ID NO: 431765 - DNA, 1532 bp, Homo Sapiens
gaggcagggtctcgctctgtcatccacactggagttaagtggcaaagtgtgaatttaaggagtgagtcgtttgggatcacgagggaacatggaggtctgacgaacattatgcaatcccagaaacagcatagtaactcgttccaatccaatgcctccaccagcatgaggaggggctccaaagcggaaggaatcaatgtaagccttaattttctccaaatcaattccatgatgtaaagctctctctgttagcagttgaggatcatgtattctttgagctcctgacaatatttcttctcctctcatgaacatatcgtaagagttggactgtttgggatttcttgggtcaggcatggtatagaaaggtcttacagccaatggatatttatcaagaatataaaaatctgtatcatacttttcctttaccaaatgacccaacagcttttcatttggtgtgctcagatcgtcttcatctcccatttcgactccagcttccctaagcatagccaatgcttcacaatattctagtcttagagttggctcccaaaatttgaatggctcacatgggaactgtttattcactgtttgaatttcagtctgaaacctttcttgaagtcctttgaatatttgtaccatggtgtcagctatttcttccataacttcgtggtaatggtaattaaaagccatttcaatgtccaaaccaacaaactcagttagatgtctatgggtattagagtcttccgctctgaatactggtccaatagagaaaaccttctcaaaatcagcacaaatgcacatttgcttatatagctgtggggactgagccaggtatgcattatttgtaaaatatgacacagtaaaaacattggctcctccttcactggcagctgaaataattttaggagtttggatttccacaaaacctttgttaattaaagtttctcggaagagatggcagatgccagactggagacggaagactgcctgactagttgatgtcctaagatcaatgactctgttgtctaatcttgtatcctggttaacagtagctcttccttcctcttctccttctgcctcaggccgaacagcatcatccagctgcaggggcagacggggttcagccaaactgatcacataaatcttctgaacatgtaactcaacgtcttgctgtgtacagcttccaattttctgattcacttttctcacaacaccttctacatccacaatgctctccttgttgatgttggcagcaaatttaaccatctgcttgcttgcatggtctcccaccgccacaagagcctggacattaaactgctgctgacgtatgactaagaagcactgtttccctggtttttcttgtgattgtatcattgaagatattccatatctctctttagcataatcttccgccgcgtccatgatctcccgcggcttctcctgactcttgcggctggcgctggcgctgggcatcgggacacggaactgggcagtggacaccaccctccctcgcaggcttccgtaaggcaggccccgct

SEQ ID NO: 431766 - DNA, 1135 bp, Homo Sapiens
agcaaggtttggtggggaatgggaagttaaaagcaccttttcaaaaggtctaaacccagcagaaccccagttggatgtccagcggggataagaggttcttccccttcgaagatagatgggtcccataggaaaaaacgctttttcaaaatcaagccacaaaatgccacattggcttaataaaacgtgtggggaactgaagccaggtatgcattattttttaaaatatgggcaccagtaaaaaaccttggctccttccttcactggcaggctgaaattaattttaggagtttggatttccacaaaaccttttgttaattaaagtttctcggaagagatggcagatgccagactggagacggaagactgcctgactagttgatgtcctaagatcaatgactctgttgtctaatcttgtatcctggttaacagtagctcttccttcctcttctccttctgcctcaggccgaacagcatcatccagctgcaggggcagacggggttcagccaaactgatcacataaatcttctgaacatgtaactcaacgtcttgctgtgtacagcttccaattttctgattcacttttctcacaacaccttctacatccacaatgctctctttgttgatgttggcagcaaatttaaccatctgcttgcttgcatggtctcccaccgccacaagagcctggacattaaactgctgctgacgtaggactaagaagcactgtttccctttagctctgcttgtatgaactcttgcacgtacccaaacaacttcatcagctttttgtattgtcaagtctctaacccgaaccaaaactcgatctggtttttcttgtgattgtatcattgaagatattccatatctctctttagcataatcttccgccgcgtccatgatctcccgcggcttctcctgactcttgcggctggcgctggcgctgggcatcgggacacggaactgggcagtggacaccaccctccctcgcaggcttccgtaaggcaggccaaaggggcttctccctccctcccagtctccgccctcccgaccctcgggtctcagcacacgcgctcggactccgcgtggaggtgcggctccagaaagatcgcgagagctgcggctatctcgagatcccgg

SEQ ID NO: 431767 - DNA, 420 bp, Homo Sapiens
  misc_feature (319)..(356): n is a, c, g, or t
ttttcttctctggataaatctttcctcctccctctgttgacctcaaaggcactgctttctccttcctcatcccctggcacacttaccataataatatcggggagcataggttttaagaaaaactaagaatattctctgatttcaagtggcttctgctgtccatcctgccacaaatatcatctgaggcaaagaagcacaaccacgctcattgcttgaaattggtggtgggaagagaggaggagggaaacacatttaaacaaattactatctcagtggaagatcttgcaacacttctacataagccatgggcatattattnnnnnnnnnnnnnnnnnnnnnnnnnnnnnnnnnnnnnngactgtggtcctcacggcattgggttttggtctaatgcagtcctttcctgaaaaaaggtagccc

SEQ ID NO: 431768 - DNA, 445 bp, Homo Sapiens
gtcactttttttaaaaagtttatttctagccctgaaagaacaaaattattgaacaaagtcaaaatacagcagttaatgtcaatgtataacaattaaataattgaacgggattaaattaaaaataaaaggcataaaatttgaagacaacagaaaagacaaaaactacttttgcttaattccatttctatcaaaacaagaaacaaaaagccaatgcgttccaaccaaagatgttgaattccacacgtaactgtttctcttattacttctgttctcttagaaacacttctaagttctaagagaacagaagtgtgcttgacagaactatcatccatttctttctgcctctgtcttggcagctttctagagaagtgaatgggaaagacttcggttctttcaaggccaggccagcgcttgcttcttctgtcgtcttctcgcagccgtatag

SEQ ID NO: 431769 - DNA, 764 bp, Homo Sapiens
  misc_feature (74)..(186): n is a, c, g, or t
gactcaagcagttctcctacctcgggtttccaagtagctacgactacatggcacacacagccatgcctggcaannnnnnnnnnnnnnnnnnnnnnnnnnnnnnnnnnnnnnnnnnnnnnnnnnnnnnnnnnnnnnnnnnnnnnnnnnnnnnnnnnnnnnnnnnnnnnnnnnnnnnnnnnnnnnnnngagtgaatcactgcacctggcatatgtatttaaatacttttaaaataactaatctctagacattaatatcttagttttaccttgtcgaattaagaactaaaatatattaagaatccattaaatggtttatgcaccttaaatttattgaaataaattactttaaaaatgttttaaaatgcaaagtgaataacttttacagataaaatttatctgagatggtttctgagtgaaatattttttggttacagaatttctacaagtgtgaaagaattagaaaacttcaggaacttgttacagaatattcattaaagaaaacaagctgatatgtgcctgtttctggacaatggaggcgaaagagtggaatttcattcaaaggcataatagcaatgacagtcttaagccaaacattttatataaagttgcttttgtaaaggagaattatattgttttaagtaaacacatttttaaaaattgtgttaagtctatgtataatactactgtgagtaaaagtaatactttaataatgtggtcacaaattttaaagtttaatattgaataaaaggaggattatcaaattc

SEQ ID NO: 431770 - DNA, 2609 bp, Homo Sapiens
  misc_feature (229)..(299): n is a, c, g, or t
  misc_feature (378)..(378): n is a, c, g, or t
  misc_feature (382)..(451): n is a, c, g, or t
  misc_feature (454)..(454): n is a, c, g, or t
  misc_feature (459)..(459): n is a, c, g, or t
  misc_feature (461)..(461): n is a, c, g, or t
  misc_feature (464)..(467): n is a, c, g, or t
  misc_feature (469)..(471): n is a, c, g, or t
  misc_feature (473)..(480): n is a, c, g, or t
  misc_feature (2450)..(2450): n is a, c, g, or t
gagtggtttataaaaaaaggggccagggtgtgatagtacgggcggcgcctatgttttgtttgggggtaggggctgcggaaacaacgctttggaaaggaggcccccgcgacgttttgttggtggcagagggggaaggaccggcgcgtcgtgttggggggagcctcccgccgcggggggcccgcgcctccaaaaaagtcgcggtggaggcgccaccgagttatatgtgctnnnnnnnnnnnnnnnnnnnnnnnnnnnnnnnnnnnnnnnnnnnnnnnnnnnnnnnnnnnnnnnnnnnnnnnaatgcgcaggcgccctgtgtgcttttcggcggagaaatcgcggggtgaaaacgaggtaagggaccgtgcattggttttnccannnnnnnnnnnnnnnnnnnnnnnnnnnnnnnnnnnnnnnnnnnnnnnnnnnnnnnnnnnnnnnnnnnnnnggnggggngnggnnnngnnngnnnnnnnnatcatatatgaatttgataatccttttattcaatattaaactttaaaatttgtaccacattattaaagtattacttttactcacagtagtattatacatagacttaacacaatttttaaaaatgtgtttacttaaaacaatataattctcctttacaaaagcaactttatataaaatgtttggcttaagactgtcattgctattatgcctttgaatgaaattccactctttcgcctccattgtccagaaacaggcacatatcagcttgttttctttaatgaatattctgtaacaagttcctgaagttttctaattctttcacacttgtagaaattcttccaaatgcgttgaataatgatactatttcttgtctggttagatggaattcataactaggtccactttctggcatatttgctatcaatttctcagaaaataagatcttcagagcagtgcccaaaccctgagtctgaagctttccccacagacgacatttaaaacaaccaacacaatccataattcttgaaatatttctaaaatgcagtcgaaagtcctactttagtttgtgtgcttcttttttatccccagcaaaaaatgaattctcatcaaaatgcaaaggaaatgacttgatttcatgaagtatttccagaagtaacattttgttttcctcatcctgaattttatttccagtaaagagttgaaaatctgggcgctcgaagaatggtaacactttggataaagcccttagttctattaagtagagaaaatacaagttcttaagccttcttggaccttctccttcagtcaaaattccatcaaatcgctgttgaaattctgtaatgttgtgtccccatttcttttctaaccaggtctcttgtaaaagatatcttgcactcaaatgcacattaatgcttgcatgtaggccagatataagtctgtagaatgctcttttttctacacagagaccttctagccaactgtaaaaagtgttctcttcacttgtcccttgaccagaagccaaaggatttaaaggtcttttaattgtctgtggcttaaaacagttttcttcgtagatgacattccatattttccaagcatctggtcccttgtaaccagtgtagcgctcaggattaagaagcaaatctacatattcagcttcaggggactgaatgtcatcagcttcacagaagttatctgaagaatcatcatgcttggtccactgaagaacagccttctgtgtttcctcactcagagattcatccactgctccaagtcgttcagcttgttcacattcttcaatgagattattggcttcttcagaatacttgtagctcgcagatttaattccatcaggaacttcatcagattgacatggtttgacagcacagtcccttcttccacactggctgatgtcattccagaaaggacacggcctcttcaggtttaccttgtaatacctaaagtagtcactttcaagaagtttttgtagtcttgggaaaagcctgtagttattaaatctatcaatggtttcaacatcacaggtacaatcatccaagtaaccactaacctggcagaagcacctctgtgccgctgtctccgggggctgctcctctccgtggcccgagctgagcagccacacggcgcccaggaggccaaacaagaatccccagccgcggcccattgcagctccggcagcttgtcgccccacgcttgggaggccagtccgcacgctcggtcgcgggccgtgcgccctcagatgaagcccgtgcgggccggccccagcggcgccccacctccgggccgcctcccaggcccgcctcggccctcctgcctctcagcgatcgccacctcgcgacccagcctgtggacgtgccgcggcgcccgcgccggcagcccggggcctcggaccggttccttcccgccgcgtgaggtgacgcaccgaccagcttcccggctcggccccgcccggntccgtgcgcccgcgcccgtcccggcccccgggtccgtgaggcccccggcctggagacgcaacccgacgcgcacaaccccagaccctgcgcgggagtcgggggtccttccagttcccagagcgagagcgaaagccggaggggcctgtgttttctgcgggg

SEQ ID NO: 431771 - DNA, 937 bp, Homo Sapiens
gaccattctagaaggttcctttagtgctacactgttgtacctttttgtcccagcaattggaggccgtgcaaattccaccaagtcatcaaataagaacaggccatggctccttcttcaatcataaattagacaatgtcatcgccaatcattcgtacctgaagtctaaaagaagattccaagtgtcttttggtattgatcgtttatgatgttccaacaaaaatgtattccataagtctaagaatttaaatcttccattaagcactaagttccagtaggcaatggccatttctagatctaatcctttttgtcctggattctttgcaaaattaaaagtaaactggtaaaaatccttaaatcgtcctggttctttcaattcttgttccatcttgggtatctgggcctttagtttttctatgctgtcacatcctaattctgtcatgccatccatgaactcctgtttggagaactcgcactgtgttgctgctctgaacttccacgcaataatcaacacactaatgctggctggatcgagtgccaggtcatcacagaactgctgtatgccatctattccaattttattctcatcttgagggtctttgtatctattgtacagctgttctaacttcttcctgtccaatgatccttttacactctctcgtatataaagttcaggattttggaaaaaattatctgttgcaacatctaacttccagtcattttgagaaagacaacttactgctgttttttcactagattgtgtgaagatcataaactgacgaactttatccttctgcgatgatttcaacttgttcagagccagtctgtcacctcaaggtacatgtggatctgttgatcttaactcctccaccctcatggtagaggcatggacttgcagtaacagctaggagtggagacccagcaatgagaaactgtccag

SEQ ID NO: 431772 - DNA, 1475 bp, Homo Sapiens
tcgagctcggtacctagcgaacgtgttatctaaaaaatttcatgtcggttatgctgacatgtatcatcatcagatactcacgatcaacaagacatgtgattgccaggaaaacaaaaaatgccccccaaagccaaaacaccattccagatccagtacacttaaatatatcactctcactggaagtgctattagcatagtctttgcaactagcccaaagcgtatatttaagaagtttttataaattgttttgtgatgttcatatgtttaattcttatgccaactgttttctgatgaagacagcattgtgctttatgcgagaatgaaaacctcaaaataatcaccataaagcttctaagacttatgggagaataaactaggatggtccacagatataagatgaaatccacaatgttggaattataaatgtttagagcggcccagactagaagacaagcccaaaccaccattagaagaatgaaatacgatatggtccaagatgtatccttaaagttttgtctcaaccctcagtctgaattgtgaggattgatcttcagttcagtccagccagcagaaattgactgtgcaattttctgttgtatttattgtacagactatgtacattctagaaggttcctttagtgctacactgttgtactttttgtcccagcaatttgagggcgtgcaaattccacaaagtcatcaataagaacaggccatgctccttcttcatcataattagacatgtcatctgcaatcatcgtactgaagtctaaaagaagattccaagtgtcttttggtattgatcgtttatgatgttccaacaaaaatttattccataagtctaagaatttaaatcttccattaagcactaagttccagtaggcaatggccatttctagatctaatcctttttgtcctggattctttgcaaaattaaaagtaaactggtaaaaatccttaaatcgtcctggttctttcaattcttgttccatcttgggtatctgggcctttagtttttctatgctgtcacatcctaattctgtcatgccatccatgaactcctgtttggagaactcgcactgtgttgctgctctgaacttccatgcaataatcaacacactaatgctggctggatcgagtgccaggtcatcacagaactgctgtatgccatctattccaattttattctcatcttgagggtctttgtatctattgtacagctgttctaacttcttcctgtccaatgatccttttacactctctcgtatataaagttcaggattttggaaaaaattatctgttgcaacatctaacttccagtcattttgagaaagacaacttactgctgttttttcactagattgtgtgaagatcataaactgacgaactttatccttctgcgatgatttcaacttgttcatgttggtgtcctccaggcctctcccctcctcctccgatcccgggaattccggacc

SEQ ID NO: 431773 - DNA, 1802 bp, Homo Sapiens
  misc_feature (1773)..(1773): n is a, c, g, or t
tacatttaaattgaattcttttattttaaatattcacattacaggaattcattaggtcagaatagaacatcattatttacacattcaaggaataactccagtgctaaatcagcgaggtacttacactgaatttaggaaatatgactgaagagagagtttcttcttacacatacaggctcaaatcctttatacatttatttctgccttggaatcttagtacatattgctgaaatcactattaattgctgaataaaatttcacaaaattatagcaatcacaccatatatttataagcctagaaagacatccatgagaaggaatccatgttgtgacagcatgtttaagggaagaaaatttcaaatgacatctccagtttaatttgtggaaaacacgagttctccaaatagctgaatatacagattttctctggcatcttgcctttcatggcttattaaaatatttgcttagctgccttaaagtgttatgttatttacagtttcaatcaatgaagggaacaatgtggtagcaaactaagtgcctagatcaatgttagctgaatgtcacacacatacaatatcttggttggtaaagtcggcgtctacagtgctaggactgactactcctcatttgaattaatgctttgctcccaggatgcagcaggactcagctgcatgattttcacttggaataatagctacagtcaatttttcttatcattatactaacttcactgaagctgttaaattgaactggaaggaaccaatcttctgtaaataaataaataaataaatgtataaataggattcccatcattttaataacatagcaatgaaattaccttccaacagtgtaaatgcttactgtcatgttttaagtcactaagagctacgttccagccttaatatattaccatgaatgattaatttcatgggaggagagatgattgatccacacatattacctgtttgggattaagccctttcaaaagcacaggtatgttttctgaataaaagagaaaagctaaacaaaacaaacccttcattaaatggaataatttttgttattttcaaagactgcttcaaattatctgcatgtaaaggctcctctgcagcgaacattcatatttttatacaatttttattacttaagttaataagtaaaagggtaggccctacttttccttcccctagtgattacactggttgactgtcaagactgcctagatgttctatgttattgcccaatttagtgttgtgcagacctgacctcaggtgactggcagtagtactgatttaggcagtgtataaaaagatataccattctcagttatagaaaaagctgccagaatattatgttcatagaatgaaactggttaagatgatattttcacatcttcatgctttgtactattaagttgttatccagtaaattgtatcacttgccaacaaataatttgttgtatttattgccaacaataactccaaaaataaagttttgggagaaaatttaccacaatatgctgcagttagaaaaaagaaacgcagcattgtttattggctcattagcactatgaataacattttcactttaccaaatgttgaaaagggacttttgaaaggacgtgaatcatgcatacggattgagacagagcctgtgtgtgagtggcagtgtaaatgtccccaaagctgcatgattcaccaattgcatgcaatttttcacctaatataaacacaaccttaatatagtcatataatttctaacacatcttatttnaaacatgcattagctactaaaataagact

SEQ ID NO: 431774 - DNA, 3204 bp, Homo Sapiens
  misc_feature (202)..(212): n is a, c, g, or t
  misc_feature (409)..(445): n is a, c, g, or t
  misc_feature (447)..(450): n is a, c, g, or t
aaccccaatttgaaaacccccaagccccccggggaaaaaatatttttccaaaaaacccttcccccgtgaaggcaaaatttttccagcccgccaagccatttgccggtttgttttacccccctttttcccctctaaaaaattttaattatttcccttaggagccttaaaaacctcggtaggtaagttggtccccatttatttnnnnnnnnnnngaaaataaaggttcccttcccaaaagttccccaagctagccagttttccccagtccccggacgttgtaaaaacgcccggcccgtgccctaagctttttaattcgaccccccttatggggacccacttggtacaagaaaggcggggtccgcgtaagcttgggccccctcgagggaatactttagagcggcccgccccnnnnnnnnnnnnnnnnnnnnnnnnnnnnnnnnnnnnntnnnncagatttaggaatttattttccatttaggttttattaagtctaatccaacaatgcaaaaatgaaactgtgagttatatgtgatgaaaaagtatagctttcttgaattcaaataagcaatggcaaagatcacatttagaatttgacagaaagaacacagcatccctgcctcgtcttttttatagatagtaagaaaagggaaagtagtcttatttcaaatatcaaaattctgacttaaatgaataaaatttagtcacgagtaaatacaaaaaacaagcaaacaataaaaccttcctggatcagcacaggcccaattcttccctgccttttatcaccctgtcagctgggagtatcttttctacctgtggctctctaccaattgttactctcttgttgtctgaacctgctagccaaacttggcaggtcgttttcaaagccagatgagttctgattgttcccttggcaatatccattatttccctcctgggtagaaggaggatctgaggacagcttatctttttggggtacgtggagtagaggtggggactcttatataatacgaaataaaaataagttctttgggctggaagtgtcaaaagattccttagaatttatagccacagggatttcatggtgtgtctgatgtactgattttgtgccacatttgagccagaactggcagcagattcaaagcaacacaggtggctaagtacacatgaggggaaggtaggtatggggagagaaaagtggcataaaacaaggctgtccccctgtgctcatcgagaataggatcttagccctcactgaaggagcttaatgatcagctctaatacattggctggactcctgcaggtactcacggaaagtagagatgctgaggctacctttttcttgtcaaagtctagggctggagattgcttcaagaaactttggagccataaagtcactgtaatggtcaacttttaaggctagaagaggccatgagacatctcattcatctccttgcctttgggcaagaattgcacacctaagcctcccgaatacatcagacacaatttagggttaaaagcctccagaggggcaaaaaagtaaaaagattttacaactttcttccacaaaccactttaattgtgtgctcatcaccgacttcagaatctaagagaactttgacacttgtttttgacaccccattgccttctcatcagtctaactccaagaccttcctccgagtggtaggctctggtaattcagcgaaagcaaggcgctaacaggcgagtgtgaagccaaagggctcccagtgacatccttgacatctttttgccagctattcacatgcatttaatatacagcacttccctgtgactgtctgcagccttttctaccagcaattcctcctgatttatccttctccagcaattcccagttgccttgcctttctaatagatgttgcagtctgacaaaacacctttgccttcatgctggtgttgttaaaggactgattataaccgtaaggaatgggaaataagaagctattccttgtaagtttgctaatcttatctgttcagaataataaaagttctctgtcaaagacttaggaagggagatttcatcccccagccttgctagtcctactctttgtgcattcttaagacaggaggcaagtgctttccattctccttggaaaaactgaggctgaatatgcagcttgtcatgcagttttgctgaagacagagagagggtcaaaaattcaaaaactcaattgctctagggcagggggttgggagcaaagccaataaataaaatgggtggtataaatgcctttcaggaaagggtgtgaagggtggggtggatttaccagaagctttggcagtcagctttgaagtcttctggaaaggaaagtgtagcctcccaggcaagcagcctcatgacatcttccataaggctgatgtgttgggaaacagcaacacatgagcaagaagttccttgaaaaattttcttccctccttcttcttctggaactgttgggaaactagattagacccaggagtctggtttttgagaatggccctgaatgaatttttagtttccgggtaggaacagagagctgagaaggttgttttctcctccaaggaaatctggccacagtttttttcctgttctatctagagcttgtgtcgctggtggattaagcacatgtgtgcacagggccaggattctggcaaacaatctcagggaggatggcaaaaggagaagcaaaaggggttcattcctctacctcacagcttcttgttcccaaaggaaacaggatctactcaccagcaacaatcccaacatcacaaaaggaacagggaaataaacgtgcatgcaactgggacacacagacccctgtcacctgctacaaatggagcagaagtgggagagaagtgagccaccgagaacctaggccttcttagctgtagcctacttgaagagggcacgggcttcctgactggtctctggtggccgagtaactctacttccctgacctgggaagaaggcgtgaataaccagctaagaggagacacccatcctcttagagttgcctggggtatctgaggcagaggtggtagcagcagactcctcaacagaggcactgagatccaagaattccaggatgatgtccccaaggcagtaaatcaaatgcctgttgatgaggggttgttgtcctcgtgccgaattcgccacccaggcctcgctaccttaaaccgctgtagtac

SEQ ID NO: 431775 - DNA, 1211 bp, Homo Sapiens
cggagacggtggagtctccgcactgtcggcggggtacgcgtagcctgggcactaggttcgtgggctgtggaggcgacggagcaggtggccagtggggccagctcagggaggacctgcctgggagctttctcttgcataccctcgcttaggctggccggggtgtcacttctgcctccctgccctccagaccatggacggctccttcgtccagcacagtgtgagggttctgcaggagctcaacaagcagcgggagaagggccagtactgcgacgccactctggacgtggggggcctggtgtttaaggcacactggagtgtccttgcctgctgcagtcactttttccagagcctctacggggatggctcagggggcagtgtcgtcctccctgctggcttcgctgagatctttggcctcttgttggactttttctacactggtcacctcgctctcacctcagggaaccgggatcaggtgctcctggcagccagggagttgcgagtgccagaggccgtagagctgtgccagagcttcaagcccaaaacttcagtgggacaggcagcaggtggccagagtgggctggggccccctgcctcccagaatgtgaacagccacgtcaaggagccggcaggcttggaagaagaggaagtttcgaggactctgggtctagtccccagggatcaggagcccagaggcagtcatagtcctcagaggccccagctccattccccagctcagagtgagggcccctcctccctctgtgggaaactgaagcaggccttgaagccttgtccccttgaggacaagaaacccgaggactgcaaagtgcccccaaggcccttagaggctgaaggtgcccagctgcagggcggcagtaatgagtgggaagtggtggttcaagtggaggatgatggggatggcgattacatgtctgagccttaggctgtgctgaccaggaggaagtcaaatgtaatccgaaagccctgtgcagctgagccagccctgagcgcgggctccctagcagctgagcctgctgagaacagaaaaggtacagcggtgccggtcgaatgccccacatgtcataaaaagttcctcagcaaatattatctaaaagtccacaacaggaaacatactggggagaaaccctttgagtttcccaaatgtgggaagttttactttcgggaaggagaacctcctggagcatgaagcccgg

SEQ ID NO: 431776 - DNA, 736 bp, Homo Sapiens
  misc_feature (481)..(481): n is a, c, g, or t
acgagagtccaaagccacacggtttattgaggggtggggccaagtgggctctggtggccagaatgggctatgtgtcacagtcctcggggacagcagctgtgatgatgagggagggctccaggacacctgggccggtgaagctctcctctgcacacagtctctggccggggagctgggaggccaggccgccctgggccagggactccacaatgacctccgccgagcccacctccagctctgcaggcggctgcagcgccaccaccaccatcttctcgtcctcgatgatcaggttgcggagcttgcgctgccgcgggttgtagttctctacccggtcgtggatctccatgtgcctccgcaggtgggcctgtcgggtaaacttgtagccacactcggtgcactcaaacttcctcaccccccttgtgccgtctgatgtgcacacgcagttgtttcacggctttgaaggttttgccgcatatctggncatgagtggtgccggtcctcctgatggtggctgggcactgtgcctcaggaggggccccttctcagtgtagcgctgtccacagaactccgcactgaagggcctttccccgctctgggtgcggttgcgcttgttcaggtttgtcttgggttcgtaagttcttgccacagaggaggcactggaagggcttcttacccgtgcgtgtgcgcatgtgcttgctgatattgccctttcggcttacggtgttccttcccaact

SEQ ID NO: 431777 - DNA, 1130 bp, Homo Sapiens
  misc_feature (78)..(78): n is a, c, g, or t
  misc_feature (138)..(163): n is a, c, g, or t
aggtacagtttaattcttaatataaaaagtaaacagatttataagaaacattctaataaatacatcaccatgattttnaaaaataataccattgtccagagttcttgataaagtattgttatagagagtatagagagnnnnnnnnnnnnnnnnnnnnnnnnnngaagtgaaactgtatgtacatacttatagcatgacaccaggcctataagtaaggtattttaaagtaaagctttcaaggaaagtacaaatcaggtattgaaattaaattgaagacatagctttactctcttctttgatcataactaaaataatattttagacaaaagctaaaacaaaaagaggatattatacagattgctgcttcttttccaaacacttctcaatatcatcaagcacctgaacggcagcctttggaattcgagtcccaggaccaaatacattggaaacaccaacttcaaacagaaattcataatcctgaggtggtatcacccctccacacatgacaagaatatctggccgtccaagggagttaagttctttgatgagttcaggaactagggttttatgaccagcagcgagggtgcttatgcccacagcatgcacatccgcatccacagcctgctgggccacttcacgaggagtctggaaaagagggcctatgtccacatcaaaaccaagatcagcaaatcctgtagcaataacttttgctcctctgtcatggccatcttgtcccatttttgctacaagaagacgagtctgcgaccttcacgttccatgaatttatgaaccctcttgatagcagatgttatctctttactttctcccaaattccctggcgaatatgctccactcaccattcgatcattcgctttatgttcaccaaatacctttttcagggcatctgtgatttctcccactgtacatcttgcccgagatgcatccactgcaagagccaggatatttccatctccgctagcagcacattcggttagtgcagcaagacaacgttcagccaaagcttgatccctgctggatttgatcttcttaagtttttcaatctgcctgtttcgcactgaagtattatcaattgccagaacttctacagcgtcttctttttccaactggta

SEQ ID NO: 431778 - DNA, 390 bp, Homo Sapiens
  misc_feature (141)..(166): n is a, c, g, or t
  misc_feature (206)..(206): n is a, c, g, or t
  misc_feature (239)..(239): n is a, c, g, or t
  misc_feature (321)..(321): n is a, c, g, or t
caggtacagtttaattcttaatataaaaagtaaacagactttataagaaacatgtctaataaatacatcaccatgatttttaaaaataataccattgtccagagttcttgataaagtattgttatagagagtatagagagnnnnnnnnnnnnnnnnnnnnnnnnnngaagtgaaactgtatgtacatacttatagacatgacaccngggcctataagtaaggtattttaaagttaaagnctttcaagggaaagtacaaatcagggtattgaaattaaattgaaggacatagctttactctcttctttgatcataacttaanataatattttaggacaaaggcttaaaacaaaaggggggtatttttaccggttgctggcttcttttccca

SEQ ID NO: 431779 - DNA, 2319 bp, Homo Sapiens
  misc_feature (48)..(100): n is a, c, g, or t
  misc_feature (2305)..(2305): n is a, c, g, or t
aatgagacagggtctcactatgttacctaggctagtctcaagcaaccnnnnnnnnnnnnnnnnnnnnnnnnnnnnnnnnnnnnnnnnnnnnnnnnnnnnncagctccaactcctttctttatgcaaatacaaaaggcaaaccttggtgcgacacttagtccttagtagcaaccctggctcatcctcctagtctttccctagtatttgcatcaatggctaactaagctgatggcagacctcatcctggggtaatactcattcagggaagcagcaacaaaggagggtggggaaagaggtcaggtcagatttacctaacatgatatgtagcataataggtgcccattaaatctcagctactagtaaagttggtgaggaagaggtatggaggcattaagacctgaagcactgagttggtccataaccctgggctttagaacaaggtctggttttattttctggcagaatcttttaaaatataaaacagataaaacacatctcaaccctgcaatctgccagcatgccttgtttctacaagatgcatgctagaccatgagactacatagcaaagggtctttaagaggatttggttgggagaaatagaaaaagcagatcttagggaagcctgggctagcccaaaagctgagctacatccctcaacactagagcagtccttgtcttttcagatcctcgtatgtcttcttattcacaacattcccacttgagtcttcatattcttcctcagtgtcaggctgccatcgttctgaagccttctgcaatttcagtttggcccacaaggagacagcatcttcaatctgtgtcacattagcaaagtgagcagtgtttgggatgcccaaacacctcatgccatgagcatgacgccattcagcaaagtgtcgctggaaggctttgggccctcggtaggtgtagtttccacaaatctcacagttgtagttgatatttaggccatgaagcttatacagccagtagggaataggtttgccatcccagccaagtggcaggtttttggggttgtaaatgatctcgttctcttcatcttcactctcactctcactgatctgctcttcttcctcttcttctcgctcttctcctgtcctggcttgcttgcgctgtacattttcatgagtgagatgtcgctgttccccgagaatctctacatattcatagatctgggcttctagaaaagcaatgtctttgttcctttcagtgtctcgcttggtgccctttgacttgggatttttggcaaacaaagaggtatcaagtgactccagggactttcctttggtactgaatagtctctgggctcgctcttctagggtcccgccacatttcaagcctaaagctaagagagcagatttcaatctgtccaaacccagagaagccaactcctcccaggaggagaatgcagagaggtcaagatgggctccagcatgggtcagggcactgcttgtctctttcggccatccaggaaaggtcccattctcccatttcttctcaaactcagcctgaatcttcccaaaaagttcattctgatcttggagaggcttcactctatctgtgtaatcctgaaggtactcaagcagcatctctaggtatctcttatactctgcattcttcctttctttaggaatgtcaaataattggtcaaagatggacaggtatgtgatataatccagcttctcagatgccttcaggttaatgtacttgaggtaacagtcatggagatcgagataacgaccatatccctcttcatctgtgaactccaccaagttttgtgcctcttcacttggattctctcgagccttcaggagttcctcaaattccactgacattggcacacagatctcatttgggtgcttccggtggaattcctttatttgcttgagtctattatagaattcagcaaactcattgggtcctgaaatggcattgagctcctcctttcgtaatccatccttatcatcatacaaatccctcaggttcccactgacctccatatacctatcttgcatggcccgagtgcggtgatcagaattgatctggtcccggagcgtggacttcttggtgagcatctctttagccatgacgtccatgagccgttccttctcctcatgatagcgccgctgctgctccagtattgtctccatcttcccttagtcgcggcttctcaattcagaccaccaacacggccggaagcaactcctgccgcccagcgcacctgagtccccacgttgcgcatcaggctgcaccaaagttccgcccccttctgtcgtcttctcgcagcatngtagtagtatagcg

SEQ ID NO: 431780 - DNA, 1172 bp, Homo Sapiens
cgattctgcagttttacgtgatttgtgtcccatgagcttagtttgtccgttatggtattggttttgccagtcctcggctgtggcaggcttttgtggcctgttttatggattctcgttcctgcttcattcttcactctcacttctcacgtgatctgctcttcttcctcgtcttctcgctcttctcctgtccctggcgtttcttgcccttgtacattttgcatgagtgagttgttccgctgttccccgagaatctctacgatatgtcatagatctgggcttctagaaagcaatgtcctttgttcctttcagtgtctcgcttggtgccctctgacttgggatttctctggcatacaatagaggtatcaagtgactccaagggactttcctttggtactgaatagtctcttggctcgctcttctagggtcccgcctacatttcgagctctaaagctatagagagcagatttcaatctgtccaaacccagagaagcccaactcctcccaggaggagaatgcagagaggtcaagatgggctccagcatgggtcagggcactgcttgtctctttcggccatccaggaaaggtcccattctcccatttcttctcaaactcagcctgaatcttcccaaaaagttcattctgatcttggagaggcttcactctatctgtgtaatcctgaaggtactcaagcagcatctctaggtatctcttatactctgcattcttcctttctttaggaatgtcaaataattggtcaaagatggacaggtatgtgatataatccagcttctcagatgccttcaggttaatgtacttgaggtaacagtcatggagatcgagataacgaccatatccctcttcatctgtgaactccaccaagttttgtgcctcttcacttggattctctcgagccttcaggagttcctcaaattccactgacattggcacacagatatcttgcatggcccgagtgcggtgatcagaattgatctggtcccggagcgtggacttcttggtgagcatctctttagccatgacgtccatgagccgttccttctcctcatgatagcgccgctgctgctccagtattgtctccatcttcccttagtcgcagcttctcaattcagcctcggccgatttacagccaggcctcgtacctatgcacttatgtc

SEQ ID NO: 431781 - DNA, 347 bp, Homo Sapiens
tttttcttgaaataaaattgccagtgaaacctccacattacaaaacaggtaaaaccagtggtttaaagtaaaggcaggggagggcagagggaccagatgtgccttctaacctcctccacattgaattttgggaggaaattaattgcttaaggtagagaaaaggggacttcatgcataattaaatgtggatactgttgttctgctgaatcctccagttcagacagctctggatttaaaaaaatcaggttatcatgaaaccgtctagttctcctatttcagtgtagtcatcactcatcatagccacatagtatccccacaggattatgaggcaatctgtaacttctccg

SEQ ID NO: 431782 - DNA, 699 bp, Homo Sapiens
  misc_feature (21)..(21): n is a, c, g, or t
agcagagtaccaaagataacnctatataatgtatggaaggcgtaatataaaggcctcaccaactgcttgagcacggttaaaatgggaagaagtaaagtgcagcataaatactttaaatcgatcagatttccctaacccacatgcaatcttcttcaccagaagaggtcggagcagcatcattaataccaagcagaatgcgtaatagataaatacaatggtatatagtgggtagacggcttcatgagtacagtgtactgtggtaacgtaatctggacttgggttgtaaagcatcgtgtaccagtcagaaagcatcaatactcgacatgaacgaatataaagaacaccaactggatcactcacaagtgaggtgataatagctgccatccccgagtaccattcaatgaagaaccaatgtaaaaccagaggaagcattgccataaatccaagatagagccaatcataaagttcaggagattctgtgcaaggctgacaatatttctgtgcattcgttctctgtcctcttgggcataccccacattctccatatatttcagttgagccatttttaaataatagggtcttcccacaataaagtccaaggcatgctggttgaatatcgacagccatgggccgcctgaaggtttttttcgagaagcgctagatcagcggatctggcagctgcaccgaacatccgggcca

SEQ ID NO: 431783 - DNA, 757 bp, Homo Sapiens
  misc_feature (14)..(14): n is a, c, g, or t
  misc_feature (40)..(40): n is a, c, g, or t
  misc_feature (47)..(48): n is a, c, g, or t
  misc_feature (98)..(98): n is a, c, g, or t
  misc_feature (179)..(179): n is a, c, g, or t
  misc_feature (246)..(246): n is a, c, g, or t
ctttccaaaagcanccatgtacacagccagagtaccaaangataccnnttataataatgtatggaaaggcgtaatataaagggcctccacaacgtgcntaaagcacggttaaaatgggaaagaagtaaggtgcagcataagtacttttaattcgatcagatttccctaaccaacatgcnatcttcttcaccagaagaggtcggagcagcatcattaataccaagcagaatgcgtaatagataaatncaatggtatatagtgggtagacggcttcatgagtacagtgtactgtggtaacgtaatctggacttgggttgtaaagcatcgtgtaccagtcagaaagcatcaatactcgacatgaacgaatataaagaacaccaactggatcactcacaagtaaggtgataatagctgccatgctgcattcaaataatgcagtgatgtgttggaaaagtgcgctggaactctttttccccgagtaccattcaatgaagaaccaatgtaaaaccagaggaagcattgccataaatccaagatagagccaatcataaagttcaggagattctgtgcaaggctgacaatatttctgtgcattcgttctctgtcctcttgggcataccccacattctccatatatttcagttgagccatttttaaattaatagggtcttcccacaataaaggtccaaggcattccatgggccgcctgaaggtttttttcgagaagcgctagatcagcggatctggcagctgcacc

SEQ ID NO: 431784 - DNA, 2289 bp, Homo Sapiens
gcgctgtggcccggatgttcggtgcagctgccagatccgctgatctagtgcttctcgaaaaaaaccttcaggcggcccatggctgtcgatattcaaccagcatgccttggactttattgtgggaagaccctattatttaaaaatggctcaactgaaatatatggagaatgtggggtatgcccaagaggacagagaacgaatgcacagaaatattgtcagccttgcacagaatctcctgaactttatgattggctctatcttggatttatggcaatgcttcctctggttttacattggttcttcattgaatggtactcggggaaaaagagttccagcgcacttttccaacacatcactgcattatttgaatgcagcatggcagctattatcaccttacttgtgagtgatccagttggtgttctttatattcgttcatgtcgagtattgatgctttctgactggtacacgatgctttacaacccaagtccagattacgttaccacagtacactgtactcatgaagccgtctacccactatataccattgtatttatctattacgcattctgcttggtattaatgatgctgctccgacctcttctggtgaagaagattgcatgtgggttagggaaatctgatcgatttaaaagtatttatgctgcactttacttcttcccaattttaaccgtgcttcaggcagttggtggaggccttttatattacgccttcccatacattatattagtgttatctttggttactctggctgtgtacatgtctgcttctgaaatagagaactgctatgatcttctggtcagaaagaaaagacttattgttctcttcagccactggttacttcatgcctatggaataatctccatttccagagtggataaacttgagcaagatttgccccttttggctttggtacctacaccagcccttttttacttgttcactgcaaaatttaccgaaccttcaaggatactctcagaaggagccaatggacactgagtgtagacatgtgaaatgccaaaaacctgagaagtgctcctaataaaaaagtaaatcaatcttaacagtgtatgagaactattctatcatatatgggaacaagattgtcagtatatcttaatgtttgggtttgtctttgttttgtttatggttagacttacagacttggaaaatgcaaaactctgtaatactctgttacacagggtaatattatctgctacactggaaggccgctaggaagcccttgcttctctcaacagttcagctgttctttagggcaaaatcatgtttctgtgtacctagcaatgtgttcccattttattaagaaaagctttaacacgtgtaatctgcagtccttaacagtggcgtaattgtacgtacctgttgtgtttcagtttgtttttcacctataatgaattgtaaaaacaaacatacttgtggggtctgatagcaaacatagaaatgatgtatattgttttttgttatctatttattttcatcaatacagtattttgatgtattgcaaaaatagataataatttatataacaggttttctgtttatagattggttcaagatttgtttggattattgttcctgtaaagaaaacaataataaaaagcttacctacataaaatttcaatgttttgacacttaattgttgtttggcacaatagtatggaagtaattcaaactggtaaatagtttcctctcatatctcgggtatatatacataccatattttattgatccagagatacttatttcactttgtgacatctctgaattaggatgcatcttacaactgatggcttattaggtttaatgaaatacagaagatccacagtataaaaagggttttcctgtggttggtttgtggtttgtgataggtgttctgtgatgtttatgctttgaaggccttaagactcatggttgcaaccatggaagcaaaatgaaatttttagctcttaacctaacaacctgaccatgtttatccatttttattgtttagaagtttatttactgatacttggtggaggttgtgtgaattagttaaattttaaatgtttaagacttctattaacagctgcaaaatatgaaagtaagtgcactcacttttcctgtagtagtctgtcttttgaattcacagcagttgtatccttgagttactttgttaatgtatttttctcagtacatttaaccactgggaaatgaacccttgtacgaatgtgtttcttcttctctgtaggaataaaaaataaatataaaaatttt

SEQ ID NO: 431785 - DNA, 1107 bp, Homo Sapiens
  misc_feature (990)..(990): n is a, c, g, or t
cggtgcagctgccagatccgctgatctagtgcttctcgaaaaaaaccttcaggcggcccatggcatgccttggactttattgtgggaagaccctattatttaaaaatggctcaactgaaatatatggagaatgtggggtatgcccaagaggacagagaacgaatgcacagaaatattgtcagccttgcacagaatctcctgaactttatgattggctctatcttggatttatggcaatgcttcctctggttttacattggtttttcattgaatggtattcggggaaaaagagttccagcgcacttttccaacacatcactgcattatttgaatgcagcatggcagctattatcaccttacttgtgagtgatccagttggtgttctttatattcgttcatgtcgagtattgatgctttctgactggtacacgatgctttacaacccaagttcagattacgttaccacagttcactgtactcatgaagccgtctacccactatataccattgtatttatctattacgcattctgcttggtattaatgatgctgctccgacctcttctggtgaagaagattgcatgtgggttagggaaatctgatcgatttaaaagtactttatgcatgcactgttacttgttccccattttacccgtgcttcaggcagttggtggaggtcttttatataaacgccttcccatacattatattagtgtatctttggtaactctggctgtgtacattgtctgcttctgaaaatagagaactggtatgatcttctggttcaggaaagaaaagacttatcggactcttccagccactgattacttcatgcctatggaataatctccatttcccaagtggataaacgtgtgtagcaagagatttgtcccccttttgtgcattggataacctaaccaagcccgtttttactagtgtcacttgcgaaatattacggaaaccttcagggaagtatcccagaaagggaccnatgggacatgtagtgtgttaacatgtgatcacgcgcgaaaccctggagaagaggccctaagtacaaaaggacaacgatagatgtacagcggctcgtggaagacatgtctacagataa

SEQ ID NO: 431786 - DNA, 449 bp, Homo Sapiens
  misc_feature (31)..(31): n is a, c, g, or t
caatactcgaacatggaccgaaattataaangaacacccaactgggatcactccacaagtaaggtggataaatagctgcccatgctgcattcaaataatgcagtgatgtgttggaaaagtgcgctggaactctttttccccgagtaccattcaatgaagaaccaatgtaaaaccagaggaagcattgccataaatccaagatagagccaatcataaagttcaggagattctgtgcaaggctgacaatatttctgtgcattcgttctctgtcctcttgggcataccccacattctccatatatttcagttgagccatttttaaataatagggtcttcccacaataaagtccaaggcattccatgggccgcctgaaggtttttttcgagaagcgctagatcagcggatctggcagctgcaccgaacatccgggccacagcgagctcggcgg

SEQ ID NO: 431787 - DNA, 339 bp, Homo Sapiens
  misc_feature (225)..(225): n is a, c, g, or t
  misc_feature (254)..(254): n is a, c, g, or t
  misc_feature (258)..(258): n is a, c, g, or t
  misc_feature (282)..(282): n is a, c, g, or t
  misc_feature (286)..(286): n is a, c, g, or t
  misc_feature (299)..(299): n is a, c, g, or t
atgtaggtaagctttttattattgttttctttacaggaacaataatccaaacaaatcttgaaccaatctataaacagaaaacctgttatataaattattatctatttttgcaatacatcaaaatactgtattgatgaaaataaatagataacaaaaaacaatatacatcatttctatgtttgctatcagaccccacaagtatgtttgtttttacaattcattatnggggaaaaacaaactgaaacacaacaggnacgnacaattacggccactgttaagggnctgncgggttacacggngttaaaggcttttcttaataaaatgggggccacattgtct

SEQ ID NO: 431788 - DNA, 2624 bp, Homo Sapiens
  misc_feature (6)..(6): n is a, c, g, or t
  misc_feature (2599)..(2599): n is a, c, g, or t
actttnaaatacattaaatttagagattatatttcccccttgttgcaatatacaatatattttcgagatgaggcacaaatatcttggtatgattcatattgagaataatgaaccacagacagtttaaagctactgcttcctatgagaagaaaaaattgtttcatgtgagtgtcacctctaaagaagacacataacagacactagtactcaacattcattgtatttattttactaaacagtatggttcaaaaaaacacaaaccggaaaacctttatttaaaactagtccaactaactggatggggctcactccatcccatcccacccccgatctttctatatatatggagctggaaccctatcagacagcgagcattcacgtacactttgtctttcctgttgaacatgaataaacgtctttgaacataaatgaacttctctgaaccaaaagaaacaaatgaagttttacaagatacaggcactttatgttcccagttttaaaaataagccaagtgaaaaatatttaataaaaataactggagcagagaaagctttaggagttataccattagttcaaatgacttacactcaatgcaaatagacagcatcaaacaggaaaacaaacaaaaatttaactgaggttaatggtcgtatttgtaaaaaaaagatatccaatttaccaaaattggagaaaaatggccatttgaatccaacttaaagatacgccaataatgtgcattacatctgcgtaactatgcagctgagtaacacctgaaagctctgcaagagtgtgtggttagtgagaaaagcaaaaggtgcttttattccacagtatctgattaaacaaaacaaagcaatttacaaaaaaagtaccaaatgatactttaaaataaatagttcatcattttgatgaatatatacatgtaaagtccacttcctggggatttagctatctaaaagtggcatatcactatccagaggtgcaggagcaagttcacataaataaaacagtgtagcttcactagcttcagcttcagtcaatggctccaggcgaacaagcttactttgggttggttctgggtctaggctgctatccagaagctcatcaacttctatgggtttatctacagaggacaaaacttctgatgatgctgttgtactcgcctgttcaacagaagaagcagggttcccatcgaggaatgcaagaagtggaaaggcggtatactggataagctgcttatctggtttggatttagattttcttccctcttccgaaactggctgaactacattgttcttggtagtttctaatcctttattctcagaatcaaccaggagatctgggtctatgctaaattgtcttcctgatagcatggcctggaatgtcctctaaactgcagtcaatactgtcaagataatccaacagctcaacctttcccaaaagatagatgttattcattcaaaatggaatccatcatggtcactggatcttctgaggtcagactggatgagccatttagctggacagcactagacatgagagggctgctgccatcactgcctgaacttagggattctctggctggttcattctgctctccactctgaatgacaggtgcatactcatcttcattgtcatcttcaacgatgacaatatcagggtactggctacagttggagggatcagatataacatcctcattagtttctggaataactgggatattttcttcatctgcattatcatcagtaacatcataaataatgatgtcatctgaaatcctctcccttggctttaaaccttcagtcctactgtgtggaactttatgatgatgattatcagttggttctttgactatgtgctgaaacaggttcttcttttgggctccattagtgtttagaagtagaggccttttacgttttaaactcacaagttggttattttgaaccaatgtaacaataaactggacaatctttcgaataacttgttgctgttgtgcatgctttgctcgtaattctgacacctccttccaaagggactcattctcactttttaattcagaaagcctggactcaatagtttcctgttttatctgaaccttctgagcactacttataatttttgttaaatcttcctgacgaattttattttcttctggttttgaagatgaaaccttccttttaatgttctccaacaagtcatcctgtccttgtttgaagtaaggatgctgaaattctacaggaccatctctttcttgctttacaattccagagtcgatatgtactactttacggaaaccatacatattcagttgcctcacaaagcttgccatattattgtgcttgaaatatttgggaagaatttcttttgcaaatcgttgctcatccaagaccagaaaactttggccattctggctccaggtgatgaactcgttagtgtgggtttcctccacaagcgtccacagcttgctgaggaaagccggcacgttcgaactctgcttcattgttaacgcggcgcagggattccaaattctacacccgaacgcggtggtagcggcggcggcagctacggcagcagctccccgggtcgaaaattcccncccctcccccctggggcgggcgggg

SEQ ID NO: 431789 - DNA, 484 bp, Homo Sapiens
tccagctaaatggctcatccagtctgacctcagaagatccagtgaccatgatggattccattttgaatgataacatcaatcttttgggaaaggttgagctgttggattatcttgacagtattgactgcagtttagaggacttccaggccatgctatcaggaagacaatttagcatagacccagatctcctggttgatcttttcactagttctgtgcagatgaatcccacagattacatcaataatacaaaatctgagaataaaggattaaactaccaagaacaatgtagttcagccagtttcggaagaggggagaaaatctaaatccaaaccagataaggcagcttatccagtataccgcctttccacttcttgcattcctcgatggggaaccctgcttcttctgtttgaacagggcgagtacaacaggcatcatcagaagttttgtcctctgtaggataaaccccataggaggtttgatggag

SEQ ID NO: 431790 - DNA, 1775 bp, Homo Sapiens
  misc_feature (1649)..(1649): n is a, c, g, or t
  misc_feature (1660)..(1660): n is a, c, g, or t
  misc_feature (1672)..(1672): n is a, c, g, or t
  misc_feature (1688)..(1688): n is a, c, g, or t
  misc_feature (1720)..(1720): n is a, c, g, or t
  misc_feature (1722)..(1722): n is a, c, g, or t
  misc_feature (1749)..(1749): n is a, c, g, or t
gcgaaggaaagacatacaaaggctaactgtgcaaaatattaaattgctaaaacaccataatgaaataatacatgtaaatgttgaagttgacacatgaaattaacatggcataagaacttatcacatttcagatattttctttagtaacaagtttttgtttttatagttcctggtacacagcaaagtttatcacgaaagataaaaatccttttaaacaaatccaacaggaaattcttgaggcaccttctcatataaaacacaagatgaatgcaattatcaatccatctgagaaaagttttcaatctaaatgaacatcattttttccatttaagtatattttacagaactttaataaggcaagacaaatttgtgaaaaaagatgtagatacaaaaatgatgtaaactaataatttatattaaaaaaccccaaagggataacagtggagatgggacagctcaaacaatgcctttttttaacctaaaacagaatttttaacatctttatattacatgttttaaatcatatcaggaatgcaaactagaactgcacactacttcagtggaaaaaagttcaatattgtgcaattttctgcctcttaatagttaaaaagtggcagcaatccctgcatttgtgtttgaaacaaggatctgagaaactttatcaaaaaaggtaatgaaggcaaaaattggcagacatccagcatcttgtttctttttaaaacaatgtggatgataagtaatttcatgattaaaaatgaatcttttaaataaatacattgtatctgacatttgcactgactgatttgataaatctttaagtaaacaacggctttactacactccctgtagcctcaagccactggctttagattctggagtccttattcactgggtttcataccctgccactcgatacccagaaggctgattgggcaacatgctgccattttgcccttgaggcggttgcactccataatttggtcccatccatggtgcagaagactgtgtctgattaaatccttgctggttccatgcctggccatacattccatatgcaggaacttgccaaccattaggcatatactggccaatttgttgtgcatttccataccaactggccccactggccataaggttggggatatccaatttgattctgctgttgcacgggatttatcatatcaagagtttctttgccccaatagcatttcacaacatgaccttcaatggtagtaccattaacagaaacaaattgcatgtgctgcactttcatgggaattgaaccgaacaaatgaatatcctttatctggaaagactcgaatttccattatttgtccaaatggtgaaaaagtctgacgcattagttgttctgttagcccagaagtaacacctccacagtatacagtacagttgcttggactagactgatttacaacctcatcatatgatagctgtttggtatttgactcatatgtactctttggagcgggaggctttcgggttgcccagttagttctgatttgtcttccaccaagccactggccacccatctgttgaatggcggagccccaactaaaaccacctcatcaatctcagtcttttccaggtggccttctttcaatacttgctgaatgggtaccagtattttntgaaagaggtnttcattaagggnatcaaagagtttccgngatatttctgtttcaaataaaacctgactttntncacttttcttatcagaaaggccacgtncaaaaccactgtttcacgcggtgggt

SEQ ID NO: 431791 - DNA, 1604 bp, Homo Sapiens
  misc_feature (1519)..(1539): n is a, c, g, or t
cctgggtggcgtttcataccgaggtgttcccgctgggccttgccgtataatgtaattgccgccggaggaggaggcggagtaacctctggtcagccgagaaaccccactatcctgtagccataaccgcttaaacgatttgggaggtagtgaagggcagggagctggacctggaggcgccgccgcgacagcagcagccatggaggacgagatgcccaagactctatacgtcggtaacctttccagagatgtgacagaagctctaattctgcaactctttagccagattggaccttgtaaaaactgctttttgtttatggatacagctggaaatgatccctattgttttgtggagtttcatgagcatcgtcatgcagctgcagcattagctgctatgaatggacggaagataatgggtaaggaagtcaaagtgaattgggcaacaacccctagcagtcaaaagaaagatacaagcagtagtaccgttgtcagcacacagcgttcacaagatcatttccatgtctttgttggtgatctcagcccagaaattacaactgaagatataaaagctgcttttgcaccatttggaagaatatcagatgcccgagtggtaaaagacatggcaacaggaaagtctaagggatatggctttgtctcctttttcacaaatgggatgctgaaaacgccattccacagatgggtggccagtgggcttggtggaagacaaatcagaactaactgggcaaccccgaaagcctcccgctccaaagagtacatatggagtgtaggtgtattggagaaagaaaaggaaatgtgggaattttgggagaaaaatacgctagattttaaatgttagagctgttcccggagacttattgcagaaatagatgagaagcaaatcaagactactattcaaaaatgtacttagttttcatttttgtaattataaataatattatttctaatgtcaagtctcctattaaatagaaaatactgggtaattttttagacattcgtgggggaggtttaatcctgaactgaagtataatatgtgtaatataagcattttgatcaaggttaatgttacctttacagtagtgtagtgaatgctacttttctctttctgcacattttatttaatgaattaaagacataaaccttttctctcaccagcaaataccaaacagctatcatatgatgaggttgtaaatcagtctagtccaagcaactgtactgtatactgtggaggtgttacttctgggctaacaggtatgggagccttccctgtgtggcattaattttttaaagtgcaaagcttaatatttgtaggatttttatataacttagtgtgatttgtttgttttggttttttgtctaacagaacaactaatgcgtcagactttttcaccatttggacaaataatggaaattcgagtctttccagataaaggatattcatttgttcggtagggatggttttttaaaaaaacatttttcttggtaatgtaactggaaaaccagnnnnnnnnnnnnnnnnnnnnnctttttcctccaaaatattttttgaacatttacctcgttttcttaaaaatttaccttggttataa

SEQ ID NO: 431792 - DNA, 911 bp, Homo Sapiens
tgtggctgttgtgtttctattggacagcactgtattagaggaaccagatgaaaataaatataagacctgataacagttctgtgggtatttaacagagctaattatatccgaacattttctgaaaatcttttgcgtgacttaaacaaacataattaattccaaatatcaatgtcttcaaatgtatattgcatctatttaaaaaaaacatgcatctgtcaaaataaccagactccactaaaccatacaaatctgttagctgtcaaagcatatcaaaatatgcatcctccaagttcacttccaatgtgacttagggataatgcagacaatttcaggcttaaaaccaaatatgttagttattatttccagatgagacagttaacattacaaggccctagaagtaatacacatcgcaattcaagtctgtattcttgaacttttcccctgttactgtgaagaagagtatcatgggtccatttaatctttgattactgcctaaaagcattcattgccccagtagttcttaattgtcttggaaatcattctcttgcaaacttcacatttccatatcatactttactttacgctattacttcatgggctcctgggcatttggtctgtttgtttgtttttctcctttcctctttgaacaaagtcaggaaaaatgtgtcagtaggagaaaggaggagctgaagggagtaaataattcaagatcacttctgtcatttgtagtggctgagggctagaaagatattcttcggtgaagaaactcccaacaggttccatcagactgatacaacttcaggggggccaccctctgcagatggcagtgaatttgcacctgtttgtggtacaggcactaccacagcatctttgatgtctgtgtttacattacatgagaagttcttctccag

SEQ ID NO: 431793 - DNA, 1393 bp, Homo Sapiens
  misc_feature (63)..(63): n is a, c, g, or t
  misc_feature (1342)..(1342): n is a, c, g, or t
  misc_feature (1382)..(1382): n is a, c, g, or t
cttaaaggcctttcgctcggatttatcccacatttggaccagaaagcccccagggccccaggnccgggaaggaggaaaccagcgggagcccggaggccaagcgttcagggagagcaggtcccagtgggtgggcccccaacccggccacaggcaacagtgagccagttgagcaccagggtcgagggcccaggggctggctcaaattcccccgtgctggttcactgctcccggccagcgcgttgcccgagccgcaggggaggatgcccacaggcatcttcacagcttcctcccagtcagggcgatctaggagcccgttcagcacctcatggagcagcccgtctcccgagaccgtgacgatgccatcccactcactcaggctcagcccctggaccagctcccgggcgtggttctgtcgttctgtctggatgaggttgaaggacagcccagcttcagagatcatgggaagcacgtggttcttacaccactgccaggccaggccccgacccccaaagggattgaccaatagaagcaaccggggcggccgaggtagcaggtcaggggtgatctccccatccccgggcagtggcagtcctcggagcagacaggtgagggcagtggcccagcgctgggcctcggcacggttctcttcgtaggtggcggccccatctgcccggaaggtgcgagtggctctgcgccgggccccgcgccggccccgagggtaggtgtagatgcagaagtaggccgctgagtctgaggggctgcggcttcgcagggtgcagcagcctgagacctcggccaacgggaccaggccaccccggggcctggcttcaggtttggggcgcagccgctgtatgtgcagggcctgcgatgtaagggtgagggcaaagcgtgggcctcgggctgggtaggagccaaactcgccatggaggagcggggtgctggcagccagtggcggtgggggcggggccatggccttagccctgaccagggtgctcctaggcccgtggccccagctcccggtcagctcctggtctggcctctggtcctgctgctcctctgcttcaaggtgtccattcatctgctggtcctctgctctgttacatcaacgggaccctggccctgggtcttaagccatagtaggctggtaggagcaaggagtcaggtctcactgtcctggcctgaccttcagctcttaagtaggacttcccaagcagcggctgcgcctacgaagtgcagcgcgagatcagggagcggtgaacctgataaggaaacgcccgaagcgtggggtcggaaatttccagatgccccgactagccctgccagccccgcctcctcacctccnacactccccttctgtcgtcttctcgcaggatagtagtatnagcgaacgtat

SEQ ID NO: 431794 - DNA, 841 bp, Homo Sapiens
  misc_feature (442)..(442): n is a, c, g, or t
aaagaaaagcttcagatttttgtctttccacagtatgaggatcttggcttttagatggtcccttacctggtcctgctgctcctctgcttcaaggtgtccattcatctgctggtcctctgctctgttacatcaacgggaccctggccctgggtcttaagccatagtaggctggtaggagcaaggagtcaggtctcactgtcctggcctgaccttcagctctgtggaggagaggtaagtgaggagcagcattgacagccaactgcaggaggcccttccaggctcaatgtgcctgagaaccaagaggcaggggcctccctggcgggtggggggaagagtagataagtcattttaatcactgccccagccagtccatctggttgcacacaatatgtatgctataatagggagtgaagggtaaattttttattgaggcacttattantgtgcaaaatattgacctcaggcagttttattaactttcataatcctgaaaaacaccctgtgtgccaggcctgttgtcatcccctttttgtccataaggagagtaaggcccaaagaagttaagtgattttcccaagatcacagagaggttaaatgacttgcccaatcaccccattagtaactagcagagccaggatttgaatttggttatagccttgcaaggccccatctcaccatctttctttgccactacttctccctgggtctccatctcacccctcttttctaggtctccttcctaccctttgggcctccattccccccagccccaagccacggagtctccattttgcctcccctatgaaactctgtctccctctttctaggtcagggaagggcc

SEQ ID NO: 431795 - DNA, 840 bp, Homo Sapiens
tggaacaagggttctacaccacgccagccagcccgacccccaaggattgaccaatagagcaaccggggcgccgagtacaggtcagggggatctccccatcccgggcagtgacagtcctcggacagacaggtgaggcagtggcccagcgctggcctcggcacggttctcttcgtaggtgcggccccatctgcccggaaggtgcgagtggctctgcgccgggccccgcgccggccccgagggtaggtgtagatgcagaagtaggccgctgagtctgaggggctgcggcttcgcagggtgcagcagcctgagacctcggccaacgggaccaggccaccccggggcctggcttcaggtttggggcgcagccgctgtatgtgcagggcctgcgatgtaagggtgagggcaaagcgtgggcctcgggctgggtaggagccaaactcgccatggaggagcggggtgctggcagccagtggcggtgggggcggggccatggccttagccctgaccagggtgctcctaggcccgtggccccagctcccggtcagctcctggtctggcctctggtcctgctgctcctctgcttcaaggtgtccattcatctgctggtcctctgctctgttacatcaacgggacctggtcctgggtcttaagccatagtaggctggtaggagcaaggagtcaggtctcactgtcctggcctgaccttcagctctccaacactgggcccgccgggtcctccgggagccactgagaggccgtcggcgtcgggccagagcgtcaccgcgcgacgcatcgtgctagctacacgcatctcgctcccagatccctttcttccccgct

SEQ ID NO: 431796 - DNA, 935 bp, Homo Sapiens
gagaggaatgaagcgactgcctttattgcatagaccttttcaattgctttttagattggggacggaggacgcgcatgagacgaacaggggatatgaatttccccgcccccacccgcggggagaggaacattagtgcaaatcctagcgccggccccggggaacctgcccctcctgggctgattggccagctaaatggaggcaccggagtggatggggcgaggctgcgggccctgaccggccgactcactgaggcctaccccagccagtacattccaggtcctgtcattgggcgacgcgtaaaatagactccgccctcagccatcctggccgggtaggagcaggtggcaagcgtcaggactgagccctgccccgtaagggcggccccagatcagacgccaggccccgccctcattgatcaggcactaccctcgggacgagcccatttctctttaaccgtgacgacgcccaccttccagcatcacgtctggtcccatgaaagcgagcgcaatcctgagacggggccagggcccctgccaccacaactctagcagccaggccacaccccctagctcaggctccgccccattggaatgtaggccccgcccccggcgggtaccaagcttgtttagtttcagggctcccgccccgggcagccaggaggcccagtgagcagtgtaccgatgccagggtgcatctgtgcctgtagcggcccatactccacctgctccccgtccactgtgagcacgccgcgtggtgtgagcggctctaggcggaaggcacgggccgcggcgtagcccagctgcggacagcccaggctgaagtggctaccacgctccatggccaagaaaaggcgcagcagcgcagcccgcgagatgccgctacgcacccagcacaggtgcaccaggccgtcgtcgaagcgcgcatgcggagctgcc

SEQ ID NO: 431797 - DNA, 511 bp, Homo Sapiens
  misc_feature (432)..(432): n is a, c, g, or t
  misc_feature (439)..(439): n is a, c, g, or t
  misc_feature (453)..(465): n is a, c, g, or t
aggtggaaactgattcctttggtaacaaaagttgcaagcccaaagttttgctcgataatccacttgacataaaggattcagaattgcacggcaagtggtcctactacacagaacaggttcatattgaataggtggtaagtcaggtctctctttcagtggtgtaaacagggttgccacaggaacaaccattcttgtagcttccagtcgacttgatggccaaacattccaactaaatcggactcccatttcgttcttcattttgttgaatgaattccaaataggttgtcattgtggagtttgattcttatttctgcggtcccccaggagcggagatgaggcggccctttcctcactgtccccctgcaggacccgtcgcagcctccgctttgcaaaatgtgtcctctccgcccagcaggagcagtccgtggcacngcaatcnaggggtggcgccannnnnnnnnnnnnttatgtagtgttttcgcagcatagtcagtagtgaggcgccgctctc

SEQ ID NO: 431798 - DNA, 1038 bp, Homo Sapiens
ttctggtacatccatttctgacgactggtccgttcactaggagatcgtgtaatagcccggtgtgcatcacggtttggaccctgtaaagctgctcttgaggttggttaacttatgcggccattaacctgcttgtcaaggaatgttaccttcgcccatacatcaacacttgtagttgacataacgttctaactgttcagaaagcctgagctgtgtttcgacctagggctttcattgttctaaaataagctgatttttctcacgggctagacgttcaaagtgatactgaagatcatccccaacagaagccaccagtaacttttttaactcacgatttacctctgtctgtacacggagctggtttgaaagaccttctttgtcctgtagtaaccttctttcagaattcttgagcttttccaatacattctttacctctgagagttccttattaggttctataactccctctgactgaccaaggaattctcctttatgatgtcccagagacttaacctttgtatttttgttggggatatcatgagttatagcagctttgggaactaatattcttacagctttaacttccattgctttttcagtgagcattttccctagctgaagaactcctgggctctctgatggaactgctttcttccatggactctgaagactatgatgctttctagattggactccggaggtaacttcaacagatttaggtggttcctcagtttccattccatctcctgctcctcggattggggatgaagtaacggtgactttggtttctaaatttttagtagtcattttttcaccttaaccactgaaaatgcactccaagacttctgctgaacaacctctaagattcttattctccgtatttcagggggcttcacttgataggctcttcggatcggtatcaccaggttaacttctcacagacctcttccattcggaagccgacccgcccagtccctccgcatatccagcagctctctccccttctgtcgtcttctcgcagcatagtatatagcgacgtct

SEQ ID NO: 431799 - DNA, 1278 bp, Homo Sapiens
  misc_feature (1137)..(1145): n is a, c, g, or t
cccaccccgggaacataccccccagttgagggtccactttgccggacccctagccatacccccctcccttttagtccaggctggtcccgactgaaattatcactgggcacccggaacagattgttttgaaggaaattcaatgagaatgtaccccaaatgaattgtgaagttcatatcctatagcccctagaatgaatattcagttctctttgtactgtagagttattacttggaacctggtattagaattggcaaagagacagagttagcatcattccaaaataaaagatctcaagaatgcattactaataatcttatgtccaacatacaatgtattcaatggagtggcaaaagttatagaaatacagagaaaaatatatcttgtccttttctaattggataaatcatttttattattacagttgattatgatagcatgtggaagtatcagatggcaatttacttgcattaaatttaatttctgatgaagttttttataaggtagtgtgctttttaagagatatgttactaaaaaaatagaaaatgaatttgaccatgaacaaagtttaaacatgttcttcaactggtctagagtgaaacgtattgtacttgagaataaaatgaaaatcaacataaggattttataaaacaaattttaaaatgtagagcatatcaagaaaggtttttaatacctaagaagtcaagataggaatcctcaggtgaatgccatccttttgatgaggatccaaagggtattaacacctcaaaagatttccatttgtttttcagatagaggcagacatttgcttttaatgaaaccatgaaacttagctagatttcacttacattttaaaagcctcggtgtaatatttgggatcagggtgctgtgatgatgttattttcaaatctagcatgggaggttcgatttcttttaaattaatactttagtacattaatgttagcttttaatgttttgtattgggaggtttgacttaaagttgcaagtaagaacaaatagcagaaaagaaaactcaagcagaatatttattagaattttttaaagtgaagaatgataaattatgccaatggactgacttctatttctcagtttattttctgttaagtagatgtgaaatnnnnnnnnntacttaccaaagtaaggatattgagctaaaagaaaaagttttatttattattctctctgccaaaatatacttctgcctcacagcacatatttttcataaggctatcttaagtataaggctgggtcaactgaac

SEQ ID NO: 431800 - DNA, 763 bp, Homo Sapiens
  misc_feature (616)..(616): n is a, c, g, or t
  misc_feature (618)..(620): n is a, c, g, or t
gaaattaaatttaatgcaagtaaattgccatctgatacttccacatgctatcataatcaactgtaataataaaaatgatttatccaattagaaaaggacaagatatatttttctctgtatttctataacttttgccactccattgaatacattgtatgttggacataagattattagtaatgcattcttgagatcttttattttggaatgatgctaactctgtctctttgccaattctaataccaggttccaagtaataactctacagtacaaagagaactgaatattcattctagggctataggatatgaacttcacaattcatttgggtacattctcattgaatttccttcaaaacaatctgttcctgggtgcccagtgataattcagtcgggaccagcatgactaaaaggaaggggatatgctaaggctcagcaaagtgaccctaaatgagagttatgtcccaggatggaaagaagaagacgtggtttaaccaagttatactgactaatctaagcagtccactcatccttccattttgggaaaggagtgggggcagcctaagaagaacatatctggattgggaagaaccgtctttctgggctagggatggggnannnacagaaagggagtatggaaagaaaaattataagagatttgactgaagcaaggaaaaaaagccaatccccaaacgtgctagatccttgaagtaactatctttcgcaaactactgctggtaccacccaaggaccccgtgggggac

SEQ ID NO: 431801 - DNA, 1959 bp, Homo Sapiens
  misc_feature (53)..(89): n is a, c, g, or t
  misc_feature (1328)..(1641): n is a, c, g, or t
ggaaatgatcgatcactatagggcgaaccggagctcgcacgcggtggcggcgnnnnnnnnnnnnnnnnnnnnnnnnnnnnnnnnnnnnnatcaggccaaatcggccgagctcgaattcgtcgagagcgggccggtgctgagagaaccgtggctggcaaagatgattcaggcgattctggttttcaacaaccatgggaagccacggctagtccgcttctaccagcgtttcccagaagaaattcaacagcagattgttcgagagactttccatctagtcctcaagcgggatgacaacatctgtaacttcttggagggtggaagtttgattggtggctctgactacaaactgatctaccggcactatgctaccctctactttgtattttgtgtggattcctcagagagtgaacttggaatcttggacctcatccaggtttttgtggaaactctggataagtgtttcgaaaatgtgtgtgaattggatttgatcttccatatggataaggtgcactacatcctccaggaggtggtgatgggtgggatggtgttggaaacaaacatgaatgaaatcgtggctcagattgaggctcaaaacaggctggagaaatccgagggtggcctttcagcagcccctgcgcgggctgtgtctgctgtgaaaaacatcaacctgccagagattcctcggaacatcaacattggcgatctcaacatcaaagttcccaacctgtcccagtttgtctgaggatcaagtattggcctgaaatagagtccttaagacaagcaaagacaagcaaggcaagcacgtctggaaacagaacccattttgagccttagaagagtcaagcctcaggacctggaaactttgtgtctggggaagactgtttggcatggaatagggaagggattcctattgacactgctcgggtgcacccagttctcacatgtgcagtcatgccgttctctgatgcatacggccactgcagatgtgaggggccctgccttcctcagtagggagtcaacatgcccaagtcatttgcacctttacctctcacatggatgctcccaagggttagggactgcattgagcaggcccacctgcttcccagaacctcctcactagggctgagcaccttctctgagtagagtcttcatccttagcaccacagacttctgaggtcctgtgccctttacttgctggtgaggtgtcataggtagaaaagggctggcccttcagatctgggggtgtggtgagtggcaagtaagggcagaattttaggagaaccagagtcacccgctggctctactgagattgttacacccagaatccnnnnnnnnnnnnnnnnnnnnnnnnnnnnnnnnnnnnnnnnnnnnnnnnnnnnnnnnnnnnnnnnnnnnnnnnnnnnnnnnnnnnnnnnnnnnnnnnnnnnnnnnnnnnnnnnnnnnnnnnnnnnnnnnnnnnnnnnnnnnnnnnnnnnnnnnnnnnnnnnnnnnnnnnnnnnnnnnnnnnnnnnnnnnnnnnnnnnnnnnnnnnnnnnnnnnnnnnnnnnnnnnnnnnnnnnnnnnnnnnnnnnnnnnnnnnnnnnnnnnnnnnnnnnnnnnnnnnnnnnnnnnnnnnnnnnnnnnnnnnnnnnnnnnnnnnnnccagaatcctttggtatagccaagccttttggttaccgcctcatgaagaatatgcttcccgcattgtcctagtcccagttgtattctcacaggtgttatgtgcaggacacaatccaaatcataaacctggctcatgcccaacacatttctgctaatagggagagggacccaccacacacccacacatgccagaggtccctcctcacagaggagagggcctgtgtctgtagaaggttaaagctgacaacatgtgaaacatcccagaattatgactcttcccaagtttaaaatacattctcctcatgagagcagaaggtt

SEQ ID NO: 431802 - DNA, 585 bp, Homo Sapiens
  misc_feature (25)..(25): n is a, c, g, or t
caggttgatgtttttcacagcagancacaggcccgcgcaggggctgctgaaaggccaccctcggatttctccagcctgttttgagcctcaattgtgagccacgatttcattcatgtttgtttccaaaccacccatcccacccatcaccacctcctggaggatgtagtgcaccttatccatatggaagatcaaatccaattcacacacattttcgaaacacttatccagagtttccacaaaaacctggatgaggtccaagattccaagttcactctctgaggaatccacacaaaatacaaagtagagggtagcatagtgccggtagatcagtttgtagtcagagccaccaatcaaacttccaccctccaagaagttacagatgttgtcatcccgcttgaggactagatggaaagtctctcgaacaatctgctgttgaatttcttctgggaaacgctggtagaagcggactagccgtggcttcccatggttgttgaaaaccagaatcgcctgaatcatctttgccagccacggttctctcagcaccggctactcccagaaagctcctccttccgccacaacacgatc

SEQ ID NO: 431803 - DNA, 1232 bp, Homo Sapiens
aaacatgacttttgattttatttgcttctcataattattttagagaacagtaaatatgaagattagtataaattaataaaatgtattagaatttaggctctctgagaagattttaactatgtagaccataaaacagatacagcagtgctctgccattaaaataattatgagttatcacaaactctgtaaaaacaatgatttgcatgcataaaaaagtcaagtcaagatataaacatgttggtgacctctggggttcttttaatgagtgtttccacaggggttgtctgagatttggcagcccatgttctggctggttacttgcaccttgaagagcgtcccatcagcacacatgcagagcttgtagcgtacccagtcaccactacccaactggtctccactggaggaactgggtaggcgggtggtgctgaccatcacagatccatttaggatgatactgttttccgcctttaactccatattaccacccatgtgaaattcaatggttttgcccataatgaatacaccttcatttccacgcacaatagcacgcccatcaacttttatatttaaatcactggtagcattgctggtaatcctttcagtagatgccttttgaacattcaaacttttcactccacttggcaaatgaaactcatgagtttcatagtctgtgctgaataagatattttgagtcctcgggtcaaaaaactgcatgccgatgtcacttgtaatagaagttttgttgttttctacactgagctttgttgtcccttgctgaaaaacaataggctggttgttgccagtgatgaccaaattttcatttcgccttcctcctactgtgcttttataaagagggtggatcactcccatgtcagatacttgcttaaatcgaagcaggccactttcatgaaactccatactatcacagccatttggtccaatgcgaatcacggcccaaataacaagtgttattattaaattgatgacagccaggataaacaagaggataatcacacagatggctaaattgccctttcttcctctcaaccctgttttgtggagacgatcttcatcaatcggaatgtatccagctttaaagttactgttgtgctctttattgacactccttctctcaacagccttctcacgcatggacttctttacaggaccattggaactttgctgttctgcagccgccgccgccgctgccgccatcttcccgcgcccccgct

SEQ ID NO: 431804 - DNA, 455 bp, Homo Sapiens
aaacatgacttttgattttatttgcttctcataattattttagagaacagtaaatatgaagattagtataaattaataaaatgtattagaatttaggctctctgagaagattttaactatgtagaccataaaacagatacagcagtgctctgccattaaaataattatgagttatcacaaactctgtaaaaacaatgatttgcatgcataaaaaagtcaagtcaagatataaacatgttggtgacctctggggttcttttaatgagtgtttccacaggggttgtctgaggatttggcagcccatgttctgggctgggttacttgcaccttgaaggagcgtcccatcaggcacacatgcagagcttgtaggcgttacccagttcaccacttacccaactgggtctccactgggggggaactggggtagggcggggtgggttgcttgaccatcacag

SEQ ID NO: 431805 - DNA, 696 bp, Homo Sapiens
  misc_feature (345)..(396): n is a, c, g, or t
gggcaggaatgatgaagccatgtctccttgctcgctccgtccctctgtgtccggtctgtcctccttggattgggtgtaaggccggcttggaggcctggcccaccagtctgggtcgcgagcctgagctccagtcggacccaagctcagtcgcggcgcgctccctcacgtgaccctgctccctgcccacttctactccctgggcgtgcagagcaggctcctcgaccctctgccgctctgccccagtcgacccggtctcctccggcttccctccggccaacagcgcgctcaggctcgcctcaggcccctccaacggaacaggagtcgaggggcagtgaggccgggatnnnnnnnnnnnnnnnnnnnnnnnnnnnnnnnnnnnnnnnnnnnnnnnnnnnngcgtgccagcggcgtgcgattctgtgaggcctgctctgcgccggcggggaagcgcgggcgacgctacgctggacgtccttccctgccggaggagagaaagtgctgtcagctgtaggggcgtcttttaatcgtttcgctgaaattagcagtcccgagctccggagcccgccaccgggatgggcccccgggggtgggggaaggaggccgtttgtgtggtagtgtagcggtgagagcggagtcgcgggaaacgcgaggctgaggactaaggttccgcctgccccagattgtgcgcctcgtgcc

SEQ ID NO: 431806 - DNA, 1816 bp, Homo Sapiens
  misc_feature (134)..(134): n is a, c, g, or t
  misc_feature (170)..(223): n is a, c, g, or t
  misc_feature (225)..(226): n is a, c, g, or t
  misc_feature (229)..(229): n is a, c, g, or t
  misc_feature (231)..(236): n is a, c, g, or t
  misc_feature (238)..(242): n is a, c, g, or t
ggccccgggtttttccttggggaaacccgtttgggccccgggttccctttccctacggggccccgggcgcccaaaagaaatgttttgaaaaattttttaagggcccaaggggggccacaaatttctttaagtgntggtgaatgtgtttgttccgggggaaggttgatgannnnnnnnnnnnnnnnnnnnnnnnnnnnnnnnnnnnnnnnnnnnnnnnnnnnnntnnttntnnnnnntnnnnnttttcccagttccacagaactgattttattagccaatacataccaaagacgggtggaaaagaagtattatttttgtagttttctttcataatggaagccttatgctattacagactgcagttttccagtcttttgattaagccttgccagttgtgtgccgctgcagcaccaaagaaactgttttgcagcctgtcacctcctctggcaggcagccatcctggtctcggagagtggggtcagcaccagactggagcagcagctctacaatatccagaaactcacaggcagaggcataatgtagagctgtttggccttcattgtcctgacagttaatgtcagctctatgttgcagcaacactgtgactagttccttatgtcctcgatcacaggcccagtgaagtagagccctaccctcttcatctttcacattcacatccacatttttcgatttgatggctttggttatatggtcaatgttgttttccctgcagtaatcaaatatatttttgtcttcttccctgatggtttcttcatgatatagagaactaataactggcccaccaaaacctgtatttgcttcttttcctttcttctctggtatctgaggattccaacctggatctagttttttaactactgcgatatattcctgcattgcttggctggggcttgaatcaccaagtgctttccaagcttcccatttttgctttccttcaaaatcaaagaagcttggtttaggagtattacaatttccaactttgacctgtttgtacctggcatacaggtacaagagctgctccctgctggccacctgaatcaggccttgcaggtgcgcggcagccttctcaaacagctcggccaggcaactggtctcctcgatctcagggctatgggggaactccacctccccggagtcgtcccctgagctcagctctccaccgctgtcgccggtgatggcccccgcgggcaggaatgatgaagccatgtctccttgctcgctccgtccctctgtgtccggtctgtcctccttggattgggtgtaaggccggcttggaggcctggcccaccagtctgggtcgcgagcctgagctccagtcggacccaagctcagtcgcggcgcgctccctcacgtgaccctgctccctgcccacttctactccctgggcgtgcagagcaggctcctcgaccctctgccgctctgcccagtcgacccggtctcctccggcttccctccggccaacagcgcgctcaggctcgcctcaggcccctccaacggaacaggagtcgaggggcagtgaggccgggatgcgtgcgagcgcggggcgcggctggcgctgggccgtgggggcggggcggcgtgcgtgccagcggcgtgcgattctgtgaggcctgctctgcgccggcggggaagcgcgggcgacgctacgctggacgtccttccctgccggaggagagaaagtgccgtcagctgtaggggcgtcttttaatcgtttcgctgaaattagcagtcccgagctccggagcccgccaccgggatgggcccccgggggtgggggaaggaggccgtttgtgtg

SEQ ID NO: 431807 - DNA, 1113 bp, Homo Sapiens
ttttacaaaaaataccgacttagtttattggataaaaacagtggtaaaatggacataaagccaaaagtgagaacagaacattttcatatcctccccacacttgaaaacatacttcccatcatctgggattcaggtgttagggagccagagccccttccaaatctctctctcttcatcttccctggaagcaaggggaggaagaagtcagaacccaggggaggaggaagtcagaggcaatctcagtccttgtctacccgttcatccctcaaaaatctctgggttcgagggaagcagggaagaaataaggggcaaggggggctagggactggcctccagggcccactgccaataatgtcccagatagctatccttgtctgtatctcatccctaataggtaccattgtcaggccttgggagagagaggaaaagcaggtagatggttcgagaaccaaatgtggtctccagactctttcccagagtcagcaaaagccctggggtgaaccccaggactctaggagccactccttttccctccagcccaaccaagaggtgaaaagaaattccttgggacacagcatcccaagccactcttaaatctccacatcgctttccttgtcattgtcatggtctccatcatagaactcattgggtgcctctggcctgctatagttctcctcaggacccctctcctctgcatcagcctcatcagtcctgtcataggtcaggaggtctgcaggcacgtcatgaatctggacactaggtgcatggttcagcatcttcaggttttcaaagattgtctggcggatctggtccagatactggcgtgagttctgattctcgatgcgggtgctgacatctggatgaagtgtgaagtctggggcaaagtactcgaagtattcactatagggaagctcctcactaatggcctcttctaccagcagcgatgtctcatatgtccagcagcgggcaacatttcggacagtataaccaccaccacccagcacgagtagagggatattgaagctcttgacatattcaacgcattccccatgccctcggatgctgaggttaaagcagcctcgtgccgattcaccacccagcctcgctacctgg

SEQ ID NO: 431808 - DNA, 1554 bp, Homo Sapiens
  misc_feature (256)..(256): n is a, c, g, or t
gggagagggaaaagccaggtagatggtttcgagaacccaaatggtggtctcccaggttctttccccagagttcagcaaaaggccctggggtggacccccaggactctaggagccactctttttccctccaggcccaacccaggaggtgaaaaggaaattcctttgggaccacagcatccccaagccactctttaaatcttccacatcgcttttctttgtcattgtcatggtctcccatcatagaactcattgggtngcctctggcctgctatagttctcctcaggacccctctccttttgcatcagcctcatcagtcctgtcataggtcaggaggtctgcaggcacgtcatgaatctggacactaggtgcatggttcagcatcttcaggttttcaaagattgtctggcggatctggtccagatactggcgtgagttctgattctcgatgcgggtgctgacatctggatgaaagtgtgaagtctggggcaaagtactcgaagtattcactatagggaagctcctcactaatggcctcttctaccagcagcgatgtctcatatgtccagcagcgggcaacatttcggacagtataaccaccaccacccagcacgagtagagggatattgaagctcttgacatattcaacgcattccccatgccctcggatgctgaggttaaagcagcccaatcgatcacagcccagagagtcagctccacactggagcacaatgcacgtgggttggtagaagtccactacctggttgataaccggctggaaaaggtgcttgtaactctggtcatcaatgccatcccgcaggggcacgttcagacagtagtagcggccactctctgccccgacttcatacatgtcacctgtgccagggaagaagtaatttccgtatttgtggaaggacaccgtcatgacccggtcagtgaggtagaaagcttcttgaaccccgtcaccatggtggatgtcaatgtcaatgtagagcacccgagggtggtacttgagcagctccaggatgccaatcacaatgtcgttgacatagcagaagccagaggcctcaaacttcttggcatggtgcagaccaccagcccagttaatggcaatatcacagatcttgttgttcagctgggttgctccttgcagagatgcgcctgtgtaacgcgagcagaactcaaagagcccgggaaacactgggcagtcatcgcctacgttgaaggcattaagactcttggtgaagccttgcatattggtggggctgactctctgcaggaagtcaatgtagtcctcggagtggaagcggcacatgtcatgttgggaggcctggtatggcttgaagacgatcatcttcttatagagaccgtaatgcaggaccaggctatgggtcaatgccaggcgatggggcttcatagggtgtccagctccgtagtggaagttgcccacgtcggggtcgtagaaataggccacggtcttggccatggtgccggcgggagcaggccccgcacctccgccgcccgccgcccgcggccatcccgggaattccggactc

SEQ ID NO: 431809 - DNA, 1685 bp, Homo Sapiens
  misc_feature (507)..(508): n is a, c, g, or t
  misc_feature (512)..(513): n is a, c, g, or t
  misc_feature (641)..(641): n is a, c, g, or t
gacatttagtgtacacagctttattgaacagcaccctcaaaacagaaaccgtaggccaatctctgtggtgacagaaagaaatgtgagctttaaacaacacaactgtggttcacagagaacattccaaaatgactgaaaatgggaaaaaagggaaataatcatattttgggttaatgggtaccatgcaccctggaggaaccagaacagctcaaagtattataggaatattttagggtagaagaagtcatgttatccatctagacgcatccaccaaaagcaccgtccgagctcctggtaataaaaggacttcctgaggagggaacagagtgggagaacagggtgtcgttcatgctggttacaggtctgggaggcacgatgtgagccaagttgagtggcttctcaggctgatctgggaacatggggtgcaaaggttcacggctggaagcacagctcagggacttgcttaatgcattagtcagcttcttagcaggtgatttccatgacgtnnaaannttcatttggtgctggttgctatgagaaccaccggcatgtcccctccagaagcagttctgacagagctggtaattgtgacactgttggcatcggtagcgaaatcccatcatactctcactgtggcagtnggaacactcaaccggatggaagacattttccacatttgctagttgatgcagaagaggcaaccagaccagacactgcgggggaggatctgacataagcgtgttcaaggaaccatttaacgtgacttttttctgttgggagagacaggatctggctgactgttctgtgttaccaaatgaaggaccttcaaaaaactgcccgtgggtagtttgagaacttcccgaaggaattggtcatatcgtccataaaccatcaccccactggagtcagaaatcattgagaaaatatatcttaatttgtccatgatcttccctccacacaatgtggctaaagccattttgacagcaaatactgaaattttaccatggccttccggatcaaacgctgcaagcaggaagttaaggaggaggctgatggactgctccacatggatttggtgagtggttggcatccgtttgttgagctggtaaaaaatagtggagagcacagcctctaagcgggacacgttgagttcagtgtttgggtccaggttgttcagagcattttcccgcaatgcttctatgacattccatatgtccaccaggtgcaaattgcatttcttctgaacaaacctaagcttgcatgctgttctgtaggtggagagtcggatgcgatccagatcttgagccctcatctctgcaaacagctgtcttctttctgccatggtatttcctcttttcccactatcttcaatcattctaaaattcaatgaagggacagcatgaacttttcaaaaccatctatattctttgaaatggcagttgattatggcacttaaagacttcccaagcacttcatccaaggattggtaaatcctatttatcttggaatggacgggcgcttcagtcactgactcgccaaactcttagaaggtgtccattggtctgcagggaggtttgagcctggagtaggagccgctttcttattatttaataatgttggaagtgccgggtccgctgccagagttgtgggtcatgtgggcacagcagaggctggctgctgccagt

SEQ ID NO: 431810 - DNA, 1349 bp, Homo Sapiens
gcagagtcctcttcgtctcagccacctcagcagagaagtgctcctgacatctctttcaccatcgatgcgaataagcagcaaaggcagctgattgctgagctagaaaacaagaacagagaaatcttacaggagatccagagacttcggctagagcatgaacaagcttctcagcccacgccagagaaggcacagcaaaaccccaccctgctggcagaactccggctcctcagacagcgcaaagatgagctggaacagagaatgtctgctctccaggagagccggagagagctaatggtccagttggagggtctcatgaagctactaaagactcagggggcaggctctccccgctcctcccccagccacaccatcagcaggccaattcccatgcccatccggtcagcgtcagcctgctccaccccgacgcacacgccgcaggactccctcacaggagtagggggagatgtacaagaggcatttgcacaaagttcaagaagaaacttaaggaatgacttgctagtggctgcagattccatcactaacactatgtcctctcttgtgaaagagctgaattctgaggttgggagtgaaacagagagtaatgtggattctgaatttgcacggactcagtttgaggatcttgttccctcaccaacctctgaaaaggcttttctagcgcaaatccatgcccgaaaacctgggtacattcacagtggagctaccacaagtaccatgcgtggcgacatggttacggaggatgcagatccctatgtgcagcctgaagatgaaaactatgaaaatgactctgtccggcagctggagaatgagctccagatggaggaatacctgaaacagaagctgcaagatgaagcttatcaggtcagcttgcaaggttgaatgcaatatccttttatcacactcctctcaactccacgtcagcactgagaccagactcgagcacccctgtcctgtaagcgagacaaaatggcgtgtgttattttggggttttgtgttttttggtgggtttctttccttggctctccagatttacttttggggcctgttctaagtgcaaacccagcaagtttcacttgtcctgtccattagatacaactacatcttgcgggggttgtttctttcttgttccacaatgaattgcacatccatctccatcagagctgatagcctgttaataagcactggtctaacacagccaaccctcctccacagcgccatattaatgtaggaggggaggaaggtgaaatctactgcatgggattcaggacaccgttgtggttggtcaggacggaagttggggtaagtttgttggtcagagggggtttgtgtga

SEQ ID NO: 431811 - DNA, 952 bp, Homo Sapiens
gcagaattaaaatgtctacaggtattcgccctcatatgcaacacttcgatttgtgtgtctcttttggttcaaaagtaaaaatgccctttcttctaaggacagtggagttctcacttgtggctccttgcgtggaatcgaaccaaggggaatgcagcaaccaaaggttgctggattttacaagatctatctacggttaacagccaagaactaataagggtggacaaagatgatcaaaataaaagcagacatcagtgctaaattatgatgcaacagtttggctcatgcatataagaaaatacatagtatatcacaacaaaggccacacactcttaatgcaattcagttcacattactacttacaaatgaaccttccctgccttatagtagatcattcaagaacccatttttcacaatctccagcacaactccctctgaccaaccaaacttaccccaacttccgtcctgaccaaccacaactgtttcctgaatcccatgcagtagatttcaccttcctcccctcctccattaatatggcgctgtggaggagggttggctgtgttagaccagtgcttattaacaggctatcagctctgatggagatggatgtgcaattcattgtggaacaaggaaagaaacaacccccgcaagatgtagttgtatctaatggacaggacaagtgaaacttgctgggtttgcacttagaacaggccccaaaagtaaatctggagagccaaggaaagaaacccaccaaaaaacacaaaaccccaaaataacacacgccattttgtctcgcttacaggacaggggtgctcgagtctggtctcagtgctgacgtggagctgataagcttcatcttgcagcttctgtttcaggtattcctccatctggagctcattctccagctgccggacagagtcattttcatagttttcatcttcaggctgcacatagg

SEQ ID NO: 431812 - DNA, 2660 bp, Homo Sapiens
  misc_feature (27)..(27): n is a, c, g, or t
  misc_feature (61)..(61): n is a, c, g, or t
  misc_feature (102)..(102): n is a, c, g, or t
  misc_feature (716)..(772): n is a, c, g, or t
  misc_feature (866)..(877): n is a, c, g, or t
  misc_feature (879)..(879): n is a, c, g, or t
  misc_feature (2580)..(2614): n is a, c, g, or t
ccagggaacccttccaagaacccgccnccccgggaaaaggccccggaaaagtaatcccccnaagggaaaagggctaaagcaaggctgaaggacgaacaggangaattgcccctcctcctcccctgcctaggaggagggaggttaataattggaaccttatttccctttttcctatgcacatgcctaaataagagacaggagaggaaagaagccatttgcagagaagtatcatgaagaaggcatttttctttaccatgatctaagtgtattggaaatacaatagcaataccccatgtatgcattcatgggcaattatacaggctgtatgtgttatgtgtccttcacccagggggactgtcttctgttaaaatttgactttaatttagtaaagtaatttttttcacaaaatacaaaataatgtaatacattatctttattgtctgacattacagattgattttacactttccttttttacagaccatgggaatgaagggtaaaaatgtgtccagcattttccaaacattctttgttacacacaaacacacataatgaataatagaaaagagcatacagaagaaatgaaagatacgttgaaattggacaggttgtggttctaattgatccatggaaataatgtgaaacttttaaataatgctagtgagtgggatatattgtcatacatagcgtggtacatgcacttgaaattaaagctnnnnnnnnnnnnnnnnnnnnnnnnnnnnnnnnnnnnnnnnnnnnnnnnnnnnnnnnngagtttgctgctccccctgctggctcttgagcctgaccacaggttcagacagctccagtttaggctataaagtcacaatgcccctatttccagnnnnnnnnnnnnanagtatgtaatgaccctctcgtctcccggagcggaaaggctctggtgctaaggaaaaagctgagagttactttttaaaaagagattactgtcaaccaacagtaaggattctgctttggggaagagccaaaaagatgggacgtgaatagtcagttatggagtacagtctttctctcacaaaattgagcacattttggtgagccatggggaacaaggctcaataattgtgtgatgaaaagggatttaattgcctgatttttataaaaagaggtttcacaggttttcagtaaaatgaaaccgaactgaatactcacagtgtgagtgggtgtagaggttagcttctgagtgctgtgggttttgggatgacatgaacctcagggtatctctagtgactgtggtatctctctgttaagagaagggtctgatcaacaacttgaaaagctaagactggtttgaaacttatacctctggggatctaaaatgtttccaataaatgacaattcgttcccttttctaaaagatgtcatagttcttcttttgatgtggatagtagtgatagttataaaaaatgctaaatttatatatctcaattcaagcactacattgaaaaagaagcaaattagtatgacttttttctctttccaaactgaagcatgaacatacattagagcaaaagcaatgagaaaaccgcaggtcggcaggcccctccactgttagttaagacctgcagtaggggacataacttactccctgcttcagttcttcttcctttagtagcttcatgagaccctccaactggaccattagctctctccggctctcctggagagcagacattctctgttccagctcatctttgcgctgtctgaggagccggagttctgccagcagggtggggttttgctgtgccttctctggcgtgggctgagaagcttgttcatgctctagccgaagtctctggatctcctgtaagatttctctgttcttgttttctagctcagcaatcagctgcctttgctgcttattcgcatcgatggtgaaagagatgtcaggagcacttctctgctgaggtggctgagacgaagaggactctgctgccagccttgccgcatacctggcaattagcctgtgttcttcatcaagccggtttgaactctcaagcatgctcctggtaataaaaggacttcctgaggagggaacagagtgggagaacagggtgtcgttcatgctggttacaggtctgggaggcacgatgtgagccaagttgagtggcttctcaggctgatctgggaacatggggtgcaaaggttcacggctggaagcacagctcagggacttgcttaatgcattagtcagcttcttagcaggtgattttgtgaatgtaagattatgttccagaaggtccttgctattcagttgttatttaaatcagtactgaattatctatattccaagaagtaacatagttttgagtcttcctatattttaaatctcaggaagctacactgggttccaacagaataagtaagagcacgcagtagggtggagagtgggaggaagggggactgaatactagacctgggatggaaggtaagtttgccctttaattctgccaccatccttgatattccctttaactctgggcacactcacacatcctacccgctctcgacgaattcgagctcggccgatttggcctgatnnnnnnnnnnnnnnnnnnnnnnnnnnnnnnnnnnngtcggccccaccgcgtgaatccagggccatagaggcagatgcggtt

SEQ ID NO: 431813 - DNA, 1112 bp, Homo Sapiens
  misc_feature (7)..(7): n is a, c, g, or t
  misc_feature (31)..(31): n is a, c, g, or t
  misc_feature (34)..(34): n is a, c, g, or t
  misc_feature (39)..(39): n is a, c, g, or t
  misc_feature (41)..(41): n is a, c, g, or t
  misc_feature (49)..(49): n is a, c, g, or t
  misc_feature (54)..(54): n is a, c, g, or t
  misc_feature (58)..(58): n is a, c, g, or t
  misc_feature (71)..(71): n is a, c, g, or t
  misc_feature (77)..(78): n is a, c, g, or t
  misc_feature (87)..(87): n is a, c, g, or t
  misc_feature (106)..(106): n is a, c, g, or t
  misc_feature (189)..(189): n is a, c, g, or t
tcccacngcactcgggcactgctggaaacgntgncagtntnttctcagnccgcngaantgcacatcacttntattgnnaaatcctcnccatcctcttccgaacttntctctgctaccagcttatttaaggatggctggctgatgtaatggttctctgcatccatttcatgccacccatccacgatgaantcgtagtatccagtccgacataatctagaagctcaaatgggcccatggggtaacccggctcctaatttcatagcagtgtcaatgtcttctttggatgcgtcacctcggttcatacagcctgattgcttccatgaggtatggaaccaggaggcggttcacaataaacccaggagtgtccttgcaagaaacaggatgctttcctagggctttgctaaagtctaccaaagattcaaatgtcttctggctggtcattggtgttttaatgacctccacaagtttcatgacaggcactgggttgaagaaatggaggccagcgaatcggtcttgtctggtggtggcattagctatgcttgtaatctgcaaggaggaagtgttgctggcaaagattgtatgttcagcagcaaacttgtccagccttttgaagagctcgtttttcaccttcagattctccacgatggcttccaccaccaagtctgtgctgtggacaacggaggctgcatccgtgctggtcgctatggtgctcagggtcttctccacaaattcatcgccggccttagggttttctgcaaacttcttctttgccactttcctaaggctttcctcaattccctttttggattttgccaggatgtcctctgtctggtctaccaacactactgtgtgaccagttgctgcagcaacctgggcaatgccggcgcccatcagcccgccgccgatgaccgtcacgtgcttgacgattatcttcttggccgaggccgaggcggtggacgaggaggacacggaacgcatgaactgcctggtgacgaaggccatggtgtggcagcggcggcgacagcgaggagacccgggcagggaagacgcgcgaggcgggcagccgcggaaagccagactctgggggcggggacctacgcggccctgccccc

SEQ ID NO: 431814 - DNA, 1624 bp, Homo Sapiens
  misc_feature (533)..(533): n is a, c, g, or t
  misc_feature (537)..(537): n is a, c, g, or t
  misc_feature (547)..(547): n is a, c, g, or t
agcttctgcctaaattaccaacttttacttttataatcatttgagtgtattacaattttatattatacatttttttcaattcaaattttcagactgaaacattgttattttagtagagtcaatttataggcaatttgcaacagtgatttctcatggaaaaaagacacagacagacagtaatcattcagatctgtggaactgaatgaccatgaaaaccgacctcctgcaaaccatgcaaacagagatatgctgacccattcagcagcagcatcttcacgacgagctgaataaagacacatcttatgtcatgcccaaaatgtagggcaagactcaaagctgcaggtagtaaaatgttcttataaaggcaagatcccaggtgctgctcgctgcagtgcttcacagactataccacttgcttgccagtggcttgtgactctcccacgcagcaacagtgagcatggtgcactcgcactctcagaggaagtactttcgccgttgatgagagacaggaatctaggcaattcttcacaaanctgncaaggttcancccacatgtttgcttccaaggcaccaagggtgtaaagctgtttagaaaatacgcagaaatgaacagactaaacaccgggaattatttcttaatggagaatctattactgctgtaactggtgtaataatcacttcgatagattacaatcaaaatgcacatttattaaaactgtactgtgtgagggaatgtctgaccaaagagcattcccacaggcactcggggcactggctggaaagcgctctcaggtgttcttctcagagccggagaagctgcacatcacttgtatttgtaaaatccttctccagtcttcttgccgaacttgttctctgctaccagcttatttaaggatgggctgggctgatgtaatgggttctctgcatccatttcatgccacccatccacgatgaacttcgtagtatccagtccgacataatctagaagctcaaatgggcccatggggtaaccggctcctaatttcatagcagtgtcaatgtcttctttggatgcgtcacctcgttcatacagcctgattgcttccatgaggtatggaaccaggaggcggttcacaataaacccaggagtgtccttgcaagaaacaggatgctttcctagggctttgctaaagtctaccaaagattcaaatgtcttctggctggtcattggtgttttaatgacctccacaagtttcatgacaggcactgggttgaagaaatggaggccagcgaatcggtcttgtctggtggtggcattagctatgcttgtaatctgcaaggaggaagtgttgctggcaaagattgtatgttcagcagcaaacttgtccagccttttgaagagctcgtttttcaccttcagattctccacgatggcttccaccaccaagtctgtgctgtggacaacggaggctgcatccgtgctggtcgctatggtgctcagggtcttctccacaaattcatcgccggccttagggttttctgcaaacttcttctttgccactttcctaaggctttcctcaattccctttttggattttgccaggatgtccctcgtgccgaattcgccacccaggcctcgctacct

SEQ ID NO: 431815 - DNA, 890 bp, Homo Sapiens
ttttctccacgtcatcactggctgcgcttgttccctcacttgaccctgattacgtaaagtttctagttctttcggagtctcgtcttcccattctccctaaggtcttccatcgtgagatcgatccactggtcatccacaaaaagctggcgatggaagtttgtaaatatccgtttttcttgctttgaatgaagtttctactttgctttgcagtccccaccacttgaatttgatggtcaccagcttataggcacacatctggggacagtcagggctgtttgccagctccttcttccagttgggtcccaaagggcctctcttggtcttgactgactggaataatgctgggtcttcatcagctttgtagtctgctggttcaacttgacttctatctgcaatatctatatggacaatttcaacagttttccatgtgtttggatctaaaccatgtacattttctaatgttcccaagtctggtttgtgccatgtttcgattttaatgaagaaatcatctttcatatattcattcgttacaattgttctacagtaggggtacgcattccaggctttctcatgaaacaccaaggagccctcgggagcaatcatcctcacgaatgcaggcactttgctctttaggtgataaattttgtgcgtatactgtcccttttctccatccttctcataaggttcattctttaagacttcaattccttctccaccaccagtctcattcttactagcttctgcaacagagtaaagctgcccaacctgatactcctgaacagaacatggcaaaaccacacggaattccttgatcagcaccatcttcccggaaccccctcacagctgccgccgataccaccgccgccgccgccgctaccgcctctcacccc

SEQ ID NO: 431816 - DNA, 317 bp, Homo Sapiens
  misc_feature (62)..(95): n is a, c, g, or t
gtagacactgggttttgccatgttgcccaggctggactcaaactcctggcctcaagcaatcnnnnnnnnnnnnnnnnnnnnnnnnnnnnnnnnnnagtgtaagacactacatccaacctacacttttaaaaattatcccacagttcttggatattctgctgtttttaaaaattttccattcctttttgaaatctttcaatttcaatttgggaagtttctattgacatatcttcaagttcactgattctttctggctgtgttcagtcttatgagcccatcaaagtcattcatctctgtttcagtgttttatttctagc

SEQ ID NO: 431817 - DNA, 839 bp, Homo Sapiens
ggggtccaggtagaacagagtcaattctcttcttgttctggaagccacgttggcttccctcggagaagtcagaactcgaactggccgtccagtttcacgtataactcaatgacaccgtaggcatggtggtggcagctgggatctccagcaccacgttggagtccttggtgacattcccatcctccgtcgctgacacctgcaccgtcttggtctggatgcccacgatgccaccacacttctcctcgacctgcatgtgctcagagatcacacacttctgcatcgtcgtgatcttctgtgtcaaaacgcacaggacctcattccttccctccagcacctgctggagcacagggtttctcagatttattgttctctcggcagagtctctgatgagctgctgcaaatccacctcctgcttcctcagggttccaaatgaagactggctctctacgcggctgctgccccccaggttcagcttgaccttccccagtgcagtctccagggttccactcacgtggtttgcaaacttgccctcgtatttcacaaagtccgactccacgaccactggactcggaaattggtcttctatgagtacatcgccaagggtgagggataaaaactggtacttgggtctctgccagcaccagaatctcttcttttttgtcaccagacttagaagctgtaacttatcagagtcattcagatttgatactgcaatcaggtcaccatcagcatcaacttctctaagaaaattcctggttgctttggcaaacattttgaaagctccagattatccgcgcgcccgctgctgggtccccggcagcccgcgccccgtgcccgct

SEQ ID NO: 431818 - DNA, 623 bp, Homo Sapiens
atagatgcaaaggcatggatttagggcagggggtcggaattgaaggactggtcttgatctcctcagagactctggagtccaccacacccacctttcatcctctccaggggcatgttcctcctctggccccgtgctgggggcgcatcccaaagatttgccttctttctgtctctgtcggagagggatccagttcatcctccacaccaacttttcccaccccacagatcaatataccctcccaaaaaaactcacaggggaacccaggagacccagggcccagggtggaggctgcagcttcactctggttctgtccccaggcttctctttcagagaagctcctggacctcatcagttcttccagccaacccctgcccttacccttttaggtcctcacccatctatgcttcctgggtgttgatctccccgggcaggggtgcctctgtggactggacgggtggctggcaagccccccgcatctgccagcgtcactgccgaggctgggaagctgcccactttgaaggtgcgaccattctggcccttccagattgtggagtcggggctgtggaaagaggagctggtaaataggatgggaataagggcaagagttagggctgggccctggc

SEQ ID NO: 431819 - DNA, 2119 bp, Homo Sapiens
gatgagcatattgggccatttttttcctcaacatgtaaactcactttttacgcttcttttattagtttttattagtttttcaaaagtatcagaaataacagaatgttgggagaagataaatctgccttttgaaaccaaatatttaatattttcattaaattgtttcaatacaacttcaggcaaatgccaactggaagaccaagcccagaaattcagaggaaataatcttccaaacaaggaacaccaaggtgatcttcttccattccagccacaatactggtgatcataatggtgctagtcagttatccagattatcgagtgtttaccacatcatctattttcagaatgctccgaacagtttcagttgcaagagtcagagcactgactgataccaacagaggctggacaaccagttcctccaaaatgttggaaataccaccctttcggacattaatgcctgcagttttttctccctgggcatgccggtttcttagttctgttactgtagaaatgggattcaggccggcattttcagctagtgtagatggaatgacctccatagcatctgcaaaagcacgaacgcagtaggattccataccactcagtgttcgtgaatattcagttaatcgtagggccaactctatttctggagcaccacctcctgcaataagagccctcttcttcactaaacaacgaataacacatagggcatcatgaatggagcgctcagcttcttcaatcaccagtttgttagaaccacgaacaacaattgtaactgtttttccagggctggcacagcctgtaatcttgagcagtttgccagaaccatttaaattgacctcctcagctaactcagcagaacccagcatgtcagcagtaaattggtcaatatgagcaactggcttggttccaattgtcttacaaatgaattcaatgtcttctctttcaatatccttaatcaccatgatcttcattttattcagaaagtgtaatgcaagatcactaagagcatctcttagaatagatttctgtatgagaaggacattacatcctgtttttttaatttgcttcactaaatttaaaatataggctctctcttctcgcagcactcggtccatctgggcatagtcagaaaccactatttgattatccatgtctgttttgggagcagataagcaaaactgaataagcccaatcttggccttttcaactctggttatgccagaatttgacactttttgggtgagaaccagcccttccaccaactcacagtcatcaattgtcccaccaagcttcttaactattttaatatctctaagatctacactggtggctgtggctgggtcaatcactttcatcactgcatttacactcattggagaaagcagacttgaatactgagaaaccacctttgagttcagtgaagtggttgcactatttaacaaagtttctctgtcactcagttccacaggtcgagacatgtcagtcaagatttcaatgcccttttccagggccttctggaatgactcagaaatgatggttggatgaatccctttctgaagaagcttggtacaagaatctaagagggagccagcaatgatgactactgatgtggtgccatctcctgcttctatatcttgagccttagacagctccaccagcattctggctgctggatgtaatacttgcatttgtttcagaatggtagcaccatcatttgtaatggttacatcaccttttccatcttgaatcattttatccattccttttggtccaaggcttgttctaatagcatcagcaaccgctttggcggcggaaatgttgctgaagcggatctgggctggcttgtcgcggtcctgataggcgcctttcccgcggccgccggcagccccggcagtcgccccgctccggggtgccacattctcgggcatggcaaactccgctgtgtctgggttggctcgggaaggacggatggacccggattctggccggccgcagtgtaataacggtaagccctcactgccttcacgaaccttccagaaagcggcgccggcgtcgggaggaggcggaggcgagaagccgctctcgacgaattcgagctcggccgatttggcctgat

SEQ ID NO: 431820 - DNA, 1307 bp, Homo Sapiens
  misc_feature (13)..(13): n is a, c, g, or t
  misc_feature (242)..(261): n is a, c, g, or t
  misc_feature (546)..(546): n is a, c, g, or t
  misc_feature (639)..(648): n is a, c, g, or t
attaccatacacntactgcacagttttaaaagctcaaatcaggcatacacttatacccaagatctgcttttcacattggtaaacttattaagcggcctcaacagtaatacagtatgctgcattcctgtagtgcataaataagcaaaatccgtttaaactgccaattctttcttacagatacttaaaaagaattattttgcatagttttatgtgccaacaatcataaatgtgtattacttctnnnnnnnnnnnnnnnnnnnntcaagtcttccatttcatagattattctcttcaaaagcaaaatacttagactccatttatatatccttgaatgtgttacgtgtttaagtaaatcatagtcgtgattccaaacatttcggggtgaccaactcagagcacctaattcagtacctagttcctcaaatatttatataccactgaatacttatttgggtccactaactgcccattcattcattcattcattcatcagtactgaaatactatacagctaattatttcttcttttaaaagaggcacatactncaggaaacaggtcctgattataacaaaagtcctactggagcatacagtgcacttctaacaaatcggcctgccctaaatgggatttcactggannnnnnnnnnaacataatttttgaggcttttaaaactgacaaacggagccaactcaaaaatattaagaattacaaaaataatttccaccagggtacttttcccctaggcctgaccttttagtgtctttttgtccaaacatatttaagaccagaggaaaaaagcaattgctttagtttctatgtttgggtaactatatctacccacagacaagagaataacaaaaaccaaacagtacagtgggaaatataccagaaaggaaaaaaaagatcatcacattaaatgtaaatgaggtaaatttttataataaagaatcttttatgaagaatgtctcaaaccaaatattgtactttccaatttcttgggcactggggatgctgaagtgtagttagatgagtatataaccctatagggctcgtgtgcataaaaatcaaagcaggatatagctgcctccaagagcatgtatgtatgtatatatgtaaaatgcttgacctttagaaacctctgagctctctcagctttgtttaaccacaggacaattaaatataccctgataatacaggcaaaaaataaactgggtagatgtgtctgatatttttaaacccaaattctactagtactaccaagttgccctccacttaaaaaaagtagttctacccaacactggagaa

SEQ ID NO: 431821 - DNA, 481 bp, Homo Sapiens
  misc_feature (466)..(467): n is a, c, g, or t
attgaaatcaaattttatttttggaaaatgacattacacacatcttgcaaatgtacacagaaatgagaatgcgatgaagaacagagcttgagagccaaaataattgcaagagcagctctttggctgcctggtattgaatgctgcgaatcttcagcactcacagttcacagcaccttacacacatggcaaacttctctagacaaccttgaagtcctctgacccaagaaagccctcattgaattgcggagggggtgggggaagaggggtgttacaggcacaggagatgaaaagggtctgctccagctggtttatgggggcctcaccaaacctaccagtccaagtggggtcagcaaaccaaaaaaggagaatgcctcttgaaatactgcttttgaatcacaatttcagagtaggttaggtattgcctaggacactgatagtaatgcatttgaactcatgcccttgtttnntgtctggctataac

SEQ ID NO: 431822 - DNA, 703 bp, Homo Sapiens
  misc_feature (22)..(22): n is a, c, g, or t
  misc_feature (97)..(134): n is a, c, g, or t
gagggacccatggggccaggcnacgaaattcctccggttgatttctcatcatagccctaagacagcttggggagcaaaagtttccctccgaggccannnnnnnnnnnnnnnnnnnnnnnnnnnnnnnnnnnnnnagtccaggctgtccagggatgccatctcggccaggggggcctgcgggtccccttgggcctcgggggccagtgtctcccttgggtccctcgacgccggtggtttcttggtcggtgggtgactcttgagccgtcggggcagacgggacagcactcgccctcggggacttcggcgccggggcagttcttggtctcgtcacagatcacgtcatcgcacaacaccttgccgttgtcgcagacgcagatccggcagggctcgggtttccacacgtctcggtcatggtacctgaggccgttctgtacgcaggtgattggtgggatgtcttcgtcttggccctcgacttggccttcctcttggccgtgcgtcaggagggcggtggccgctaagaggagcaggagccggaggtccacaaagctgaacatgtctagaccctagacatgtagactctttgtggctggggagggggttagcgtccgctcatgcgtggcctcacactccgcgtgcctcctgctccgaccccgaggagaaactcccgtctgccccattctgtcgtcttcttgcagcatagtag

SEQ ID NO: 431823 - DNA, 1504 bp, Homo Sapiens
tgcatagctgacctcctgactaatggacatgaccgggtggtgaaagctgcatctggagcactgagaaacctggctgtggatgctcgccaccaagaattaagtggtaaacatgctattcctaacttggtaaagaatctgccaggaggacagcagaactcctcttggaatttctctgaggacactgtcatctctattttgaacactatccacgaggttatcgctgagaacttggaggctgcccaaaagcttcgagagacacagggtattgagaagctggtgttgatcaacaaatcagggaaccgctcagaaaaagaagttcgagcagcagcacttgtattacagacaatctggggatataaggaactgcggaagccactggaaaaagaaggatggaagaaatcagactttcaggtgaatctaaacaatgcttcccgaagccagagcagtcattcatatgatgatagtactctccctctcattgaccggaaccaaaactcagataagaacacctgatcgggaagaaattcagatgagcaatatgggatccaacacaaaatcactagataacaactattccacaccaaatgagagaggagaccacaatagaacactggatcgatcgggggatctaggcgacatggagccattgaagggaacaacacccttgatgcagaagatttagcaccactatctccgttccatctgggcttatatgtacttttattttttggtggtgaaattgactgatgattttcctttttcttcgctggactattgtgccaactgccaggctgcctcctgcccttacagccctaagtggctgccttctttccatcaactcccaacttcttcctgtgaagtttaattgtctcaacgcctccccctcccccattccctccatttttctcccaagaaacctgactcaattatttgcatattttgagaaactgctgcagattagttctttttgccagttttccctggaactcctggccttttgtggaggggagggatggagagaataggaatcttcactagaagccgtgggaagaattggaagttacatgctgtatatgcaatgtccagcagtctgataaactgacgattcttaatcaagatttttttcctgatggggaagggacttttattttcttttagagaggggaaagtgtgagctcttcccttattcctaatggctatttttgaagcaaagaaggccagcaacattggcacatgccacctggcaaaggacccttgagtaagtgaaggtctccctaaaactgggatttagaaaccttgctctcctcatctccaagggcaggggaccatcaaggaaccttacagactccatctctttctggcaagcctcatggccaacccttgggctatttgctggctggccccctttaaccccagggctgttcctttaaccccacctcttcctggccctgtgaaaatgtcctggctgaattgggccctggcccattttccaaaaggcctgtaa

SEQ ID NO: 431824 - DNA, 938 bp, Homo Sapiens
cggtccggaattcccgggatctggccttttgtggaggggagggatggagagaataggaatcttcactagaagccgtgggaagaattggaagttacatgctgtatatgcaatgtccagcagtctgataaactgacgattcttaatcaagatttttttcctgatggggaagggacttttattttcttttagagaggggaaagtgtgagctcttcccttattcctaatggctatttttgaagcaaagaaggccagcaacattggcacatgccacctggcaaaggacccttgagtaagtgaaggtctcctaaaactgggattaagaaaccttgctctcctcatctccaaggcagggaccatcaagaacctacagactccatctcttctgcaagcctcatgccaaccctgggctattgctgctgccccttaaacacaggctgtccttaacccacctctcctgccctgtgatatgtctgctgagttggcctggccatttccaagaggctgtagaaaggggagaatgtcaaggaagacttttggtagagaaggagcagaaagatgtgtttttgggaagaagaagacctctaggaggagctagtaggaatgtacatgaagcaattagtctgaaactggcttccccactccccccgtttctccttttcctatccttataggcctgtcccttgcctctgccctggattggttggcaaactaaaggacttggtgtacataaactcctgtcccttttcccttacaaggtggggattgcccctggctttgcctcctctttggggcctttggcctgggggggatctcctcccgccctttccatgtgccttttctttggcctctggcaggctcattttctcataattttcgccaaataaaattttgggtggcttcccttacccacatatttgggcccctaattacgcccaaag

SEQ ID NO: 431825 - DNA, 1697 bp, Homo Sapiens
  misc_feature (1521)..(1569): n is a, c, g, or t
ttctatgtccattctttaatagaagtaggaagaaaaatggtacttagaacaaactgttcagatacatatcaacttcataagcacaaaaaatttattctgaataaatcactttacaattactgaaaaagatgttcattaccttagctatgtacttaatgaaccaaattacccaaacaaaataaacatggcaatataaaaatgttaagaatttacaaagctgtacaaaataacttaaaatttaaaaattagactgatacagtctgtaagatctcttcgagagagctgtccaattacagatctatatacttttcttcagaaggtcaaagaaaggatgctttaaggcttctctgagagtaattcttttggctggatcatactccaacattttctgaatgaggtcaaagagacgctcatgttcaacatcttgagaaagcataaattccttcagaggtttacagcgtcttgaaacatatctgccggcagaactgtgttcatcccagtctaatcgatcgtggtgaaaatatttacgtttcctggttttctgtatcatatgttttggtagaggtccaagaatcctttccatcattgctaaatgctccttactatcgtgtgttggaaatacggtaaacccaagatagtattcaataagaatgcatcctatgctccagacatcacatggttgggaccaccctagggctaaaataacttcaggtgctctataatgtcttgtagataccaatgtactgtgatgttcgtcatcatatgttgcactaccaaagtctacaactttaatatctggatttattaaggtgcgttcatcacgttttattttgggattatacgcctctgtgtagtcagactgcacaaataagatgttttcaggctttaagtctgtgtgagtcaacttattactgtgcaaaaaattcacagacttgcatatctgatatgccatctttctgatatgatccagtcgaaatggtagaaaaccattttctttaatgaagtcgtaagtactaagtcccaatagttcaaaaacaatgcaaatgtgaccatgatgctcaaaccattccaacatctggacacagcggaaagtactgttggggtctgttgtattcagatgttccagaacttgtatttctgagcgagcagcttcacagtatctatccacatttttaactatttttactgctacatgtctacctcccgctttatgatcgatgcactccacaacttttccaaaagctccttcacctaaagtatcaacaatttcatctaaaagagagaaataaatctcagtcatatcaagaagtggaaacaatgtacttatcacaataaatgctatcaatgtagattattctagttgatgctacaaatttccttatcactagatattttattggtcaacaccatcaaaaaacataattattaggtctaatttcattaatttgattactgttctggaagttctatataacaaacattacatttctaaagaaagcaaaaatacaatcccccccaccnnnnnnnnnnnnnnnnnnnnnnnnnnnnnnnnnnnnnnnnnnnnnnnnnatttccaaatccctgaaagcttaatctatatatagattatgttatctgaaaagttaataagtgttgaaaaatattctatacatcttgcacttagtacgtctccactctgacagatcaggtgaccccca

SEQ ID NO: 431826 - DNA, 914 bp, Homo Sapiens
  misc_feature (538)..(538): n is a, c, g, or t
  misc_feature (629)..(629): n is a, c, g, or t
gggagctccattttgttgttggtgcgcgacgcagtcagctgcgtgattcccgtgattgcgttacaagctttgtctccttcgacttggagtctttgtccaggacgatgagacactcaaagagaacttactgtcctgattgggatgacaaggattgggattatggaaaatggaggagcagcagcagtcataaaagaaggaagagatcacatagcagtgcccaggagaacaagcgctgcaaatacaatcactctaaaatgtgtgatagccattatttggaaagcaggtctataaatgagaaagattatcatagtcgacgctacattgatgagtacagaaatgactacactcaaggatgtgaacctggacatcgccaaagagaccatgaaagccggtatcagaaccatagtagcaagtcttctggtagaagtggaagaagtagttataaaagcaaacacaggattcaccgacagtacttcacatcgtcgttcacatgggaagagtcaccgaaaggaaaagaaccaggagtgtagaggatgangaggagggtcacctgatctgtcagagtggagacgtactaagtgcaagatatgaaattgttgatactttaggtgaaggagcttttggaaaanttgtggagtgcatcgatcataaagcgggaggtagacatgtagcagtaaaaatagttaaaaatgtggatagatactgtgaagctgctcgctcagaaatacaagttctggaacatctgaatacaacagaccccaacagtactttccgctgtgtccagatgttggaatggtttgagcatcatggtcacatttgcattgtttttgaactattgggacttagtacttacgacttcattaaagaaaatggttttctaccatttcgactggatcatatcagaaagatggcat

SEQ ID NO: 431827 - DNA, 1983 bp, Homo Sapiens
  misc_feature (1264)..(1275): n is a, c, g, or t
  misc_feature (1727)..(1796): n is a, c, g, or t
  misc_feature (1929)..(1929): n is a, c, g, or t
  misc_feature (1948)..(1948): n is a, c, g, or t
agcggagtgttttcgagacgagtctcgacgcagcagctgtcagctccattttgttgttggtgcgcgacgcagtcagctgcgtgattcccgtgattgcgttacaagctttgtctccttcgacttggagtctttgtccaggacgatgagacactcaaagagaacttactgtcctgattgggatgacaaggattgggattatggaaaatggaggagcagcagcagtcataaaagaaggaagagatcacatagcagtgcccaggagaacaagcgctgcaaatacaatcactctaaaatgtgtgatagccattatttggaaagcaggtctataaatgagaaagattatcatagtcgacgctacattgatgagtacagaaatgactacactcaaggatgtgaacctggacatcgccaaagagaccatgaaagccggtatcagaaccatagtagcaagtcttctggtagaagtggaagaagtagttataaaagcaaacacaggattcaccacagtacttcacatcgtcgttcacatggggtatgaacgtttttaaaacattttggaaattttatatcccatgtggaacagggaaacttgaatttttgtgtttgattatttgagaaagttttaagatgaaatcatctcagttttaacctgcaggatttttctgtgtttgtgcattggataggaaattccgggaataaagtacacatttagttctataatttaattattggttggctcctaattgacattccagtgaaatgatgggagttaattgatttaatttagattagttgaaaattattacaaaatattctaaaagggttttttgtggtacttcaagaaacctgattagttttgatctattgaaatcacaaaagtagaacagggcattttatttttgtataatttaggattaggtatgcttctttgttctaacaagtcatgttttctaacccttctttcactaagcaaaccagaacagatttgaactgttatgggttatatattagtatggagatcagctcagatgacattaaaaatgccgtagtgttattcttgtatgccaaatctttttttccccaaaattagcactttaattttatttactgttataatatttgttttcttagattaggtaggaaatcttaatttggccaccgcctactttgacaagtaaatattacatcatacgattttgcaacattaaattagaacactagaaactaaaaaattatgtttcagtggaatgctacaactaagcannnnnnnnnnnnaagaaaaacaattgtattatgttttgttgccttgccactttgagtatcttatctgaaaatctgttccttgccatgtttttcttctgttaacataaactatgtgccctgtgaatttctggggactgaatttgaaattgctcctgccaactgtttgtggcctggtgtttatctgaatgcctgaatatctccccgctgaatgaatttcgtattctgccctgaattcactctggtatattgattggctggatgatcttggtgccgcccacttgacgtttccagaagagtcaccgaagagaaagaaccaggagtgtagaggatgatgaggagggtcacctgatctgtcagagtggagacgtactaagtgcaagatgtatagaatatttttcaacactttttaacttttcagataacataatctatatatagattaagctttcagggatttggaaatnnnnnnnnnnnnnnnnnnnnnnnnnnnnnnnnnnnnnnnnnnnnnnnnnnnnnnnnnnnnnnnnnnnnnngctttctttagaaatgtaatgtttgttatataggaacttccagaacagtaatcaaattaatgaaattagacctaataattatgttttttgatggtgttgaccaataaaatacctagtggataagggaaatttngtaggcatcaactaggatnaatccacattgttggcctttttttgtggataaggt

SEQ ID NO: 431828 - DNA, 538 bp, Homo Sapiens
  misc_feature (50)..(50): n is a, c, g, or t
  misc_feature (167)..(177): n is a, c, g, or t
  misc_feature (396)..(409): n is a, c, g, or t
ggacagatatttctgtttattttctgtctctccttccctaccccctgccnatcctaaggcccgtgaaagggggtttctcccctgtcctccatcccccgtttctgttcattcacagctgcgtccccgagcactggaacagtgcctagcacataatagatgctcagttnnnnnnnnnnngtgcagactgagagttaaaagtgaagggatcgcagagagcagctttggattttgcttctggttggcagttcctgaaggtgcgttctgtgcaggtaaatactcccaaatctgtgtgtgctgacccgggagaaggtgaaaaggccagacagcttctaactgagcgtctactctgtgccaggccctaggcgagactctgatgacgacagcgatggtgatttnnnnnnnnnnnnnntcaaaacgaatcatccagaactctttaggtgatgggttctgggctcggctgcgaaaagatgccccactctgttccctaggtggaccgtttccgccgtctctggggagatgactttcttgaacccatttt

SEQ ID NO: 431829 - DNA, 3487 bp, Homo Sapiens
  misc_feature (3322)..(3322): n is a, c, g, or t
  misc_feature (3341)..(3341): n is a, c, g, or t
  misc_feature (3400)..(3400): n is a, c, g, or t
  misc_feature (3405)..(3405): n is a, c, g, or t
aattgcagccgcacacaacccagccctaatgatcgttctctctacctctcccccaagtcctcctccgcctcctcctctctgcatgcgcctcagagcccgtgccaagaacaagcagcagtcctgaactcgaggtccataaaaatcagtcgactgaatgacaccatcaaatctttgaaacaacagaagaaacaagtggaacatcagctggaagaagaaaagaaagcaaacaatgagaaacagaaagctgaaagggagctagagggtcaaatccagagattgaacacagagaaaaagaaactaaatacggacctgtatcacatgaaacattctctcagatactttgaagaagagtccaaggatctggccggccgcctgcaacgttcatcgcagcgtataggagagttagagtggtctctctgtgctgtcgccgccacacagaagaagaagccggatgggttctcgagccgcagtaaagcacttctcaagcggcagttagagcagtccatacgggagcagatactgctgaaaggacacgtgacacagttgaaggagtcgcttaaagaagtccagctggagagagatcaatatgctgaacaaataaaaggagagagggcccagtggcagcagaggatgaggaaaatgtcgcaggaggtttgcacattgaaggaggagaagaagcatgatacgcatcgggtagaggagctggagaggagcttgtccagactcaaaaaccagatggctgagccactgcccccggatgccccagcagtgtcctctgaggtggagctgcaagacctgaggaaggagctggagagagtggcaggagagctccaggctcaggtggaaaacaatcagtgcatcagtctcctgaaccgtgggcaaaaggagaggcttcgcgagcaggaggagaggcttcaggagcagcaggagaggcttcgggaacaggagaagaggcttcagcagctggccgagccacagagcgacttggaggagctgaagcacgagaacaagagcgcactgcagttgggagcagcaagtaaaggagctgcaggagaagctgggccaggtgatggagacgctcacctcggccgagaaggagccagaggcagcagtcccagcctcagggactgggggcgagtctagcggccttatggacctcctggaggagaaggtggacctgagggagcatgtggagaaactggaacttggattcatccagtaccggagagagagatgccatcagaaagtacatcgccttctaacagagccaggggacagtgccaaagatgcgtcaccgggaggaggccatcatcaggctggcccaggacgaggaggagaggaaggtgaagctgttggagctgcaggagatggtgttgcggcttgtggcagctatagcgaggggcacggcaaattcctggccgctgcccggaaccctgctgctgaacccagtccaggagccccagccccccaggagctcggggctgccgacaagcatggtgatctttgtgaggcgagcctcaccaacagcgtggagcctgcacaaggagaagccagggagggttcttcccaggacaaccctactgcacagccagtcgtgcagctccttggtgagatgcaggaccaccaggagcacccaggcttgggcagcaactgctgtgtgccatgcttttgctgggcttggctgccgagaagaaggagataaacaccaccatcatcaaagagctgctcaagaaatttttaaaaacgaaacaaagttatggggttaatctcctacacaattcatttacttcatttgaatgttagagctactcatgattatttgtgtttctaatttatagtttaagtttatttgtaaaaagttaaaagagagtgggtctctgtggctctcactgatgttcactctggcatccttcagcatttttcttttttcatttcataattgtaggtcattagcatgcatatcgagtttgcccttacgtggtgggagttcaaacacacaaagacccactctttgcacaaaactgttctcgctggtttggaataggctcccgtgcttttctaatgttattgcagcatggatgtccattacagaattcagataaaatttgctaatgttctgctatgatgtttgatctcatcttaatcacagtgagctcttctatagctcaatatgcggtttgccctcaagtgtgcactgtttattactttgtaatatgccactgtgagtactgacatttagagctgtttaaaggccgagaactggaaacagcctttcctccattttctgtgtattggtgatgggagtgataaccttttgggggagctttctaaatctcacagaagaggaaagtggcctgctctggcaggtatgtgcaggatacagtgtgtttcatctgttccggtgccaagaatgagcagtgtactgtggcagttccctttggatttgtatgtgctctgggctcatgaagatattgcatcgtgagctgcagcagttgcactctttttcaatgacctaaaaagggcttatttccgaggaatgaaaggctgccatcattggctgtggatgtgaaaaacctttcctagcttagagcatttgtatctacaatacattttaaagtcagagttcgtgttccctgttttaatcacatgactacctgtcccagtacacgaaagggcgctggttggcattcttcttaatgtatttagtaaagatcataagacatcctttaagagtttaaatgtctctgaaacaggcatacaggctctagtcaagaatgaattagagtgaaggaaagctgtgtgacacctggcattcctctctgttcatggagcttctttgaggcttgaagtttgattttactatctagacctctctggctaatacctattcttcaaccacctcggttactctgacataggaatttacttcttttccttgagtggaaaacactttagaaagtaataacaaacattattataaactaatatatgtgagagtacttagttgaaacaaaaaggaattttagtagacagtattatattatctttgaaaatcaaggagaagtttatgcaacttaaaatgtttacacactgtggtgcaatctactgtttgtgaatgtctgtattatcaggaaacatgtctatacgatcgcagagttgtatttcctcacaaacttctttacgaagagtgaaatacgtttttgtacctctcattttcagtcagggacatactttgtgcaatatttctgtgattgtgcctatgcatgatgaatgaatgcatttcaatcatacattgcctaaatcataacttgatgatgcttgngaaagaatcaacagttaanacttcatgaagttctaatgtctgtgttcctggggagttttctagttactagaccatctncattnttagcacttggcaagctcatgatccctttataaatgtgagtataacaggagagcagcaatacgattttgccatggaatacct

SEQ ID NO: 431830 - DNA, 1252 bp, Homo Sapiens
  misc_feature (449)..(458): n is a, c, g, or t
cccacttagcacacaaaataaaattttaaggcaaaaacagcactttgcaacaatttaataatttattacattacagtggcatcacaccagcagtcaataaggccactctagggaaaaatctttcagtatttccatgacacattctgtttacaataattcataaactggtaaaattcattctaagaaaacttggcaaataaaactttggactggaattggcatttctttctctgcttttcgttcccaccatttctttcttttatactacagtattcatattttaaaatgttttaaattatttcagaacattaagatagcagttacattttttaatagttatattattttaaaatgactctttaagataaagttttagagaaactatattatggatagggctgatttacattttcaaattttctgaaatcagctttggttttagagctgannnnnnnnnncatttctggaaaattatcaggtttaatcaaatacttttaaaatgattattatatattgccatctttaaataggtgttttgattcttcctacagacattaaaatgtattcagtggaactcacagtttaaaattctatgtttctgatgaactctaacattccaatgttgccttctaagcaaactgaaagcttccttatactgaatgaggaagagtacaaatactcggctgaatgaggtatcgcaaaagactgcatgcactttggagaaagacttaagttattgtcatacaatttccattctttttagcgttttcttaaatatatcacaaatacctacacaaagagtggtatttcagtcaatatagtaaatttattttccagactgaccttcagcttaaatatgccagtgtgtgatttaatccataggcacctcatgaacacattattgtcagattggttacagatgctaaacgctatccgaaggtcattcctagtcactgatatttatcagggtaaaagtgaagtgatttcaacgataaaagtacctttgcaataatttatcaatgtattagataagctcagtttcagaatggataactgttagaccaaataatgtggctaattaacagtggtacgaattctagcccgagggtttaaaaatgagttaaaagtaagtgctttaaactgaactcaaagaatgcaaaagcggcaagttaagaaaggcaagaacaggaccttaggcccatttaagccataaatttacacaaatatgccttctgctgagaggtttcatttt

SEQ ID NO: 431831 - DNA, 558 bp, Homo Sapiens
tgagcctcttcatgccgatctggaagccgttcatggcctggatggcggtctgcgcgctggccgggttgtcgaagctcacgaagccaaagcatttactttggttagtcgcccgatccacaaacactttcgaggagatgacattaccgaaagggaggaacatcttgcatcagctcagcgtccccaaactcctggggcagattgtagatgaacaggttacagccctcgggcccttctctctgctgctgggggatcattggaggcggctgaggaaaggccttggcttatctgaccataggcagcagggtaggcagctggacctgcatactgctgcactccggcgtaggcctgctgcagggggtccgcggcggtggggctctgtgctgggtaggggtggatgccattggcgaacacagcttccgcagcaggttgcccattggcctgtggggggaggccggtgaagccattcaccccaatgggggatgggatgctaggcacggctggtgcagtgatgcccggaggggtgctgccacctgaggttggggtcataggtgcggccgc

SEQ ID NO: 431832 - DNA, 1268 bp, Homo Sapiens
gagaaggaaagaagctgcataacacagtgtttttctcaactgtgcccctagaggtgatcgggcaagaccgcgcagtcgtcctggtattcacatcgtccgtgcaaatcagtcgactgaagaacaccatcaaatctttgaaacaacagaagaaacaagtggaacatcagctggaagaagtaacgtgatttcgtttcctcgcgacatgactgctgggtttggggggcactcagacatagaggcgccagtctcgtctcatccatcttcaggtcttccgcagggaaggccctacatcatctgctaccctgagagatctggagagcccgtgccaagaacgagcagtagtcctggattcaacgtccgtaaaaatcagtcgactgaagaacaccatcaaatctttgaaacaacagaagaaacaagtggaacatcagctggaagaagaaaagaaagcaaacaacgagagacagaaagccgaaagggagctagaggttcaaatccagacattgatcatacagaaagaggaactaaatacggacctgtaccacatggaacgttctctcagatactttgaagaagagtccaaggacctggctgtccgcctgcaacattcattgcagtgtaaaggagagttagagagggctctgtctgctgtcatcgccacagagaagaagaaggcaaaccagttgtccagctgcagcaaagcacatacagagtgggagttagagcagtccctgcgggaccaggcactgctgaaagcgcagctgacacagttgaaggagtcatttcaacaactccaattagaaagagatgagtgttctgaacatctaaaaggagagagggcccggtggcatcagaggatgagaaaaatgtcgcaggagatttgcacattaaagaaagagaagcagcaagatatgcgtcgggtagaggagctggagaggagcttgtccaaactcaaaaaccagatggctgaacccttgtcccctgggagccccccagcagtgccctcttgaggtggagctgcagacaccctgaggtaaggaactaagagagagtggcaggagagctccaggcccaggtcaaaaagaatcagcgcataagtctcctgaaccagcgacaaagaagagaggattcaggagcaggaagagaggcttcggaagcaggaggagaggattcaggagcagcataagagccttcagcagctggccaagccagagagcgtcttcgaggagccgaacaatgagaacaagaccgcactgcagttggagcagcaa

SEQ ID NO: 431833 - DNA, 588 bp, Homo Sapiens; identical to SEQ ID NO: 325253

SEQ ID NO: 431834 - DNA, 592 bp, Homo Sapiens; identical to SEQ ID NO: 325254

SEQ ID NO: 431835 - DNA, 384 bp, Homo Sapiens; identical to SEQ ID NO: 325255

SEQ ID NO: 431836 - DNA, 897 bp, Homo Sapiens
cgactccaactgcagtgcgctcttgttctcggcttcagctcctccaagtcactctgtggctcggccagctgctgaagcctcttctcctgttcccgaagcctctcctgctgctcctgaagcctctcctcctgctcgcgaagcctctccttttgcccacggttcaggagactgatgcactgattgttttccacctgagcctggagctctcctcccagctcccagcctttcagcctcccccgtctgctcgtgatattttgttttaaagttgccttttgtgtgtttttttctcaagtttttcttcatcttcttcttcatgtcatatatatgtttcccccaaacacgtgccctctgaactccatagacgctatactttccttgaagaaatgttacagtcacacagatagtgtctggagtcttcagcttgattgatattggctgatatgtcaaaggtgtcatccaacagttctcatttataaatatatatagagagaggtttgttttttaatgtagcccgttcagcatcctgccctgtgcgagtcctggtctcccccgtgggacgctcccgccggcgctcagtacgggcgattggcgtctatgggccgcttcagctgcaccttgagcctcttcatgccgatctggaagccgttcatggcctggatggcggtctgcgcgctggccgggttgtcgaagctcacgaagccgaaagggaggaacatctgcatcagctcagcgtccccaaactcctggggcagatggtagatgaacaggttacagccctcgggcccttctctctgctgctgggggatcattggaggcggctgaggaaaggcctggcttatctgaccataggcagcagggtaggcagctggacctgcatactgctgcactccggccgct

SEQ ID NO: 431837 - DNA, 1135 bp, Homo Sapiens
gtgggaatttacttcttttccttgagtggaaaacactttagaaagtaataacaaacattattataaactaatatatgtgagagtacttagttgaaacaaaaaggaattttagtagacagtattatattatctttgaaaatcaaggagaagtttatgcaacttaaaatgtttacacactgtggtgcaatctactgtttgtgaatgtctgtattatcaggaaacatgtctatacgatcgcagagttgtatttcctcacaaacttctttacgaagagtgaaatacgtttttgtacctctcattttcagtcagggacatactttgtgcaatatttctgtgattgtgcctatgcatgatgaatgaatgcatttcaatcatacattgcctaaatcataacttgatgatgcttgggaaagaatcaacagttaaaacttcatgaagttctaatgtctgtgttccaaaacacatcacattattaggttgtagggagatatgtaggtgtgctccctggggtggggagttttctagttactagaccatctccatttttagcacttggcagcctcatgatccttttataaatgtgagattaacaggagagcagcaatacgattttgccaatggaataacagatttgccggcattcactgaaagagggcagatattgggtccttgtaacttcaactgactcttccaaattgtatgaatttatcaatgtattacacaaatccagtttcagaatgataaaaaatgttagaccaaataatgcggctaattaacagtcgtatgatttctagcccatgggtttaaaactgtatcttaaagagtcattttaaaataatataaatattaaaaaatgtaactgctatcttaatgttctgaaataaaacattttaaaatataaatcctgtagtttaaaaggaagaaatggtgggaaggaaaagtagagaaagaaatgccaattacaggccaaagcgttatttgccaagttttcttagaatgaattttaccaatgtatgagttcttgttaacagaatgtgtaacggaaatactgaaagacttttgcttaaagtggcattattgactgctgatgtgatgctactgtaatgcaataaatttttaaattgttgcaaagtgc

SEQ ID NO: 431838 - DNA, 658 bp, Homo Sapiens
gacgtggcattcctctgtgttcatggagcttatttgaggctagaagatggatttataccatctagacctctctggctaatagctagtcttcaaccatctgacataggaattatacttcttttccttgaatggagaacactttaaaaataataacaaacattattataaactaatatatgtgagagtacttaagttgaaacaaaaaggagttttagtagacagtattatactacatttgaaaatcaaggagcagtttatgcaacgtaaaatgtttacaaactgcagcgcaatctactgtttgtgactgtcaaagtgtcatgaggaaagtgtctatacaatcacagagttatatttcctcacaaagttctttacgaagagtgaaatatgtttttatacctctcagtttcagttagaggcatattttgtgtaatatttatggcttaaaatggatctaaaggtcctgttcttgcctgttctgaacttgccgctgttgcactctttgagttcagtttaaagacacttacttaaacgccagtgtaaaccctcgggctagaaatcgtaccactgttaatatgccacgttatttggtctaacagtttttgtttatcattctgaaactgagctgatctaatacattgataaagtatgtcaaagactt

SEQ ID NO: 431839 - DNA, 538 bp, Homo Sapiens
aataaacacttgcatagttatactacaattttgtgaaaatgaaacagattatctcatgccaagcatgcccagtatttgcacagtatcaatacctttaatactataattttcaagatgcgcaaaataaaattttaaggcaaaaacagcactttgcaacaatttaataatttatcgcattacagtagcatcacaccagcagtcaataatgccactttaggcaaaagtctttcagtatttctgttacacattctgttaacaagaacccatacattggtaaaattcattctaagaaaacttggcaaacaaagctttggactggaattggcatttctttctctacttttccttcccaccatttctttcttttaaactacagtattcatattttaaaatgttttaacttatttcagaacataaagatagcagttacatttttaaatatttatattattttaaaatgactctttagggatacagttttaaacccacgggctgggaaatcataccactattaggcccacattatttgggtctaatt

SEQ ID NO: 431840 - DNA, 440 bp, Homo Sapiens
  misc_feature (427)..(427): n is a, c, g, or t
agctgagcattttttatgtgctaggcctgttccagtgctcggggacgcagctgtgaatgaacagaaacgggggatggaggacaggggagaaacccccttcacgggtctttgggccgcttcagctggactttgagcctcttcatgccgatctggaagccgttaatggcctggatggctgcctgggcgctggccgggttatcaaagctcacgaagccgaaacacttgctctggttggtagctcgatccataaacaccttggaggaaatgatattgccgaaggtagggaacatctgcgtcatttccgtgtctccaaactcctggggggaggttggtagataaacaggttacagcccttgggaccttcaggttgggggagagaaagacattaaagcccccaaggagaggaggcgaaccccccccggggaanttgggtaattttt

SEQ ID NO: 431841 - DNA, 476 bp, Homo Sapiens
  misc_feature (19)..(19): n is a, c, g, or t
  misc_feature (40)..(40): n is a, c, g, or t
  misc_feature (64)..(64): n is a, c, g, or t
  misc_feature (69)..(69): n is a, c, g, or t
  misc_feature (130)..(130): n is a, c, g, or t
  misc_feature (133)..(133): n is a, c, g, or t
taggtttaataaataatgnttgggttaattaattttcccnaaaaagtggttttccccaacctcnaaggnaaaaagaaagtaaaattcccctatgtccagagtaacccgaggtgggttgaaagaaataggntanttaggcccagagagggtcctagatagtaaaaatccaaacttccaagccctcaaagaagctcccatgaacagagaggaatgcccaggtgtcacacagctttccttcactcctaattcattcttgactagagcctgtatgcctgtttcagagacatttaaactcttaaaggatgtcttatgatctttactaaatacattaagaagaatgccaaccagcgccctttcgtgtactgggacaggtagtcatgtgattaaaacagggaacatgaactctgactttaaaatgtattgtagatacaaatgctctaagctaggaaaggttttccacatccacagccaatgat

SEQ ID NO: 431842 - DNA, 651 bp, Homo Sapiens
tttgcaccttgaaacaatttagtaatgtattacattatagtagcatcacagcagcagtcaataatgccactttagacaaaaatcagtatttccattatgcattctgtgtataagaattcataaatcggtaaaagtcattctaagaaaacttggcaaatacagctttggactggaattggcatttctttgtctacttttccttcccctagattctttgttttaaactacagtattcatattttaaaatgttttaaattattttaagacgttaatatagcagttacatttttgaatagttatttgaaagtgactgtaagataaagttttagagaatctattatggatagggttgatttacattttcacattttctaaaaatcagctttggttttagaactgattgtttttcattttgggaaaacctaccaggtttaatcaattactttaaaaataattatcatattttgcagtctttaaataggtgttttgattctttactccctagagaaattcaaatttattcagttgaagtcacattttaaaattctatgttcctgctgaactctaaccttctaatgttgccttctaagcaaattaaaggctgccttatactgaatgaggtagagaacaaatacttggctgaatctcgtg

SEQ ID NO: 431843 - DNA, 420 bp, Homo Sapiens
  misc_feature (76)..(76): n is a, c, g, or t
  misc_feature (94)..(94): n is a, c, g, or t
  misc_feature (160)..(160): n is a, c, g, or t
  misc_feature (216)..(216): n is a, c, g, or t
  misc_feature (275)..(275): n is a, c, g, or t
  misc_feature (280)..(280): n is a, c, g, or t
  misc_feature (290)..(290): n is a, c, g, or t
  misc_feature (331)..(331): n is a, c, g, or t
  misc_feature (356)..(356): n is a, c, g, or t
  misc_feature (382)..(382): n is a, c, g, or t
  misc_feature (409)..(409): n is a, c, g, or t
tgtaaggaagtaaaattagtattaattcaagacaaccataaaaagacatgcccgggttggtatttgctagaagttntgattaattaatatgttntttcacccatgtttgttcctctggcttttatcaacatcacttgttaaaataatgatgaagtaaatntacctgccttcatacaccaatgtttaaatatggtattccacctcacaaaggagctncatatttttaactcatatgcttatgatttcatctcgactaagataattaataattaaantattnaattcaggtnaatatcaattaaattctgtaaatataaatattattaaagtntaaagcatctatataaaaatttagnacttattaaataagttccaacctatntacgggggctatgggtaagatttactnattaacacatg

SEQ ID NO: 431844 - DNA, 1514 bp, Homo Sapiens
tgcaccaaaaaagaaattcctcagtgccattagccactgcaaaataacttcaggcccccatcacttcccatgcccaaaccagaaacactcattaatacaatctaacaagtagattcatatgagaagaattccaaaaggtaaattcaaaattcaaaacaaaaaattagagccatttaaacattttaaaatatatatatagagagagaaagaagacagaatcaggagttctgtgaggcagaggagtggggagtggcaatatcaacaatggtttctatgcgtgaaaggcccttcctaaacctcctaccatagcaaagctcccccggtctatcagatgaacagaattctagatttgttttctctttctctcaaaggccactgacaagaaagcagctatggtatattttccttgactgagggctggagactcaaaaacaaaagctatctgcccagccagagccctctagaaggttgctgggcttggggctattttacactggataagcccttcctgagtttggaagcatcaattagaagactgcggcaatttgtcctttacgctttatatcctacccattgccccgcactccctcacccctaggatgtacatagaaagtcgacactaggggcactgggactctcaattctagggtggctgggaagggagggaaagctgggccgagctctacttgtgacaactgatactacagtttcttttcccctgctgtcacccccttcctctccctatggccagcctaatgaacacctgtctctctatcctccattatttgcctttgtctgactgtctagtggagaggcacctggccttgaagtgcaagggagtcaaattctcctttcagtgcataagggagtgactgggagaagacaagagcaggattttatttcctagaagatgggtgaagtctttcttcaatctgtctccatgtgtatagagtcacatcttgcagaaggggacagttaaagaccaagacataggcttttttaaaggactcctgacctcataaagagttggaatttattgctctttgctaccctagctccccgttgtccttccacagaaggaacattatttctgatgtcctggttccctgggcaaagggtccaagcacaccggggcagggcaggttgctctagacagtttagagagctttgtcctttcccaccattgcacagcacacaccagaacaatgcccacctgaatccctctgagtacatgtgtgcattcagcatggagccacagctctttcaagaatcactcttgctatatgcagagttatcaaaagtcaaagtctggggagaattcaaggatcccagtccagtccttccccaacagttgcatgagtgtcaaaaggcactgtttgtccagggttggggtgaaaatttaccctaacccaggaggcagggacaacactgtctatatcagtgtttcccagtcttggcaatattgacccctggagtcagatcctcgtgccgaattcgccacccaggcctcgcta

SEQ ID NO: 431845 - DNA, 1119 bp, Homo Sapiens
aaaaataagattttcctctttactctcgtccttacatgtccacagacttcatgtagagaggctgagcctttcgaccacaaagtgtgtgctgtgttgaagatgttataatgatgggagagggcagttgcagcagcttctaaccaagtgtctacaacacatgtactactgtttcctacctgtgtcacctctgcaaaaaatggagctctgagcccagttctgtgagcatggtgtcagagccctccaaagtcctgagaaatcaataccagggatccaaatctcagacaccagtttgaaggcaatacctggataccaagactcagagtgaggatatggattttgggagctggacagttttgctgatcctgccacactggcaggggctgaagtccagaaatggtgtgtagctctagtcattcttattcaccacagctcttatttcacagttttttccccttggtttcttctgtttcttctgttcctcatattcaagtattttctgttggaaatagcctgcaggaggattcttgctcttctcggcttcctggatgaaaagtgagaagagctgtgtcttcacaaacttcttcacaaatcggcggttggtcttggaggtcagagccttacagaaggatctttcttggaagtggccttgcccatttgcctcccgcttgatataggaagcataatggcccacaatcttgacaaagaactgcacaaaggggcctgaaacatgctcgttgatttgttctgcagtctttaactcattgatcccctgaccaagagagtctaagatgtcatcctgaagcttcggtggcaggatgtctttttcatcaccaaccgacattaagaaggttccttcacaaagattgaccagcaggacctgaaataaacatagactggctttctctggtcctctttcttcatagacccccagaggatttaccgtcttgatttctgcctgtggctgtatctttcagcccaggtagcaacaaaatcaatatcttcagttctcatttcctatctagcattctcctttctcaccattcccctctggagatctcagttccattcctgaggaaagggtgtgggtgtttgtaggaagggagtaggagaaagagctaa

SEQ ID NO: 431846 - DNA, 765 bp, Homo Sapiens
gcgactctagcaggatctcagaccactgttcgtgaccctctagtacatgcttcaccactgcatctgtagttccaaatagatcacccccagttattcctctcacatccgattccaccgcaccagggacaggtttctttatcctcagaccagaaatatcccaaacgcgcacagtctggtccaggctggctgatactaccaagtcttctgtggggtggaactgagcacacatcacataatggttgtgccctgttaacacacaaacacaggttctagattgccaattccacactcggatggtctgatcatcggaggcactcagaatccagggatattcatgatgaaaaaacgtggtgcgaatataatctaagtgcccaagcaatgtgaaaagacagcgccgaagcttgtaattccaaaccttaatcttatagtcatctcctccagagacgaacagtggctgctgcttatggaagtcaatgcctcgcactggaccatcatgttcatcaaacttgtcaatgagagtgcacatccgatagtcccataactggatgaccccattatgtaaactagtcaggatccaaggtcttttggggtgaaagctgagccctttgacccgcgcgctcttggtctcgaatttggttaacatctctcaggtctccgactccgatgtcttaatccgagccccgacacaccctgctgcccttcggacgcctccacgtcagccctcgtgccgattcaaccacccagcctcgacctagcctattttgt

SEQ ID NO: 431847 - DNA, 1483 bp, Homo Sapiens
tttaaaatcattaaatactttatttaagaacagtttgtttaccaagttaggacagtggttatgatttctcaatttacacatattccttttgaaaatcttagaaaaaatgtttcaccaatgttaaggtacaactcttgaatatgcagcgtagtcttctctctttattctgaataacagaagcacgtaaattaaattatcctctttgcacaattattccccccaaaactaatttataacatataattatctccctaaaaagcagttacaaaccataaattgaatatgaataaaatatgaaaaagagcacaaattttaaagccctccatgcaaataaaatattaatacattggctttacctataaaccttattttgttaatgctaagcacagaacccttatgggctcataggagtcagcaaacagctacagatgagtcttcttgttaagaattcattcaatgcttctcagaatagcagattttaaaaaatgaattcactgaggttcttaaacctctgaacataaggcaacagttcacaactgatttcagaaatagatggtaagtattaaattacaaattctactaggtcagtgggagtgggcggattcacctggagtggagcagtgaaggtttattttacctctttcaagatctctccatatattccaccagtttgagataggctgggggaggaggtggaatagcttaaaaggttatatttcttattttaaagtataaaaacatacacttaaaggctaaacctatctataacctacatcttaatgtcagcaaaacatactgctttctacccaaatcaccaattgaatcagcctcgctcatgatttcagagcataaggtgtccagagaagaaaactcaagactgaatgggctgccataatggggaagtacaggtagccaaaggccagcaattgagacagcattagagaaactatctactatgtctgaataagctcccctaccttacaagcatcaactactacattgaaaccattctgagtgctgcatttcctatatgtgcctagacttggtaatgcctgataaattctgtatattaccacgtcttgcatttaatagacaatttgtttaatgatactaactttactcacacttaattgactttctcatatcctgagattaatctaagaaaactatttcaaagataaatttaaaataatttttaaggaacccagaatttttatttagaacactgctttgacttttgttattactttgtatttattagtatatcctattcataattttgcactgactttcaatataaaattaaatctctgcttacacaaaataactgtcagctccaaatcaacatgaatggagtgacattgaaaatatcatactattcccgataaaaagagtttaatgcaaaataattattacctggtatttcacattcggtttgtgtctttatctctactcccaggcaaatattctcacttaagacccc

SEQ ID NO: 431848 - DNA, 2629 bp, Homo Sapiens
ttttacggattgcaatgtattcctttttattaaattataaaactgttgtcaatacatgtgcttttggaaatagtgttttcctcaagtatctgcttttgtgcagcacttgggtttaaacaaacaacaaatttcgataccaacttcttgggcttcaagctattgagcacttatagccaaactatcaagtatagttatgatatagacagtccaaatttatggaaaatattacaaagacaaatgccttgaaaagatgacacagtgcagggaaaactacagctattaagctggtataaaaacttagtcaaaatgttttagtccattatggctctgcctaaagcttcaaaggaagaaaatttaagacacttctcatccaaggcacttaaaagagttgcaataaagtacttctttgaatttagtttgagcccaacagtattttttattcctttttcacattctgactcacactgaaacagtccttgaaggcagctattaatgaggaaaaatagttattgcttcttaatatacatattacaagtacgcaaacagaatacagatttcggtccactgaagcaagtaacaggatctgactgcagtgttctgcttaattctgaacaaaaagccacagactcctctaacccagtcccacaaacagagccctcagttctgaatttgcaccagctgtcccctgggttctccatgaggacacacgagctggagtcccaccacgtctccatggtgcattctaactggagaagaaccatcccggcggcctggcaggagtggctagtctgatgccatgcaggcaggcctgggagagtccgtgctcagacatctataattctgtgtcccggtatcgggcagactggccatagtaaccgcgcttggagtgttctgacagctgctggcggtactcctcctcctcggcatcactgccataacttcctctggtatcctgataaggtctggaaggagctttctgtggctcagggggtctggaactcgtgtgctggggcgtgccagggtctggcttgtgcgttttgattggacctgcatagatatcaggatgcttctgggcaatttcgatccttgcattctgtgcttcctggagctcctgcattctctgtaacctggccttgtgatccatcttctcaaatattttgactttgcccaggactgatttgggagcattatcttgctcctcactgctctctcccacctcctcaccctcttgaggagggatgggagtggagggcttcagtatagaccgcccaaaggtaggttttgctgcaacaggaggaggataacctttggtagatgccccaggagtttcattaccagcaacggcagaggggtttgacttatattcataggatttggagaagtcataggattcttctttgttctgggttttggccttgggcggctctggcttgaatgctgggggcgggctatttgtccctaagttgatcgctgctagcagccctcctcatctgagctcgtggctctgggctgggtttccttatgctctcctcgtgctgcaccggctccgaggagcgggtgatggacgacaccagcggctcctcggctggctcatccagctcattgtcagtgtaggcgcctccttcaccgtccgtgtcttcaaagtcactgatgaggcggctgtcgcaactcagatagtccgcgcccatggcggttaagtaggacatgcggtcttcggggtcatcatccatcccttccatctttccttcagagacccaaaccgcttctccttgctgatgctgaatagtgtcctttaagctgccaaaccagctatcattggctgaatttaggttgattgtagctgtaaaaaaggtgtgcacacgtttttttaagcttgttggcttgatcaaataactttcgagaacttttgttggacgttggatttaacctttgtctcatggttttgacaccttgtctggagtctgggttgaaaaaaatcacaattgggaaccactgggtgtaattcaacaggtccacagctttcggagtcacatccagtagtgcatgcttatcctgttcaataatttgcctcacggtatttaaccggaccactccagtggatttctcagatcctgcatcttttggttccgttttagcagtttgaaaccagtcaggtaactcattagccaatttttccattgctatatcagctatggggccgaataagaccacaggtctcttgaaaccagcttctcgcagcaaaaccctctcataagctgggaacttggtgctgacagacacaacagctgtgaggtcttcccgacttttcctcaggctcttcttcaccccagacctctggccacgcattctccagaaatctgcccggtccccagcgttgtctctctgggcattttgaacactggccatttgttcagctctgctcttgttggggattaagcctttctccaactcgttcccaatcctcacagccagccagttgcccagcttgccgtcatacagtgtgtctaccactcggaagacctcccctctggtgaaggccaggctctgtggagtttccttctcacattcaaagtggcttcttataaaaaacgaatcccctctgccacaagccaggatgtctctatacaca

SEQ ID NO: 431849 - DNA, 1130 bp, Homo Sapiens
cagttgtgcgatctctgttgtctcccctctctcgggtcttctgctgtccttttgtggcgctaccacgctctgttggccgacttgtctgccctgcgggcttgtgcctttgcccagtggtcggtaatcctgcgtgtttcatatgaaggtcctccaccccgttcccatggtgtggggactccgatttttgtcgggcccactggcagtctctcgtggcaaggtacttgctagctttcttcgaccaattgctgggtgcccattcaatagaacggaagggttgtcactccttgtgcaatggcttggctgccagaggcatacccccccgggcatgatgggattggtaacccctccagtcacctatgccctcaagcgaaggtgacggcaagagcctcttcccaagaggcgcccgatggcagctccaaggataaagatgggcatgaagtacccggcaggcatggggatggtggtggccagaatcagcatccagaacttcataaccaggaagaaggcaagggtcccaaagatggttgaaccgcgggtggtaccattcccaccaaaggtgctgggggtcgagctcctcgggccagggtgggctggagttctgggtcatcagcgcccaggagtggttgtcgaacagcgagtccagttgctgcttcatggacagccgagaagctaggaagtggcccacaccaggcgggtaggtgatggaggcgagaagcaaggtggccagagcggagtacacaggcttgctagtagccagcagtttggagctgtaccgattggtcttgatgaagctgaggaaggttcgctgacagaagaggtaagcacagctcaggacgccgcagatgccacccagcgccacaaaaaagaagatctcaggcaggtcgaagggaacgtccacccggaaactggtcttgtagagggaggtgatggtctcctgctcgctgttgaagactgccaggagccggaatatgaaggccccgcaggtggccgcaaagaagcccctccagtaatcccggacagagaagtgggaagacatgacctcgatgctgaacaggacgcccaaggcggggctgaagtgagaacaagaatgagccccatcccctcctccaggctctcagctgggccgaggg

SEQ ID NO: 431850 - DNA, 2020 bp, Homo Sapiens
cctgtttctgtttttagtttttattaaataaaagcagaggaagaggaaggcccctggtctcccgggctaggggggagagccatgggtcctcccctccctctgttcaaggtgcactgcgtgctgggcttgaggtgtaagctggggagggagggcagccgggaagggtcagtggtcgggacctgcaaccctttcaccccttctggaagactcgctgggcagggagggagcctcctggacctggactggggcttatcccaagggatgagagccgataggtctacaggctcggcccagggccccttccaccctaggaagaggaaggggtgccggcgtctatctgctggagggtggtcaggcaaggctgtggggctgggtggccagcccctcactcgtggacgtcccagatctccgacagcagaggcggcagcttcttgtcctggagccgcaaggcgaagacctgctccgagtgcacagagctcagcgtgcgcaggctcaccagcttcatgagcatgcgcgggaagcgcagctggtcctgcggcctcttgatgcgcgtgtaggacagcagcgcctccacgtagggctgctgcaacgcctccacgcggcccggctcctgcacgttgggccggtcggccgagaagatgttgatggcgatgagcagggcgtactcagcgtcgtccaggcccagccgccgcatggcccgcgagaactcgaagatggggttgatgaactccacctgcaggcctgcacggtggaagtcgtccttgctgtaggtgaagtccttcaagaaggtgatacactctgtctcgtggttgtagcgcctggctgtctctagcagcatgatctcgatagtggatgccttcaggagggcgatctggtcctcccggcccagctgcaggaaaccaggcacttgcttagcgaagtccacgatctcctggactgagatgatggccagctccgtgaagtgggcaaagcgttgctggcgggcatctcgggactgggggtctgcgcccagggggcagggcgtgactttgggctggtcggagaaggagcgtttgttgcactgcagttgggccgccaccaactgctggatcattagttcttgagccgctgttagctggacaccctcgccttccccggagccctggctgcctgcctcagatccaccaggggaagccccaggcccagaggctgagctgctgctgccctgcggcccccacaggtgactgcgactgtgactgtgactcctgctgctgttgtttccgaatcttcttcttccggatctgttcttcagaaaggacgcactgctccctcatccctgcctccttgcacttgcgcagccggcactgctggcacttgcgccgcatgaaagcgtccatctggcaggttccgccaccccggcaggcatagcgcctggccccaccacggaccacactgcgccggaagaagcccttgcagccttcgcagctgagcacgttgtagtggaagccggaggccttgtccccacagacacggcaaagctcgtggcccagcatcttcggggctgggcccttctttcgcttgcgctctggttcctcttcgggatctgggatgacccagtctgtgctgcaggctgagctggcctcatcagtgcctgggacatcagggtccggacccccgggccacggctccggaccctcctcctttacagtgggtgaagaagaaggggcgccaggctgaggggggccatttccaggcaggggggtatccagggaactcgtggtaggagaggacatggtggggtcacggagcagcctctctccaggtcccgcccctctccaagcaacagcggggggcggggctcatggctgcgcgcgggggtctcgtggacggcctctcgcggagtgaactactcctgttgccctgggttcccttgctctgcttttcttcgtcctcctctttagcccctgacacaccgccgctactcaaataccctcaaaagtaacttcgccacttcttccggcaatccggagaattccggacc

SEQ ID NO: 431851 - DNA, 1064 bp, Homo Sapiens
ggtaccggtccggaattctcgggatgttgccggaagaagtggcgaagttacttttgagggtatttgagtagcggcggtgtgtcaggggctaaagaggaggacgaagaaaagcagagcaagggaacccagggcaacaggagtagttcactccgcgagaggccgtccacgagacccccgcgcgcagccatgagccccgccccccgctgttgcttggagaggggcgggacctggagagaggctgctccgtgaccccaccatgtcctctcctaccacgagttccctggatacccccctgcctggaaatggcccccctcagcctggcgccccttcttcttcacccactgtaaaggaggagggtccggagccgtggcccgggggtccggaccctgatgtcccaggcactgatgaggccagctcagcctgcagcacagactgggtcatcccagatcccgaagaggaaccagagcgcaagcgaaagaagggcccagccccgaagatgctgggccacgagctttgccgtgtctgtggggacaaggcctccggcttccactacaacgtgctcagctgcgaaggctgcaagggcttcttccggcgcagtgtggtccgtggtggggccaggcgctatgcctgccggggtggcggaacctgccagatggacgctttcatgcggcgcaagtgccagcagtgccggctgcgcaagtgcaaggaggcagggatgagggagcagtgcgtcctttctgaagaacagatcccggaagaagaagattcggaaacaacagcagcaggagtcacagtccaccggtcgcaggtccccctggtgggggccgcaggggcagcaagccagctcagcctcttggggcctgggagcttcccctgggtgggaatctgagggcaggcacggccaaggcctccggggaaaaggcgaagggtgtccaacgctacacacgcgggtccaagaactaatgaatccagcagttgggtgcacgcccaactggatgtgcaacaaacggcttcattctaccgacaagccgagagtcacggcctgaccctgggtcgcaaacccc

SEQ ID NO: 431852 - DNA, 1118 bp, Homo Sapiens
  misc_feature (429)..(475): n is a, c, g, or t
gccccgtttgatccccacacagccgggagggtggaggggctcttcccatgttacggacggggaagcgaagcctcttggaaagggcggggctcgcagttgcatcacagagacagaaggagctacaaagatgatgcagtcctttgaatcccagtcacccaggagagcttttcacaaacacagaccctttccttggaccccaggatttggatttgggatctggggaagggacctcacatctcttcccatcagctccccacacagccagctcataggccagtgatgaagccctcatcactcaggtgtggggaggaggacttgagctgcagatgtgacgctcctgacacgtcgcaggcacacggcaggtgtcggcctcctcgccagccctgggcaagatgggtcatcaggatgggaccgtgtggcacagcctgnnnnnnnnnnnnnnnnnnnnnnnnnnnnnnnnnnnnnnnnnnnnnnntcggcctccgtgatcttagacaggcagccccagctccttgagacaccatttctctacaacgggatcacgctgcctgcctcgtgggatttccgtgggcactcagggtgcactggagctgggagcaaaggaggctctgtgagaggagggccagttcagccgcagcaggaggactgacaggggcctgatggaggagtttgtggggctgcgtgaggggcttctcaggggaccctgtgactctgcaggagctgtggggcccctgtcccctcatccgccgaggcatccgaggtggcctggagtggctgaagcagaagctcttccgcctgggcgaggactggtacttcctgatgaccctcggggtgctcatggccctggtcagctgtgccatggacttggctgttgagagtgtggtccgagcgcaccagtggctgtacagggagattggggacagccacctgctccggtatctctcctggactgtgtaccctgtggccctcgtctctttctcttcgggcttctctcagagcatcacaccctcctctggaggttctggaatcccggaggtgaagaccatgttggcgggtgtggtcttggaggactacctggatatcaagaactttggggccaaagtggtgggcctctcctg

SEQ ID NO: 431853 - DNA, 1001 bp, Homo Sapiens
  misc_feature (371)..(371): n is a, c, g, or t
  misc_feature (851)..(908): n is a, c, g, or t
  misc_feature (963)..(963): n is a, c, g, or t
cagactggttgtgaaaaccttgtttttttgtttcctccattgccccatcatcttcagcccttcctaagaagaggcgaatggcctattggtttgtgcttgccccaactcgggaacttggcccaacaggtccagcaagtacggctgaatattgtagagcatggcgcttaaagtcctcttgtatctccggtgggtgtccttaagggacacagataacgtgttttggagagaggttgtggaaatctgtattgcaccgcctgaaagactgattgactttttagagtgtgaaaaagcaatgctgagaagaccaacgtaacttgtcccttgatgaagcagatagaatgcttgatatgggctttgaacgcaaaataagnaagattgtggatcaaataagacgtgataggcaaactctaatgtggagtgcgacttggccaaaagaagtaagacagcttgctgaagatttcctgaaagactatattcatataaacattggtgcacttgaactgagtgcaaaccacaacattcttcagattgtggatgtgtgtcatgacgtagaaaaggatgaaaaagttattcgtctaatggaagagatcatgagtgagaaggagaataaaaccattgtttttgtggaaaccaaaagaagatgtgatgagcttaccagaaaaatgaggagagatgggtggcctgccatgggtatccatggtgacaagagtcaacaagagcgtgactgggttctaaatgaattcaaacatggaaaagctcctattctgattgctacagatgtggcctccagagggctaggttagtacaaactcgcattcatggcttggtttcccagaagatctccatttaannnnnnnnnnnnnnnnnnnnnnnnnnnnnnnnnnnnnnnnnnnnnnnnnnnnnnnnnncacataaaggtgctgtctttgtggcaaggcctaggcatgacaatcggaggactcnagggggatggaggactagtgatcggctggctgcttcca

SEQ ID NO: 431854 - DNA, 327 bp, Homo Sapiens
cccactgctcgtgaaccaagtttgccctttcctaagctgttttaatcaatctgcttcaatggaggagctcacacatacccatctctcctcatttttctggtaagctcatcacatcttcttttggtttccacaaaaacaatggttttattctccttctcactcatgatctcttccattagacgaataagtttttcatccttttctacgtcatgacacacatccacaatctgaagaatgttgtggtttgcactcagttcaagtgcaccaatgtttatatgaatatagtctttcaggaaatcttcagcaagctgtcttacttcttttggc

SEQ ID NO: 431855 - DNA, 1786 bp, Homo Sapiens
  misc_feature (601)..(601): n is a, c, g, or t
  misc_feature (606)..(607): n is a, c, g, or t
  misc_feature (617)..(617): n is a, c, g, or t
  misc_feature (622)..(661): n is a, c, g, or t
  misc_feature (665)..(674): n is a, c, g, or t
  misc_feature (792)..(792): n is a, c, g, or t
  misc_feature (1746)..(1746): n is a, c, g, or t
  misc_feature (1750)..(1750): n is a, c, g, or t
  misc_feature (1755)..(1755): n is a, c, g, or t
  misc_feature (1766)..(1766): n is a, c, g, or t
  misc_feature (1770)..(1771): n is a, c, g, or t
  misc_feature (1778)..(1778): n is a, c, g, or t
ggtcgtgtgtttgtaatacagcggggtgcgcacacatcatgatgacgccgaggctttttatttgtacacacccccgttggtgtttatcggctcgggcgcgcgaataggtgatgtatatctcccaaaggcggacgacaacgggggcgtagaggtcgcgcgggcgggcgcatagttacagggttcacgacgagagggcgtattagggaaggggcgttgtccaagtgttgggcatagaaactggttataggggaatgtttaagcccgtgttctctcgatagagggtggacagggacgggggcgctaattttgtatattggagacctcccgttggcgctccccccttgggtaaaattcccgatatgaaagcctcgagaaactcccctcctgggaattggtttacaagaccctgcaggtttgcgccccgcggggcgttttttttgtggggggggaaattcaaggggcgtggttctttgcccaggggttttcttgggagaacaagctggtagggcagggggtccgttacctttttgggcccggcgcccccaagaggaaagagttttgaaaaaattttctgggggggagagggcgggggaaaaagggnttttnntttttgggtnttggnnnnnnnnnnnnnnnnnnnnnnnnnnnnnnnnnnnnnnnncttnnnnnnnnnntttttcagtcttcaaatattttttattggaaggccatgcattgccttcatttattgtatttcaaatcactgtacatttacttttgtgaaaacactgcctgcattttctagtacaaaanaaacctaaaaattgtttcaggaatgtagagaaatatccaacttaaatagcgaaaaagtgcaccataattactgctgcactgcagtcatttctgcaattcccatgtttcttaaataactatcttgtcagataacacacaatataaagagcaattatgaaaaacagacatttacatatacttctaaagtcttattgggaatatcctgttggcattggataaccaatcataggtgcagctgcagtagcaggatatgcatatgcctgttggttcataccattgtgcatatttggaacattacttccgtattgctgagtgctatcataaccattctggtaagtccctgttggattaccagtcctaaaactggtctgtataccagcagacacaaaattacttccaaagctcccattggtgtaatttgcagcactgtaaacaccattctgagtttttgccccaaaatctcttttaagcaggctagagtaacctctgtcataattttccctgtctctaaaggtattaaatccaccccttttgcccgcagagtatctgtcccgacggtcatccttcatgcctcctctacccctggaacgacctgaacctctgtcttcgaccaactgaagcaacttgggattaattgcttgattagcttcacgaagcacagagataaggtcgctcacttgctttatgttattaggtgtaaagaaagtgtatgctgtgcctgttttggtactgcgagcagttcttccaattcgatgaatataatcctctgaggagttagggtagtcataattgatgacaaatttcacatcttccacatctagccctctggaggccacatctgtagcaatcagaataggagctttccatgtttgaatcatttagaaaccagtcacgctcttgttgactctagtcacatggataccatggcaggcaccatctctctcattttctggnaagncatanatctcttttgnttcnnaaaaaanggtttatt

SEQ ID NO: 431856 - DNA, 1987 bp, Homo Sapiens
  misc_feature (893)..(906): n is a, c, g, or t
  misc_feature (1469)..(1469): n is a, c, g, or t
  misc_feature (1527)..(1527): n is a, c, g, or t
  misc_feature (1529)..(1531): n is a, c, g, or t
  misc_feature (1535)..(1535): n is a, c, g, or t
  misc_feature (1541)..(1541): n is a, c, g, or t
  misc_feature (1553)..(1554): n is a, c, g, or t
  misc_feature (1561)..(1561): n is a, c, g, or t
  misc_feature (1568)..(1568): n is a, c, g, or t
  misc_feature (1582)..(1582): n is a, c, g, or t
  misc_feature (1600)..(1600): n is a, c, g, or t
  misc_feature (1624)..(1624): n is a, c, g, or t
  misc_feature (1631)..(1631): n is a, c, g, or t
  misc_feature (1634)..(1634): n is a, c, g, or t
  misc_feature (1655)..(1655): n is a, c, g, or t
  misc_feature (1661)..(1661): n is a, c, g, or t
  misc_feature (1664)..(1664): n is a, c, g, or t
  misc_feature (1672)..(1672): n is a, c, g, or t
  misc_feature (1676)..(1676): n is a, c, g, or t
  misc_feature (1685)..(1685): n is a, c, g, or t
  misc_feature (1732)..(1732): n is a, c, g, or t
  misc_feature (1734)..(1734): n is a, c, g, or t
  misc_feature (1737)..(1737): n is a, c, g, or t
  misc_feature (1758)..(1758): n is a, c, g, or t
  misc_feature (1813)..(1813): n is a, c, g, or t
  misc_feature (1815)..(1815): n is a, c, g, or t
  misc_feature (1817)..(1817): n is a, c, g, or t
  misc_feature (1835)..(1835): n is a, c, g, or t
  misc_feature (1837)..(1837): n is a, c, g, or t
  misc_feature (1858)..(1858): n is a, c, g, or t
  misc_feature (1881)..(1896): n is a, c, g, or t
  misc_feature (1980)..(1980): n is a, c, g, or t
cgagatgggaggaggactagtgatcggctggctgcttccagtcgattagagaggtgaaaaagctgaacgtgtgccagtaatcttcaaaaggcagaacatatcacctctgccccgtaaactgttctctccgagggaaaaaatggaagttatcctcacagttcactgccgtggtatttcttctgtcccatgctttgcatgactgccatggtacagccttgtttcaaactgttcactgtgatctgtgggtctttgagtttcagtgagtttgctgaaatgtcgaagaagtagttccaaacttcaatgttcaatgaaatttttgttcaagtttgaaatggagagagcagctttaaaaggtactaagccttttacaaattggtgagtactggcacatgagatctagagcaggagcaacttctcacacatagtaagtgggaaaagaaagtgctttgaaagttcctccctcacctacacagtagtcgtcatgtcgagacctgccagagagagacacattctcaagtgaatcctggcttcttggaagcgcttgcctagacgagacacagtgcataaaaacaacttttgggggacaggtatgttttcttgcagctgcggttgtaaggtcttggcaagacaagcagtgtggccagaattttgaacttctgatgaatgtgtaatgcaaaggaccttgtacatttttttgtttcaaggtcctcaaaatgagcacatgaagaggttgctgtgaaactttaagtggccctactgcgcagaagcattcagatgtcacttgatgatctgtaagggaacttgctgatttgggaatgtgcttagggaacacacattccttttgacagggtctgtcactgggtgggtgatgaattatacagatgacatgtgcnnnnnnnnnnnnnnccaacctcaatggtattcctacaggaaatggataaccattttaactgtattttttgcagcccgtaccttcttgggaatacaattgtctaactttttatttttggtctggctgttgtggtgtgcaaaactccgtacattgctattttgccacactgcaacaccttacagatgtggaagatgtgaaatttgtcatcaattatgactaccctaactcctcagaggattatattcatcgaattggaagaactgctcgcagtaccaaaacaggcacagcatacactttctttacacctaataacataaagcaagtgagcgaccttatctctgtgcttcgtgaagctaatcaagcaattaatcccaagttgcttcagttggtcgaagacagaggttcaggtcgttccaggggtagaggaggcatgaaggatgaccgtcgggacagatactctgcgggcaaaaggggtggatttaatacctttagagacagggaaaattatgacagaggttactctagcctgcttaaaagagattttggggcaaaaactcagaatggtgtttacagtgcngcaaattacaccaatgggagctttggaagtaattttgtgtccgctggtatacagaccngnnntagnactggnaaccccacaggnncttaccngaatggntatgatagcactcngcaatacggaagtaatgncccaaatatgcacaatggtatganccaacangcntatgcataccctgccaccgcngccgcnccnatgattgnctanccaatgccnacaggatattcccaataagactttagaagtatatgtaaatgtctgtntntcntaattgctctttatattgtgngttatctgacaagatagttatttaagaaacatgggaattgcagaaatgactgcantncngcagtaattatggtgcantntttcgctatttaagttggatntttctctacattcctgaaacaannnnnnnnnnnnnnnngtactgagaaaatgcaggcagtgttttcacaaaagtaaatgtacagtgatttgaaatacaataaatgaaggcaatgcatggccntcgcaat

SEQ ID NO: 431857 - DNA, 1996 bp, Homo Sapiens
  misc_feature (139)..(139): n is a, c, g, or t
  misc_feature (192)..(192): n is a, c, g, or t
gagtagcaagggatatggcatatggcctggtggttttcatacccattgtgccatattggagaccattactttccggtatggctggagtggctatcatacaccattcctggtaaagtcccctgttggattacccagtccntaaaaactggttctgtataccagccagacacaaaatttacttcccaaagctcnccattggtgtaatttgcagcactgtaaacaccattctgagtttttgcccccaaaatctcttttaagcaggctagagtaacctctgtcataattttccctgtctctaaaggtattaaatccaccccttttgcccgcagagtatctgtcccgacggtcatccttcatgcctcctctacccctggaacgacctgaacctctgtcttcgaccaactgaagcaacttgggattaattgcttgattagcttcacgaagcacagagataaggtcgctcacttgctttatgttattaggtgtaaagaaagtgtatgctgtgcctgttttggtactgcgagcagttcttccaattcgatgaatataatcctctgaggagttagggtagtcataattgatgacaaatttcacatcttccacatctagccctctggaggccacatctgtagcaatcagaataggagcttttccatgtttgaattcatttagaacccagtcacgctcttgttgactcttgtcaccatggatacccatggcaggccacccatctctcctcatttttctggtaagctcatcacatcttcttttggtttccacaaaaacaatggttttattctccttctcactcatgatctcttccattagacgaataagtttttcatccttttctacgtcatgacacacatccacaatctgaagaatgttgtggtttgcactcagttcaagtgcaccaatgtttatatgaatatagtctttcaggaaatcttcagcaagctgtcttacttcttttggccaagtcgcactccacattagagtttgcctatcaggtcttatttgatccacaatcttccttatttggggttcaaagcccatatcaagcattctatctgcttcatcaaggacaaggtaggttgttcttctcagattggtttttccacactctaaaaagtcaatcagtcttccaggtgttgcaatacagatttccacacctctctccaaatcacgtatttgtggtcccttaggagcaccaccgtagatacaagtagacttcaagcgacatgctctacaatattcagcagctacttgctgcacctgttgggccagttcccgagttggtgccagcaccaaacaaataggcccatcgcctctctctaggaatggctgatgattgatgtggacaatggcaggaagcaaataagacaatgttttcccagatccagtctgtgccactccaaccatatccaatccacttagagcaactggccatccctgagcttgaatagcagtgggttcagtgaaattctgtcttgcaataacatccatgacatttgcagggaaattggcttcataaaaatttagaactggcttcgggcagttgtgacctctaactgtaatttccttgcttcttctgtatgtttccacctcttgtgctgtgcgcctagccaaatcagggtgctcttgataaaaattcttctcaaatttaggcagctcatcaagattccacttctttttaactaatttctccccagggtttccaaacttctttccagataagggccctgccctacttcctccaaatcgaggtgcaccaaaccctcggtcccggccgcggtctcggtcactcgaataacccgacatggcgtcaatggttgcggttggcggggaacgaagtatatagaaaagcgtgcgacaagtcgctggaaatggcctcgatgacggcgaagccttgcgggggcggcagcggaggaaggacaccgatgacaccagccgaagctgcactactagagaccggtagaaatgaatgaggtcgggg

SEQ ID NO: 431858 - DNA, 691 bp, Homo Sapiens
ccctcttttttagggaaagggctggatgatttgaatgtggaccaatggccagggaggccaattagggcccatgtttttccccagatccccgttctgtgcccactcccaacccatattcccatcccacttagagcaaactggcccatccttgagctgaaatagccagtgggttcagtgaaattctgtcttgcaataacatccatgacatttgcagggaaattggcttcataaaaatttagaactggcttcgggcagttgtgacctctaactgtaatttccttgcttcttctgtatgtttccacctcttgtgctgtgcgcctagccaaatcagggtgctcttgataaaaattcttctcaaatttaggcagctcatcaagattccacttctttttaactaatttctccccagggtttccaaacttctttccagataagggccctgccctacttcctccaaatcgaggtgcaccaaaccctcggtcccggccgcggtctcggtcactcgaataacccgacatggcgtcaatggttgcggttggcggggaacgaagtatatagaaaagcgtgcgacaagtcgctggaaatggcctcgatgacggcgaagccttgcgggggcggcagcggaggaaggacaccgatgacaccagccgaagctgcactactagagaccggtagaaatgaatgaggtccc

SEQ ID NO: 431859 - DNA, 778 bp, Homo Sapiens
  misc_feature (113)..(129): n is a, c, g, or t
ccagtcttcaaaatattttttatttgaaaggccatgcattgcccttcattaattgtatttcaaatcactgtacatttacttttgtgaaaacactgcctgcattttctagtccnnnnnnnnnnnnnnnnntgttttcaggaatgtagagaaatatccaccttaaatagcgaaaaagtgcaccataattactgctgcactgcagtcatttctgcaattcccatgtttcttaaatagctatcttgtcagataacgcacaatataaaggagcaattatgaaaaacagacatttacatatacttctaaagtcttattgggaatatcctgttggcattggatagccaatcataggtgcagctgcagtagcaggatatgcatatgcctgttggttcataccattgtgcatatttggaacattacttccgtattgctgagtgctatcataaccattctggtaagtccctgttggattaccagtcctaaaactggtctgtataccagcagacacaaaattacttccaaagctcccattggtgtaatttgcagcactgtaaacaccattctgagtttttgccccaaaatctcttttaagcaggctagagtaacctctgtcataattttccctgtctctaaaggtattaaatccaccccttttgcccgcagagtatctgtcccgacggtcatccttcatgcctcctctacccctggaacgacctgaacctctgtcttcgaccaactgaaacaacttgggattaattgcttgattagcttcacgaagccc

SEQ ID NO: 431860 - DNA, 920 bp, Homo Sapiens
caacctcaatggtattcctacaggaaatggataaccattttaactgtattttttgcagcccgtaccttcttgggaatacaattgtctaactttttatttttggtctggctgttgtggtgtgcaaaactccgtacattgctattttgccacactgcaacaccttacagatgtggaagatgtgaaatttgtcatcaattatgactaccctaactcctcagaggattatattcatcgaattggaagaactgctcgcagtaccaaaacaggcacagcatacactttctttacacctaataacataaagcaagtgagcgaccttatctctgtgcttcgtgaagctaatcaagcaattaatcccaagttgcttcagttggtcgaagacagaggttcaggtaaggatgactgataggaaatgttggtagttacgagtcacatcgttgtctacaaatccatttaaatggtattggagggtgagtaaaaccttgaatgtgaaaacttaagctgaaaaattgtaaaaacatttcacgcctaccatgaatagatctgtttctttctgtccacaatgatttgtgtcatagacataattgatcaatttgcaattgttttccttgacaggtccgttccaggggtagaggaggcatgaaggatgaccgtcgggacagatactctgcgggcaaaaggggtggatttaatacctttagagacagggaaaattatgacagaggttactctagcctgcttaaaagagattttggggcaaaaactcagaatggtgtttacagtgctgcaaatttaccccaatgggagctttgggaagtaatttttgtgtctgctgggtatacaagaccagttttagggactggttaatcccaacaaggggaactttcccaggattgggttaatgattaggcaccttcacc

SEQ ID NO: 431861 - DNA, 704 bp, Homo Sapiens
  misc_feature (572)..(572): n is a, c, g, or t
gggacacaaaatcaacgggagaagtttgaaaaaagagaactgctgggattaaatgttcagtgatttacttgttgtattagtccattttcatgctgctgatgaagacatacccaagactgggcaatttacaaaagaaagaggtttattggacttacagttccacatggctggggaggcctcacaatcatggtggaagacaaggaggagcaagtcacatcttacgtggatggcagcaggcaaaaagagagcttgtgcagggaaacccccatttttaaaaccatcagatctcatgagactcattcactatcatgagaacagcacaggaaagacccacccccataattcaatcacctcccaccgggttcctcccacagacatgtgggaatcatgtggagttacacttcaagatgagatttgggtggggacacagccaaaccatatcaggcccactttgcaaaatatcaaaacagaggggaaaagtataagtaactgaagagaagggtgcggtgtgctgaatacaaagatgctgactggggggagtgaatgtacctgcatcccaatttgcctgggangtctggttttacccattgtctgacattctgtctaatttagcatttgtcctgaatatttcatttagtgatgtattattgttattagttgcattaaaacaagccaagatggattaggtagacctccacgttgta

SEQ ID NO: 431862 - DNA, 810 bp, Homo Sapiens
tggctccattttcgttgtgtatgattgacaggtgttatcacctgcgtcctcagtcatcacgatgagtcgatgtcctgtgttgacttgtgcgccctgtaccgtgagtccgtggagagcctggcgattctttgccagctcaagaggtgctgtccagttgtagaggtcaatggtaggacaataaattttggaatttttgttctgatccagatactgttgcaatacatcgaataatctggaacattgcgatctgattgttttttatatatggtgacattcgcatatccagtcctattgaatgtgggacttctgacgatacaggtatcaataccagaatcagcaactgcagctggtagaaacttcagaagttggcctgaggcaaacacacgatttctttccgtgagtgggaatacttttgtttgttctgtgagtaataccaatccacggtgtaactaggttttccttgtctaggacatcttacaattaaagcctcattttccaggccccatgattgtttactaaactttgctgctgtggaatacatgagaattgtgagaattgctaagatcccaaaccccattctgtttatcaatcaagagcaagtattggtaactcgttgttgagattactccagatgagtcactggcatacgacagtgaaggtcaccacacatgaggcagttggtgatactcttcaagactgagttgggaagagtagcctatatctcaaccacactgaaagacagaggggatgaacttggagtcagtgacggagctaagaatagtttccagtctttgtaggtccctcctcccc

SEQ ID NO: 431863 - DNA, 442 bp, Homo Sapiens
cctaaaaagacttcccgtgacagctcctgcaattacaaaatggcttaaaggcatctttatttcggtaatacattccagactagtgttcactgtgtctttgcccaaacagctccccggaggcggtccccatccagattccgggtaatagggctctgggacgtagggaagccgcttctgacgctcctcaaggacttccgaatcggcagtcacagcttcggcagcaaagactcggggaaataggcacaatgctctacagagaaagctcccgcgtgccggtggcggcacctccatggccttctctcgactacggacaaacttgagcgctcaggacttcaaagcctcgcggacgtgccgcgggagagcgtaactgtacgaggtgagaatccgtgcatttgacccaggttaaccctctgccagagggctcgacacccacaccttacag

SEQ ID NO: 431864 - DNA, 1415 bp, Homo Sapiens
ttttttttaactgtaaaattcaactttaatcttttgcgaaatgttttatttactgcttaaaatctaggtgggtggatatattcatgtatgcatatattgatagattaatacaaacataagtatgtatttaaatttaaggataagtaaagtgagagtacaacagccccattcttagttaaaaagaaaagaaaaagacaagagcaagccactgccaccacaggtaccagcacttaaatttgtcaagcaggctgaccaaaagagtggcctgtctgttggcattcatcggacatggcagctcccttcagctctccagtgagtttcaagttcagagcactttcagtccttgtcttgtttatctattactgaagggtttctaggaaggtttagcagtgcttcaattttcttagcatcattctcaggttcatcttcctgtaaactactttcaattttctcagggaggtgctcagtaacttgtagtctgcctttccactcttccagttttagctcatggagtgcctttcgatccttctgttttctttcctgaacagtctcaccagagtacttctgaaatgccatcagcaggcctcctacaggagtgcccagcaaggctccaattatgccaccagccaccaggccacgcaggcctacgtttatcctaaaaagacttcccgtgacagctcctgcaattacaaaatggcttaaggcatctttatttcggtatacattcagactagtgttcactgtgttgaatatagtcacaaacactgcagttctccaaccccagcgccagccataacgaatgaagcctcgtgtggcagcacgatgtgcagattgcacagcatcaaaccggttatgataaatttctgcctggctctgctcaatgtattgttgtttagcatgaataaaagctggtattcccccatacacccagccaatgatgcctgctgtagctgccgtcttacagatattagcaaggtcctttgaaattctctgctgttcatctttgccaaacagctcccggaggcggtcccatccagattccgggtaatagggctctgggacgtagggaagccgcttctgacgctcctcaaggacttccgaatcggcagtcacagcttcggcagcaaagactcggggaaataggcacaatgctctacagagaaagctccgcggtgccggtggcggcacctccatggccttctctcgacctacggacaaacttgagcgctcaggacttcaagtcctcgcggacgtgccgcgggagagcgtaactgtacgaggtgagaatccgtgcatttgacccaggttaaccctctgccagagggctcgacacccacaccttcagtccccggcctcgctttggagtccttggaaatacgacacaggaagtcccgggaatccggaccggtccagcc

SEQ ID NO: 431865 - DNA, 554 bp, Homo Sapiens
  misc_feature (14)..(14): n is a, c, g, or t
  misc_feature (32)..(32): n is a, c, g, or t
  misc_feature (47)..(47): n is a, c, g, or t
  misc_feature (55)..(55): n is a, c, g, or t
  misc_feature (413)..(413): n is a, c, g, or t
  misc_feature (483)..(483): n is a, c, g, or t
  misc_feature (485)..(485): n is a, c, g, or t
  misc_feature (488)..(488): n is a, c, g, or t
cccagccaataacnaatgaaacctcttgtggncaagacgattgcaanattcacanccataaaacggttaatgataaattctgccctggctctgctcaatgtattgttgttttaacatgaaataaaaagctggttattcccccccaataacaccccaagccaaatgaatgccctgctgtaagctgcccgtctttacaggataattagccaaggtccctttgaaattctctgctgttcatctttgcccaaacaagctcccggaggcggtccccatccagattccgggtaatagggctctgggacgtagggaagcccgcttctgacgctcctcaaggacttccgaatcggcagtcacagcttcggcagcaaagactcggggaaataggcacaatgctctacagagaaaagctcccngcgtccggtggcggcacctccatggccttctctcgactacggacaaacttgagcgctcaggaccttccananccntcggacgtgccgcgggagagcgtaactgtacgaggtgagaatccgtgcatttgaccccaggttaac

SEQ ID NO: 431866 - DNA, 896 bp, Homo Sapiens
ttactctccagcaactttaagacctcttgagatttttcacgataaaatgattctcctgaatattcatcaaaatatactcccagacgcttgtaaacccgaatgtactcttcaatgctcaagtcccgaaattttttgccccagtgaaagtgcttgcacatcggccagtttccaatcgttggaaggaactcctgtgctgcttttgctacacttttatcatctgctgcttctttattaacttgtacataactttcaaagagatgctgtagaggattggactgcagtttttcctcatagccaaacagctggaagccagttcccagaagaccaaactgcatgccccaatcgccaaggtaatttattcttattacttgatgtcctaaagcttctttgagatttgctataaaatttcctatgatggtagaacgcaaatgtccaacatgaaattttttggcaacattaggtgaactgaattcaaccacaatcttcttctggggaagtccagagaaaagttcactttttaatccatattttgagccatcttcaattacttgttgtagcactgtctttgttaagagctctctgtttattttgaaatttacagtcctttgaccagtactgatttcactcaccactgtatcacatcttagcttctctgctagtctcttggcttgaacttgaatatctggtcttgaatggtcattgtctttttccaataaagaatccacagaaagctgaaaatcagctacttcttctttttgggaaattggaactgcagatattgatgtgatcaagttttctggtggaagattcaacactctggaaagctggcaagcaatagcgcggcgaaagccgcacgccatgtccacctctacggaagtgcgccgcagtccgccccc

SEQ ID NO: 431867 - DNA, 801 bp, Homo Sapiens
gctattttgttatttaagcattaaaacattaaattgaactatcaaatacttcctcaaaggaacgtttagcattttatgtgaaactaaacacttacctatgatggtagaacgcaaatgtccaacatgaaattttttggcaacattaggtgaactgaattcaaccacaatcttcttctggggaagtccagagaaaagttcactttttaatccatattttgagccatcttcaattacttgttgtagcactgtctttgttaagagctctctgtttattttgaaatttacagtcctttgaccagtactgatttcactcaccactgtatcacatcttagcttctctgctagtctcttggcttgaacttgaatatctggtcttgaatggtcattgtctttttccaataaagaatccacagaaagctgaaaatcagctacttcttctttttgggaaattggaactgcagatattgatgtgatcaagttttctggtggaagattcaacactctggaaagctttcaaagtttacttttcaccgagacaaactgatcccagccgacgctccacaggacttctgaagctccaccagctccagagaagggggaggaggtggtagaaactaacaggattccgtgggacccaccctccagctgactgaggactggcccgcagcggtgaaaggcctttggggtccctagctcctcagggactcctctgcgcgctccgggatccatacctggcaagcaatagcgcggcgaaagccgcacgccatgtccacctctacggaagtgcgccgcagatcccta

SEQ ID NO: 431868 - DNA, 1146 bp, Homo Sapiens
  misc_feature (34)..(34): n is a, c, g, or t
  misc_feature (102)..(102): n is a, c, g, or t
  misc_feature (144)..(144): n is a, c, g, or t
ggctctccggcgcgcgtcatcgttcggtcagtcnttgcagggtgatctctatcacttccttgttaagtcttcccgtctcacgtgtcgcggatcctagtccgnatgatctttcaaattgttggtgcgctactttgaggagaggantagagtagtgttctgtcatttcaggtgttcatgttcgtgcgtatggacgtctcggtcagtaggacggagtcttgccggctgtttacccattcggccgttctctttagctgcaccggcaccataaatcttcaaaagtaaatgccgtagagggactgggactgccagtttttcgttcatagcccaaaccagctgggaaggccagttccccagaaagacccaaattgcattgccccattcgccaagggtaatttattcttattacttgatgtcctaaagcttctttgagatttgctataaaatttcctatgatggtagaacgcaaatgtccaacatgaaattttttggcaacattaggtgaactgaattcaaccacaatcttcttctggggaagtccagagaaaagttcactttttaatccatattttgagccatcttcaattacttgttgtagcactgtctttgttaagagctctctgtttattttgaaatttacagtcctttgaccagtactgatttcactcaccactgtatcacatcttagcttctctgctagtctcttggcttgaacttgaatatctggtcttgaatggtcattgtctttttccaataaagaatccacagaaagctgaaaatcagctacttcttctttttgggaaattggaactgcagatattgatgtgatcaagttttctggtggaagattcaacactctggaaagctttcaaagtttacttttcaccgagacaaactgatcccagccgacgctccacaggacttctgaagctccaccagctccagagaagggggaggaggtggtagaaactaacaggattccgtgggacccaccctccagctgactgaggactggcccgcagcggtgaaaggcctttggggtccctagctcctcagggactcctctgcgcgctccgggatccatacctggcaagcaatagcgcggcgaaagccgcacgtcgtgccgaattcgccacccaggcctcgctc

SEQ ID NO: 431869 - DNA, 3152 bp, Homo Sapiens
  misc_feature (54)..(91): n is a, c, g, or t
  misc_feature (2826)..(2897): n is a, c, g, or t
  misc_feature (3001)..(3001): n is a, c, g, or t
  misc_feature (3005)..(3005): n is a, c, g, or t
cgcacatagtgaatgaagactactatgggcgactgggctcacgcggtggcggcnnnnnnnnnnnnnnnnnnnnnnnnnnnnnnnnnnnnnnatcaggccaaatcggccgagctcgaattcgtcgagagcggctttaagtcacgtgacatgaggagaggtgggcgggtacctggaggaagctcgcggcgtcggtggcggtggcgcgcggcggcgctgagaccggggctttgagtcgcaccctgtggcctgccccccgcctgcaccctcgcagatccgtgctttttcccctttgcttctctcccgtactgggtcagtcctgtccgcgctcgcgcgtcggtttgcgggtgtgcgcaggcgcggcaggggccattagccctttgggtgggcggtggagcccgggagcgcgcgggcgagaccatggcgggtagcagcactgggggcggtggggttggggagacgaaggtgatttaccacctggatgaggaagagactccctacctggtgaagatccctgtccccgccgagcgcatcaccctcggcgatttcaagagcgtcctgcagcggcccgcgggcgccaagtactttttcaagtctatggatcaggatttcggggtggtgaaggaagaaatttcagatgacaacgcccgcctcccctgcttcaacggaagggtggtatcctggctggtgtcctcagataatccccaacccgagatggcccctccagtccatgagcctcgggcagaactggcgcctccagccccacctttacctcctttgccacccgagaggaccagcggcattggggactcaaggcctccatccttccaccctaatgtgtccagcagccatgagaatctggagcctgagacagaaaccgagtcagtagtgtcactgaggcgggagcggcctcgcaggagagacagcagtgagcatggcgctgggggccacaggactggtggcccctcaaggctggagcgccacctggccggatacgagagctcctctaccctcatgaccagcgagctggagagtaccagtctgggggactcggacgaggaggacaccatgagcaggttcagcagctccacggagcagagcagtgcctcccgcctccttaagcgccaccggcggcgaaggaagcagaggccaccccgcctggagaggacgtcatccttcagcagcgtcacagattccacaatgtctctcaatatcatcacagtcacgctaaacatggagaagtacaacttcctgggtatctccattgttggccaaagcaatgagcggggagacggaggcatctacattggctccatcatgaagggtggggctgtggcggccgacgggcgcattgagccaggggacatgcttttgcaggtgaatgacatgaactttgagaacatgagcaacgatgacgctgtgcgggtgctgagggacattgtgcacaagcctggccccattgtgctgactgtggccaagtgctgggatccctctcctcagggctatttcattctcccccgaaatgagcccatccagccaattgacccctgctgcctgggtgtcccattccgcggctctgactggcaccttcccagcctatccaggttcctcctccatgagcaccattacatctggatcgtctttgcctgatggctgtgaaggccggggtctctccgtccatacggacatggcatcggtgaccaaggccatggcagctccagagtctggactggaagtccgggaccgcatgtggctcaagatcaccatccctaatgcctttctgggctcggatgtggttgactggctctaccatcacgtggagggctttcctgagcggcgggaggcccgcaagtatgccagcgggctgctcaaagcaggcctgatccgacacaccgtcaacaagatcaccttctctgagcagtgctattacgtcttcggagacctcagtggtggctgtgagagctacctagtcaacctgtctctcaatgacaacgatggctccagtggggcttcagaccaggataccctggctcctctgcctggggccaccccctggcccctgctgcccactttctcctaccagtaccctgccccacacccctacagcccgcagcctccaccctaccatgagctttcatcttacacctatggtgggggcagtgccagcagccagcatagtgagggcagccggagcagtgggtcgacacggagtgatgggggggcagggcgcacggggaggcccgaggagcgggcccccgagtccaagtccggcagtggcagtgagtctgagccctccagccgagggggcagccttcggcggggtggggaagcaagtgggactagcgatgggggccctcctccatccagaggctcaactgggggtgcccctaatctccgagcccacccagggctccatccctatggaccgccccctggcatggccctcccctacaaccccatgatggtggtcatgatgcccccacctccacctccagtccctccagcagtgcagcctccgggggcccctccagtcagagacctgggctctgtgcccccagaactgacagccagccgccaaagcttccacatggccatgggcaatcccagcgagttctttgtggatgttatgtagcccactgtggggccaggctgggccgggcgctcctggtgtgtgactgggtgtcctggccgtcatgtgcttgctcttacagtgcctgggctcagcctaccagctgctgccatacaggagattgtggccactgtgactctcaccagcagtgcctggttcctcccccttccctcaggggtagacaagggacctttgattannnnnnnnnnnnnnnnnnnnnnnnnnnnnnnnnnnnnnnnnnnnnnnnnnnnnnnnnnnnnnnnnnnnnnnnaataggcatttcctcttttatatgaagaattcccatccattgggccccttctaaccccagaatgtgacctcctcctcagttacccacagccctgccctttgcangggntggggggtggtcagcgggtaccccggggttaggcatcctagacagcagcctgaagaaactggggagatttgggccatgtagctggcctttggtaccccatttattttaagccacttgtataaaacaccacaataaagcaatagaggc

SEQ ID NO: 431870 - DNA, 397 bp, Homo Sapiens
  misc_feature (292)..(322): n is a, c, g, or t
gcctctattgctttatttggtgttttatacaagtgactaaaataaatagagtaacaaaggcagctacatggcccaaatctcccagcttcctcaggctgctgtctaggatgcctaaccccggggtaccgctgaccacccccaaccctgcaaagggcagggcctgtgggtaactggaggaggaggtcacattctggggttagaaggggcccaatggatgggaattcttcatataaaagaggaaatgcctattaaaaaagtcccaaaaatgtaagaaactctattttaacccccnnnnnnnnnnnnnnnnnnnnnnnnnnnnnnntaatcaaaggtcccttgtctacccctgagggaagggggaggaaccatggcactgctggtgagagtcacagtggcc

SEQ ID NO: 431871 - DNA, 1187 bp, Homo Sapiens
gggaggaagaggaaaatgatggagaaacacctaaatcttcacatgaaaaatcataatctgactaattttgggactgaatgaataagtacaagaggttggattttctatgttggctgattaccatattgaacacatggcatttgtagcattctttaaatctatctactgaaatgtatttgacattcaagcagttatattcggtccttcattttatagaatattggcactattattggtacagtttaaagccattaatatgttttatccatttgataattttacagtaagtaggtctcattcattttgacagttatcaaagatgtactttccacagttaaatttacattaatggcaatttttgatagttttatggctttttactgttagactaatcaaaaataactttaaaaggaacaaagaaactccaacatttcacattatgcatagttatgtagccatttcacagtttctttaagatgtgtaaactcattgtccttgatagtttttatttttcattataaaattataccaggagatttcttttaagattctgagttagcagagttcaaaactattttgtggaaacaagccaactagtaacaatgcagcaacacttctggtttagctaaattatttttccaatgtaggaaatccacactgatttgtacgtctgactgagagaaagatggtcgtctccagcagagaaagtgaacagcatttgttggaaggtgatggctctccctcctccctccccatttcattggcgtaacgtaaagtgtattctgtacataatttacaaataaaacattttattttaattgttacttattatttagatatttctcaacacttaaattcataaaattaagaccatgtaagggtatgtttttagagaaatggaagtttgagtaacccacagaacatctgtgatctttctacagcagcttcagttttgtgccaacattccatgtattttgaatatgagcaaaaactgatcttaagagcagacttaaagtagctttgtacgccttaatgttcattttgatttattttaaatctttacattcagaaatgagatactgtattatcagaccaggaggcattgctgtgaaagataatttcctattctaaaatatcaaatttaaaataaagataatgaaagaaaacataagagaactattggactc

SEQ ID NO: 431872 - DNA, 1239 bp, Homo Sapiens
aaccggaccgtctttggccagcagaaatgagagtaggtgtttattacctcagtgtgggtgcaggctgttttgtagccagtattcttctccttgctgttgctcgatgcattctatttctcatcatttggctcataactggaggaaggcaccacttttggttcttgccaaatctgactgctgatgtgggcttcattgactccttcaggcctctgtacacacatgaatacaaaggaccaaaagcagacttaaagaaagatgagaagtctgaaaccaaaaagcaacagaagtccgacagtgaggaaaagtcagacagtgagaaaaaggaagatgaggaggggaaagtaggaccaggaaatcatggaacagaaggctcggggggagaacggcattcagacacggacagtgacaggagggaagatgatcgatcccagcacagtagtggaaatggaaatgattttgaaatgataacaaaagaggaactggaacagcaaacagatggggattgtgaagaggatgaggaagaggaaaatgatggagaaacacctaaatcttcacatgaaaaatcataatctgactaattttgggactgaatgaataagtacaagaggttggattttctatgttggctgattaccatattgaacacatggcatttgtagcattctttaaatctatctactgaaatgtatttgacattcaagcagttatattcggtccttcattttatagaatattggcactattattggtacagttttaaagccattaatatgtttttatccatttgataattttacagtaagtaggtctcattcattttgacagttatcaaagatgtactttccacagttaaatttacattaatggcaatttttgatagttttatggctttttactgttagactaatcaaaaataactttaaaaggaacaaagaaactccaacatttcacattatgcatagttatgtagccatttcacagtttctttaagatgtgtaaactcattgtccttgatagtttttatttttcattataaaattataccaggagatttcttttaagattctgagttagcagagttcaaaactattttgtggaaacaagcccactagtaacaatgcagcaacacttctggtttaacctaaaattatttttccaatgtaggaaattcccccctgatttgtaccttctgactgagaagaaagaagggtcgtccccacccgaagaaagttgaacagg

SEQ ID NO: 431873 - DNA, 1222 bp, Homo Sapiens
  misc_feature (97)..(160): n is a, c, g, or t
agcggctctccctgcacctttctttatcttggagcctctcccatctctccctccctcttcctccctaccccaccctccgaccaccccacttcttccnnnnnnnnnnnnnnnnnnnnnnnnnnnnnnnnnnnnnnnnnnnnnnnnnnnnnnnnnnnnnnnnggccttccttcccttccccgactttgcagatttctcttcccccaggcctccctcctccacctctccgccccctccgggcttgtgctctcccaggaggctacgactggagccactggtcccgcaggatccccgcgtcctcgtgtcgccgcgtccacgtccctctcgcgtccccgcccggcgccacgccgcctcctctgggttcggcctccgcgcggtgcatgcgcagtctcaggccgcgggacaagcccgacttaaatctctgccaatggctaacgaagcttatccttgtccgtgtgacattggccacagacttgagtatggagggctaggccgtgaagttcaagtcgagcacatcaaggcttatgtcaccaaatcccccgttgatgcaggcaaagctgtgattgtcattcaagatatatttggctggcagttgcccaataccagatatatagctgacatgatctcaggaactggatacacagccattgttccagacttctttgtagggcaagagccttggggacccctctggcgactggtctatcttccctgagtggctgaaaacacagaaatgcccagaagatcgatagagagatcagtgctatcttgaagtatctgaaacaacagtgtcatgcccagaaacttggcatcgtggcattctgctggcggtggaactgctgtccatcattttgatgatgacctactcagaacttcagggcaggggtgtccgtctatgggtaacctctgccttgtgctttttgactccatgcacaaggacgggttgcaacacgtgcgcaccatcacgaagctcccaaccagtgtaacagaagcccccagattaatggtggcatcgcattggccccatccttcattcgaaactggggtttaaaccaactctggcaaacaatcgacgcgtgggcagggatggcacgtgcagatacaccaggcgcggatgatccacgctggaactcatgaaggtcactgagctcacggtggtgctgcttccgggaagcaccatcatgttacactacggtcaagtcgctaccctcgctgaaagcgata

SEQ ID NO: 431874 - DNA, 763 bp, Homo Sapiens
cccgcgtttctgttgcgtggtcgcgcgagatgcagtgtttcgttgttattgctgtgtcttttttgaattcaatgctgattttatttcaactaaataaagcaatgcacaagtcacctgggcagtaagcttaactccaggagcaaaagccaagaaacaaggattctttttttctttaaattatccatcactacacatggctgtcttccatacctgctctcagaaaatgtgtgttaacaaatctcatgtaaagaaacacaggaaaagagaaaaaggggaaatgcaatttatctagtctgccagtgaaggtggtctctccatcttcttttctgtaaactgctccatcagcagggtccatttcgaatgattttaatattatgaccaccttccctgattttcatgcacagagtacattcattggcataagtggacatgtcactgccacacacagggttaaagtgtctgggacatcctggtaatctatactgagagcagtttggcgttctggcaggtcctttggggaaccgccagtaacgggcgcgcgggtaccgtcgccgaggccgcccggagcagggcagggtccgccgccggtctgactcccaaacccgcttttctccggaggtccccgctcgccaggaccgctccgagcgctacctgcgaaggtaactgccaggagcagcagcgccaagcgcagcaccgacagcgccatcctcctcccgcgccggctgtcttgcccctgcggtctgttacctgcgccactcgcccc

SEQ ID NO: 431875 - DNA, 1202 bp, Homo Sapiens
  misc_feature (149)..(149): n is a, c, g, or t
  misc_feature (378)..(386): n is a, c, g, or t
  misc_feature (562)..(573): n is a, c, g, or t
  misc_feature (607)..(607): n is a, c, g, or t
  misc_feature (609)..(611): n is a, c, g, or t
ccaaggcggaagggtgatcggggccatatagacgcgcgataagggagagtatagtgaggtgggtgagcgtatgaatgtaggtaagtctcgcaagtaggggagagggggtagagaaagaatagggcgcgggaaggagaggaaagagtgtnagacacgcgagtgggtggtccactgtttgagaggtcgtaagtgattggttgtatcttcgtatgacgaggcagtacagaggggagagaggggtggcgtaatgtaaggcaaggtgggtgacgtccgcccaggtgagggggggatgctgttgcgcaagagaagtccaaggctccggtcgttgttttcaaagcgagggtatgcggtgaagaagaaggggacagtttcttgggnnnnnnnnnggggtgaccctcggaaggagggggccccccgttgccggagaaagaggggaagcgccgcggaatcatggggcgttcggaagagaataagtgaaatggagaggcccccaccgagaaaaagaagaagagcggggggccgaaaggagggtagggaggttgtgataagtgaaagggaagannnnnnnnnnnntaaggttattgggggtcggttgattatggtgttntnnngaattcaatgctgattttatttcaactaaataaagcaatgcacaagtcacctgggcagtaagcttaactccaggagcaaaagccaagaaacaaggattctttttttctttaaattatccatcactacacatggctgtcttccatacctgctctcagaaaatgtgtgttaacaaatctcatgtaaagaaacacaggaaaagagaaaaaggggaaatgcaatttatctagtctgccagtgaaggtggtctctccatcttcttttctgtaaactgctccatcagcagggtccatttcgaatgattttaatattatgaccaccttccctgattttcatgcacagagtacattcattggcataagtggacatgtcactgccacacacagggttaaagtgtctgggacatcctggtaatctatactgagagcagtttggcgttctatattttgaaaacagaccaaattgagggatcagagaggctgcgaaggtaactgccaggagcagcagcgccaagcgcagcaccgacagcgccatcctcctcccgcgccggctgtgttgcccctgcggtctgttacctgcgccactcgcccgct

SEQ ID NO: 431876 - DNA, 1989 bp, Homo Sapiens
agtaaggggatgggtggtgccaaagcaatcgggcccaattcgttccagaaataggggcaacaggattgaatgttgggaggttatgccagaagtcctcccggttaccgtttctgtcccggagtctgtttttcccggaagcctccccccaatggggggagaaaggaaactggacttgggagaactttccgttgtagcaacttgttttgcgagaacaggtggggtaggggacaccaggtagggctgccatcacccccctgtcctttccagcgttcttcatggcccccatttagccttcgcaaatgcaacatggtcaggcagtgcccaacactatggtccctctggcctctcattctcaccgctccagcctctgtaagactgccagcccttgaaggccctaatgccaaagtaaccattctcccaggctacagttccttcctttggcagatgtccctggccagggcccccaacctctacgcacccctgacctggagttaggggtagaggtttggggcaggggtagtttatccacccctcactcaaggtgggcaatcagcaccatcatgataactccccccagcagccccagcacctccagaagtgattgcaatggtgatgcctccctcagcagctcgggcaacacagacactgttgctacgtagataaagccacctgcagtaaatggcaggacccagccaggacctgcaccacctgcaatttcactgcccactgctcctccttcagtgagaagggcacaggctgtgcctgccagtgcccctactgctgtcagtagttgcagacgcatcgcctgctttttgctgcagccagactggaccaagatggcaaagtctccgacctcgtggggcacttcatgtagcaggacagtcattgtggtcaggatccctagtccccggccccctcgaaaggaagccccaatggccagaccatcagtgaagttgtgtgccaagtcagcagccagattcaggtaccccgacacacgcaggtctaagcctcttttttcttcttcagcgttctgaggtctcactggcccatctttgggtactgtgctccctcctcgcctcttctgaacccctcttgtttccttttcttcttcctctgagctctgcttctccttggtagaacgctcttgtcttccatgtccatgacttccacgtgtatgactgtgagcgtgtccatgtccatgactgtgaccatgtcctcctttcacatgtctcacaaatttctccacgacaagaaaggcaacaattccactgagaacccacagtcccacagacagaatggggccctggccactgtgggagtgtccatgtccgggttgctccagagtgtggtgagaatgaggttcaagagcatgaggaatgaggtgcaggaaagcatctcccaggagcccaccggaagcaaaactgagcaagatctgaagtagagagcgatgccggggagagttcgactccacggggataaggaagaggacaaaaaatggagctgctgagatcagcactgtggcccccagtgcataagcccagagagtgacagcatccaggtcctgcttgatgcctggagccccagactccccatagcctccatggctatgctcatggtcatgtccatgtcctctgtggtagaggctctcatgggagtagccatggctatggccatggtgtaaatcctcatgtgaatgtccatggtcgtgatcgtgggtatgtccatgccagatgctctcgtgagtgtggccatggccatgggcatggctgtggccatggtggaaatcttcatgtgagtgcctgtggctgtggccatggaagtcctcttgcagatcgtcgtgcaggtcgtcatgacccccgagtccagccaccagaagccccaaggtcgcccaggtcagcagtcccacggccacccagtggggggcccccaggcctctggccatcacgcggctccgggatcctctcctttcccggtttgcttgacgtgcat

SEQ ID NO: 431877 - DNA, 849 bp, Homo Sapiens
ggagatttcgacttcacggggataaggaagatggactttaatggatctgctgagatcagcactgtgtcccccagtgcataagcccagagagtgacagcatccaggtcctgcttgatgcctggagccccagactccccatagcctccatggctatgctcatggtcatgtccatgtcctctgtggtagaggctctccatgggagtagccatggctatggccatggtgttaaatcctcatgtgaatgtccatggtcgtgatcgtgggtatgtccatgccagatgctctcgtgagtgtggccatggccatgggcatggctgtggccatggtggaaatcttcatgtgagtgcctgtggctgtggccatggaagtcctcttgcagatcgtcgtgcaggtcgtcatgacccccgagtccagccaccagaagccccaaggtcgcccaggtcagcagtcccacggccacccagtggggggcccccaggcctctggccatcacgctgaccagagggacagaggcagtgactccacttgactcaactctatacctacacagggtccgctttactccaatcgcgccctccgtccacctctatgggccgctctcccattcccttaagttcccacctacattgttcccaagactagttctctttatcccgaaccacctcccggatgtagggccctgggacactaatctttcaccagccactttacagactctctgggccctcgtctctacgactcattaggtgaggaaaaggcctggaaaggatggtagagaaaaaacagagaattctcaccggctccgggatcctctcctttcccggtttgcttggacgtggcagtcccgcc

SEQ ID NO: 431878 - DNA, 436 bp, Homo Sapiens
  misc_feature (420)..(420): n is a, c, g, or t
cctctggctatattcaaaagagaatctttctcgtctcttgtagccttcaagcctggtggttggtcagaagacactgtcctagatttttctccatccttttttttctctggctatattcaaaacagaatcttccttgtcacttgtagccttcaaggctggtggtttctgagaagacaacttcacatctcttcagtggaagagtcctgaattgatcaccttggacacctgtttgctgatacctgtcctagatatttctccatcctttttttctctggttatattcgaaaaagaatctttctcagcacttgtggccttcaaggctggttttttctgagaagacactgtcccagatttttctccatcctttatttctgtggctatattagaaacagaaccttcctcgtcagttgtagccttcanggcttgttgtttctga

SEQ ID NO: 431879 - DNA, 2363 bp, Homo Sapiens
  misc_feature (2157)..(2157): n is a, c, g, or t
  misc_feature (2255)..(2268): n is a, c, g, or t
tctatagtactgaatttgttttttcatggtgggcagattctcaggatactctgttccagatttctgaccacccattattcttgtggcaatattcaaaagagaaactttctttttaaatataaccttccaggccgattgtttctgagaagacatacaaatgtagaatctcaggcctgctgaatcagaatgtgcagcttcaaagagtcccccgctgatttattcggggaagagaagttcttgtctatcttggctgaacatgacattaaatgtgctttgcaaaattatgtctcccagattgttgtccatcctttatttctgtggctatatttgaaacagaatctttctcgtcacttgcagccttctcagctggttgtttctgagaagacactgtcccagatattggtccctcctttatttctgtggctatattcgaaacagaatctttctcgtcacttgcagccttctcagctggttgtttctgagaagacacttttcctggaggtggtgaatccttccttcttatggctacttttgaactgggatctgcttctttcagggtaagcttcgctgaagttagtgaatccatacttcctaagaatctagttgaaatgtgatctctgtctttcaccggatgctttcctccttgtctctctcattggtgtcatgatacgtgagcagaaggtactccagtttctccagattaccatagaagacagctctgtggatcctcctcatatgagatgatttaatgtggtattggggaaatgagaagccgtcggagcacaagcgctccctgagggtgggccacctctccggctggtagtcttccatactcgtctgctgcaaattgtatcctgggaacgctccagccgtatttcagctcgccttcggggatctccgcctccgaagcgcaacaacaagcaatgcggtgcgtccacggacctttgcacatactctcagcgcctcccgcctctcagcagaaacgcccaacagaacggttaggaccagcgagcacgtgcaccttagccggccccgcccaacaggccctaggcggagaaaccgccctagcagctctctcgcggcgcccagtgcaggcggcggttgctgctcaggtgccgcgggctggcggggctccctggagccgcaaggcgcgccctgccccagggcctgtttgactgtggcctgcgcgctcttctcctcttccaccggctcccgatgctccgaggcccccgcgctgggccctctgcagcccagggatggggttgagtggtgcttctccgcctggtgccgccggtgggcccacagcccgacttctccactgcgtcgcccccggggtccgtgctgatgggtgtgaggcgggaggacgggatccggggttgccactgctgcagtcagcgcaccgcttgcaggtggcagctgcacctccggattctgcggccgctggaccactatccacctgacaagacaaagcgtcctatcacccctgctctgcctctcaattcatccctcaacctacatccccatgcaaattcctcaccctactccatgcgtaaacttccactaatcccacccacacttcgagcacacgcgactcccacacaggccccccttctccttttattccacatacatgatacacgctatcccccagacagtctcccctctctattaaatgtcccacttccccttatccgtcctctttgcccccaaaccaaccctatcccaccaagtctaatcatcacccccggagcttattatatacccactcacagtccaaagcgcgatattctgtcactccttcccactccagttctccctctttgcccacccggtaccctccacatatgtcatataaccacgtacccacttttcctcattccttcctatcgccccccacaccgcctctgtatcttcaccccaacccataacaccttccacttacgtacctcgtctcctctccctcagtcacacatccctcgctcacaccacgcccatccccctctcacaaaccccactattcactctcgctcatcatcgccaccaccggatacgtcataaccttcaaactccccactagttctcgctactccctcctttttgtcatattatatatgcatgcacaatgatctacatttcatgccacacacaaattatacncactacctcataattacctcctcacatctcctccgctctcctataccgaagtgattatccccgataaggtaatactcatcccacatctcctcggattnnnnnnnnnnnnnngctctacatccgccccccttccgccgcgctgttgtcccctaacctgccttctcccattctacgaccgtattcttccctcgattccccgtgacccg

SEQ ID NO: 431880 - DNA, 1697 bp, Homo Sapiens
  misc_feature (296)..(296): n is a, c, g, or t
  misc_feature (410)..(410): n is a, c, g, or t
  misc_feature (556)..(556): n is a, c, g, or t
cttgctgtatggcaaatctcaaactacagagttctttttccaattcaagtgtttcatgctttaactgcgattttatttcttctttttcagatattctcttttgtagtacactagccttatttttcagttttcgaatttttactctaagttgctcacagtggttatctttaagttttgttaatcttttccataaacaaaatgtctttttaattttcaataggtgaacacaatctttacacttcatttcatgttgatcaatgagtaatatgacattcttacaattacagcaaagcgangtcaccgtcctctgagactgtttgagatgactgaattatgtcatcaaggtcatccctagaatgtatttgggtttttcacctgtggctggttattttcatattcttcaagcctcnttttgctctccctctgatgccatttctaagtctgttctgtgtggatgtttgtacatctttcattttggtggctgtattcagaacagaatttttaattttccattgtagccttcaaggtgggcagattctcaggatactctgttccnagattttccaaccggcctgttattcttgtggcaatattcaaaagagaaactttctttttaaatataaccttctgggccgattgtttctgaggagacactgtcccaggtttttgttcatcttttatttctgtggctttattcgaaacagaatctttcttgtcacttgtatccttccaggccggttgtttctgagaagacactgtcccagatttttgttcatcttttatttctgtggctgtgttcgaaacagaatcgttcttgtcacttgtatccttcaaggccggttgtttctgagaagacactgtcccagatttttgtccatcctttatttctgtggctatattcgagatagaatcttccttgccacttgtagccttcaaggctggttgtttctgagaagacactggattgctatttatagaaagctcttcatgtttctttctttcatattcataaattagttcaaaaatgactctgttcttagcctcgctggcataatcttctgcaagctttccatacacatctcgagaaaacacatcaatattgtgctgcagaagaagaatgactatatctttttctccaagagtaacagcatgtatgagggctgatctgccaagataatcaacggcatttatatttgcttttttctttaataaaaattccaccattttcacttttctttgactcacagcaaggaacagtggcggatattcatcctcgctgcattcttcaatatttgcaccatatgaaagaagtttttctatcatggatgtatcttcattatacacagcgtagtgcagagcagtccttccaaagacatccgtaatatttggatcggcgccattttgcagcagaagagttgcacaagcctcctgcctcagttgtacagccttgatcagaggtgtcctgtcttcacggtcgcagaggttaagctcacatcttctggacaccaggagatgtaccatttccggttggccagtggcacaggccaaatgtagggcggtcctttccttcctgtctctcttattgatgtcataacgcgtgagcagaacgaacttcagttcctccagatcacgatagaagacagctctgtggatccccttcagatgatacggtttaatggggtattggggaaataaga

SEQ ID NO: 431881 - DNA, 1940 bp, Homo Sapiens
  misc_feature (586)..(616): n is a, c, g, or t
atgatccttctagggaaatgccctctggctgtagcaactcatactgttgcgtggttcaagctctctgcccttcactaagtccaagccttcatttggggcaacccagtttaaaaggggccacaatgacaggagcaaaaggagtaggacatgggggccccccgcttggcctggggctgacagaggggaggatggaagtttctaccggaagaagacccagggtacctggtgggtaccctggccccacgtgtctcagtgtaggtgctctctctgcagcatctccagcgtcagcagcagtcttgcatctgcactgggatgcctccagtgccaggaagctcactctcgatgtgctcaggccctcgcagggttgaggcattgctttgggggaactgtctgtgctccaccagcctcctcaactccagcagagagtggaggaatgggtgagttcctgcccaggcagctgggggccccaagcaggaaacctgtgtagaaccagagaccaaatcctttggaggaacaaggattcatcacatgagaattactctcaaagtagagattctggaggtgcccctgactctctggagagaannnnnnnnnnnnnnnnnnnnnnnnnnnnnnncaaaagagcttacatttattgagcatgcttgtgctaagccctgggctggcctttgtttcattggcacaacagccttgagaggttggtccattatcacccctcagttcaggtaagtggactgaggctgagagaggtgcacgggtttgtcagggtcacatagcacatgaggacagagccagaccaggagccctgtgacatcctcggccaggatgctaaccctaaggacagtgaggtcactcttcacaccgctgtgaagggagaggctattgctctgcacccacagctcagcaatggggaccatgaacgcctctagggcagcccatgtatggggccgctacctacctggtaactgtccacggctgtccatttggaagagatattgatgtgtttgttttctcctccccagcctgtgggctcctggagccaaggaccccacctaattcatcactaggcacaaaacagctgctcaataaatgtttactgaatgaatgaacgcatgaagaatcaatgaaggaggcggtgaaggaatgaatgagtcagtggagaacctgaattggttcctcaagccagccttccactgccctgcatgccctggcatcttggacatttctggcactaggctgctcctgccacctcactgccaggggtgatacagggctgccggcctctgcaagccggggaggcctacggctgtgccgaggcagggaacagtgtgctgtactcctcctggaagcttaggtccttgaatctccgcacggccagggctgcggtcaggctccaggtgaagatggagaaaaaggagaaggcgatggcggcccgggctgcgtccgtcccttcgttcagtgggttgtccttgggcttggagacctgccactggttggccaggtagcagaatcccacgaaccagaggaaagcccagaaggccgagacaccgatgtcggacaggacggctttcttgcggtccttgacgctgctgatctgcgggaagtacacgtccagggccaggtacagcaggcaggtgaggaaggcgagcacgcccacggccacgccatagctgcaggcgttggggttgcggttgtagatgcagaactcctccccctcggaggcgctgttgaggtagccctcgttcacgatggagccgaacaccactatggagaacagccaagacacgacgcgcaggatggtgtgcggctgccggaccagggtgtaggggtcgaaggcgcccccggctttgcccgctccgtacgcacccccttccatcgtggctgcacccgcgcgggccccccctcgtgccgaattcaccacccagcctcgcacctagccg

SEQ ID NO: 431882 - DNA, 1185 bp, Homo Sapiens
tcgtttgggagggtgccgcgcggcgctattagccttgcggaccgggggtccagtcggcggagcaatcgggcgcgccggatgtgttagtgaccgggatcgcttaataggcggcagtattgggtctgggggcggggttaggttggttcagcggcttttgattgtcgttcgggggagtccgcccgcgcccacggggtcttttggtccggcacctagattcaacacccgggctgcccgtcgcccggtgtggcgctcctccttattgtctcctgggggggcgcctgggtacgcgctattggggatccgggccaaaggtgtttcgacggcggcggcgccagggcaatcccggggccgagatcgaggggcctgggcctttaaggtgagggggccgatttaagattgggcggtgggcatccggcccactgtggctcagtaggcccggcgtttggtaacccccgggccttcgtggtcgaagtgggttacggactggtggtaggttccgcccataccggcgggattccggcccagtgttgggctccacgtagggcgcgtaaggcatgctggagtcctggctggggtccatgtagtcctgggagaagagggccgagtcggcgccaatctggtaccgctggaaggccagcacagcctggcccgcccaggtgaagatggagaaaaaggagaaggcgatggcggcccgggctgcgtccgtcccttcgttcagtgggttgtccttgggcttggagacctgccactggttggccaggtagcagaatcccacgaaccagaggaaagcccagaaggccgagacaccgatgtcggacaggacggctttcttgcggtccttgacgctgctgatctgcgggaagtacacgtccagggccaggtacagcaggcaggtgaggaaggcgagcacgcccacggccacgccatagctgcaggcgttggggttgcggttgtagatgcagaactcctccccctcggaggcgctgttgaggtagccctcgttcacgatggagccgaacaccactatggagaacagccaagacacgacgcgcaggatggtgtgcggctgccggaccagggtgtaggggtcgaaggcgcccccggctttgcccgctccgtacgcacccccttccatcgtggctgcacccgcgcggtgccccccgctcggcgcgcgcccccgccgct

SEQ ID NO: 431883 - DNA, 805 bp, Homo Sapiens
ggaggaccattctatttccttctggttaactctacacactttctgtgctggaatctctaatgcaaatgatagacaattgccaacacagaagggctttgctttaggaaaatatgatcctgcaatgacatgctttcagttgagcttctagtctttcaaaaattaatgctatttctcctttcaagtggcaagttctcttgaaggagtgaataatacagttgcagaaattgaaaggcagtagtagctttgactttccaacacaccttctccaatacaatcttttccattctcatcaagtctgaaaccgtaaacctatattgacttattcggatcaagtcagttgccaatgggacattcctttcctcttctattgattttacagccaaataaaagcagctcagtccaacacacccaaggtgcttgggctgtaccttcattttagacaggaatctgtccagtaaattcacagctagagaaaatgtctctgtgtcaaagccaaagaactgagttagactaagaagatcttttacttcaaagtcccttagtcttgcagtcattctgaggccattatcgtgtgcagactcaattagtctcaaaccacagacctttggctgacatctagactcctgttccaacagggcattcagctggtgtagcagtttctgagagtcagttgttgtcagtacctctatcatcttgacagagactgcagctcctcagcggtaaccaccctccccgggtggaggcctcggcagcgccgccgagacaactcggccctgatcagggtcagctcggagccgaagggccc

SEQ ID NO: 431884 - DNA, 852 bp, Homo Sapiens
ggaatctctaacgccatgatagacatgccacccagaaggctttgctttagaaatatgatcctgcaatgacatgccttcagttgagcttctagtctttcgaaattaatgctatgtctcctgtcaagtggcaagttctcttgaaggagtgaataatgcagttgcagaaattgaaaggcagtagtagctttgacttttccaacacacgtttctccaatgcaatcttttccattctcatcaagtctgaaaccgtaaacctatattgacttattcggatcaagtcagttgccaatgggacattcctttcctcttctattgattttacagccaaataaaagcagctcagtccaacacacccaaggtgcttgggctgtaccttcattttagacaggaatctgtccagtaaattcacagctagagaaaatgtctctgtgtcaaagccaaagaactgagttagactaagaagatcttttacttcaaagtcccttagtcttgcagtcattctgaggccattatcgtgtgcagactcaattagtctcaaaccacagacctttggctgacatctagactcctgttccaacagggcattcagctggtgtagcagtttctgagagtcagttgttgtcagtacctctatcatcttgacagagactgcagctcctcagcggtaaccaccctccccgggcctgctcacctcaccccacgatatcagatccgagaggcctacgaggagaggggactcgtaggcaagaggagagaggcccggggagggggactgtcctgggtggaggcctcggcagcgccgccgagacaactcggccctgatcagggtcagctcggagccgaagagccgct

SEQ ID NO: 431885 - DNA, 1203 bp, Homo Sapiens
  misc_feature (833)..(842): n is a, c, g, or t
gagcccctcgggtttcgccccagggtttttccacttttccagcggagaaaaggggaaaaggcccccccaaaaatgggcaaaagtgggggggccacgggtaccagaattactttccaaattcgacgtgccttaaatggaaaggatcttcccagaattaccccctgtaaaaaaacctttgaggaaaaatgttcaatgacctggggccccattggggaacctgaggccctttgttccaaggaatgggaaacattcggttcaagccagattcttcaaggaaaccggggaggcaaaaggatatttctttaggggctttccaaggtttcgtagtctttgataaccctttccttcaagaaaggccattttccattaaggccctcaatggtcagggatcccgccagggcatatctttcccagaatttccttcctgtgggggctccttcttcattcttgcccaactggtcctttttgacaaagccagtggctgctgcaatgctccctgctccctccactgtcttctgggctactgctgtcacacccgtcaccactgctcctccaacatttgtcacttgctctttggtcttctcagccactgttgccacaccatgcaccactccctccttggttttggagcctacatagagaacaccctcttttgtctttcctgctgcttctgccacaccctgtttggttttctcagcagcagccacaactccctccttggcctttgaaagtcctttcatgaatacatccatggctaatgaattcctttacaccacactgagtccctctgcttctccacaactccgactcctccccgcctctctctttttttnnnnnnnnnntttaaacaattcccaaataatatttaataggaaagaagaaggaaaaggagcgcacaggaagggcggaggcggcacccgggggggactgtccccagaggaggccgctgtgagccggcgacgcgaggctgggggagtgggaggcaaacccgctaacctgtcgtcgaatggccactcccagttctccgctcacgagggtggaagggcagaaggcttgaaggcaaggcgtgagggagcgcccaggacgctctcggaggggccgggccggggtctgcgctgcagcccgcacgcacctcacttccgcgtcgcggcgctcggtcgctcgccccctctcttgggccccttctggtcgtcgccgtcctcc

SEQ ID NO: 431886 - DNA, 947 bp, Homo Sapiens
ggtatcacttaggtttttaattggtttaacattgtagattgaacccccaaatccacggcacacaaagaccctgttaccatgtattcacttcagtgaaagggaagcaccgaaatgctgagtgggggcaaggtacagatacttcaatcactggctgatggaagacttcgagatacactgtaaaaactttgagaaatgtcatgactgggcaacattggaactgagcacttgtacaggatggaacatctgtcagcagatctcaagaaactgggagcaaagatatttcttaggcttcaggttcgtagtcttgatacccttcctcagaaggcatttcataagcctcattgtcaggatccacaggcatatcttccagaattccttcctgtggggctccttcttcattcttgcccaactggtcctttttgacaaagccagtggctgctgcaatgctccctgctccctccactgtcttctgggctactgctgtcacacccgtcaccactgctcctccaacatttgtcacttgctctttggtcttctcagccactgttgccacaccatgcaccactccctccttggttttggagcctacatagagaacaccctcttttgtctttcctgctgcttctgccacaccctgtttggttttctcagcagcagccacaactccctccttggcctttgaaagtcctttcatgaatacatccatggctaatgaattcctttacaccacactgtcgtcgaatggccactcccagttctccgctcacgagggtggaaaggcagaaggcttgaaggcaaggcgtgagggagcgcccaggacgctctcggaggggccgggccggggtctgcgctgcagcccgcacgcacctcacttccgcgtcgcggcgctcggtcgctcgccccctctcttgggccccttctggtcgtcgccgtcctcctcctccgct

SEQ ID NO: 431887 - DNA, 425 bp, Homo Sapiens
  misc_feature (135)..(265): n is a, c, g, or t
catggtcgaatattatttattgtcagaaaggtacagcattcacaccaatatcagacaaaatagattttaactaaaaaattatttcgagacaaaaataacaatatatgttaataaaaggctcaattaaaaatgtannnnnnnnnnnnnnnnnnnnnnnnnnnnnnnnnnnnnnnnnnnnnnnnnnnnnnnnnnnnnnnnnnnnnnnnnnnnnnnnnnnnnnnnnnnnnnnnnnnnnnnnnnnnnnnnnnnnnnnnnnnnnnnnnnnattaatcacagccacttaaggaaccagtgcataccaaaacacacttctggcagtgttgcttcagggaattccgagtgtagggttaatgttccattttctctacctcttctaaaattcctccttcttcaaatggctattaataactttatatttttgtcct

SEQ ID NO: 431888 - DNA, 2027 bp, Homo Sapiens
  misc_feature (19)..(19): n is a, c, g, or t
  misc_feature (46)..(46): n is a, c, g, or t
  misc_feature (130)..(130): n is a, c, g, or t
  misc_feature (185)..(237): n is a, c, g, or t
  misc_feature (251)..(261): n is a, c, g, or t
  misc_feature (409)..(423): n is a, c, g, or t
gttaaaaggatcctccccngaaaagagaaaaaacccttccccctanggaaaaacccctagaattccatatatttgggcaacattttaaaggaggcccatgaaatttttatccagtcctagagaattgatnctccctttaaggtgactctggtagttcccaacgatgtttaaaggcatttcctgtnnnnnnnnnnnnnnnnnnnnnnnnnnnnnnnnnnnnnnnnnnnnnnnnnnnnnatttctgatgattnnnnnnnnnnngtgaggaatgctgagttaaaccaagttaaccacattctctcagagcccttgaaatgtgctaaatatgtgctaaatgtgtcttatggctctctaaggagggtgtagtccaaatcatcttctacactgcttaggttcccgggaacccccnnnnnnnnnnnnnnnattcatggtcgaatattatttattgtcagaaaggtacagcattcacaccaatatcagacaaaatagattttaactaaaaaattatttcgagacaaaaataacaatatatgttaataaaaggctcaattaaaaatgtataacaattataaacacatacacatcaaacaacagttccccaaaatacataaagcaaacattgacaggattgaagggagaaatagaccactctacaatagtagtttggggtcttcaacaccccactttcaataattaatcacagccactttagggacccgtgcataccaaaacacacttctggcagtgttgcttcagggaattccgagtgtaggggttaagtgttccatttatctctacctcttctaaaattcctccttcttcaaatggctattaataactttagtatgttttgtcctcttgtgtcagttcttaattcatgttagcttataagcatgattgtttattagttaaagtgagatgggataaaaataaaatatttttgcaatgagataacgttttattttaattctcaccatttatatacaaacacaagtgaataaaacacatcgcaaaatggtaaaatttcatatttagtatttataggtgcatagtttcatgctcacatatttttaagtattatatatattaacaaatttcacaatacgtcattattcttagacagtatcattaaaagacacctaaaaatcttataatatatgatagcaaatcactaacaacttctgaacaacagcaacaaaaaaatagtgaggatttagaaataagtggtagtcacttaggtgtttttaatttgttttaacatcgtagattgaagccacaaaatccacagcacacaaagaccctgctaccatgtattcacttcagtgaaagggaagcaccgaaatgctgagtgggggcaggtacagatacttcaatcactgctgatggaagacttcgagatacactgtaaaaactttgagaaatgtcatgactgggcacattggaactgagcacttgtacaggatggaacatctgtcagcagatctcaagaaactgggagcaaagatatttcttaggcttcaggttcgtagtcttgatacccttcctcagaaggcatttcataagcctcattgtcaggatccacaggcatatcttccagaattccttcctgtggggctccttcttcattcttgcccaactggtcctttttgacaaagccagtggctgctgcaatgctccctgctccctccactgtcttctgggctactgctgtcacacccgtcaccactgctcctccaacatttgtcacttgctctttggtcttctcagccactgttgccacaccatgcaccactccctccttggttttggagcctacatagagaacaccctcttttgtctttcctgctgcttctgccacaccctgtttggttttctcagcagcagccacaactccctccttggcctttgaaagtcctttcatgaatacatccatggctaatgaattcctttacaccacactctttcagagctggaagacagctgttcctggatcacaccagaatggagaagcaagctcctaccccgct

SEQ ID NO: 431889 - DNA, 1013 bp, Homo Sapiens
catccgggcacgcagttaggagcctgagttcccccatgttgctgaggtactgtttgctttcaatattcctcttccgccagtgtggccgtcccttcggcactctcttcatcgctgggcacactatcagtcgtttcgctttctgcataggaagacacgggggagatctgcagagggtagagctcgctcatgctgaccggctgctcgtcgctctcagtggtcacctctacaacttggcaaatgtctggcggattggtgacaatctcttgattctcaatgttgctgtccagatgggactgtcctacaactatgatgttcaccgtactatccacttcattttttatagttgaagtcaggaccgcatactcaggagaaagatcacttactccattactaagccccagagatgactcaactggttcttgcttgatgtgcttaactttgtcttctttttctgtctttggtttctttcctttcttagaaggccgttctgataggggcagcattcggtagaccctgaaggcattatttcctttctttatgcttttatccttgacttcttcaatatcaggcaaggaattcatggcgcatctgaaattcgccttccatgttttgggatcaggtttatctactcctggttgatgctttcctgtatggattgcccagtttctaaagagtggtgcatctttttccacatcccacccatgtctagccgcatgcatccaggggatctgaaaaatcttcttttccttgttaagccacttgagccccgggatcgtgttggagtttatctgctcctccagccacgggcgcatgcgcatcctttccaccggcatggtgccctctcagtgtgcttttttcacgctaccaatacaattccgcaaggtataagtgttgctagggtgtgtgaaatggaaatgaaagcccgtcagttgaataatcgcaggagcaaaactaaaagttactccccggcttgcctgagaacagtccagatcgaaagcaaaacaaggagaccc

SEQ ID NO: 431890 - DNA, 785 bp, Homo Sapiens
  misc_feature (624)..(632): n is a, c, g, or t
aagacttttttgaagccatccgcagaaggggagacacattttatgttgtgtcatttcgaagggatcacctgctgttaccagctaccacccataacaagaccacaagaccaaaaatgtcaattgtgttaccagcaataaacataaatgagaatgtgatcaatgggcaggactacgaagtgatgatgcagattgactgtcaggtgatggacaccaggatcctccatatcaaaagttcgtcggttcctccttacctccgagatcagcagaggaatcaaaccaacaccttctttggctcccctcccgcagccacagaggcaacccacgttgtcagcaccatccctgagtcattacaatagcaccctgcagctatgctggaaaactgagcgtgggaccctgccagactgaagagcaggtgagcaaaatgctgctttctgccttggtggcaggcagagaactgtctcgtactagaattcaagggagaaaagaagaagaaataaaagaagctgctccatttttcatcatctacccatctatttggaaagcactggaattcagatgcaagagaacaatgtttcttcagtggcaaatgtagccctgcatcctccagtgttacctggtgtagannnnnnnnnctgtacctttctaaacctctcttccctctgtgatggttttgtgtttaaacagtcatcttcttttaaataatatccacctctcctttttgcccatttcccttattgattcctaaagtggaattttatttaaagctatgccacacatgcatgtaa

SEQ ID NO: 431891 - DNA, 855 bp, Homo Sapiens
  misc_feature (5)..(5): n is a, c, g, or t
  misc_feature (11)..(11): n is a, c, g, or t
  misc_feature (14)..(14): n is a, c, g, or t
  misc_feature (72)..(72): n is a, c, g, or t
ctatnggattnganggaagagaatcatcttttagattttcatcccattcacgtagctgtttcttgattctgnccattaaggtctcagcatcaatataaggaatacagccagcgaggccatgaagttagatttgcacaaggaaactttctcttctggtatttctgccaccatttatatgaacattggtcttctcttgagacaggttttgaaggaaatatctggcacttattgagggattctaattgaactgcagacatggttgaaggcaacacacattcgggaagaatttgcactttagcttgctggattccatctgactgtgttcttagctcaaggactttgaacctttgtcttccaattgctttcactttcactatctcaattccaaaatcctgttcttctcgataggcatatatctctgctgttgttccaaactgtgcttccctttcctgtacattgctgtatgcaagaacagcaaaggttctatctttctgaattaaattccgcaccatactgacttcttgagggtgaaaaagctgaagaggtaatgtctgtccgggaatcaggatcatcatcacttgtggaagaactggaatcacctgacagctgtcgtcatcgtgcaaagtcctgccatgaaattcttccatatcagcacctaggtatgtatgtgatgtcggcagactggtgtcaaaatttatgatgtttggttttttggcttctttactatcctggtcttcaacttccatttcatcttcttcctcactctctgcaggcaggagcggcaggtggttgcccatgttgtgcgcagcgtcctgctgatctccttcgccggccatgtctgtttacccgcccgct

SEQ ID NO: 431892 - DNA, 955 bp, Homo Sapiens
  misc_feature (43)..(79): n is a, c, g, or t
  misc_feature (483)..(483): n is a, c, g, or t
ctgtatagatatatggggactgcgggtttcgcggtggcggcgnnnnnnnnnnnnnnnnnnnnnnnnnnnnnnnnnnnnnatcaggccaaatcggccgagctcgaattcgtcgagagcggagacatggccggcgaaggagatcagcaggacgctgcgcacaacatgggcaaccacctgccgctcctgcctgtacctaggtgctgatatggaagaatttcatggcaggactttgcacgatgacgacagctgtcatgtgattccagttcttccacaagtgatgatgatcctgattcccggacagacattacctcttcagctttttcaccctcaagaagtcagtatggtgcggaatttaattcagaaagatagaacctttgctgttcttgcatacagcaatgtacaggaaagggaagcacagtttggaacaacagcagagatatatgcctatcgagaagaacaggattttggaattgagatagtgangggtgaaagcaattggaagacaaaggttcaaagtccttgagctaagaacacagtcagatggaatccagcaagctaaagtgcaaattcttcccgaatgtgtgttgccttcaaccatgtctgcagttcaattagaatccctcaataagtgccagatatttccttcaaaacctgtctcaagagaagaccaatgttcatataaatggtggcagaaataccagaagagaaagtttcattgtgcaaatctaacttcatggcctcgctggctgtattccttatatggatgctgagaccttaatggacagaatcaagaaacagctacgtgaatgggatgaaaatctaaaagatgattctcttccttcaaatccaatagatttttttaacagagtagctgttgtcttctatgatgatgtttgagaatcagttctttaaatgggagtgatatcaaggaattgtgtgaataagacattatgat

SEQ ID NO: 431893 - DNA, 711 bp, Homo Sapiens; identical to SEQ ID NO: 325172

SEQ ID NO: 431894 - DNA, 1105 bp, Homo Sapiens
ctggtgcctgccttggggctccgggactgtgggctgtctccatccggaggtctccctaccaccaggctctgtggggcagggaagcccagtggggtgcagggagccaggaagctggggtggggtcagggcagggtccacagggagaccgggcgaggctggcagccttcccagtccgcgcagccgtctctgcagggggagcaagagctgcccttccacccctcccaggggacgggtaggggcactctgggcttttcccaccccctcacgcagggacacaggcctggtgggtctatgactgaaattggccagaccgcattctggtggttttattcggaagggaagtttaccctgttcagcagaagctgagatgggaacaggaaacccacagggcccctttattcggcaaaaatgtcagtcagcgccacggggagcagccgagggtccctgagtgtgtgagtgaggtggggaaacacagatggactttggggggctccccttctacaggaaacccggagtggactggaacggtgcagggggagaactcgccccctcccatcgggcgcctccttcataccggcccttcccactcggactttgcctggagcagctcctgcctcccgcagggcccaccttgtgtccccccaggcgccagatccactccagcagggcctgagcccctctactgctagccagaaaacccccctgatgcccagatctcctgctagcatcagggttctagaggcacagatatgtcacacccgaggcggattctcgtttctctttacgtctaactctttctggccccaaagacgcagcaatggcgctgaagttcctcatgctggaggtacaatcctgcatagctgggttcccggaactggccgggactggagccgtgagggccattgaaagaccgccttgaagaacttgtggggaccatcccttccttgatgaaatccagtcccccagagaaccggacggatcattgacgggctgagtctcatattctcacaccttcgctggtgaaggacccatgttgataggccccaatataggcagttcctgacagtgggtccagtacgcactcatggacacagaagtagtccag

SEQ ID NO: 431895 - DNA, 1728 bp, Homo Sapiens
  misc_feature (517)..(517): n is a, c, g, or t
  misc_feature (649)..(649): n is a, c, g, or t
cttgtataacattttatttagcattcttacacactacacaaaataaatacttggataactcacgtctaacaaactaaactatatatgtattttttccataggaaagcacaaggagaagacagaaatatcaagagtctcaagaacctttgaatgaagtaaacagtttcccacaaaaaatcagctatacacaattcccaaactcattttatgagcctcatcaagattttaccagtccagatatattcaagaagtcaagatctccatcttggtataaatacacttccacagtcagcacggggatcacagacttagaaagttcaactggactttggcctacaatttcccagtttactcttagtgaagagacaaacgcagatgtttattattatcgcatcatcatacctgtccttttgatgttagtatttcttgctttattttttctctgaagatgataccaaaattccttttgataattttttaagtttccagctcttcaccgaaatgttgtattcttatntcagtgtttccttccagacatttttaaggtactcggcttactacaatatggacattcaccaaatatgatgttaaaactctgtctactagttagtagtcctctcagccactcatataagcatatttgatggangggttgtccacactgggaattatcacacacttgatcagggatggtaccgtcaagttgataagcataacaaattccacaatccatagtaaagtcagatttttccaggatagcacgagctggaaaatcaatttctaaaacatctttcaaatttttgtaacacactattttctggatcccacaaatgtatgttcctgctcagcttaattcccaggggttttaccacatggtcagctccaagaaagaagcactcaggaagcatagtaggatgcctggggtctacctctatatttatggaaacatgtattacctaatgcaattctgcgtgctgttgcactccgtggaggtttttctggctcaagtacccaggtcttctcatcgatttcatccataacatcccagaatgcctttagtgattctattgctgccaaaaactgactataaatgcttattaaggagctctgaggtgtccaggaggcacaaaatggaacaggaaaatccacaaaataatctggtgattctgcaggatactttgccttcaacttgagagtgattaaatgctctctaccagaagcatcttctgcttttaacttgatggtactgaagcaggtatccgcatacacaagtttatcccaaccaagagttcctatctcttcaataaggcttgagtagaactggggaggaggaggtagtgcatacagctcttgtctattctttaaggcaacttccaaaagcatcttcaactccatcataaagctcattagatcaggagagtgctgcattctctgttgtactattcgatggtatccactaagtattgttctcagctgccaactacataataatcttgcattcttcagttgtaaatcttcaggcaacactatcctaaggtggaagtctcttccctgagccgagatgaatccctcatacacggttttcgaccggttctggggcagaagcagggggcactggcgcaacaggctcgcttccgtcaccgccatggctcgaagtccggagaaacacagaaaagctctagacctgctgggtcctgcacatgcgcagtccgctcccattcgtgtcgt

SEQ ID NO: 431896 - DNA, 910 bp, Homo Sapiens
  misc_feature (125)..(126): n is a, c, g, or t
  misc_feature (188)..(188): n is a, c, g, or t
aacaaatttgttggacaagcttcccccagtcaatggttaaatgggctccttctggaagcaagttgcttgaaatagcccaattttttggtatgtgctcatagtttagcatatgatgaaaagccaannctatcaagccctcaagaaaaatttgacccctcatggaataccttagggaccactggactttnccacaaaaggacagagtataaatgtccatactccaaacagtcaaaaagttgattcaccaaaggctgcaaccaagcaagtccacaaggcacaccataggttaatcgaaaaaaaagtccacagtgagagaagcgctgagtcctgtgccacatggaaagtgcagaaagaggagaaactgattggattgatgaaccatgaagcagctcaggaaagcacaaggagaagacagaaatatcaagagtctcaagagcctttgaatgaagtaaacagtttcccaccaaaaatcagctatacacaattcccaaactcattttatgagcctcatcaagattttaccagtccagatatattcaagaagtcaagatctccatcttggtataaatacacttccacagtcagcacggggatcacagacttagaaagttctactggactttggcctacaatttcccagtttactcttagtgaagagacaaacgcagatgtttattattatcgcatcatcatacctgtccttttgatgttagtatttcttgctttattttttctctgaagatgataccaaaattccttttgataattttttaagtttccagctcttcaccgaaatgttgtattcttatttcagtgtttccttccagacatttttaaggtaattggctttaaaaagagaacatttttaacaaagtttgggacactctaaaaaataaaattgctttgacta

SEQ ID NO: 431897 - DNA, 546 bp, Homo Sapiens
cggacaggacaggactgacgcagtgtcaatcaggtctgcaaaggtccccacggagatgtgcctgggaagtgccaaacaggaagtagatgaagacagtgtagaaggggctatagaggccaaacacggtggggcaatccagccaggagggcgtaggccaagccctgcggaagctgcatgaaggccacactcaggccggataacaggtcacccaggagccagtcacgcacaggataccggggtaaccagaccaaaaccgggaggtgttggagcagaagggcataggcccgagcacgggagcactgcaaccaggtccgccactggtgggtcctaggtgctgagccccagcgccccagctcctccaaatgctcctggttcagcagcggccgttccatgtggtagtctcgcctccgcaggtccattgcttgtgttgcagacagcagtgcctgtgtgtccctcggtcccgacgcatccgccagccccatggctcgcaagttgtccggtgcgggctgctcctgctgctcgagctagaggccgctacgctccccc

SEQ ID NO: 431898 - DNA, 536 bp, Homo Sapiens
ttgagcagacaaatctttattcctgaggctaaagtatgcaccagttccctccctgtaccgcgccactgccagcctgactgcatgcaggccctgtcccagacctggagcgctgaacttggagtcccaggacctccttccctgagttgtgtgtgtgtacatggaggggactcctgggtagcacctggaggcggcctaggggtgaggggcttctcaagggtgccctgcacctccagaggtgcagtcttgggcaggatgtagcatgttcagagtctggtgaccgaaacagggctgtcggggacaggcctcgggtgttggagggcaaaggtgacagcatcatggacagaggcaaagagatgcttcttggtgatggatgcatcgaagaagtgcccagcctcaagctggctgaccacagggctgtggcaggccgccatgtacacctccacctcaatctcccggaagtcatggaaaatattcttcaggctcttgaggcacacagtgtccacaaaggagagggcacccaggtccaggatgaggct

SEQ ID NO: 431899 - DNA, 1312 bp, Homo Sapiens
ttttttttaatgatttgtatattttattttgactttacatgcggtgttaaaaacccaaagtacatattatttacacatccacaatacaagtttacaaggtatctattcatgttaaagtactctataaaacagtatagagacacttcacttgagggttactttttatgccgtaccattaaaaaagatacaatctgcgtttacctttgcacaaatggataaagcatttaaaaattaaattaacaggatagagactagatttaatgttagaaatttcaacataaatactgattgaactcacattacaaactacaaggaagcacaatgttacaaaatgttatctggggtcacatagagttactgttctgttttacacacgctgggattaatattggtaaggtgaattcaaacacgtttgttgttggtggactgagtagtgtttatcattggttggtttaatttattattaatctgtaatattttagttgcaaagctgaagtgtttcaagaacagaaattttagctttagcgcttccagagatcactggaaatcacgttctttataaaacaatgttctttaaaaaaaagaataactgtatcagtatttcacattctgtatacaaatgatctggtcttcggcaacatgtcctcccccaagtaataggtaccaacagtattgtcaaaagaaatccagttgaactcatttgcctgattacagcaggagcatacctctgccttggtactttctagatttggttcactaaacaagtgtgtggtgtgcagcatattaactgaaacagtcagcagggttgcgcatcatcagccgtaagtggtttctgccaaactacgtataaatgacgctctatagtttctgcaggtgtcacattacccaggaaacctcatttgagttcacattatcactgtttcatccttaggaaagcaggagtggaatgtttatcacggcaaagaatgtaatgctgctatgaggtcggattatgtaacaaataattgtcctaggttgtttctgtgattttttgaaaagagtctttttaggtgctggttgaaaaacatttacaactggcactcagtaaataatgtgctatactgaaaacacttgacagattttagtacttctatcattctcatgaataaggcacaaaatgcacagattcaggtaaactcacatgtggtatttacagtatattgtcattacctgcatgacttaggagaaaattctcacataacacaacacagacaacatgattgcaccactgttaggtttttacagactgtttctgttaagccaattacaattc

SEQ ID NO: 431900 - DNA, 939 bp, Homo Sapiens
  misc_feature (515)..(515): n is a, c, g, or t
catttccaccgtagctaagggacatttgcaattttggaaagatgaacctctttggcttgccttgcataagtgccgggagtgctcagcagtgccctgggacccccccatcggttttcacactaccacactggggccccttaggttcagcacctcttccctcacgggcttgcaagtgcgctgcacatcctcctgaagctcaagactggctttgcaggagacacctgctgcctctctgattccatctgtgctgccaggaaagggcattggcttgcagtgcctggcttgtggcaggcaaggggtgtccagacggaagctgtgtgccatctggactctgctgggatccatcaggagtctgttggaccttggccttagcagttttgtctttctcactggccggaggggtttctttgatctgttggtagtgtactgctgcagtggacatgcccgaggggctggcttggccccacttccatcatcttggggcagttttgggccatataacaacagagatttgncctgctttctgcagaaaggcctgggggactcgggataagaatgggcagcggcgaacaacactctccatgttcaggaagtatgctggctcctgtggaaagaatctaggtggagaagaagccactcatccatccaggcagggaagactcttagggatcctgactttctcctggtccccacatcccctaaacccgaggaaggggtccagcagggtcccgagtccctgaagcaaggattcctccgtggtcgtgtccccacagcgggaagaactgggcataactgcgctgaggactgcagaggcggcggcgaaggaggcgggcactcaagtcgagaagtccaaacgagacgctcgttgccccggacgcgtgggtcgacgatatcccgggaattccggccgggaccacctgtgtttacaacggttaatca

SEQ ID NO: 431901 - DNA, 2592 bp, Homo Sapiens
  misc_feature (2201)..(2298): n is a, c, g, or t
  misc_feature (2301)..(2302): n is a, c, g, or t
  misc_feature (2305)..(2305): n is a, c, g, or t
  misc_feature (2307)..(2318): n is a, c, g, or t
  misc_feature (2358)..(2369): n is a, c, g, or t
  misc_feature (2385)..(2432): n is a, c, g, or t
  misc_feature (2453)..(2461): n is a, c, g, or t
  misc_feature (2518)..(2529): n is a, c, g, or t
ggcgccggcgatcgcggcctgaggctgctcccggacaagggcaacgagcgtttcgtttggacttctcgacttgagtgcccgcctccttcgccgccgcctctgcagtcctcagcgcagtctttccacaggagccagcatacttcctgaacatggagagtgttgttcgccgctgcccattcttatcccgagtcccccaggcctttctgcagaaagcaggcaaatctctgttgttctatgcccaaaactgccccaagatgatggaagttggggccaagccagcccctcgggcattgtccactgcagcagtacactaccaacagatcaaagaaacccctccggccagtgagaaagacaaaactgctaaggccaaggtccaacagactcctgatggatcccagcagagtccagatggcacacagcttccgtctggacaccccttgcctgccacaagccagggcactgcaagcaaatgccctttcctggcagcacagatgaatcagagaggcagcagtgtcttctgcaaagccagtcttgagcttcaggaggatgtgcaggaaatgaatgccgtgaggaaagaggttgctgaaacctcagcaggccccagtgtggttagtgtgaaaaccgatggaggggatcccagtggactgctgaagaacttccaggacatcatgcaaaagcaaagaccagaaagagtgtctcatcttcttcaagataacttgccaaaatctgtttccacttttcagtatgatcgtttctttgagaaaaaaattgatgagaaaaagaatgaccacacctatcgagtttttaaaactgtgaaccggcgagcacacatcttccccatggcagatgactattcagactccctcatcaccaaaaagcaagtgtcagtctggtgcagtaatgactacctaggaatgagtcgccacccacgggtgtgtggggcagttatggacactttgaaacaacatggtgctggggcaggtggtactagaaatatttctggaactagtaaattccatgtggacttagagcgggagctggcagacctccatgggaaagatgccgcactcttgttttcctcgtgctttgtggccaatgactcaaccctcttcaccctggctaagatgatgccaggctgtgagatttactctgattctgggaaccatgcctccatgatccaagggattcgaaacagccgagtgccaaagtacatcttccgccacaatgatgtcagccacctcagagaactgctgcaaagatctgacccctcagtccccaagattgtggcatttgaaactgtccattcaatggatggggcggtgtgcccactggaagagctgtgtgatgtggcccatgagtttggagcaatcaccttcgtggatgaggtccacgcagtggggctttatggggctcgaggcggagggattggggatcgggatggagtcatgccaaaaatggacatcatttctggaacacttggcaaagcctttggttgtgttggagggtacatcgccagcacgagttctctgattgacaccgtacggtcctatgctgctggcttcatcttcaccacctctctgccacccatgctgctggctggagccctggagtctgtgcggatcctgaagagcgctgagggacgggtgcttcgccgccagcaccagcgcaacgtcaaactcatgagacagatgctaatggatgccggcctccctgttgtccactgccccagccacatcatccctgtgcgggttgcagatgctgctaaaaacacagaagtctgtgatgaactaatgagcagacataacatctacgtgcaagcaatcaattaccctacggtgccccggggagaagagctcctacggattgcccccacccctcaccacacaccccagatgatgaactacttccttgagaatctgctagtcacatggaagcaagtggggctggaactgaagcctcattcctcagctgagtgcaacttctgcaggaggccactgcattttgaagtgatgagtgaaagagagaagtcctatttctcaggcttgagcaagttggtatctgctcaggcctgagcatgacctcaattatttcacttaaccccaggccattatcatatccagatggtcttcagagttgtctttatatgtgaattaagttatattaaattttaatctatagtaaaaacatagtcctggaaatannnnnnnnnnnnnnnnnnnnnnnnnnnnnnnnnnnnnnnnnnnnnnnnnnnnnnnnnnnnnnnnnnnnnnnnnnnnnnnnnnnnnnnnnnnnnnnnnnaannaanannnnnnnnnnnncccccttataaaaaaccccccgggggggccccaataattnnnnnnnnnnnnttttttgtgaggaaannnnnnnnnnnnnnnnnnnnnnnnnnnnnnnnnnnnnnnnnnnnnnnncgcgttttttcaaaccccgcnnnnnnnnnaaaaaaaccgcaccctggggggatttctttggagaagaaaaccccctcttctctgtnnnnnnnnnnnnaaaaattattgtggcaccaaccacccccctacacaaaatatttttccccgcctttcgggcggg

SEQ ID NO: 431902 - DNA, 889 bp, Homo Sapiens
  misc_feature (109)..(109): n is a, c, g, or t
  misc_feature (843)..(843): n is a, c, g, or t
  misc_feature (845)..(845): n is a, c, g, or t
  misc_feature (869)..(869): n is a, c, g, or t
tttttgcttggctacccggagtgaagcggccgggttgggcgattaacaggccgtggttaggaaggacggagaaggggcgttcgctcctttgggacttttcatgcctcgnttttctttcagatgtggcttggtctgggcgcaaggtcccagcagccagcttaagcttactcttctgtgaaaggggaaagtatcccctgtggaaagcggttaaacttgtggagggggtgcgggacgtgagttcttccccatgccaggcgaatggtgtggccttgagctggtccaggagccggctcgacgtgtctgagggaggccccggagggggcggggaggtggcccacagaacgcgggttctgtaaagagacgttgggaagattcgattccgagaagaggaagaaccggattgaaagagagccaggccgctgagggggagggggctgctaagatggcgtcggcctcctccgggccgtcgtcttcggtcggtttttcatcctttgatcccgcggtcccttcctgtaccttgtcctcagcatctggaatcaagagacccatggcatctgaggtgccttatgcctctggcatgcccatcaaggatataggccatagaagtgttgattcctcaggagagacgacatataaaaagagaacctcatcagccttgaaaggtgctatctagttaggcattacccacactgtggggagcctgagtacctaaccagagcgtgatgtccttatgcaagatttctacgtggttgagagtatcttctttcccagtgaagggtagctacctgacccctgctctatcactacaatgactttcgttttcaagacctatgcacctgttgncntccgctacttccgggagctatttngtatccggccgatgatactt

SEQ ID NO: 431903 - DNA, 439 bp, Homo Sapiens
ggcccacagaacgcgggttctgtaaagagacgttgggaagattcgattccgagaagaggaagaaccggattgaaagagagccaggccgctgagggggagggggctgctaagatggcgtcggcctcctccgggccgtcgtcttcggtcggtttttcatcctttgatcccgcggtcccttcctgtaccttgtcctcaggtaagcccggcagggcgtgggtagggagctggtgaggaatatgcgatgggaggaagagcgagacctaagagggtacctgtagctgggaatgtcctacgtgttaccggtaagtgggcgcgagctgggctttcaaatagggatttatgagcgggcaggagtttgaggaaaggataagtttgattaagaagttgtcgaaaactttggttgtctttgagaagtgcgcctagtgcgggatcctctaga

SEQ ID NO: 431904 - DNA, 931 bp, Homo Sapiens
tagacccaggaaggttgagctcgtgtgctgctaccttctactgagtgagcgaatatgactattctgtagcctgttgatgggagcctggggtctgctcgagcgaacaacaattgaggtgtcatcaacttggtccacagtcgggtcaggaggggcatcaggcgctgttgtttgtgaagtagacaggatcaaactctgctccccatcctcagatatctgatagacatttacaatgtattttcggccaggaagcaggtcagggatgttcacagaagtggctgtgcttggaagatccaggtactgtggctcatctccctcctcactcagctcatattccacccggaatcccgacacggtgtcggaagctgagacccaggagaccacaaagctactggctgtgatttcggtcacagattcagaagtggccacaagaggagaaaagggagtcgtctctcctgtcacggtgttgctggtcacaggtgtgctggtgctggtggtggtgaagtcaaagcgagtcacttcttggtggccgtactgctggatgctgatgagctggccctcgtataccacaccaggcttcaggcctttgatggtgtaggagtttaagtggcctggtatggtagcttccttccaacggcctacagaatttttaggtctccacctgagaatgtacttggaaatgtgagatggctgtggtgcattccactggatggggtgggagttgggctgactcggagtctcagtgataaatacttcgacaggaccacttgagcttggataggtctgtaaaggttggcaatgccactccccaatgccacggccatagcagtagcactggtatctgacaccatgcacatacttctcccatgaatctccaattttgataaaacgtcccagtctctgaatcctgggaagagtcagcattgtggtccgg

SEQ ID NO: 431905 - DNA, 1707 bp, Homo Sapiens
tagtttagtgtttgcatttattttaaaaatacacaaaatagaaatttttacatcaaagtgtgataacctcacttacacattgttccatacttacctggttttgtttgcatctttctgcaaacattaaaaggagatggatttgattctgatttttttgctatggttcatgtaaacagttgagactgctacataaagtaggttgttgtcaaaggtgaagtggccacagaatcccaagaatagaataattcaatttggtttaatgaaattggtggaggtcttagcagatagataatccaagactaaatattgtcttctaggcattttaaaaattaagaactttgaggttttcttcatgttgtaaacataacttagaccttgttggcattaagtttacaaaagaaaatattaaaccatgatttttatcatcctgcccatgtcagtatacactctctttattatgagaatgaaaccaaataataagcaaaatacatcaggaatttcaaattgtactgcaaagaaggtcccagctggtctcttctgggagtgatctaactaacttaagctgaccctgtgactggctgaggataatcccttctgtccactgcaccgtgcaatgccacaggtcatgagatggtcagttcctcttgctctgtgtcgtctgaagcaagtcgaggccctacttctggttccgcccttcttccttgggcttagatttgctgggttagtagtttgctactattgtcaagactgtactgtccctttaaggtaccacatgccaccatagcttacacagcagtcctttagtactttatccacctcctgtttactgagatcttctccacactcttgagtcaaccgagactggatcatgtttcggcgtacccggtaatttttggaaaaaatttcaagcaaaacctgtcgatgctttagtagcaaaaacacgttatgatgggaaacagtgatctaaaaagagaaacatccccaaacaagacacccaagccatgcacctgactttgtgttgcagtctctgataaaaaccctcacgcagcacctctggttaaagatgagccaagtcatctctagagacccagcaagacagtgtacagaaataaaaacacaaaagtaaaggcattaatgctatgtctggaaacttgaatataaataaaaacaaaggtatatgccagcataacaaaagaactggtgaagagacatgagaggatgagtggcttgaacatatttctgcatggtaaaatgcaggcgtgcatcggacttagcaagcaggtgaagcgacaatctaagctgcacggagatgagaagaggttgtcaaaattggtgtgaagtcttaatgcacaaacaatgccactgcatccatgaaacaggatgccgttagatacgttacacccccaaataaaaatggaaaagattggattcagtatgtctaatatctgtcataagaattctgtacattaccttaataagttacaactcacaggattttataagaactcaattgtctagtacaataatgacccgcaccagggcacagctgaaatggcactgactgatatacagaataatgaaaaattctgcagtttggcataaaggaaagaatacaggccaaatttaaaagaccaagaaggagaatgttatggaatttcaacaactctgaaaacttaaacaatggaaactctcttaaagatgcttcat

SEQ ID NO: 431906 - DNA, 1090 bp, Homo Sapiens
  misc_feature (1087)..(1087): n is a, c, g, or t
gtacaaaaaatacgtatgccggtacgtatgccgaagcgtgcaaaaattaacaatatgatgtaggcacctagaatacggaccatattataataattatccattaatttttttctagttaagcttatgcctctactttaaaaaaacacaaaataagaatattttacttcaaagtgggataacctcacttacacattgttccatacttacctggttttgtttgcatctttctgcaaacattaaaaggagatggatttgattctgatttttttgctatggttcatgtaaacagttgagactgctacataaagtaggttgttgtcaaaggtgaagtggccacagaatcccaagaatagaataattcaatttggtttaatgaaattggtggaggtcttagcagatagataatccaagactaaatattgtcttctaggcattttaaaaattaagaactttgaggttttcttcatgttgtaaacataacttagaccttgttggcattaagtttacaaaagaaaatattaaaccatgatttttatcatcctgcccatgtcagtatacactctctttattatgagaatgaaaccaaataataagcaaaatacatcaggaatttcaaattgtactgcaaagaaggtcccagctggtctcttctgggagtgatctaactaacttaagctgaccctgtgactggctgaggataatcccttctgtccactgcaccgtgcaatgccacaggtcatgagatggtcagttcctcttgctctgtgtcgtctgaagcaagtcgaggccctacttctggttccgcccttcttccttgggcttagatttgctgggttagtagtttgctactattgtcaagactgtactgtccctttaaggtaccacatgccaccatagcttacacagcagtcctatgagagagaaacagggtaagcacagatttttgcaggaaaaggagctaattacattctgtccacaatgtcaacactcgatttatgattagtgaatagaatacaaatgggaaatcaaaaactgcctaaccataccaccatggctactaccagccaccctttcctcaggggtagtnttt

SEQ ID NO: 431907 - DNA, 1220 bp, Homo Sapiens
ttttttaacacatcgctacacatactttatttgcaattcagtaccatgaaaacatttctctaagaggtcaatgtaataatcttttattgatataggaactctggcactgaaagcttgaataacccaaggtaatgatgtcgtcaccaagggaggacaagaatagaacccaaatcccttgactcccaagcttgtgttttccattaattgtgctcctttctattcatccaagagcatcaagtgtaaaaggctggagaaaggagtggacacaaatgagccaagtccgcaaggtggagactgcactgaaggtcctaggaatcgccccttggcactttccttttgtgttggctgaggaagatgaaagcagcaacaaccacaaactcctgggaccaagaactggaactaggtactgcttgttgtggtaactctcttcctcattttaggcctttcctttttaacctctccttccggccaagccttcgcgctctcttcccctccctcggtttctatccgctcccgttagctccactccgcacattcctgcaaggtgtcccggttaagaggaggcagctgcgccgcactggctctccaccctccatccggccctggcgcccagtcgtcaggtgttcgagaggttcgtagcgtcacaagcgctctcccaagttagctctgcgtgggtctaggtagctcgtcacgacaaagcaaaatttagacaagcgttgagactttccttctagctccgagtttcacagctccgccatcccctgagcaacctcccactggagggcgccttccggagcgcgcgtgtttacacttttgctacaccaggcggaggaaacaagcgctcgctgaccccgggggattccaaaccgttactccgcccgccggggtggggccagcgcaacgccgagcctgcgcagccagccggctccggggccccgcgcactacaagtcccagaaggcagctctccgcggggcgggcagtcgccttatctgcttctggctcatttttaccactgctctccccttccccggtcccctggtgtcctttccacagttaaaggctactttctcttgaagcacatgaggagaagccttagcaacctcaataccgaagttcttcgcgcgctcgctctttctgcctccgcccgaactatgcctgagtccctcacaggagttgggtagtagaggcgagagaaggaagtctttgcaggccaaaattg

SEQ ID NO: 431908 - DNA, 1945 bp, Homo Sapiens
  misc_feature (197)..(200): n is a, c, g, or t
  misc_feature (205)..(205): n is a, c, g, or t
  misc_feature (210)..(241): n is a, c, g, or t
  misc_feature (245)..(247): n is a, c, g, or t
  misc_feature (249)..(249): n is a, c, g, or t
  misc_feature (254)..(254): n is a, c, g, or t
acggaagtaaaggtttctttccccaaaaattcccaaggttaggcatttttcccaatccaggcggtggtaaaaagggcgggccaaggcccaagctattaatgcggctccctattaggggcccccttgttccaagaaaacctgggtaccgggtaaacttgggcccccttgagggattattttagaggggccggcccccnnnnggggntgggnnnnnnnnnnnnnnnnnnnnnnnnnnnnnnnngggnnntntggtntgtggtgtgaattatgattctttattctgactggtgcctatgaaagcaatagggaaacatgtctactaagtgagttttgtctttttccacagagaaagcttggactatatttctggaaggcacccactgtggggtgctgcttgttctgtggtgttgctgtgcagcggccgggaggagcagagggctgcaggagaccctctgagattctgctttgtgcacatgtactgccagcgcatggcattcttgagcccataaagcaagacttctcaggccctgtggttagcatcccccacacccatatcagccactagcattttaaagatggttttaggtgggtacataagggcccagaaaaaaagttttacaattattttaggggcctgaaccctcatgtcatagctaatcagtgaatgaagttaccttttaatccaagagcctcatccctgttttcttggtactaaaaactttcaccaatctgaatcctagtgtcatactctaaacacgaaccccacccatcccactgtcaccagatggagatcttagacttgcaggcttccagtagggattctcctgatgagcgtgtgtaccagtgcagctgggcacagttgggaacagcaggctggtcttcaacacctggcttcagaggcagggtgggactccaggcgcttgcgcaggtggttggcaaaatccacctgggtctgggacaggacctggttgatgatgctcttgggcagccaccccttgaggtcgatgctgagtagccacgtaagtttggtcttagagggacttccagccaacgggtgaagcaccatgcaagtgggaccgtgctccgccctgatgacacccttctgctcaggcatgttcccgaagtctgtggccatgccagccagcacacaggtggagcctcggcgcttggcacagcgcacgctcacaaagtcacggggccccaccaggtttcctgctgcctcggcagccagctcgtgagtaatgaatgtatcttttccgatcttctgcaggaccttgatctccttgacattggggttccactcccccattgcttccatgcgctccacgagctcttcatagagcctctccatgggctggtccaccacgacctccagccggaacaccttgcccacatctgggaccactttactcatcactttgtccccattgtcctgctgactctccttcttccagccctcttggttgctaaggatgcccaaggccttctgcatggcctcctccccctgctggagataggccagctcctggtcactgtagagagtctcttccagccgagaaccgagtagagagctccgccgccgaacctggttaatccacgtgctaggggtggggccccccagggccctccggttcagctcctggctgatggccatcacagcctgttgcctcagccccttcatgttgcgcatgtgtctgtaggagctcccagcgcacagcttgaatgtcgctagcagcattgtttcctggcaaatgtggcagtggtggggtcgctgccgctgctgctgccgccgctgctgctgcctcttctctcaagggtggttcttcgtccttcctgagcccctcaagcttcgcctctgagtcccgcatctgcagcctggacctggtgttctgcgtcttaaatgtcccccgctgaaggctgtgcatcatcatcaggagataaaaac

SEQ ID NO: 431909 - DNA, 1551 bp, Homo Sapiens
cagtgtaaaagttatattttattgccatgctacaaaatgtatgaagttggcactgatagggagaaatagagaacaaagggtgggaagggatagagggaaaattatgttgttacatatacaacaaggttttattttaattaacagtggttacgttttgccaatattaaaaatgcaaaccaaaatttaaaatgctgatctgaaacagcattaagatacaatgtatgcatagtacagtatcacttatgtctttttattagagaaatatggaatgtttataaaagaaattaaccatgggggtaaaattcatatttcatatacaatttggcaatggtagtcccactgttggacaattttttataaaagaaaaaattaaaaatctaataagctacctttatacaaagttgctatatttatgcctttacgtaggaaaaaaacatttataatgcaaattaggacatacaatagtcttacaatattatacaatgtaatgaaaataaaacataacacaaagtttgtcctttataaaatgtatattttgcattactaatgcaaatgtggcacactggtgactactgtactatttataccagtctgtttccatgctataactgtccaattgccatagaactgcaattataatgatgcttcaaaagaactgtgttataccaaaaatgaggaagtagggatggggaacagggatgtaaagaacaggaaagatagatagggtgctggttgggcagagtatactgtggtacgtcataaaatatgttaatttttcaagccaaaaacattttctttacattctgtaatttcgtaccaatgcctttattcaaatttggcaaacatcaaggaaaaggtaattagtaccatatacctcacacatcagaaatatgaatgagatgccaatacatcagttacttgtgaatgatgtctctgatggtatgtctatttcaagaatatatgtatttatacacacacactacacattgcacaaaacatttgggcattataggttaggaatagcacgggggaattgggaagtactttttcatctgttaaaacctttaccttgaggcaaaaatatggcggcacattgttgggaaattatgaaaacataaggcccctgtcccatttttaatagaacattaattgaggtacatttttatatgctgtgccacagttttggggagggggaggagataaacactagccttgacttgttctatttataacattgaacgctggagagggtcaacattagtatctataaaaacaaagattgcttggcaaattttcctaagtcccagatatgatgtattctggatatactgagaagtgaaaagctttttgctgaatcttaaagagtaaagtgcatatctcatcactccacagcagcagtaaataaaaggaaatatttgccagtcttcctggagggagggaaggcaccatattttcatttttagaagaagatgaaactgggaaataaaacacactaagaaaaaacacaagtaataccaatatcagtttccaaccctagcatgggatagatgc

SEQ ID NO: 431910 - DNA, 1006 bp, Homo Sapiens
  misc_feature (277)..(277): n is a, c, g, or t
  misc_feature (981)..(981): n is a, c, g, or t
  misc_feature (994)..(994): n is a, c, g, or t
gggcaaggacaccaatttgggtggcttctccagccatcacatttagttcccccaacagtgggcaaggccacccccaagctttttttcaggtgaggccaggcaggagtacagctgtcccctaccagtaaagggtgtaatttctacccctgacagtggagaacatgcatcttgcaaactgtcagaggcagtatccttttgcttcttctcatcttgagcaacttacatcccagggaaggtccacatttgtagggcattttacaaaccacatcttgaattnctgcagtttcttccccagcgtttgacatttaggcactgcctgtgttaacggattttctttttgtacacagcgggcattcttcatctcaggactccacttaaggctggagccacagagaaatgctgaaggaccttctaaggacatgccacctgaacaggaaacagtcaccttctcaccaactgtgtagaaaggtttttgggggtgactctgtatgccatccatcagtacaggtagtacacaggcaattttctgacaatgcatttccccaacaagccaccgtaaatcttctccacatctggccactgggtttccaataagagagtatccttcattgcaagtgtacactacatttttccccacaggaaacattgtaccttcatcttgaacaaatccatctttcaaggcaggaggtgatggacagaattctgttggaaccaaagacaaaggaaagcaatgtggttcaagcaacctcaagtgctccagctcctcatcttcgcattgtgtgctttctgtcgtttctccaacgcaggatctcccacccccactgggaggtgggttattgcattcacggcttcttgttttcttccccttggacacaggggctccaagaggaccagcaactccaacctccatcaacccctcctgcttgattccctacgaggactccttgctcacacgccgcaccaacccttctgtcgtctttntcgcagcatagtngtagtaggcgaa

SEQ ID NO: 431911 - DNA, 1812 bp, Homo Sapiens
gaggtacagaggggtattttatctagagaaaaacacaagaccaggtttatttcatacaatgttattcatacatttttcattttctaatttatacataatatacaaagaagtgaagttaacattatttcatatgaaccaataagagccaggacttagacaaactggtccagaaacaatccctatcaaaaggagacactcaagagtaaagcctaggtagttttgcccaattgttttattctgaaatgtgattttcagattttaccaaaatttcatgccaacttactaaaaggtaaaaattggggtgggcacccaaaatggcagactgtaaaatttctacaagaacaggtacttttgtagagcaggcctgaaagtattgggaagattgggttgtcagcactgggacaaatggggaatgagtatcaggaccccaagaagagggtttagtttctcaatgtagtattctctacttgtcattttctaaaattgcagagataatgcctgtgccaacagagggcaaggatgaaggaagactaggaattcaactgtacaaagacaggaaagccattaccaatctccaacatgacagctttgatcctgaaaccatgggctgatactgagaacaaaagttcgatacgggccgaaatactctgaggttggtaaagtaggaaaaagtgagacagcggctttgtgtgggttttaaaaaaatgaaacaaacacaaggcgttgctgcagtgactgggacatgctgatgacccagagtgactatgagaaggaacggtgacaagtgtttggatttaatggtctcaccaaggaatgttgggttagaaaagtaaaataactcaacaccaaacatgaaaaagtatgcctggcatccccaaactttatgccattatttttaggttcataatatgaacaactaagtgataaaacctttagattccatattgtgctcagaagattgcgtttcttctgcagatctctagtaaaaaaagatctcttccatattcagctgacagaatagcatgttcattttagttttcagcactgaacataagtgggtcaacataaatgtttatacaaaatactgacttcaacaaaatacaaagcactttctttatctttcagaaactgaatatacacagcaagtttttttccaaaatattttcataggcaaaggattaaaaacgattttaattatacacatatggtcacaattttgccttaaaaagattgttgggaaatgtacataaggccgcttgtaaatgtacatcgtgttactgttatgtcttatgtccagaggaaaaaatgttatcatacagatttgctcttacttgggagtaggctattcaaaaatacagtactcttctgtacaaagaaaaaagtcacatcacatttaataagatgaaaaaagcattggcctccatggtaaccaaatatctcagtccaatactttctattatgcacaataccctgacttcaattgaaagtgatccaaattctagcaggtccatattaacagtcaacaactatgttataaaacaaaatgatctcacaataataaaaagaaagctggttcatacttctgaaaccatataaagataaaaaatttttaaaaaatcactctcgatttggagaaataaatttacattatacaacactatattgccaggtcaaagagggcagggacgtaaatgtacactaaaatgcaaatgtatcccaaagagataaaacaaattccatttacagcatgaaggtttacaaatgtacacctgtacaaccaaggaaagcatcactactaaattagcaaggctt

SEQ ID NO: 431912 - DNA, 1050 bp, Homo Sapiens
cagggccttgctgggcttctctggtcttttcattggcttcagtgatggtctggtgatgggcaggaatcttccttagtgcctcctttgcggccgtccttgttatcgttcacgcgcctatcaaaatctttcaggttgttgagaatgtcattagcttcttgtaaggtatcccgtcccttctttgcagcttcttcagcgagggccttggcagcatcagctcgggctaggagttggtctgcggtctgctgttcagtcttgcctttctccagaaggttcttgacttcaagttccttccctctcatatcttctctgaggtcctcataatcttttaatttctggtcaatcagttgttccagattctcagcttccatctttatgttatttgcttcattctccagtgtctcagagtccaaagggctcagctgagccacgctggcatagatctccacagctttgtcaccggcccttttggcctcctcatgtactcgggcagcttgtttttccagatcctgtgagatgttcttcgcttgttcatacttcctattaagctcttcaatctcaaatgctgtttgattttctcctgccagtgtcctcagaagcaggttgtatgcctcagttgacgtatcattggctgtctttgccactcgaacaatgtcatcagcttcctgtttatgacgttcagcaagctttcgagcctcttctgccaaaagagtcatgttgtttgggtcccctgtagattctggctgagtgactgacacattggcagcagcgacttttgctttctcaagttctctggatgcgatttcaatcaaccgctctgtgttctctacatgggcacgcgctctgttcagccaagtttccagtctcttcagtggtattccggatattctgtaaactgctaatttggctggacagagtgttattcactctctgtaggcgatccatcaaattctggtcaacatctttgacatcctgggcctcacgaaggaggtccataacttccctctctgcttcctttattctatcctcgaaggcttgatctgtcaccatctc

SEQ ID NO: 431913 - DNA, 983 bp, Homo Sapiens
  misc_feature (895)..(931): n is a, c, g, or t
ttctaggtcaccagtttgttaactttattattcagagagcaccttgcagggactacgcacaaaataggcaatcactaagtatttacagacgaaggcaacttcaacttccttattgcatccaaaagcaagggcactaaatggtgtaaaagacttcaaatgcagggaaagacaatacaacggtatttgtcctgctcctagggcaaatcaggaaggaaagaatttccagggtctagggggaggctcaaattgaagagagtacctaattcacaacaaaaggccaagttctgttcagaggattttatttcaagataaatcataacttctacccatactatgattccaaagggtgaaaaaagtgttttgcctcttctaccctccaaagagggcatggcaatgccaatgtctctaaaatgcctctgcatagttgtcagaagctatatttcagtcattgaaaatacttgtccattttcagctgaggtaaggtttgttaggaaacctctgtaacaacttattcaatttatttggaagtaaactcccagactctcccagggtttcctgtattgatctcatctttcgggcttcctgagccctcgcggcacaatcgaggaagccctggatctcttttctgcacgcatcgtcgcggaattcattctgcttccagcaagccatcatcaccgacatctccgtgatgcaagtcgcctcgcccttctcccggcgccgctccccgacgcggttagctagaatgagaggtttattggcgcttcagcacaggcttccgcgggttcccttaccgcgccagacgaccccgcaggctgggtgtcgccatagcgcaccaagctcccggcaggctttgcccgctctcgacgaattcgagctcggccgatttggcctgatnnnnnnnnnnnnnnnnnnnnnnnnnnnnnnnnnnnnncgccgccccgcgttaactccaggcgcctatatgagtgtagtacatcgccttt

SEQ ID NO: 431914 - DNA, 1984 bp, Homo Sapiens
  misc_feature (1246)..(1246): n is a, c, g, or t
ttttaccttacagcttgcgtatttattgaacaaatactactaaaatagctaaaatacattgggtacttgtcatgagtgcatcagtaaagatcacactgttacaaaagcctgcattttcagcagtacacaactgcaactctacataaatgccacagatgcagaatactgttttcttgctctatttacacagctgatatacctattctaacgaaggagggagaggagtaatgcacaagaaactcaggccaatgggggagcaagaagaaaacgaagaagtgcagtgcatgcgtcatcggtgtttaacagtcagaagcgaaacagttcagaacaaggcctgccctgtcaaaagaagagctaaagacagttatataaaaattaaggtgggctttcagactggctaacacaacaacattccatgagtagatggtaatttatttttgtttatccatttcgttgggagcaaggacaaaaatgtaaatctacaccttgcttatcaaaattgccgaaaaaagaatgctctgccttttaaaaaagtatcatgattttgtagaccttgttttccaatttaatatttggaaaaggtgtcattttcatattcctactcagatgccagtgttttgggtttttttccagggggagtttatttaaaacggttttgctctttttttcgacaaatatcctttcaaacagaaagaacccaaagaaagagacacctcaaaatgcctgtaaaattattgcttttctttctctaagtcaggcaggcgaggctatggaaaggaagagatttggtaagtaaattacagttttgtgattgctcccgctaccgtgactgcatgtccgtgagcgccagccaacgagacaatggtctctcacactctggtagcattcgctcaacctacaacactgaggaagaaagccacactgaagacacaaggaaaacaagtcaatccagtctagagaacaacattcagggaaacagagtaccaacaccttcttagaacatggaaataaaaaataactccatcagagctacctcgccaaggagcatgttgaaagtccaaaatagcaccattcatcagtgtctcaggtcctgtggcagcatctcggtcacttaccacaaggaaacaatgagtttcaaactacttctatacatcaaaagagtacatggataaaatatagagatatacagacaattgatgaacataaactactaggtttgttacatctaaatgaaaaaaaaggtggnggggggggactctcagcctctgcaagaagcagtcgggagctgtgtgagtgaaaaggcaggagtggaccggttgtgtgagcgcggtgggagtttgagttgtggaagacattgttgtagcgaaccaggcctgaaggcccacctgtaagggttgtaaacgtggattcacagtgtgaaattctgagcgttttcacttgagtcagaatgattaaaaactggtttgatgacacctatttgtccactgtaaattctctaaagcaaggctcagagtcccatagtttcttcttatacttgatgatttacacagaaaaaaatcccatatatgataccatgacctcatcaatacccatacaccatatgtaatacaaatggaggtgttacgattaaaaaaagtggaggtaactgattcttggggagcggagttcactgctgcccagtggagtcagggaggcagcgtttgtctcatcgttcttcttgcggttcacttcctttgggacaggaagtcttcccttaggaagccttccctccatgtccttgtttggaaatggttcttgactgacccagacaaagagttctgggtaataaaccattttgagaatcttagtcttgggcttctattctccctctcttcagtccagggagaccaacagacaaaagccccgctccctgttcactctctctcctctctacacctgaaacacaaatgtggttgaaaaagggcaacatgctagaaagacagat

SEQ ID NO: 431915 - DNA, 717 bp, Homo Sapiens
taaaatatagagatatccagccaattgatgaacataaactactaggtttgttacatctaaatgaaaaaaaaggtggggggggactctcagcctctgcaagaagcagtcgggagctgtgtgagtgaaaaggcaggagtggaccggttgtgtgagcgcggtgggagtttgagttgtggaagacattgttgtagcgaaccaggcctgaaggcacttgagtcagaatgattaaaaactggtttgatgacacctatttgtccactgtaaattctctaaagcaaggctcagagtcccatagtttcttcttatacttgatgatttacacagaaaaaaatcccatatatgataccatgacctcatcaatacccatacaccatatgtaatacaaatggaggtgttacgattaaaaaaagtggaggtaactgattcttggggagcggagttcactgctgcccagtggagtcagggaggcagcgtttgtctcatcgttcttcttgcggttcacttcctttgggacaggaagtcttcccttaggaagccttccctccatgtccttgtttggaaatggttcttgactgacccagacaaagagttctgggtaataaaccattttgagaatcttagtcttgggcttctattctccctctcttcagtccagggagaccaacagacaaaagccccgctccctgttcactctctctcctctctacacctgaaaca

SEQ ID NO: 431916 - DNA, 1296 bp, Homo Sapiens
tcacaaagaagtacaaggatatttattttatagcattattagtagtaacaaaagattggaaagcatctaaacatacagcaacaagaaagggctaaacacattataacacatttagaaaatgaaacgatttaatcattcagaatgattaagtagaggcagttccatgttaatcacatgggaacaatttccaagaattttcagatcaggacaatgggcatagggtgttatcatcctgaagttatttgaaggatccttgagactcttttggattgctgcttggagaacattcctgtaacttgtccctgctccttgaacagactgcttgtacttctggatttttgtcttcaggtctattctgtggatgttctttaggcatttttctaataaatccagttgatctggggcaaccagatttagtttctccaactcaaccacaaggtccaagaaactcttctccttgcttatcttgcctcggcccatgtaatccttcatgaggaaaattaatgaggacacatcagatttatccaaatcctcaccaatctctgccatcagcactctatagtccgaaacaaggtgagggttcctgagcaggtgggtctccacagcttttctgtccatcttcaagatacgtttgagcaggtcaaatcgcctcactctgtagagcagttcagccaagtccccgacagacagcttacctctttcccgtaaaatatccagaaggtccctgacattaggtggaaccacatctatagcaacatcccggcacaaaaagagcagcatctccttctcatctgtatcaagtgcttcttcaacctgatggatgacttcagcagacatcctactcttagactagggaagctcacaagggtcttgcagtacagctccgggccagtcaacagaaagccagcaggcagtcaacttcatttctgagggctgacttcatttctttcagaatcctttccagtgggggagttcgtcctgtcgcggccggactctcctgccgctgccacctcagccttcgctcccctagacgccgggaaggcgcacccaagatggaggcaaagaaaccgaaagcctggaagcggacttggtgctgggcgatcgctgttcgcggcgcttctctcctacacctcctcccgtggtccttgttgtctcagctgtcactggacaaaagtccaatagccggcactcactgtgtgaggccgagtccccacccctagctccgggagtcccttttagttgagactcgtcggtgaggctgcaagctcgctgtttcctgctatggcttgtgtccca

SEQ ID NO: 431917 - DNA, 498 bp, Homo Sapiens
  misc_feature (28)..(28): n is a, c, g, or t
  misc_feature (56)..(56): n is a, c, g, or t
  misc_feature (82)..(82): n is a, c, g, or t
  misc_feature (113)..(113): n is a, c, g, or t
gctcggggccataacgggccaaaatggncccaaaaaaacctggggaataatacccnggccaaaactgaagatgccaaagaanttccgggaacttccataagcccccagggaantgaaaggtgtcctcgaaagaaagctctgtcctcaatgcccaatgccaatcgattaatccaggcagattccctaggggcttgctcttcatcttgtatctctcttcaggtatgctctgaggcaaaaaagcttctgattcctgaatggatttcttcactggttcttgttgagcgccaagctgttccttaagtctttgttctttacttctcccattatggagcctgaagttatttgaaggatccttgagactcttttggattgctgcttggagaacattcctgtaacttgtccctgctccttgaactataaaagcagaagggaggtactgagttaaaacttacaaattattatcaaataaatcttcaatagtggttcagtccaaggtca

SEQ ID NO: 431918 - DNA, 600 bp, Homo Sapiens
agtctagggcgtgcgctcatctgtagctctcttaggtatgctttgaggcaaaaaagcttctgagtcctgaatggatttcttcactggttcttgttgagcgccaagctgttccttaagtctttgttctttacttctcccattatggagcctgaagttatttgaaggatccttgagactcttttggattgctgcttggagaacattcctgtaacttgtccctgcgtccttgaacagactgcgttgtacgttcgtggagtgttttgtcttcaggtcgtatgtctgtggatgttcttgtaggcatgttttctaagtaaagtccaggttgatctggggcaaccagattgtagtttctccaacgtcaaccacaaggtccaagaaactctgtctccttgcttatcttgcctcggcccatgtaatccttcatgaggaaaattaatgaggacacatcagatttatccaaatcctcaccaatctctgccatcagcactgcccgggcagccgccggctcttcccactggatctccgccgggaccaactcccaccctcgccggacaagctcagacctgcgtgctccccgcaatgagaagagtagggatcctc

SEQ ID NO: 431919 - DNA, 341 bp, Homo Sapiens; identical to SEQ ID NO: 408865
  misc_feature (182)..(212): n is a, c, g, or t

SEQ ID NO: 431920 - DNA, 1841 bp, Homo Sapiens
  misc_feature (1765)..(1765): n is a, c, g, or t
gctgggcccggggggctggtggctggcaaggaggagaagaagaaggcgggcggcggcgtcctgaaccgcctgaaggcgcggcggcaggcgccccaccacgcggccgacgacggcgtcggggcagcggtcacggagcaggagctgctggcgctggacaccatccggcccgagcacgtcctgcgcctcagccgggtcaccgagagagtgtgcactcacctagttaggcctatcttggcctgcccatcactcctggcgtgcagtctcctaaccctgtggcagcagcaacattccctggatggatcgaaggctgccatggtgtctgctgagctgctatagcaggcagcccagggctgttcagattatttatgtaaacccgaagacaacatctacagtattgatttcacccgcttcaaaattcgagatttggagacagggacagtactttttgagattgccaaaccttgcgtttcagaccaggaggaggatgaggaggagggaggtggagacgtggacatcagcgcaggacgttttgtccgctatcagttcacaccggcatttctccgcctccggacagtcggggctacggtggagttcacagtgggagacaaacctgtttcaaacttccggatgatcgaacggcactatttccgggaacacttgctgaaaaactttgactttgattttggcttctgcatccccagcagtaggaacacttgtgaacatatctatgagtttccccagctttcggaggatgtcattcgtctaatgattgaaaatccttacgagacccgctctgacagcttctactttgttgacaacaagctgataatgcacaacaaggctgattatgcctataatggaggccagtaagtgctgcaagagtagataggggaggtgctttgccgcggccacaagatcctgggcacacggagatgatcgaagctgcagtttgtcaacacacatctgggaacctgggccccaggaagccaaggctggggtggcagtttcctgcgcgccaaaaggagctgccaaacagtgctgtgttttcttccccagtattttttcttccctttttttcctgccccgtaggttgcagaggtactatagtaaagtaaaaggttaggataagggtcctggaatccagataaaaaagtttattttccgtagttctggctgcctgttggttgtcttgacgaccaggcatagctgtgcctggtgagaaggctctggccaggcccaccagcaggtcagcagctcttaaggttcctgggtgctgtgggaagctgaaaggtaggcctcttccaggtagctcctcctctcacctccggcattgccatcagcgcagtctgccctcggtctgtgtgaagtcttaaaccaactggaagacacttgaaagggtggggagggagggaggtgccaagagtggaggcaccaaggaatgggtgatgctgccaagctgaagggtctgctttgtggagaggctgctgctctgtctgacttccagggtctcagccagccctcctgggaatagaccaagttttcagcctggcagtgccttctgttcccattttggaggacagacaagcttgctccacatctcctggctcctcccttctgagtctcatgaaatagaatgagtcagctctgctcatggaacagtagtatctcttgaggccagagcaggtcttgtattttgtttttttatttcaagacttctttcggggaggtttataaaatgacagtggtgttccagcatatgtgatangtggtagacttctgatagtatcagcttcaagggctaatctggcttatgttggggagatatgctacaatcagaagaa

SEQ ID NO: 431921 - DNA, 2406 bp, Homo Sapiens
  misc_feature (2372)..(2372): n is a, c, g, or t
ttttactgtgaaaatctttcttttattactgtctcatgtggcaaaataacattttatacaaataagtcacctagtttactttggacacaaagacaataaaaactggaatgtgattttgggggaagcgggaaggaggaggaaggacagatcaggtcattgatgtttcttatattctgtaaaaaatagatttacaggaaaaaaaatagactttcacaacttcaatgactttacacggtcctttgtaaaaccagtggtaaatccacctccaccaaatccttcttgaggctgatatgttctgtgacatggaatgtgagtaacacaatggttcaatgattaggctcctacaccaggtacagcagcacctgatgccacaggaatcctcgtgcactggggtgaggagtcagtcctgtgaatttcaggacacactgtcctcatccccagacctcactgacatcatagtgacactggccatcagaagaaagtgactttacagaggggaaaagagtatcctggaagcgtaccggtggggcaggacacactaaggcaggactcacccagtttgtacattagacacagcctattaaatccattccagaaatgagttccacttcaactgaaaaaataaactgaagattgcccaatcactgccatttcacaaatttccagtttatggtcagccccaaaatcacattcttccaccctatgtattggaaatcaaatggcccaaagactgaggtgtcttcaggaagcacatgcttgaaaaatgttttctctgcaaaacagtattgagtaatacataaggagacatagcctactttagcccaaaacttctttcacttgttatgtccttttacctcttaaaacatagaatgaaataaactcggatcttctttggagaagctagaagggcattttggcccaaaggctgtacaggaaaagagaggctctctccaggagactgcaaggcaaaggaacagaagcaggaggggcaggccctctggcaccaggtgggcctgctactctgatgaaatgtgctcccagctcttgacaaagggcagggtctcctatgcaggtagtttttttgccgcctcccattgtatcacccacaaggtaactgctatcaacagttcagattccttaataacatggcagcctgaatggttctgttactttcagagaaagtatgccttgcaattctctccccaactcaggtacaaacgcttgaatttcaaactcatactggtttacaccccagagtggaatgcttctcaagatttcctgagcagctagacacaggaacccacagccccagatacagaacaccagactttcagaagcagcaaagccctgtcctgctgggcatggaccaagcactatccgcaaatggtctccagtgagactaaggcaagctaacaaggaagaggatacagcacaactcaagccagattgcccacctcctccttcctccacatcctctttctagcaaaagcgaacactgcagataagagatagcccactaatgtagcagatacagtgtgcccaggggcatgtttccaagacacactctactaagcacagctctgggcagctccagaaccacatcccagataatactcaaatatcaaatagtagaaactgtcccacctgggcctctgtcaaagagagaagggattgttgttacgcttgacaggaacatgcaaatcccatttgaggagccacaatgagaaacagaaggtgaggagacagtgctaacagccctggcatctttctgccagtgaggaggtgggaacaatggcaatgcagctttcccctgcagcataagggacagagccacacgtaaggcacctggatttacagtggacgccagttctgagagtggccggtctggtgataaggaacccactccacaggaggaatggtctctcccctctctcggggctgaatccaaggccagcacacaggggtaagctaggaccttctcagtgagaaagctgccagcatgtggcattgccaagactctggcctgggacaaagcactgggccaaggttcggggccactcgccctaaagcccacacagggagcagcactggtggtggatggacaggaatttctgtggccacacactgtctcttccatccctggcccccatacggcctttctcccaagcacatcaggacactctcctgtcacaggtactgtgacacctcacagtcacttaccagatacctgggcctttcctagtgacatccttctactgatgctaactggaccctggccacatcaatcgtctcatcagagggtttgtggagtctgtccactaagggtctgaggacaaagcagcccacagatgtgcaagtgaacttttttgacnctcgtgccgaattcgccccccaggcctcgctacc

SEQ ID NO: 431922 - DNA, 1210 bp, Homo Sapiens
  misc_feature (904)..(904): n is a, c, g, or t
  misc_feature (1083)..(1083): n is a, c, g, or t
cggggttatagcacaagatggtcattcaaaaaattatcaactgcctggtcataaatgttagctgaaaatactattagttgtggtattacaggcgaaccaaaaggaaaatctctgtatttctcctcactgataaagtttccagcgacaaactgtggcaaaaagcagagataccagtacattcgagaccagtacaaagagattgaagacctagtcttatgaatatagatacccatttttatataagaaaaaaattacagggctccatatcacaaaatttaagatcttcctgttaaacatcacacaattcccatcatcattatgccctacatacactctaaattatgtagagtttctactgatatttaacaacaacaaggtccagaaatttaactaaaacagctgcagaactgcatattgggcagtaatctgtgtgtaccacaagagcttgggccaacacagagggccaggattctgcctccatggcctggactcctccacacacagtcagacgagtcaggttcttgcagaccttcaaatctccattcatatcccccttcaagagggccgttttcagaggtgaaggaaggagcagccactgggcacgaaacgccgcactcctacttcagtatgatatgatagctatcattggtttctgctttcattgtgtccagaataaaacatgcttcttcctgaaagttctgtatcatctcatcactgatgagcacatgaattcctgttggcccctgcttgtaaatctggctgatctggcaaggggaaatgctgaaaagctgagcaattttttctgtcaattcaacagctgttagttcttctagatagatagcatggtaaacgaagaaagtaccatttgagtctccatcctcatgcttctgctgctgttgctgcngctgttgtagctgctccctcaactgcagtgattcctgacaaacataaatggttaaccttggacgcaccatcccttccccaagagaaaaactgctatgggaactgttgaagccaggtgatggggagttattgacatacgtgatctcgggccatggagaacactctgtgagtatggttgtntcataggaaggctgatatttctccttttcatgaggtgttcgtttctccattttttccctatccgttttttgctttctgtctgcacctttgggcttgaaaactttgatctggcagctggccgagtgta

SEQ ID NO: 431923 - DNA, 1952 bp, Homo Sapiens
gacgaacataacggttaactttggacgcccatccggctttttaatgcattaaaaagtctgattccatctgcaggggccacagatttggatccacatcatctctagttcatttcaatacatctgcccttgagaagtttgtgaaaagccttgtgaatgtagaaaaacgatttggatgcaaccactgctgagcttcctgagggtgtggttgttggtacgaggttatctgtgactggagggggtggctctggctggtggtttggtgaaccatttccttccccaagagaaaaactgctatgggaactgttgaagccaggtgatggggagttattgacatacgtgatctcgggccatggagaacactctgtgagtatggttgtctcataggaaggctgatatttctccttttcatgaggtgttcgtttctccattttttccctatccgttttttgctttctgtctgcacctttgggcttgaaaactttgatctggcagctggccgagtgtaagtgctcagtatattccccgttttcattctccttgaaggtatctatttgtactcggaatggcacccccttttctccaccatgtttcctcatagtgaactctgtgctaatacagtgcacctgaataaacacagatgtcctctttgcagggtcccacaggaactccactgtatttagttgagttggattagccctaggatcgattatacccacagacatcgggatatctatgtcaagaattctgtctccaggtcggttccacctccagccctctagctgctgatgctcagtgtactgaagccttctgtcatggaacaccacacggaatatactcttcaccaatttgccattaatttctggaagttctccaagtttcctattgtctagcattcgaatttcataagactgtccttgattgagatacgttagggtttcatcatggagtttcactgctggagaggtagcagcacaaagcacatattgaaaaggcaggattttattctcattatcaggaggcaaactcgactcttcttgcttaaaaatgggcaatgcaaggacatcactcatgctataggcaccagcacccagttcctggccgatcccggacaggctagcatcaaagtcctgcaccaacccggattcaatcacttcgtcggccagaggcagcttcagagcccaggccatcctggctccttccttgccccaggagacaccgtgtcttgtacaaaggcgcggagggtaattctacccaacaggagtaacgcaaaccaagaaaactacaaaccaaggtttcccacgcagtgcccaccagccacccccaagcccgaccagcactgctctgtgcacaactaatctcccgtacccttggctgctcgttcttggctgccccaggttccaaaatcccccctgcccagctctcaggaacgtgaggacccctttgctcaactactgcagacttcccagaggcagctctggactcccgcactcccactcctcttgagagttcgtagtggtggcttgctgcttcccagtcagaccagcagcagccgcaggaagccagcccggcgctcccacgctgcttttgcaccttttcccccgcccctttctgctggaggccccctccctcccaggtctcgctctctctttcccctccaggcctcgcttccggtcagtcccacgatcacttccggtcaccccttctcaaccccacggcttagaaccaaatccaggtttccgctgagccgacttctcgccctctgtagccccccacggcctggaaacatggaaggagaaagtccagcacaggcgtaaaacctagactcgccaggcccttccaccgtccgccgccccagcgcccgacgcgtggtcgcgacgcgtggtcgacatatcccggaactccggaccgtaccagcctgctgtataaaccgggtttcatatgtcaccaaagca

SEQ ID NO: 431924 - DNA, 774 bp, Homo Sapiens
tttttaaaattaagacaagtttattgagtaaaaaaatgcatacattggaacggcaaaacatcaataaggccctaaaacaaaaaatacagttatgctttaacaaattcttagcaatgtggcccacgctttttaaaaaattgacgtgttggcagtgtttgttagaacattgacgtacatcccaaatagtaataaattcagtatgaaattatacgcataaccttactcaccatactactttttctcccaaactattgtgacttctttttgctctctgattaaaacaaacaggtaacatccttacacctttgctccatcccttgggctttaaaaagaatggctgtagttagttttgattcactatatactctctgtacttgaggaagagtaagctgtgtttaaaagtgcccttttccatgtcgtcatgtaccaataccctctgcatttgaaaatgttgactcagatgtttttccctctacagaactagaaaattgtccccccactttggtctatttactcatttgaagacaaacagggttactaagagttttacataagttatttctttagagtgacgaagtgttagtttacttcttgcttagtggagacaaaattgtgagataaagaggaaggaataggatgtacacatttacccatcaatatagcacccagtgttatttgagcaggacccttctgttagcatctaaggtaaggttaggacagtcaagataaaatactggatgttggccaggagcagtggctcaagcctgtaatccc

SEQ ID NO: 431925 - DNA, 464 bp, Homo Sapiens
agtaattaaaagtaaggatggcaaagtgaagctgaaaaaatgacaatttcacatccttccctcctttccagctagttaggaaggagacagaatttcccaagttgattccaagatcacacagtgagtcaacaacataggctgaagaaattgtaggagcaatggacagagacaggacccagcaggaggtaaagaggagacatattttccaagcactgggacaaatggaaataattacttggccacttgctgccccatcattgtatcaccttccttcaatcttttggctgccactctcatgtagggatccacggtgaggaacaaagcttcaagcaggacctctccattttttaagggtgggagctcagatgtcttcaactcaaagtcactattagtaggatagccaacaaagtgcttcttcagggtccatgtcttagtacgaaccatcctgaagctcaggagcccga

SEQ ID NO: 431926 - DNA, 2397 bp, Homo Sapiens
  misc_feature (66)..(74): n is a, c, g, or t
  misc_feature (136)..(147): n is a, c, g, or t
acccacctatttaaaaagagggcgcgcacatatttaattttaatatcttctaaaggtgttttaatnnnnnnnnnggtttttccccaaatgggtatataaaaaaatattaggcccgccggattttcccaggttattnnnnnnnnnnnntttaaattttaccaaggtaaattgtaattatacttcaataaactggagataaagcttactgaacctaaacttttgggttgattgaaatttaatgaaagtatttggacctgaatacttgtaaatttggttttttaagttgtgtacatattacagtgcatttataatctagtttgaaatttactagcaccaaataggtaccataaatggacaacctagtacttgtatttggagaagcaaagtttacaaatttgcaaaaaatagagtagtccatcaattgaaagcacattcccgtacgtttgctggaaggatggcatgtcagcataaatggccaacccccaatggaaatacacgtcccagttttcaagaatcaacacatatgacaaggtagcttagctacacacatgagaagcctgagaaagtggttgttttgaactagggtagtcacctgtaccttgctttggtaatacaaagaatagtgcttatttatacaaatttacttggtgaaagattgtacctatgatatgatgattctgattgggggaaaatatagttctacctatctatatttgtttttcttttaattatttggtctctggatggtgaattaatgaagcaaaacctggattttcatcttcagattatcacccagttcaccactgaggtagtctttgtcatatttgtcttctagttggttaagttctttctttttataaagtggagtactactgatttgtaatgaataggttccagccactggcttcttctttgtgaagtggaggtagctgatcccttccttttggttgattttaaagaagccatcttcatttccagattcgatcaagtatctgttgtgattcgtcagagttgtaagagctggaaggagttctaggattcgaaccttgttactgacgtgggaaatattgaaagcaaagatggctgtcttctcaacatcccaacttgcaagactcacattggcttctgtctcagactgatcctcgatattggaggcatcagtttcgtttgtgcttctccgtttcctgccccgtttggggtagccattgatcttacactcgtaacaagcctctggggagagtgaattgtcatccatttcaccactgacaggtggctctgggtttcctcggcccatgcccattccagaaacacagtgcccttggcctatgcggaagtaaccaggtggacagccacacaggtaaccgccctcggtattggaacagccatagctgcagggggcctgcgcagagccacattcattgatgtcttggcatcctccactgaactgttcatactggaagccggcgggacacatgcacttgtagctccccagggtgttgtgacaggaggctcctccgcagatgtgagcgctgaggcattcgttttcatcaacacactggttccactggtagtgctggaggtagccctgggggcagctgcacctgtagcccccaatgatgttctggcagccatgctggcagcggtggttaccctcacactcgtccacgtcttcacagctggagccggtctgatcaagtgagaatccccgctggcattcacaggtgaagcttccaggagtgttctggcaaatgcccttagacccgcacagattgatgtcagaggtgcattcattgttatcaatgcaggacgtatggtgttgggtaaatccgggaggacatttgcatgtgaagccgccaatggtgttaacacataggaactggcagttgtgttgcttggttgcacactcatcaagatctttgcagctccttccatcctcttgcagaatgtagcctttcgggcatgaacactggtaactcccttctgtgtttttgcagataaaattgcagggtttgggagcctggttgcactcgttcagatctacacaggaagtcccagttatatctggagtgtacccagttttacaaatgcaatgatatgatcctctgtcattgacacattccccatttcggcaaacatcgtgaataaccttgcattcatcgatatctgctccattggtcatgaatcctcggccatggggacagagtttcttgaaagccacagtcccctggaaagggcagatctcacagtggggaccccagcctctccctccgtcacagcagcattccgatttggtgacggggttcctgttgctggagccgatctgacacatgttttgtagcacctctgtgaagcagtacccttcccgattgtcaaggcactcgtcctggttggggcccc

SEQ ID NO: 431927 - DNA, 386 bp, Homo Sapiens
ggctctttggggttttagtatgtgtcaaacataggactggaagtttgcccctgttcttttttcttttgaaagaacatcagttcatgcctgaggcatgagtgactgtgcatttgagaatagttttccctgttctgtggatacagtcccagagttttcagggagtacacaggtagattagtttgaagcattgaccttttatttattccttatttctctttcatcaaaacaaaacagcagctgtgggaggagaaatgagagggcttaaatgaaatttaaaataagctatattatacaaatactatctctgtattgttctgaccctggtaaatatatttcaaaacttcagatgacaaggattagaacactcattaaagatgctattcttc

SEQ ID NO: 431928 - DNA, 3377 bp, Homo Sapiens
  misc_feature (1033)..(1285): n is a, c, g, or t
  misc_feature (1298)..(1318): n is a, c, g, or t
  misc_feature (1421)..(1421): n is a, c, g, or t
  misc_feature (1423)..(1423): n is a, c, g, or t
  misc_feature (1817)..(1831): n is a, c, g, or t
  misc_feature (3296)..(3332): n is a, c, g, or t
aaagcacaaatgcccacacaactttgacttacaaggtagttctatatagaataaattaaaatgttagtaaaatctgtattaaaaactatgtacaattaaatgtggtttacagggtacataattatgcttctcacatcaattatagttgaggacaattatagttgaggttatctaaaagaaagtgtaatacggacatgaccattcataagtaaaaggctggaagtctccctggagtttatgcagatgatttttacttgttattgcacagtgtgaattggtaggggaaaaaataatacactaacccttgggtcccatacaggcaaattaagattgcattcttcaggctgtttcaatagcactggatttggccattccctgtttaaaaagattgtagcacttgataagactattggatattaccatctaaacgtattttgttaaacatacagcatttgtgaacgtgatccttcttcattctgccttcttggtacatacaacgttttaatcctttctgacgacattagactactcaaaatctttttctcctaactatgaaatgaacttaaaccatttggtagccttctcagactgaaaccaaaaacgttctctgccactcaaagaactttaaaggactatttaaataaagaagtaccatcccaagataatgatgtgtccacttcaaccttgaacagaataaatctccactgaaagacaaaattcctgcctttatactagttccatccaaagtcaagtgataattttaaaagttacttctgatcacaggcaaaggggtatgaataattatagaattcatgacttaaaagtggtaagacaagtgtagtagtaaaacttggtggcataaccacattttcatatgtgttccataaactagctactttggtcccatatgaaagaggtaaaaactggagaacacctgccactcttaacatcaaggttagcttcttaaaaacattatttgcttatatatgtgtagcattaaaagaaattctgacagccggacgcggtggctcannnnnnnnnnnnnnnnnnnnnnnnnnnnnnnnnnnnnnnnnnnnnnnnnnnnnnnnnnnnnnnnnnnnnnnnnnnnnnnnnnnnnnnnnnnnnnnnnnnnnnnnnnnnnnnnnnnnnnnnnnnnnnnnnnnnnnnnnnnnnnnnnnnnnnnnnnnnnnnnnnnnnnnnnnnnnnnnnnnnnnnnnnnnnnnnnnnnnnnnnnnnnnnnnnnnnnnnnnnnnnnnnnnnnnnnnnnnnnnnnnnnnnnnnnnnntccgtctcaaacnnnnnnnnnnnnnnnnnnnnngaaattctgacattctttaatcttatcacacctgattataagtgctactaaatcccaaaacagccagaatgtgtactgaaaagtgtggcatggttctaaattntnttttatttttcctccagttgaacacagctctaaattgtctcaaataactaatttttataaaattactagaaaagaacatctcttttgcagagggaggagcaggagttcataagaacaggaatggacgatttatcttaatttgattaaaaaccaagaaccctcaccttttgggccaaggcaattaatataaaatggcagtaatcttttattctactttttcttaaatcatagttgacatatgtggaaatgaaacgaagaaacttaaaaaaatctgggttaatgactaatctcaaattccttttttgtcccgaagcacttaatgttaatttattctttaaaagcttcttatgaaaattcgtatctttaatattaggccaaataaatgctgaaagcnnnnnnnnnnnnnnnacaatcacaagaaactaatggcctatagatagagaattaaaagagtgaaagaggtagtgtgtacaagttttatccaaaagtatagtaactgatttcccaacctatcaataaattggatcttagctgctaaaattcagagtttattcagagggtaagtttatgcaaggaagtacaaatagaatctgccttactatcctggccaaactagggaaaaaaaatagtttcagtttgccattttatacacaatgtgatctccaaggctgcctacatgactacatcatgaactaaaatttgaatctgaaaccaagctgagaaatgtcatagaaataagactaaacttcagtgtctacaatcaattttattttaatataatctaaacacataccatttagaaaataccaagaaaaatttatgtacaagagttgatgctattgcatttggataaagctggcaagttcttgctactagcatagcccaggaaacaccaccgaggaaacctaatatattggaatagatgttgtggcgtttggcccatagtttgatagctctcagagttaacctgaagttgtcaatgtttggtactagatgtaaaatttcatcggttaccctgcaaccgttaagacttcttatacatcttatatctaaattttttagcagactgtcatctcgtagatccaaatcttcaggaattgtctgcagtgctaatcttgcaaacaaaatatcaatctctatcccatcaaaacagagtttaataactggtacgaatgcctcttcaacagctcttaaatcttttacttcttcctgtaatttcaacttatcatagaatgaggtgaaaaagtcacttcgatcaacatgtcttggtgcaacacacaacgcatcaatatcagcaccttttgtatgcactcctaatctgtaagatccaaatgtaaaaatttttcctccaacattttcaattacagattgtggaagattcttgctttcactgatttctcgtatccactcttttaccaggttatttagttttcccaaaattaaaatcctgcgctgcagttcctcttcctcttcaaaaaccccaaagggtttcaatgtctcaattagtttctgtgtaagtacgcagtcagtctccttgggggctgctaagctgataggagaagtaatgccatagtgcttctgtggcggttgtgtttgttgtgatccctgtgttgtaactggaaacggcatcgtctccggcgccggcaccgcccagtcacttcccccccgcaaccgccgccgctgccgccctgggcatgatccactgaggcgggagggaggggggggcctgcctcagccctgggtccaacccctctcccgcaccgctcccgccgctttaagcgcttctcctccttccccttcgtcctaacatggcgcccgagcgctacctcagcccgctctcgacgaattcgagctcggccgatttggcctgatnnnnnnnnnnnnnnnnnnnnnnnnnnnnnnnnnnnnncgccgccaccgcgatgagcgcggattcgccctatagtgagttaca

SEQ ID NO: 431929 - DNA, 623 bp, Homo Sapiens
  misc_feature (206)..(215): n is a, c, g, or t
  misc_feature (561)..(572): n is a, c, g, or t
tttcaaatgtcacatttaatgttttcaccactgtacttcaaatctacattgtacaaagtgaccagaaagtgtgccacggtaattgaccaacctctgagattgtacctttcacaccagtgtcttcttgggctcttttgatactaaacacgtttctcattcaagtgaattgaaatgcttcagttgggttgattctcaggagcctcatnnnnnnnnnnccaagatattgcaccatctttgtttagtaattcaatgtttgtttctttcacagcaaataattacttcattgaagttaaaacttcccaacataacttagttaatagtcttcaaattcagctcagatcactcaagttggaaatactctgctaaatacagataacttacaataactttaacagttaattgtccataacacacaccaaggttttttcctagaccaattttaagacgatccattagtattccttgtacaggtgaaaaatgatcttcaattttcttgtctttttatttttaatataaaagttggaagggacattcaagtttcaagtctccacactgaactcnnnnnnnnnnnntagtcatcatcagcatgtggaggtaaacaagccaagttgtataaccccgct

SEQ ID NO: 431930 - DNA, 1148 bp, Homo Sapiens
  misc_feature (347)..(356): n is a, c, g, or t
  misc_feature (585)..(641): n is a, c, g, or t
  misc_feature (835)..(855): n is a, c, g, or t
aatgcaccatcttgtttagtaattcaatgtttgttgcttttcacagcgagagtaattacgttcatttgaagttaaaacttccaagcataactctattaagtagtgcttcaaattcagctcagatcgctcaggttgaaaatactctgctgaatacagataacttacaatacctttaacagttaattgtccataacacacaccaaggttttttcctagaccaattttaagacgatccattagtattccttgtacaggtgaaaaatgatcttcaatttccttgtctttttatttttaatataaaagttggaagggacattcaagtttcaagtctccacactgaactcaannnnnnnnnntagtcatcatcagcatgtggaggtaaacaagcccaagttgtataactcccaggaggtagaggccttcgatttgtattcatatgtacatatgcacagaagaattcagtgttccaacagaaaaaaaagaacttgtcaaaaagtaataagttatttactactgtgacatttcaagactcccacagctttgcctaaggacacaaacacatttgacataattccctatgtgccnnnnnnnnnnnnnnnnnnnnnnnnnnnnnnnnnnnnnnnnnnnnnnnnnnnnnnnnnctgtccagtgcaggaaaagtctcacaaaatttcacagacctaaaatgtgcaagctagttctctttctatacagcaatattgggattcttttgaaattagcccagaaatgaattatttacacacatgaaagatgcatgcttggggttcttttatgtaagaaagagcagaaaaacttctaataaaaatagattaannnnnnnnnnnnnnnnnnnnnctgggtaaggaaaacaaaagtttagtctctcctagtcacacaactcattctctctacccacaacattggattttagacagcacacatcaccatcacggctctaatgagaagctaattatagggcttgatcattaggtggcatgcccctcctccctaccctcccccccaggtgcagccacgatcagctcacgtggctccatgattggtcgcaggcaaggttcctagattctttagttttagaaaaccccaaatctttaggaatggctcaaatatcaaaatgtatgactgtcctt

SEQ ID NO: 431931 - DNA, 1077 bp, Homo Sapiens
  misc_feature (217)..(217): n is a, c, g, or t
aacattagtaagtcctagcccaaagggtttttgtattcttccattccatctgactgtttttttggatggtggccattctctggtacactggtaccgaagatttcaccatggaaagctgtgcttgacctttcaacctgatcctttttttcatcttgacataataaggctgccatgtcttcacccttcagtggaaaagcccgtcgttcccaccacaaangacttggtttcttgactttgatttaaagaaggtaagccatatgcacacagatcctggttctctgaaggaagcccaggaggacttgcagcagcacattgctgactgctactgaagttattagggtattctttcaaaagcaagtcctgtccttcaacatttttactgtaagctctgctgtttcttctgtgccacttgctttgctcccatagtgaccacctggcttgctctctctcttcatattttttgtgccttagggagaagacttcatcagaaagatcttctaatctcttctttgccctaaattatattcatccaaaaggctgaggaacaaccatcctccagcttggagtaagtatttccttatattggagtttctctaatttagctggggctactaatgacatgggaatcacaatgttatctatgtcataagagctctcacttctcaatctccgtcgtgcagtatttcgtgatgaattctggattcttgataaaacgttgacattggaaacagcagtaaaattgctatgggatcctgattctgtgtgttgaaaatcagattcttcaagtttagttctttctcctaatgctgtttcactcaaatgtcttttctttcttccctgtaacagttgtgcagaagattctgaccttatttgaggcttacatataggtgaatatccatttctccattgattcagagtactatgtacaggtgatggagatatgatatattcatctacaaatttattttcagcaagattgccttttatttcagtcttttttaacagtgtttcaaagtgaaaatgaagaggcacatctgatggcaatgatagaacagaatggaaagaggaatctaactc

SEQ ID NO: 431932 - DNA, 1117 bp, Homo Sapiens
tatttccacagggtactctgctttattgatagccttattgtccacattaatgatatgtttaacacaaggtgatatctaacaatgcagtcttaattttactttccagaagttcaacactggtaatcagataggaagcctcagattcatttagcccatgaactactgcttctttgccaagtgtggcatataaagtcacaagaggaaagttgtacttaaagcaggtctgtgctgcaatcatccattcggccctggtctcacagaagatggcaatggtgttctttggttttagtcccagtgcagtgagtccactaccaaagttattcactctgcgattcacttcaagatagttcatccatttataattcccaagaattaacttcttaaaaacttttccatttggctgcatttcattttcttcacttaggatttccctggtcccaaggctgtccttcttcccaaacttggatacagcatggtcaaataattgtatccagagtatctgctccagggatgtctattacagctagtgagtcgaagtgtgtgacagagcgatatggacttccaggtttgtctgaagtgggcttagcttgttattctcgtttgccatagcgtttttcttcttgggcattggtaagaaaataccatggaataaatataagggcactgtatatttggttatttaacaagtggacaggcagcaaaataatggtgagcacatttagcttaagtttcatagtggaaaggcttctaaaatggtgcttatttcttgttattctttggcttttgaaagccttattgtgctgaagaaggcaataatagaagcagcagtaagaatagcagtaccagccaaggcagttcaatcttagtgatacagataaaagttagtaatctttggaagccgacaataaagtacgcaaatgtcctctttttctcttaagaagaacacgaatatcttctgtgatttcaatcggaggggcggcccaccgcgtcttcgcagccggccggcgcctggcactcggaaagctcgcaaaaaggaaccgcgtgcccgctagcgctgggacgaggaggagcgcgcggcggaggccagagaaaaagccgcagcggcgcgcgcgccccc

SEQ ID NO: 431933 - DNA, 1144 bp, Homo Sapiens
  misc_feature (43)..(78): n is a, c, g, or t
atgacattttttgggagggcaaacccagggcggcgggaacttnnnnnnnnnnnnnnnnnnnnnnnnnnnnnnnnnnnnagaaaaaagttggggcccagagcccatctgttttccaccctgaatgcccccggacccgggatgtagggagctttgggatggcccacgccccaccctgttcacggcccctgctggtagtcaggccaaacttcttgatggagtagatgcccatgatggtaaccctgttccccagggacgacccttgtcacaacaggtacctgtcgcagtagagctgcatgtgtctgggcatctccccgtgggggactgcatcaggcagctcctgcagcttcagggtctggaagtccacgcatttgcatttgtcgggcatgatgaagtacgggtccaatgggcatttggggcgcccagcctgatctgtgttgcacttcctgggcagggcatagccctcgaggccagggcgcatggcaatgttggtgagggtgttgcggcagctgcggcactggatagagatgcgggtggccttggcacggaccgcagaggccgcgatgatgatgccagggatcttcaccaggtgtgacatcatgtccgacttcaggctacgaatgctggaagggctggcgtccgacttgagcatgacctggatgtcctggagcacctcctccccagaaggccggggccgggtcacctcatcagctacctccttggcagcttcctccagcagctgcaggtgctcggctggctgcttgtacaagtagtcggccaggtcctcatcaaagctggccagatcctccatctccacctcaatccagtactcccccaggttgtaatgccgcttgagttcatccctgtatttgaaggtgaagcccgtgcggtcggtgcccactcggtactgccgcaggaactccttgaagcgcctctgcagctgcgatttgcgggcctgcccctcgtcggcctgggcgtcgcccccgaagctgtcgctgtagaaaatgccaggatcgtcgaatcccgacatgactgcgcctctggttttccgcacttcacaaaccaggggagacaagaacctccacgctcagccgccgcggcacgcgtggtcgacgatatcccgggaattccggaccagtaccagcct

SEQ ID NO: 431934 - DNA, 1442 bp, Homo Sapiens
  misc_feature (34)..(34): n is a, c, g, or t
  misc_feature (113)..(114): n is a, c, g, or t
  misc_feature (238)..(238): n is a, c, g, or t
acacgttttgtgccccttgtctcctttccccctngggggcccgccgccccccaaaaagaagggtttttagaaaaatttcttaaaggcccaagaaggcccccaacaaaaaaccnntgtgtggttaagatataagcacggggcgcggcgtcttgagtatagagggagattatgttcagtgtgttgtgttattctggggatcggaatgtgtgggtggatgaggtttgattagtgggggggnaaccctgaacacaccgtggctttattattaacggatgccaaaagcacacttcccagaaccgcgctagaggcgggcgcccagaggcagcaggacactacagctccttcctctggggcagaaaggagggtgcctgggaagttcgagggctgcagtggggaggcagaggtcccagcaacattgtcaatggcaggcagcggcaggaggggcgaggcgtgggcgagtccatgagtccagtgaggcggcgcgactcacttgaggcggtagagaaccttgcgctgcatgcgatgctggatctcgccgcgccgcagcatgagctgcagcaccttgtggatggcgtgctccgggtatttctgcttggtgaagtccttgatgatgctgtgctcagacacctgggagccaatggcaaagcggcgcttgagctgcttctcgatgcggctcagcatctcctggtcctcctggctggtgaagccctccacccctgacagggtaccggacaaggcagcatccaacgtggacacttggaagagccgcagggcctcctccacatctgcctctgtggcgaagggctgcagcttcatcttgctgagggcttccgcgatgcgcacaatggcctccagctgccgcacagtgatggggatgctggagcggcggtcactgtccctctcgtgctgacgggccccgctccgcatgatgattgtagcggttcttcagtttctctgcagcctctgctgacagccgggggccacacttcactcggcagtaggcaataaacttcttcagcttggccaggtcaatctcgccctccacagcctgtgtctgtgtcagtgcgctcacgtgcagagtgatgacatgcttggccaggtgtgacatcatgtccgacttcaggctacgaatgctggaagggctggcgtccgacttgagcatgacctggatgtcctggagcacctcctccccagaaggccggggccgggtcacctcatcagctacctccttggcagcttcctccagcagctgcaggtgctcggctggctgcttgtacaagtagtcggccaggtcctcatcaaagctggccagatcctccatctccacctcaatccagtactcccccaggttgtaatgccgcttgagttcatccctgtatttgaaggtgaagcccgtgcggtcggtgcccactcggtactgccgcaggaactccttgaagcgc

SEQ ID NO: 431935 - DNA, 889 bp, Homo Sapiens
cttgtgacaacagggacccgttgcataagacctgcaatgtgttttgggcatttccaccgtttggcgactgtcaatccaggccagctccattcagcattcagggtttctggaaactccccacgccatgttgccaattgttcgggccattaagtaaagtaccggggttcccaatgggccatttttgggggctcccaagcccgggattctgcgcgtagcagcattcagtggggcaagggctattaagccccgtcgaagcccatgtgccgcattgtccaatgtttgtttgaaggtttctttcggccattgcggcaactggatagagattccggttggactttggcatcggaccttcagagtccgtcgatgatgattgccagggatctttcgccaggtgtgacatcatgtccgacttcaggctacgaatgctggaaggtctggcgtccgacttgagcatgacctggatgtccttggagcacctcctctcccagaagtccgggtccgggtcacctcatcagctacctccttggcagcttcctccagcagctgcaggtgctcggctggctgcttgtacaagtagtcggccaggtcctcatcaaagctggccagatcctccatctccacctcaatccagtactcccccaggttgtaatgccgcttgagttcatccctgtatttgaaggtgaagcccgtgcggtcggtgcccactcggtactgccgcaggaactccttgaagcgcctctgcagctgcgatttgcgggcctgcccctcgtcggcctgggcgtcgcccccgaagctgtcgctgtagaaaatgccaggatcgtcgaatcccgacatgactgcgcctctggttttccgcaccttcacaaaccaggggagacaagaacctccc

SEQ ID NO: 431936 - DNA, 717 bp, Homo Sapiens
ccacattgatctgcaggcccccatctgcctcttccacctttggggggcctgactcaggggtcacttctttctcttcctcctcgtcctcggtctcctcttcactccactggatcccagtcaggagcttcccgggccttcttgcttccgagcagctctttcaatgggctgcaacgcttcacctgtcctcctcatccgtcagagttggagtcagctccatagtcatctaccgtatcagcatcgtcctcggagccccagaggtccccgtggttcaccataccatcttcttcagagtcttcctcctcctcttcctcatcactgccaggtgctgggcgcttcttgcctcgaggagcattaaatagggactggggtcccttcttaccagctgtctggacagctcctgcagagatcccttttggtagctttccaggcaatggtttggcctcaggagacttatttgtcttaggggcttcaacagagcccaatctcctcttggctgccctctttcgagcacgactagacagcctcttggaattttcgtcacttactgcaggcaagaatctgacgagttctgtctcggcacccttctgcttccgggcctttcggcctggcccccgcttctccttcgtagggtccaacttgcgccccatggtacagaatgcgggttaatgtccgagagtgcccttcgggcggccctccacgtgcaatccggacctagcc

SEQ ID NO: 431937 - DNA, 1097 bp, Homo Sapiens
  misc_feature (972)..(972): n is a, c, g, or t
ttggtactggtccggaattcgttgggatcaagcagcttttcagtctctgggacctttcatatcttctttaaaatactggcctgagctagatggattagcaaaagtagatatgaaaggtcccagagactgaaaagctgcttggcgaacccaacgtgaaggatcactgatcaaattaataaaaagtgctgataatttggtccgtcggatttcttgacatgttgcacatgaaagcgccatgaagcattcagcacaagcctttcggactccccatacattatcagaacaaagctggaaaaatctgggcagcaacatttcttcagtagcttgctggccaactacactgcaaatatctccaaaattggcagcacagacctttcgaacgtgaaacattctgcaatcgcagcacatctcacaaaacctagggaggataagacgctctgtaatatccttcccaaccatgggagccattttgcacattatagccacagcttctgttttcacatcatcattgctatctggggctgtcagctctatgaggacagggcacactttggtctccacatcaaatcgttcaatgagctcctgctccaacagagccagcaaagctgcctgacttgttttcctcacctgattattctgatctgcaaggtatctaaccacaataggtagtaagaattttgaaaaagcatatggtattgaaggccggttttcttgacaaaacagtgcgatgtgaggcacctgttccatcagctccgctctcacagttggttctgaatcatcggccaatctgctaattctttccaaaacagcaatacaatctctttcatcatcgcagacttccctcaaggtatcgagcaaactccgggccaccatttgtctgttaaatatgttctcacttgcagcatacttgtccaatctccccaggggcgtcaacatttcatcttgtgagacaaagtccaggggatccgtctncgtcctcctgcaggtcctcctgaagcagcgagaggtccgccatcttgtggtcgccccctcctccgcggccgccggggagccggggctacatggagcggcgcgagccggggagccggtggacgcgc

SEQ ID NO: 431938 - DNA, 812 bp, Homo Sapiens
ccaaaataggctaggtacgaggccgggtggtgaattcggcacgaggggagattggacaagtatgctgcaagtgagaacatatttaacagacaaatggtggcccggagttgctcgataccttgagggaagtctgcgatgatgaaagagattgtattgctgttttggaaagaattagcagatggccgatgattcagaaccaactgtgagagcggagctgatggaacaggtgcctcacatcgcactgttttgtcaagaaaaccggccttcaataccatatgctttttcaaaattcttactacctattgtggttagataccttgcagatcagaataatcaggtgaggaaaacaagtcaggcagctttgctggctctgttggagcaggagctcattgaacgatttgatgtggagaccaaagtgtgccctgtcctcatagagctgacagccccagatagcaatgatgatgtgaaaacagaagctgtggctataatgtgcaaaatggctcccatggttgggaaggatattacagagcgtcttatcctccctaggtttgtgagatgtgctgcgattgcagaatgtttcacgttcgaaaggtctgtgctggcaattttggagatattcgcagtgtagttggccagcaagctactgaagaaatgttggttcgccaagcaggttttcagtctctgggaccttcatatctactttgctaatccaactagctacaggcagatttaagaaaaaggaaaggtttgaggatgtctttaaacaatggccggattaaacccagaggaatcggcaggaaactatccggatg

SEQ ID NO: 431939 - DNA, 2921 bp, Homo Sapiens
  misc_feature (1892)..(1892): n is a, c, g, or t
tagttaaaagacaaatattttaatctagtttccccactttaaatcattaatacaggtcacaaattgcatttattggtagacatctagaaaacaatcaaaagtgtatatatctctctctatagatcttattaataaattttatttggacaagagaacttgtgccacaacagtttaaacagcatgattaaagactgcagcactcccaagagtggtcacaggtatgtacagtatgtgaagaagttgcacctcagagctgatcatgatcaagttaaaaacaccagacatacattatacgtctaataaatttccttcaggtcatgaccagcatgaaaaaatcagacacagacactcagcaaccattctgtaaatgtgtacagcaatatgctgcgcttaagagtttaagtcaatcctacttgtgttggcatcaggtcctttaggagatgtaaaaacccctcctttcccatttgcacacgtcacaaacgattcacacacagggctgggctggacagctggccacagagcccagcaagtccttcctgggagagaagagttagggctgatactgaaggtctctttcacatctgggcacacgtctgccttcaggctgtaagaatttcatttgtcgattgttaaataaaaccaggagaaagcaatgcaggtctctgggaatctcatcccttccataaggaaaatgctctgccaattcaagtttcattcagtcaggaagacagaaggatttaaggcttcggtgacaattataatcctctgagaaattatttccccttaaagtcaagataagataatagtgtttactgtactttctcttgactcttgaaatccctggtattgggtgtaggcaacttgcacctgcaatgaagtccgcaggagaggaaggtctctcctcccccgaaagctatcccaggtcacatgcgtggcgaatgcccactgaacctcggctctcatggaagcaggaaagacaccgagattcaagccttctagtaggttgaggacgctgtgctcatggcatcttcggagattttggtactggcagggtggatgcttgcaaaatacttgacatcgctgtcacggtccatctgaagagccatgatggtctgctccacagcctcctggtggcagctggcagaggccaagaaatagtctttttctagtagagtttgtcttaatgtctttgcaagcagcactcgcacgttaggaaccctgtcatttgctaaggttagcagatgcggcatgagatgcacagcaaactggtccatgggaaggcagtcatcctcaatgacagtctggcagacaaagacaaaggcttgccgaccagaccacttgggacatctgccaaagttctccacaagctcattgatgaggtcccactccgaacgttggtggtgttgccgcgtgcagcttcttcaccatctcgctgaccaacttgtaggaaatccaacgaacagaagaaactttgtctgcacacagattcagagcaatgggacgtaaatagtcataaacatctctgggactatataactctagaagtaaaatcagctgttcagccagttcagctcgaaaccgccaatttctactattatctgtcaccaaaaactcctgaagttgataaagatattctcttcttttgtcaatatgaagaagcttcagaaaatcatgcaagtgtttaagaacacctatcctgacttcatcgaggtcttttaaaaatccattaaaaattggaaccagatctgcagctgtcaattgatctccaagaataactgcaagctcgtggatggagaatgctagagttcgtcgaactttccactgcatgtctgaggccagagtctcatacgtctctctcaggcagtgccaattctgtcttccgagtgtcaagnccacaccagggaggctatatgcacagtgcttagcaatttcagtgtcaaccgtctgtgcacgagaagggtcagtcatagataaatactgatctaacaacgcctgaggtacaacatcttgtactttagttctcctttcctcatcagggctaaaactgctattgttgctcaagtctgaatcgctgtgaatatagtgaagagtggagtccatattctcaacagcatcgctgattaaaggccacagaatcttcttgatttattttacaatttggtagctcatttatatccagttcatcttgcaaatcacttctcttttctatactgatggtctcttcatgtgcatccaggctggaagcacgtagtgcagcggacagcacttccacttgtgctttaacatctggatcatcaatgtggggctctagattttctatcatttcttccagttcctttctggtggccatggtgatgtttggagaactgggcacaggggccctcagattcttcctctggtccctctgggctgggttttcccccagagttctgttcaagctctatgtctagatctatttcaggaagaggagtcctccagaaatggaaggagttatacaattcctgatctaagagagctgaatcttgtgaagtggtgccaacctctggtcgtaacatagatttgtagttaccaggttttttatcattctcattactagctgcttcctggtgagattctgaggacaaagtacaaagtaaagagctgtccagtggaacactaatttcacctagaggcttcccggatgcctcagcagcatggtcttccatcgtgttttccagtatgacactggaattactaacactgagatctgaaggagtatcctctggcctgacttgtacatcctctggggcttcttgatctctggtcctatttttgttttctactgacatctcttctgaacttttgctttcttctttaaaatactggcctgagctagatggattagcaaaagtagatatgaaaggtcccagagactgaaaagc

SEQ ID NO: 431940 - DNA, 1106 bp, Homo Sapiens
  misc_feature (360)..(399): n is a, c, g, or t
  misc_feature (833)..(922): n is a, c, g, or t
  misc_feature (951)..(959): n is a, c, g, or t
ggggggcttttttttcctccctcttttccccttgccccctctgcagccggaggaggagatgttgaggggaggaggccagccagtgtgaccggcgctaggaaatgacccgagaaccccgttggaagcgcagcagcgggagctaggggcgggggcggaggaggacacgaactggaagggggttcacggtcaaactgaaatggatttgcacgttggggagctggcggcggcggctgctgggcctccgccttcttttctacgtgaaatcagtgaggtgagacttcccagaccccggaggcgtggaggagaggagactgtttgatgtggtacaggggcagtcagtggagggcgagtggtttcggnnnnnnnnnnnnnnnnnnnnnnnnnnnnnnnnnnnnnnnngatttttttcttctcttaatcggaatcgtgatggtgttggattatttcaatggtggggttaatatagcatgttatcctgtctatcttttaaagatttctgtataagactgttgagcagtttttaaaatagtgtaggataatataaaaagcagatagatggcgctatgtttgattcctacaacgaaattatcaccagctttttttcattcttaactctttaaaggattcaaacgcaactcaaatctgtgctggactttaaaaaaacaattcaggaccaaattttttctcagtgtgtgtgtttattccttataggtgtaaatgagaagacgtgtttttttccttcaccgatgctccatcctcgtatttctttttccttgtaaatgtaatcagatgccattttatatgtggacggtatttatactggcccaacatannnnnnnnnnnnnnnnnnnnnnnnnnnnnnnnnnnnnnnnnnnnnnnnnnnnnnnnnnnnnnnnnnnnnnnnnnnnnnnnnnnnnnnnnnccgggcttctttggggcacttgtgggtannnnnnnnnattacacgtccccttccccgaacgggcaaaaatttcaacttttaatttgtttatactcaaaggcggggtgtttgcacctctttggccgccgacccccggcccgggcgagtgggcgacccttgggatctcttaccccggggggcgtct

SEQ ID NO: 431941 - DNA, 828 bp, Homo Sapiens
  misc_feature (545)..(598): n is a, c, g, or t
  misc_feature (797)..(797): n is a, c, g, or t
cgtaacaggttttaatttttcaattggaacaggatttgggggtggggatactaaatgtggcaggtttcacaaaatttacattttatcaaaataaggttcttaaagaatacaatgatagcatatgctttaactctggtagcacaaaccctcattaattgatggtcacagaaaaatactgtaatgctttaaacaaaagttttaaattacatcaatgacacaagtttcaaacaaaatgcagtgatcaaaatacttaactgtcctttcatcaagcttttacaaacacaatcagtcttcgctgtctgaggaaatcagttttagtttcttcatggtcctccatctgtcttttaacatgacacttgtccggttgttgaatttataatgcaacagtattttagaccagtttccctctccatatttcctcacgccagatctcaaattcttgtcttcttcccaaagccatgcctgtctttttctagctcgatgtttttcaggagttaccggctgactctttgaaacaggtattctgctttcagtggctcttctgnnnnnnnnnnnnnnnnnnnnnnnnnnnnnnnnnnnnnnnnnnnnnnnnnnnnnnttaaggtcttgttgctgggttccatgttgcaacttagataagaaaagattcttgtgagacctcaataaggatactgtaccctctgaggattcagttaccgcagactgtttgtcactaacactttttcttgtatccaaattagcttcagtttccatttcaacatcattaccactaggtttattttgagaagttattgttnctggcctttgcttctactacttaaccggtgc

SEQ ID NO: 431942 - DNA, 925 bp, Homo Sapiens
  misc_feature (431)..(447): n is a, c, g, or t
  misc_feature (814)..(823): n is a, c, g, or t
  misc_feature (825)..(826): n is a, c, g, or t
  misc_feature (828)..(828): n is a, c, g, or t
  misc_feature (831)..(831): n is a, c, g, or t
  misc_feature (833)..(841): n is a, c, g, or t
gggaaaatggcaactttaaagaagcagaagaagtctttgaaagaatatttggtgatccaaattctcatatgcctttcaaaagcaaattgcttatgataatctctcagatagatacatttcattccttttttcaacacttcagctacaaccacatgatggagaaaattaagagttatgtgaattatgtgctaagtgaaaaatcatcaacctttctaatgaaggcagcggcaaaagtagtagaaagcaaaaggacaagaacaataacttctcaagataaacctagtggtaatgatgttgaaatggaaactgaagctaatttggatacaagaaaaaggtctcacaagaatcttttcttatctaagttgcaacatggaacccagcaacaagaccttaataagaaagaaagaagagtaggaactcctcaaagtacnnnnnnnnnnnnnnnnngcagaagagccactgaaagcagaatacctgtttcaaagagtcagccggtaactcctgaaaaacatcgagttagaaaaagacaggcatggctttgggaagaagacaagaatttgagatctggcgtgaggaaatatggagagggaaactggtctaaaatactgttgcattataaattcaacaaccggacaagtgtcatgttaaaagacagatgggagaccatgaagaaactaaaactgatttcctcagacagcgaaaactgattgtgtttgtaaaagcttgatgaaaggacagttaagtattttgatcactgcattttgttttgaaacctgtggtcattgatgtaattttaaaacttttgtttaaagcnnnnnnnnnnannanaanannnnnnnnnacatggccggcccgcctcggcccctcaaaaacttttctagaacctttccttttggcgcccgggccccattagggtaaatgaacc

SEQ ID NO: 431943 - DNA, 1634 bp, Homo Sapiens
  misc_feature (549)..(565): n is a, c, g, or t
  misc_feature (1436)..(1437): n is a, c, g, or t
  misc_feature (1441)..(1441): n is a, c, g, or t
ccgtatcaaggttttaattttttcattggaacaggatttgggggtggggatactaaatgtggcagggttcaacaaatttacattttatcaaaataaggttcttaaagaatacaatgatagcatatgctttaactctggtagcacaaaccctcattaattgatggtcacagaaaaatactgtaatgctttaaacaaaagttttaaattacatcaatgacacaagtttcaaacaaaatgcagtgatcaaaatacttaactgtcctttcatcaagcttttacaaacacaatcagtcttcgctgtctgaggaaatcagttttagtttcttcatggtcctccatctgtcttttaacatgacacttgtccggttgttgaatttataatgcaacagtattttagaccagtttccctctccatatttcctcacgccagatctcaaattcttgtcttcttccccaaagccatgcctgtctttttctagctcgatgtttttcaggagttaccggctgactctttgaaacaggtattctgctttcagtggctcttctgcnnnnnnnnnnnnnnnnngtactttgaggagttcctactcttctttctttcttattaaggtcttgttgctgggttccatgttgcaacttagataagaaaggattcttgtgagacctcaataaggatactgtaccctctgaggattcagttaccgcagactgtttgtcactaacactttttcttgtatccaaattagcttcagtttccatttcaacatcattaccactaggtttatcttgagaagttattgttcttgtccttttgctttctactacttttgccgctgccttcattagaaaggttgatgatttttcacttagcacataattcacataactcttaattttctccatcatgtggttgtagctgaagtgttgaaaaaaggaatgaaatgtatctttctgagagattatcataagcaatttgcttttgaaaggcatatgagaatttggatcaccaaatattctttcaaagacttcttctgcttctttaaagttgccattttccatacaaacagctatagcctgaattttaattaaattctgtatttcttcatgaagtttgtcatgttccttttcaattgaaccccaaatcatcagggctgattccaagggtgtaattcgttcatcattttcaaactgtgcatcaagggtttttcctgctgcaattcttgtcaaaaactgacatatgtatatcgttctcaactggcaagctgttagactggatagtccatgaataatagcctctgcgctgttgcgggtcctgcggaagtcctcggagcggccgtcgcggaaagctcggcaaagagagaggcagaggaaatcgagcatccagccggcagccacggcctcggcctcggccaccaggcccgcgtcctcctcctcttctnnttcntcttcgggggcccccacctgcacctggcactcgagcagttcctggcattcgaactgctcctcgtcgtttctctctgtttctgccatctgctcctcagtagggtcggcatccctaccatccgcacagccccgcgggctcggggccgctgagggaacatcctccgccattcctcgtttttgacgccacccaggcc

SEQ ID NO: 431944 - DNA, 575 bp, Homo Sapiens
ttttttttcaagtgtagtcacagtttatttctgatgtggctgaatctagggacaggcgggctgggctgagtggggggcgtgtcggcgatggggctagaactccaccttgcaggccgggaaggcgtcatcctgcatggacaccatgctgttgctgcccaacaccgtgatgcccagcgcctggtgccgggcgtgcgtctctgcgtaccacgtatgcatggccaccgagtcgaaagtggggatcagggtcacctgcaggtcacggtcccaatgctgcttgctggccagtagcgcgtccaggacggcccgcatgccttcctccttgcgctggtcctggccactgatgacgtagcagagcgcgcgcacgcgctggaagaactcctcatccaccaggtgggcgctgctcccgctgggcaggtaggccaggtccaggtagaccggggacttgggtggggtggctgacaccccgggccggctgctggctgacccttatatagactccacgagttgccagaggctccggagaaaagtcttgccctccctctccgaaagaatgtgtcacccgggtgtccgccccc

SEQ ID NO: 431945 - DNA, 1735 bp, Homo Sapiens
  misc_feature (19)..(19): n is a, c, g, or t
  misc_feature (39)..(39): n is a, c, g, or t
atgtggctgaatctagggncaggcgggctgggctgagtngggggcgtgtcggcgatggggctagaactccaccttgcaggccgggaaggcgtcatcctgcatggacaccatgctgttgctgcccaacaccgtgatgcccagcgccttggtgccgggcgtgcgtctctgcgtaccacgtatgcatggcctccgagtcgaaagtggggatcagggtcacctgcaggtcacggtcccaatgctgcttgctggccagtagcgcgtccaggacggcccgcatgccttcctccttgcgctggtcctggccactgatgacgtagcagagcgcgcgcacgcgctggaagaactcctcatccaccaggtgggcgctgctcccgctgggcaggtaggccaggtccaggtagaccggggacttgggtggggtggctgacaccccgggccggctgctggctgaccccgacgggcctcgagtggcagtcttgggggttgaggactttctggacaggggtgcccggcctcccttctcactgggctcactccgggcactgagtggtcggctggcacggtccccaccagcaagccccttggttttggcagcagccactggagtggctttgggggcggcagcgcgtgagttggggcgggccaggggcttccgggtgcggctgacgttctccgtttgccgtgctgtcttggggggcagcatctcggggtccaccatgcagatgctggatgggtcaggcagtggtggggggaccttgagggggtcaggcaaagggtcgtggcgagggactccaaaaccctctgtgtcttcgtctgagtctgccgcaccgggggccaggggcacgggatccgagtcagacagggtgggcagggactcgctgaccgatgtgggtggcgtctcctcggcccccagcccacctgcccgttcctgtgaccgggcactgctgtcattcgagctgccgggggacgcacagtgcctggtccattggcaccgccttgcgatgctcaaattcacagggtgacaccaggcacaggtccacatcgtgtggggaagccgagcgccgcgcccgggggccacgcagcgggaggctcagcccagcctcactggtgggggcggatggcggcagcacctgctcaaaggacaccgacagggactcgtccacctcggtcgagtgcggggagcccacctctgcgggtagtgagggcgtggtcacccgtgggtgtggtcactgtgggtgaggcgtctggcccggcctccccgccccgcagtgggctcagcgacagccgctcgctgccctctgcggggctccggtgggactcaggggagggtgtgcgtggccttgggattgagctggcaggccaaaggcagctccagtgccttctcctccccggctgggatcggccccagctccaggctgggcgtggccaccagctgggaggcacggagagaccgcaggcatgcactgggggggctggcttctccacatcggaggctgggcgggctgcggggtccatttgccaccggcgggaagccagagtgggacgtgctgggcgctttgcggggcttgggtgccgcactgggcattcgtcttcttgaggttgggcacagaagaggctgcccggcgcacctcccgcggctgggtccgggagacactcggtttggggtctttcttcaactcccggggggtcttggcttctttctcagtcttgcgtggggcctcagcaccgtgctggc

SEQ ID NO: 431946 - DNA, 825 bp, Homo Sapiens
  misc_feature (235)..(247): n is a, c, g, or t
aaacctgtgtatccatctcatcctcttgcgcattcctagtaagcaaaaaaatttgttatgccatcttcattattcgaattacagactgaaaaaatatggccagtttttaaagaagtttagattatgttttccatggaaggacaagtctgactgttcataggctgattttctttaagaggattattctgttttacaatttcaattctagatcacattttatatatgctgcatgccnnnnnnnnnnnnngagaaaactgccttttctggtgtggaggggaagaaaaactaatattctaccttactagtagagttcaaaacaagttttcactgagagccttttcagtaaaagttaaacaagtttgtttttttgagcatttgtcagttattctatttcagaagagtcaaaattcaagcacgatacattttgaagggtttgcaaactcctaaacccctggatgagtcctctccttctggaagtgggaatttgagtagatactgatttgtcccgtagtatggcagatgacagggaggtcttttccaatcaggcactcagaacacaggtcaccgtatgttctcagccagtaacaatcatactgaggacgaaggactctccgtttgatgcagacacaattgtaatggagatgtaaaacttcttagcaatcagatggataaattgtttgctttttactttaaataggaaattgttttctaaaactaaaatacttgaattgtcagacagtataatctcagcttgtattagtttttgaatgctcccatcgaggaagtgtaacaatccatgaaatgtgaataaatgaaaagtaaacc

SEQ ID NO: 431947 - DNA, 893 bp, Homo Sapiens
taaaatttttatttctgtgtaaaacaaagaattcctagaggtcaaataatataccaaacttaaagcactattaagtcatgaaacaaagaagattctgaggtagaagtcaagcaatataatccacagtttcaggtattcccagcaaccatcgcatttcgcaagtaagatctattttttttaaagtctcaacttccaaaaaatcaataatccattctgtaaaatcagatgtaaaactatgaccaacagaagacacccaaacttttctcatggtaacagagtaaatgcttttactaaaagctgccaacatttctatcagtagtaaccgtaaggaggccgctggttgtaaccataatgtccatattgctggggatagtaaggttcttgtctgtgttgcgggtagttgttaccccaggatcgtccatgccactgattggatcgattgtcacttggccacccccatctgttgtccctgcctctgaactgtctgttgtcttgcaaccgattgcctctgtttctttggttcccaccagctctgctattccattcctcaacaattggaggagactcaggagggcgtttcaggtattcctgatactccttgtcattttctgtgaatctactagcaaacatctcttcaaactttggaacagcttcggcagtgtcagtcattctgaaaatcccaaaggtttgaggcagctgtactgcttaatgtttaggttgtttaaatccgccaagggctatgtcaatccagctcaggccgaaccccgccggcgagacactgagaagcccaggagaggtggcctctggtccactacaccgtggaactccagaccactccagttctccaatgtaaccgagcgccttcctctaaaatccgacaaccaccctccgct

SEQ ID NO: 431948 - DNA, 454 bp, Homo Sapiens
agcgctggagaatttttcttttattattttgacattgctttcttttaattggagtgaggacaaaacctgatcccgttcagagatgaacagaatcatctaggtcgttaagaacagtcttatctttctggttaaccaggtcctaaattcaagggatttccacgtgttctttaaaaccacctgaaactgtcctgcgcaggctcacactgcggctctgtaccaagggcttggccccgcctgcagccagagggcatctcactggatgtcatcatcatcaaaaagatcttcaaaatcgttaaaaaagtctgcatgaacggccttttcattggctgccaagtccatcaagagcccggtgctgcctcccgcctcgtccaggtccacgtagggcccggcgccctcggggaacatctcgtccaccgccggcttcatctcggggccgcggcgctctaggctcccc

SEQ ID NO: 431949 - DNA, 137 bp, Homo Sapiens
gagcaggttggactcttcggcttccccgcagttccgcgcccgcccgccgcggcagttgcggggtcgggctggctggtgcctcgggacgagaaggccatcaagtgttgctccctcatctgtaacgtgcagcccccctt

SEQ ID NO: 431950 - DNA, 1081 bp, Homo Sapiens
tttttaatgaagattctaatattttatctattttgttcattgaattccatggttaaatgctcataaaatatatactttattaaatcatccaaccaaagcataggaaacattgacccagaacctgacttaatggttttgaagatttactatgcaatagggtaactttgagtttcagcaaatgtctttaggttgaaggaattacctatgtcatgaaggacctgtctgtggtttttcaatggagtctttaagcatgatcttttttctgtctagtacttgttttcattctggccagcagttctacattaaatcaccttgtcaagggctctgtttacatctatacattttgaagatgaaatttttagccttaaagtttatattctcaagtccttttacaatcagtgtgtctcctgaactagcacacaggctgtagaaacagtcttagaaatcattgaaagatttgattatgaaagaatagcaaaattatatttcttgacatataaaaagttggtttaatgcctttatttctctttaaggaccagaaccaggaatactatatcgaaaaattagtctgtggatttaacactgacttagcatatagcttaaagttgctcttttggtttttaacttcctccatacataagcttcaaggacaataagatgttaaaaaggaggaaataattatttttattttgacactgtgacagttttggtaactaggatcctagggagggaaatgtttgcctgttgaacttctttctgttatgagaggatttagttaggtcattaagatgttgatcacacagcttcaatcacaatatgccaagtataacctggtttcgttagaggtgtctacagtccagatgttcttcgtaataaaagcaaagtttttgaacctctgagtccaaggcaggctggttggcgataatatgtaatttgaaaaataaaatcttatcttgcagcactatcagtatgttgaatttattatgtatattatttctaatatccgaaactaaatacttgattttttaatatgtgtgtttattttatgatattgctattaaatttttattatctacctgaa

SEQ ID NO: 431951 - DNA, 608 bp, Homo Sapiens
tgcaaaggaaaatgaatatttattcaatgtccagattggggaggggtctgtgtgtttaacaggaaaagatacagaaaaaaacctatcacacaggaaaagataaatatgtttgattattttaaaaggtgaaacccataaccaaaatttaaaggcaaattcacacaagtggaaatacagatgcccaactatcgtacaaagagaaccatgatcaaggtcactaacaagcaaagaattttaagtttttcttgtatttctcattgttataattggggagggggtggataactatgggcagtttgcccttttctgcatcaaaactgggagaatgaaattccactttctcaattcttttctcacatttactcaaatgcattgtcttgccctatggactcaggagttgcttctcaagaaacagccagcaagtatttctcagcctgagggtgggttgctactgtccacatagggcatttccggaattcacttttttgctacaacctccagtgaaagcaattattttaaatgtgcagttacttgatgtgactaaaaagtaggataaatgcaagagataataatatgtgaatcttgaagcctattttattgctacaaat

SEQ ID NO: 431952 - DNA, 543 bp, Homo Sapiens
aagtttaaaaattctttatttgaattttagagaaataacaggtagtataaagacttgcttgaaagtatgaaatagtctgttgttattatttctttaggttttgcaaaccaacatcattattaagggagagaatggtacatctctcctcctcatctttaacacgttcttcaattggcatgggtacaacctgagcaaaaagatcctggtgaaatggcatctctaacactcccccctcagttctaatggctccatggatgaagccctactggacttagaccatccatacttgccaaagtggtaacaggaaaccagtgcctctaaggctagtagtgcatagtagttttcatctaaagctctgtttccccatcatctcctctgtcctggtgactggcctggaaattatggcaaggatgagttaaaatggatcaatatacaattgctgtgaaagtcaacctactaatctctagctgggattaacataaaggggatatgccaagcctcctggtttattcaacttcattgagagcaaacagcacaatagtg

SEQ ID NO: 431953 - DNA, 407 bp, Homo Sapiens
  misc_feature (299)..(307): n is a, c, g, or t
ttatgatctaataaactttattttttaaaaatgaccatttttccattttctttctaggaaattaaacccttttaattcttatctaccttctacataatggttattgaatactccacaatatattaagtctagatgttatggtacatgcatacactttcaggctgttttatacccactgtcaccaatacacataaatgggggaggaaaagctatgaaactgtatagggctgtatatatacttgtctcagcttaatgcaggaaattggtttaatttccagcagttttgtctaaactgttcnnnnnnnnnctatgaacagagttcaaatacaggactgtttgttttgaagagactttctaaagtgtacttaaaacatagtagttttttacctttcacaaaactgagttcc

SEQ ID NO: 431954 - DNA, 748 bp, Homo Sapiens
  misc_feature (48)..(128): n is a, c, g, or t
  misc_feature (130)..(202): n is a, c, g, or t
  misc_feature (334)..(389): n is a, c, g, or t
ggtatgacagattatgtttcaactctgtagatgtttaacgtcatagannnnnnnnnnnnnnnnnnnnnnnnnnnnnnnnnnnnnnnnnnnnnnnnnnnnnnnnnnnnnnnnnnnnnnnnnnnnnnnnngnnnnnnnnnnnnnnnnnnnnnnnnnnnnnnnnnnnnnnnnnnnnnnnnnnnnnnnnnnnnnnnnnnnnnnnnntgggttcacgccgttctcctgcctcagcctctctgagaagctgggactacaggcgcccgccaccacgcccggctaatttttttgtatttttagtagagacggggtttcaccactcacaggatggtcttgatnnnnnnnnnnnnnnnnnnnnnnnnnnnnnnnnnnnnnnnnnnnnnnnnnnnnnnnntgagccaccgtgcccagcctgttctcaatctttcaatcttgctcttttgagagtctgtctagtcagtcagacaacagataattcacactgcttgggaatatatgtatttcgggccatttctctctccatgcaattgagagatggagagtggatgactgcctggactctcagggccacccctgagtgcagctgcagtgcagtagaagttcactttcatcttgcattgccatgcagggcagactcatcctggtttttgcctccgttgtcagctggttgtagagatcaccccctcccaccccaaagaggccatagggtgagctgagggagatgcattggcatgacataggtgggtgacatga

SEQ ID NO: 431955 - DNA, 652 bp, Homo Sapiens
tataaatgtccaaaaactgtcaaactcatcacctacttagtaaggattgttttaaattgtgctttctcttggagggaaatcatgttacattattacacatttagcattactgataacagtagtagtattataaacatagattacaatatgaaaatgagttgtcaggcttctaaatgacccaaatctattaaacaaggttggttaattattattctttatctctttaacactaaaaaagatagcaaaatgctatagtaccagtaccttttaaggttcaaaaatggtttttcatgcacttctttaaaaagttcaacagcagctgacatcaggtttcaagagggaagtacatggatggattgagtggtctcttcagaagtccaaagaagatagttaatacaatctaaacacagccttggttagagttatttacataattacaatgctgaagttctgtcgcagtataaattgtgtctgttggactctcagcactgtccttgaagcacgaagttcaccttctgtggcctattattcccttatcgatctatctccaaacttcacacaccactgagatgctactgaggcattgcaagaggcaacactgacaaagttcatttcaaaatatcccattcattcatatttagaacgctccccc

SEQ ID NO: 431956 - DNA, 832 bp, Homo Sapiens
tccgcattgccaccattcgaagtatttaccagcgggtcggggcaatcgtgcatggtattctcaaccatttgcaggcttgtgtccaacaccattcatccagcccagggtaggccctgcgggccgggaccaccaggactcactcagctgtgcggctctcacggaacagcgctgtcactgacacccttgcgagtcttgctgaccgtgccgcgtacctgctcccccgcgccgtgttacatctggcggccggtgctgggcaccatcaggccgagacctcgcaccggccctccggttccaggcttccagccccggctctgtagcccccaagcttgggcctcacctggggccgcacgtcgtctgtacaacgccgtatctggtagcaaaagcccacgcgcgtgccgggccgcagtgtgaagcaccagggcgcctctgagccgtcgaggttccagcagaagttctcccgaaggtctctaagcaggcgctccactcagccctagcccgccagcctccagccctaagcccgtgactaccctcctcccgtctcacccgcagcagcacgtcccaacgcccgcccccccacctcacttgcacgcgtatttttctggcgtaaatcggtgctgatgcgggatttgcgcgtcccaacgctggcaaggtacgtccgcggtggtggtattggctgtgccccggtagccctcacccttcccgcggaagcagctgacacttgtggcctcttggcggggctgtgcctcggacccttagatggaccgagataggtcgggccccgagcgagagctgagatccctctggggctgggaccaaacccgcctttcccccc

SEQ ID NO: 431957 - DNA, 1637 bp, Homo Sapiens
  misc_feature (61)..(61): n is a, c, g, or t
  misc_feature (127)..(127): n is a, c, g, or t
  misc_feature (506)..(506): n is a, c, g, or t
aggattgatggcggctggtcatcagcgcagcgtcgcagggcacagtagtcgaatggggtcnttggttccatcgtgtagcaccagggcccatggctatccccatttgggttccggcagaagttctccnccagttgtgcatgcggttcggaggtaaacgtgaactgcggtttgtgcggcgtctcagcggaccagcgttggcactggacaccccttgcgggttcttgctgaccgtgccgcggtactgctcccctgcgccgtggtagcagtcctggggccgcacgtcgtctgtacaacgccggatctggtagcaaaaggccgcgcgcatgccgggccgcagtgtgaagcaccagggcgcctctgagccgtcggggttccggcagaagttctcccgaaggtctctaagcaggcgctccactcagccctagcccgccagcctccagccttgagcccgtgactaccttcctcccgtctcacccgcagcagcacgtcccaacgcccgcaacccnccccacctcacttgcacgcgtatttttctggcgtaaatcggtgctgatgagggatttgcgcgtcccaacgctggcaaggtacgcccgcagtggtggtattggctgtgccccggtagccctcacccttcccgcggaagcagctgacagttgtggcctcttggcggggctgtgcctcggacccgcagcgggggaggtcacagaactctcgctcgatctgcggatccgtagtgtagcaccatggccgctcggagccgtcaggattccggcaatagttgtcgtccagaccttggtcgaggaacccggctcgaaggggtgctggtgcgggtgctgaagatcccagcgctggcactcgcgccctgactccgtgcggtctaccgcgccgcggtattcctcgccattgcaccagacacacgcggcctcccggcaggatttgatgccgcagctctggaagcgcacagcagggtctgttgtgtagcaccaaggacctccggggtcgccatcagggttacggcagaagttctcttccagggcattccggagagtgggcgtgtacttgtgatcatttgggcacttgtggctccaatcctggccggtcaggccatccacggtcgtggtcatggtgccccggtaccctatcccattgttcattatgcaggtccgtccgtagtctttcttctggaagaggtcacagcgcccagaatgccgcagcctcgtgtggggcgagtgttgagtccatggcagcagttggcaaccatggctgctcacgttgtagtggaaggcccggcagtccattaagggcccacagcgaccagcacactcttcagcatctgccacatcctcctgccaaggcccgggcaccaccgcatgtagcaggtgctgtagctctgtgccccggagcacttggaagtcattcaatggcgagcgctgcccagggacccctaagcattgagtcagaagcagcaggagtgggagccaccccatccttctggctggaggctgcactgtgacccaccacagccccatccgggaagttgtgaaacctgtccctacgggattgggtggctctggctccacacgtcagctcagggcctgctggaccctgacctgagacctggtgacaggagccatgag

SEQ ID NO: 431958 - DNA, 1325 bp, Homo Sapiens
ttttccagaaattaagaccttccatccttggggcctttgtttgaaaaaatcctagaatatggaatttaatttgggaaagtacctagagcctatggtccaaagtattcctcccagttagtccctgttagagttcccaaggagaaattgaactgcagggaaagcaaataattactaaggacaagacactggctgaactagagaaactgaaattttgctaacctacaagcttcttaattgagtgctagagaattacataattaccctgtagtgtgtgacgttaagagcaaagtttttatatttacttttctcctgattaattgccctcgatggtgttagtgtcaagtggctacaggtgtaacccttttaattgagaatgacattatttctagcagcacaatgtaaccatttggtttttacttgttcctcctaagagatacagaaagttccaaatcccaaacttcatttatatattagcttctgcttctaaaatttttaatgcccaattctgagttagattgtacttggccttatgacttaaaatataagtttcaatttatagatgaggtctaaagatccaagttgatccacctttaacacagatcaatttaggacagaaacagaaatctggacatagataaataaacttgttaagttgcagtggtgtttataaaagtaggtgggcatcccttaccatttgtggtgaaaaaatcatctttggactgcagggaagcattaaaattacatcctagcaacccacagagttcagagggcaccaatgaaagatgtgagcaacggatgaactccttgtttattaacagaatttacagacttcattttagttggcaaaaatacttcaaaaaatatatacctaatgcacaaggaaaaccaaagaaagtcaatataattgaaggagttctcaaattacaattctgaaacttaccctctgtagggtgctgctaacgctactattcatcctagagcaggcagttaccaacaccttgcctgcagtgtccagtgtatgtgctggtctgcaatttttagggtcaatcacggccccgtgtggaaagagctgcggcagtgaagtcagaggacgtgcttctggagctggtgtgagcagttctgccttcaccatatctttttccactccacccttggctatccttttgactcagggcccttggcaccatcagtgcaaaaattagagtcaaacctccaggtactaaaattttactggccttataatcagcagtacctgtggctaatgatagccatgattcaactcagtagtgattcagttagataaccttcccaaactcttcaccgct

SEQ ID NO: 431959 - DNA, 1211 bp, Homo Sapiens
  misc_feature (61)..(61): n is a, c, g, or t
  misc_feature (123)..(123): n is a, c, g, or t
  misc_feature (132)..(132): n is a, c, g, or t
  misc_feature (206)..(217): n is a, c, g, or t
  misc_feature (346)..(400): n is a, c, g, or t
  misc_feature (444)..(452): n is a, c, g, or t
  misc_feature (492)..(502): n is a, c, g, or t
  misc_feature (516)..(684): n is a, c, g, or t
aggtgcggcggttgtttatttctcggcgcaggagagaaactgtatttatgtgttgatggcnggcggttttggtggttgtagcccccgggggggaggagatgttgctgaccaccgagccgccangaaagaganggttcccagcgccgggagagaaaggttgttcatagtaatcaaatccaagatttgatatgggagtggtatgcgannnnnnnnnnnnaaataatgtatttaggcaagtctccctgtgtgtggcggggccgggtggtgggtgcccctattggctccccctcgactcgcttcccctctggtggttgttgttggagggtgctggttgtggtccccggcnnnnnnnnnnnnnnnnnnnnnnnnnnnnnnnnnnnnnnnnnnnnnnnnnnnnnnntttttgtggggtgggtgttggggcggccttgttgttcccgcccnnnnnnnnncgccgcgccgcggccgcggtgcttgtgctccttttttctnnnnnnnnnnnccgccccccccccnnnnnnnnnnnnnnnnnnnnnnnnnnnnnnnnnnnnnnnnnnnnnnnnnnnnnnnnnnnnnnnnnnnnnnnnnnnnnnnnnnnnnnnnnnnnnnnnnnnnnnnnnnnnnnnnnnnnnnnnnnnnnnnnnnnnnnnnnnnnnnnnnnnnnnnnnnnnnnnnnnnnnnnnntacagaaaatctatttgatatttattaaacttagtttctccaactatggtttggcattgtacaaagcatcttaatgacacagtagagttaaaaagatctttacaaattgaaatgtgatacccttgtctccaaatattttaattgccataaatttgtttaaaaatacacattaaacgcatgtttgacactctaaactttctatactctcaataccacaaaatacatataatatactatacagatgtggaaaaatctagttagtatataatactttgctcaccattaacagctttatcgtgtgaaatgcacatactggacttaggaaatcctaggcttttgaggccccaaaggtacctctggaaattgtaatgtattggcaacaaataaaaatcacagtatataattgaaattctggttgaaaatgtcagatgcctaaatattttggataaaagaaatgtaaaacaaagatttggttcatgtacaaaacaaaggcatccttatcagtcactaacagtacctttctgccc

SEQ ID NO: 431960 - DNA, 1418 bp, Homo Sapiens
ctgtcgcacaggccttgccatccagctcgcttcttcagctctgacacccagtcggggttgtcatcttcctcctcaaagtccgtgtcctcctcatctagcccaggctcaagtcgctctggatccaaaatgacagaatcgtgacctccatcaacactgtccgatgcttctgtttcttcagacagggggcctttcaagaacccttctgaacctggtctatatattgtgtatgtttgaaaagccaagctgagatcagcattcttaaggatgttcaacaaagtgtccggggtctctttgagccactgcttacgagtagtatttttgctgtactttattacagaaccacctctatcgtcctctgctgttaaactggaggtgagtatggatgcattttccaaagctgtaagagctgtattgggtacatttttctcccactgtcgtctatgaagatttggtgaactggctttcctcagatggactgacttattacctttttcttctctgtttactcttctcaatgcactttcaactaaattttcattaatgctttccaaatcagtatggctaccctttctatcttgttcttcctcttgcactgtgcttgcttcatttcccaaagctatcctgattctgctggggtttgttttttttcttggtgtgttatgcttcgaattttttatttcttctaatacttcctcaccatattccatgatgatctcggggggtaagcacttctggacaagccgagctacgatgcctcgagagagaagcgttgtagccgaggggcgatgtgagggattccttttaaacatctgcttgactaggaactgaagttcataggagtaatgagacggcagtggactgatgcacccttgacatactttgaggataagatttttccaactatttgcctgaaatggatgcttaagggtacagagttcatacaggatgcaacccaaggaccagatgtcacttttattgttataaggcaggttttcccaaatttctggaggcacataataaggagttcccacataggtacaagcaaatgccatcggattggagagaagacgggcagatccaaagtctcccaatttcacttttccattctgagtgaggaagatattcttggacttgatatctctgtgtagcacacgtttcttgtgaatgtgatttactccaaggcacatttgggtaaaccaattaagtatcatgtcttcaggaaataactttcctttctgctgtttaatcttttgcattagatcccctccatcacagtattccatcacaatatacaagtgtccttcagcttcaaatgattctttgaaggcaacaatattagggtgtttcattttggctaaaagaacagcctccttcctagaattctgtgtattagagaaagaccgcttccccggcgaccc

SEQ ID NO: 431961 - DNA, 615 bp, Homo Sapiens
  misc_feature (410)..(410): n is a, c, g, or t
tcgtttatgacaaaatgaccttgcagccatattcgctgccccccatgaaggtgctgagaatggtctcattttctctgttgttgaaagtatagcaattcccatgcatcgggtggtgaaaaagcgtgaaattcctggcatcacaggacactccatcaaagaagcaggtcaccagcagctcctcagcagaatagctcatgttgattttcttctccagaggcacctgtgccatgatgttcatgtagtgtagcttataccactcctgaatggcattgattcccgagctgaaggtgtaggtggcacagtcggaggtgtcatttgagcacagttggaatcccaccacttgcttggactcgatgtgcatgacatttgaagccttgtgaatgatgctaccgccgactttccggcttccntcccttgtgaagaagtccctggcctagcccctctcatcctgatcaaagatcagcagcgggatccggtgggagaaatctaggctgctttccctctgagacggagttccaggactccgcctctcggcgcttccgggactctggaaagccgtacagggacttcagggcctccctggtctcctgttccaagtcagctagaaggtggtga

SEQ ID NO: 431962 - DNA, 510 bp, Homo Sapiens
aacttgtttgcttttttattaaatgatagttcttatgttctagattttaacattcatacattacgcataagtcacatatctttcctcagtctgttgctttatcttataccaaaagtaggtcataaagaaattttacattttgtaatgatcaaattcatcaatcctttcgcttatatttttgccttctggatcttaagaagccttctcaaccttgagaatatagatattttcttcttgtaagtataggacgattaaatgtgtgtctattttgtttactaatgcaatgatgctactctttttactgcttcatgatgtatcttgatatctagttgggtaccttttaccttggctctttttgtgcatttattctttcttaccaattctagaaggccttacttctctttgctttattacttctatacttccatcattgggcttttgttttttaccactcaactattattacttgttcagtaagacacacttactactaagaagtaattagaatat

SEQ ID NO: 431963 - DNA, 734 bp, Homo Sapiens
caactttttattagagaataatagattagagggcatgttggctcatacctgtaagcccaatgctttgggaggctgaagcgggaggatcccttgaggccaggagttgaagatcagcttgggcaacatagcaggaccacatctctacaaaaaaatttaaaataaaatgtttatccaagcatagtggcactcactcacctgtagtactagctgctgaggaagctgaggcctggagttcaaactgcacaacgctgcacttcaacctatgtgacaaagtgagatcctatctctaaaataattaattcagtttttataattagggaacatttaaattcagattataagtaaaaaatggaataaacaagtcctgttacctgatatggtttggatctccatccctacccaaatcttatgttgaaatgtaatccccaatgctggaggtggggcctggtgggagatgattggatcatggtggtggtttctcatggtttaacaccatcgtcccctggtgctgtcgccgtgatgatgaattctcacgagatctggttggtttaaaagtgtgtggcacctcccccttctctcttgctcctgctcctaccatgtgagatgccttggtccccctttgccttccgccatgattcagagttctctgaggcctccccagaagcagatgctgccatgctttctgtacagcctgcagaaccgtaagccaattaaacctcttttcttatacatta

SEQ ID NO: 431964 - DNA, 985 bp, Homo Sapiens
ttgtagaaccacaagctgttgtattttacgcgggaagccctataaaaaaagttttctgttttgtgttcacaagaagctttctttgggaagtccccagggagatccgacaaagaaggtgcacagggttacaaattagaggggccttttcgagtgggcatttttcttggcagccgtatttttccgggtcatttcagcggttggaaaacaaagtccgattattgaagcattttggcaaagaggataggaaattccccaattaatttaaccacaaaaatggtgtttcggcaaaccattgggggggttagattttggcgggacatccctttctgttgggcagcgttttccccatcctcaggggagccggaatccctccaagcactcgcacgtgtatgagtggtcactgttcacacaaatgtgttcacagccatggtctatagcttggcagacatctttccttctgcaggtttttccatcttcacggagtatataaccttcaaagcactggcacacaaacgaatcttcactgcttacacacgaatgttcacaaccgtggtcccccagagcacaagagtccaattttgcacacgtcttcccatcgctgcggagcacgtgtccctcaggacactgacaggcaaaggatctgtccatgttgacacaggagtattcacaaccatggtcactcagcaggcagtaatccacccgggagcaggtcttgaggtcctcgttgatgaggaagccttctgagcactggcagacgaaggaatcctccgtgttcagacacagctgctcacagccatggtcctgctgtgcacagtggtccactcggctgcaggttttgccattggggtccagagtgtagccacggtggcagcggcagtagtagctctcctccatgttgacgcactcatgctcacagcccggtttgttcagtgcacagtagttgatccttctgcaggttttatccggagaattccggaccggtcca

SEQ ID NO: 431965 - DNA, 441 bp, Homo Sapiens
caattccaatgtggtctccctatacattccattagcaagcaagcattactcagaatagtctgagagttaggtaagctgcataatagtatgcaaggtttgtatgcagcagcctgatccataaataatacaccatctatcttgccagacctcctcaggctcttatatactataaccagaggactgacacacaagtagtttttagactagctattgcagacccagctcttcataaattattttgattattatgactcacccatatgtctcacttcatattccttggaacaaaactctcaatggggaaatacgaggcttttatttgtgctttaggaaatgtcttaaagtctccaaagcaaggacagaaccagagagtcttaattgtgtgtctcctaaaaggaaaattccactgcatacagctttgcctaatggaaattctccccc

SEQ ID NO: 431966 - DNA, 1196 bp, Homo Sapiens
  misc_feature (374)..(422): n is a, c, g, or t
ggttttaggctacaatatttgtttaacctccctaagaactttcaaggcatctgtcctgaaagctgttaatttatggtctagcagatttatattatatgcagataataattaactggggataaaagaatggcaaggggtgacacaaagtagcaaactgaatacttctccaatagcaaccccaagctacctcctcaccctgcatcttggagggaggcaggaaatttcttttgaaataaagtgctggagctgaattctgcattacttatcgttgctgctgaaaccacctataaaagacttgctggctaatgtgcattgtcatataatgtacactgtcacatctttacagtcttgtatgttatagaatacaaaataannnnnnnnnnnnnnnnnnnnnnnnnnnnnnnnnnnnnnnnnnnnnnnnnccttcataggttatatgccaagatagtatttgataagtcaatgacatttggatgttttcttcaaagaattttatttgacccagatttcttataaagttatcttacattaaggatgtcattttcatcagaccttctttctacatattattcatgaagcataatgttgcatttctccaaattttatgcctgaaagggtagtgttgcttcctaaggtatcatgttgtctttgtgctttgtccatctcttccgtggcgaagctttatatctgttcctaaaacagttaatcctgtgaaataaatattgaacataatccagaagaatctctctatttcccttggggaatgccatatttaattcaccagcagtaatcctttaataactggcagagcactttattcttctggtgagctgcctgaatatttatttttctgattataaattttctatattagtagcattttttaattattacttcttcactatagagcatttacttttagtctctagatgtatattttggaatgctgtacttggcataacatagattaaaatcataatgcatgactaaaaactccttggatttatttcccattttaaaatttttagcggtaagttcagatttataatctttctctagacttccatggtctgaatgttgcctgctgaagtagcaacctaaaaagtatcccctgcttatgcttctccagttggccctccatgtccataggcttcgcatctgtgattcagcccactgtgggtcaaaaatatttgggg

SEQ ID NO: 431967 - DNA, 670 bp, Homo Sapiens
catttacaacaatgcagtcatttatttattgagtatgtgcacattatggtattattactatactgattatatttatcatgtgacttctaattagaaaatgtatccaaaagcaaaacagcagatatacaaaattaaagagacagaagatagacattaacagataaggcaacttatacattgagaatccaaatccaatacatttaaacatttgggaaatgagggggacaaatggaagccagatcaaatttgtgtaaaactattcagtatgtttcccttgcttcatgtctgagaaggctctcccttcaatggggatgacaaactccaaatgccacacaaatgttaacagaatactagattcacactggaacgggggtaaagaagaaattattttctataaaagggctcctaatgtagtactgcttgaaaatggtacatttttgttgtagattattttaaacataatgctatagtaatattttgaagatttgagctgttatttccatttgtttttacactgtgactaaatgattaggttttagttttagactctaaacggaacctgaattaataggaaataaacacggtactatagttgtcctatggtgcccctatgggtgatgggttccaagaaccccctaggatactaaagtccttgatgtcaagtccttat

SEQ ID NO: 431968 - DNA, 678 bp, Homo Sapiens
  misc_feature (100)..(148): n is a, c, g, or t
  misc_feature (658)..(658): n is a, c, g, or t
gctgaaacccctataaaagacttgctggctaatgtgcattgtcatataatgtacactgtcacatctttacagtcttgtatgttatagaatacaaaataannnnnnnnnnnnnnnnnnnnnnnnnnnnnnnnnnnnnnnnnnnnnnnnnccttcataggttatatgccaagatagtatttgataagtcaatgacatttggatgttttcttcaaagaattttatttgacccagatttcttataaagttatcttacattaaggatgtcattttcatcagaccttctttctacatattattcatgaagcataatgttgcatttctccaaattttatgcctgaaagggtagtgttgcttcctaaggtatcatgttgtctttgtgctttgtccatctcttccgtggcgaagttttatatctgttcctaaaacagttaatcctgtgaaataaatattgaacataatccagaagaatctctctgtttcccttggggaatgccatatttaattcaccagcagtaatcctttaataactggcagagcactttattcttctggtgagctccctgaatatttatttttctgattataaattttctatattagtagcattttttaattattacttcttcactatagagcatttacttttagctctaaatgnatattttggaatctatcttg

SEQ ID NO: 431969 - DNA, 536 bp, Homo Sapiens
  misc_feature (216)..(483): n is a, c, g, or t
atgtatattttggaatgctatacttggcataacatagattaaaatcataatgcatgactaaaaactccttggatttatttcccattttaaaatttttagcggtaagttcagatttataatctttctctagacttccatggtctgaatgttgcctgctgaagtagcaacctaaaaagtatcccctgcttatgcttctccagttggccctccatgtcnnnnnnnnnnnnnnnnnnnnnnnnnnnnnnnnnnnnnnnnnnnnnnnnnnnnnnnnnnnnnnnnnnnnnnnnnnnnnnnnnnnnnnnnnnnnnnnnnnnnnnnnnnnnnnnnnnnnnnnnnnnnnnnnnnnnnnnnnnnnnnnnnnnnnnnnnnnnnnnnnnnnnnnnnnnnnnnnnnnnnnnnnnnnnnnnnnnnnnnnnnnnnnnnnnnnnnnnnnnnnnnnnnnnnnnnnnnnnnnnnnnnnnnnnnnnnnnnnnnnnnnnnnnnctagggggttcttggaacccatcacccataggggcaccataggacaactatag

SEQ ID NO: 431970 - DNA, 390 bp, Homo Sapiens
  misc_feature (306)..(306): n is a, c, g, or t
  misc_feature (353)..(353): n is a, c, g, or t
acaacaatgcagtcatttatttattgagtatgtgcacattatggtattattactatactgattatatttatcatgtgacttctaattagaaaatgtatccaaaagcaaaacagcagatatacaaaattaaagagacagaagatagacattaacagataaggcaacttatacattgaggaatccaaatccaatacatttaaacatttggggaaatgagggggacaaatgggaagccaggatcaaatttgtgtaaaactattcagtatgtttcccttggcttcatgtctgaggaagggctctcccttncaatggggggatggacaaactccaaatggccacacaaatgtttaacnggtatactaggatttcacactgggaacgggggttaaa

SEQ ID NO: 431971 - DNA, 423 bp, Homo Sapiens
  misc_feature (361)..(361): n is a, c, g, or t
agcagattgacatagtgctttatttaagctgtctgtacgaaggaaaatcatgttcatccctatcatatacgtgtaaaaatactaaggatgtacagtgtacaaaaacagtttctcctagttattccacatccttgtgggtcatatacttcaggaaatagacaggtttagtatgaccaacagtaatagtaatacagtttcttgggtttatagttgcatctgcttaaaatccttaaccagatgactaggatcttgcgcagatctaatgaaaggaactaggcaagggtcaaggaaatgtcacaaactattaaaggctacagggggggtaattccaatttacccaatttaggagggttttcttttntattttaatttaaatacttttacctttcctggcttggccggtaattgcactaccgggggggc

SEQ ID NO: 431972 - DNA, 2001 bp, Homo Sapiens
  misc_feature (404)..(417): n is a, c, g, or t
  misc_feature (1908)..(1917): n is a, c, g, or t
cagaaaaagggcccccatcccagaaaggattcaaacgtgaagtcaagactgcagtccagccatcctaccccatctacatcacccacgtctaagtttgttaatttgcccatgacatgttgttagaaatacactctaagaaaggaaatatgcagagcagtacattatcaggaagacgttaatgaaaagctacattccttcagattctgggtccaaaccgtgtgttgtatagatgattcgggtctgaatgtccccagggtctgagacctccttcatccctggcttcacagtacatccatcctaaatccagtgctgagaggtcagcgtttcccctcagaagcagccgttcatcaaagtttgcacaaccgcactactgccatttcactgaagtaaaaatgatcccctannnnnnnnnnnnnnagctacaaggaattatttctatattttcctgtcacattttatacaaggtaggttaataccagctggggctattaaaaatcatgttttcattaaagaagatttaatttggggggattatagaaccacatccaacaacaataaacagagaagtagcagattgacatagtgctttatttaagctgtctgtacgaaggaaaatcatgttcatccctatcatatacgtgtaaaaatactaaggatgtacagtgtacaaaaacagtttctcctagttattccacatccttgtgggtcatatacttcaggaaatagacaggtttagtatgaccaacagtaatagtaatacagtttcttgggtttatagttgcatctgcttaaaatccttaaccagatgactagatcttgcgcagatctaatgaaagaactagcaaggtcaagaaatgtcacaaactataaagctacagggaggtaattcaattaccaatttagaggttttctttttatttaaataaatactttacatttcatgcttgcctgtaatgcactaccaggagcaagttaagggaaattctactgtagacagtacaaacagtagcagcaaagtgtgtatgttgaggtgtaatagagagaccctgcagttagtaaggaaggcccttacttttgtactctaggagaagcaagtggcccctgcaagaacagtcagctttaagaagctggaaatcagggatgggaaatggaaaacaatacttgaataatgctatgtaattagtgtagaaagcaaagctgagcgcgaccctgccaaccatctaagcagaaatggccaatttcctccaagatggctgcattatgacaagaagtcaagcttcatgacagttagtatgggctggagtctgcaaagtctgaactgtattctcatagaatgattccaggtttcagggtgttccacctgccagaacccaaaactacaactatgggcgacacaagggaagttttagaaatctccctctacacgcatttctggttttctattattcctccatggcagctgacagatctggaagtgaaaataggggattctcaaaatcaaagccaagaagacaccttgtgtgacaccaatggagtctcagagggtggaatagaagtgactgagccccaggcatggctgggaactgagagccagtgtgaggagtggcccgcctggggcaatgtcagtgccagtcattaatctttaagaagtgtccttggccaaggtcatgggaatcactttaagatttgcgggagaaaaaaccaaaacaacaaaaagctgtgtgcttagtgttcggtgtcatgctttccctctagaggagtaagtgctctgaacatcagccagtctcagctttctgctcttcctctcacctgtttctttcttatataatggatgcaagacaacttaaagaacataccttctagtctacttttttgtcaaaatgaaacattcaacataattccaagtgnnnnnnnnnngattagctatgtgtgtaagtaagaatgaactaccatttactgtaacttcctactcaatactaaggatgaacttcactcaggtag

SEQ ID NO: 431973 - DNA, 1137 bp, Homo Sapiens
agttcgacggagaactctcaggttctgtggcaaggatacatcagaaagcgcactcgaagaaaatgttctgaacttgaacatgacgagtggagatgttggggtaccaggcgaatgggacggctgaccaatgcataaccttctccatcaaattgaatagtcccctcactatcttccacctgaggactgacagtgcatccttggcagtcaccttctttttctcggaaattccacaaacctataggtttgttgtcaaagtatgtttctcccatgcagccagtgaatgtaatcacacgtacagcatcagccttctttaatttcccagtcaggccaccaacaaacagcattgcatttgcatccacatctagaatcgtgtaccctggaggagacgtcgaatggtgtgtgctgggcacaatgctggctttgggtccatccagggctctcacagaaatagttccatttctcccagttcttgatgctacgatacggtaccaatatgagtcatcaatagtcaaatctggggtactctacacgtccaactccagatccaacatcccagaggaagctgactttgcctttacgcatttctatagccagaaagtcaataaatttggcacttccaagataaaagaggaggttatcagcaacagctgtctttacgttgacaacaatattattgtaacttcctttcttgatttctggtttgtatgttcgaatgcagtcacctcctgaagacacagatactttgatagaattggcttgtttccgagcttggtttatcaattcctttatctcagagatgtttttctttaggttatcctcaagttccttgatgggtttgagtttatctattagccggtcagcttcctgttctaaatttttgacagtggcatctgcatcggcaatgattttgttcttggaaggatctttaaccacagcattcgttttggcgacgctgtctgctagtttattgtaattcttcttcaggccatcgaggttctggtggagctctgtaatctgtgccagtacatctttagctgtgtcgttggcttgtcaggctttgtccttaacagctgatccgaaaatccggaccggtaccagctgctaaaaccgcaaccggcgccgagggaaggaggggaa

SEQ ID NO: 431974 - DNA, 1148 bp, Homo Sapiens
gatcacaccaaacattttcattgagaaattgacacggacactaatgaggtttatcatggatggtctcagaagctttcctgtgtatgtgaagcagaactataggcctttttgtataagttcctgttacatcttgtccatgctgttctcaaagatgggtcggtgggattttcccttataagaggctgccctgttggaccagtattcaccgtcatccaaatggaaagtgccacgtggctgctgacatgagctatactcggggtcactgtcataggcagagtctctacataaaagacttcttttcagttccagttcatcatctttctctaggtctctctcatcatataaatgtctttgatgagcctgatgtgatttcaagacattttttacccggtcatggatctcatcgcagtttgaaggtgaacaccaatcagaatgaaatctgttccctgagagaagctctatttaacacagggcttggagaatgctttggcattgttgagggtgctgaatggactagcaaggtcctcgctgaatgccggggcttactacacgaccttgggctcaaatactcttcacatttttctaaagagtcatcgaagtctctcccatggggtgtcctgataaccttataatccttgggtcggcagcagccaagatgagaatgatcattgtgcacccttgaccatccatctctttcacagtctcttccagaagatcccaataaagtatcagccctgggacttgggggatcaacatgtctaatcacaaaatggaggtttatctgtttcttttttgaactcatagggtcccagatttaaatgggccagccgccgcctggtgtcttcagatagctcacacatgcgtctttttgtgtagggagatggagagtgtgattttgaagaaattgtaggctgttcgtagttttttgcatttatacagtatttacttctctcaggtgacttggattttttcttttgtgatcttgatgttctgttttgcagtctgccatgtgatttttcaactggagccaaatggtaaataaatttatcctttcttggcttaagtcacagttatcatcttcagcacactttacttgaatactgataatgcagtaaatgtacaatccactccttccacgataagcccag

SEQ ID NO: 431975 - DNA, 435 bp, Homo Sapiens
agagttcacatagtggaggttttattgctttaggatattctattacgaagaatgtaaaacctattatggctaataattttttttacttaaaggcaaactttctaatgctgatattattgtcttttccaatttagattctatgtaaacatcactactttttaagttagttcatctctcgactttacctaacttgaggtataacacaacttatctcaaaaccactcgcgtgagtcagaccatcctgcagagactttcagatgaggacatatggtgcattccacatttctgtatccagtctatcgttgatgggcatttgggttggttccaagactttgctcctgtgaacagtgctatactcggggtcactgtcataggcagagtctctacataaaagacttcttttcagttccagttcatcatctttctctaggtctc

SEQ ID NO: 431976 - DNA, 1728 bp, Homo Sapiens
  misc_feature (708)..(717): n is a, c, g, or t
ggaaataagtcaaagcattgtttatttatgacatatttacatatttacaaaactgattttactcaatacatcatcctgcgtaatatcataaaatgaacaccatatcctgggaataaaaatccatatttcttaataatttatgtatagcccaacttttagaacatagaatattatcaatttggcttcccaaactacaaagtcctgtttataattttttctagccaaggaacagagtaggttcaacagcatattaaagtaatttagttaaccctgaggtaattactaacttggcataattttgaatggggtatatataacacactttcatctggcacttaggatacttatactatcacactacctttttgtatttatccacctcaattttcaacttcattaatcttcagaagaaagaggaataaagaataggaaagtaataacagaatcattacgaggaaattactagcactgcctaaacattcagaagtctgtgacacagtttaggtctagggttgtctcaaaaacctaacaaaaggaggatcccgaattgaataatctgagcaccttgtcaactgaggttgattaaattatttttcctgcattctttgtttcctttcacactaattaaatattgtgtacaagcttataaaattcaataatttgtattaaaatacaaaatccaataacaaccaggagttcttcggaagnnnnnnnnnntcacaaaacaaccccaacggtggtgaagaactatattaaagatggcttttcctaagacagagggagaacaaaagcaaacagcactctccctccgccaaggctagagcaggaggttcaaggaaatgggcaggaagagaacagaacactcaagctggacgattagtgaaggaaactgtggcctgagactgatgatcagcatatcttatgcctaaacaccaccactaagactacctggctaagctgccatggtgtgttagagatgatgagttacttttcttgccccttttacaacagggaaatctaaggacaacaaaataaacaaaaggctgagaaagctgagcatgtgaagtcagtcatgctccgctgcttttcaaaaactctgggccaagaacagaaccagagaggccagagcagttcatgtattcctctcttccatctgaccatctctcatcttcctcacccactcacacggttccgagcaggaggcttaccaggtcaccaggggcaggaaaatttctagcttcaaccaagccatggactgccactgctctttggggattctaggaaaataatcatctaatgaaatgtcagtatttgtgattctatgagaacaattctcaaaacatcaaaaagacatttgtgacttggtaaaataaaaatcaaagaaaaattaaggtatttttagaatctgtaaaatttccttataataggagggaaagtagcagaactattttaagtaaggacatgcttcccttcagtctgtaatgaaagactgttgttgtcatcatgccattgccatgataaaatactactagaaaaggatagcttttaaaataaagtgtagacgcaaatggtagagaaagccttcttgtacttgaaggaaggaaagaaagtattctgtccctgttactcctggacaaaagtacaccaaggcaacctataacctctctgtgctgtctctcatgacttttaatgacacggaagtctgatattcactgaacagtcattata

SEQ ID NO: 431977 - DNA, 473 bp, Homo Sapiens
  misc_feature (452)..(452): n is a, c, g, or t
  misc_feature (461)..(461): n is a, c, g, or t
ttgccttggtgtacttttgtccaggagtaacagggacagaatactttctttccttccttcaagtacaagaaggctttctctaccatttgcgtctacactttattttaaaagctatccttttctagtagtattttatcatggcaatggcatgatgacaacaacagtctttcattacagactgaagggaagcatgtccttacttaaaatagttctgctactttccctcctattataaggaaattttacagattctaaaaataccttaatttttctttgatttttattttaccaagtcacaaatgtctttttgatgttttgaggaattgttctcataggaatcacaaatactgacatttcattaggatggattattttcctaggaatccccaaaggagcagtgggcagtccctgggcttgggttggaggctagggaaattttcccggccccgggngcccggggnaggccgccggtt

SEQ ID NO: 431978 - DNA, 1341 bp, Homo Sapiens
  misc_feature (490)..(490): n is a, c, g, or t
cgacactcggcctaggaatttcccttatctccttcgcagtgcagctccttcaacctcgccatggcctctgccggaatgcagatcctgggagtcgtcctgacactgctgggctgggtgaatggcctggtctcctgtgccctgcccatgtggaaggtgaccgctttcatcggcaacagcatcgtggtggcccaggtggtgtgggagggcctgtggatgtcctgcgtggtgcagagcaccggccagatgcagtgcaaggtgtacgactcactgctggcgctgccacaggacctgcaggctgcacgtgccctctgtgtcatcgccctccttgtggccctgttcggcttgctggtctaccttgctggggccaagtgtaccacctgtgtggaggagaaggattccaaggcccgcctggtgctcacctctgggattgtctttgtcatctcaggggtcctgacgctaatccccgtgtgctggacggcgcatgcgtcantccgggacttctataaccccctggtggctgaggcccaaaagcgggagctgggggcctccctctacttgggctgggcggcctcaggccttttgttgctgggtggggggttgctgtgctgcacttgcccctcgggggggtcccagggccccagccattacatggcccgctactcaacatctgcccctgccatctctcgggggccctctgagtaccctaccaagaattacgtctgacgtggaggggaatgggggctccgctggcgctagagccatccagaagtggcagtgcccaacagctttgggatgggttcgtaccttttgtttctgcctcctgctatttttcttttgactgaggatatttaaaattcatttgaaaactgagccaaggtgttgactcagactctcacttaggctctgctgtttctcacccttggatgatggagccaaagaggggatgctttgagattctggatcttgacatgcccatcttagaagccagtcaagctatggaactaatgcggaggctgcttgctgtgctggctttgcaacaagacagactgtccccaagagttcctgctgctgctgggggctgggcttccctagatgtcactggacagctgccccccatcctactcaggtctctggagctcctctcttcacccctggaaaaacaaatgatctgttaacaaaggactgcccacctccggaacttctgacctctgtttcctccgtcctgataagacgtccaccccccagggccaggtcctagctatgtagacccccgcccccacctccaacactgcacccttccacctctgccccaccattatctcagctgtctactactttttt

SEQ ID NO: 431979 - DNA, 1073 bp, Homo Sapiens
  misc_feature (117)..(117): n is a, c, g, or t
gaaggccggcccttgggaaagttgtccgaattgggcccagaagagggttgaagggttggttcctttcctgccctggggctcagtctctgccccagttcccccagtcccccagccagnccagtggcccgtgccagggccctccctggggtccccagcctgcgctgagctcagtccaggggaagaacaaagcagagaggaacagagtggagcccgtggcacctttacacgtagttgctggcagcagcagagcgggcagcagaatacttggcggagtaaggcttgtctgtgcggggtggacagttgcagcaaagcagccccccgccaaggagcagcaggccggaggcggcccagccgacgtagagcgaggcacccatctcccgcttctgcccggaggccaccagcggattgtagaagtcttggatgatgttgtgggccgtccaggacaccggcactatcaccataaggccggccaacaggaacaccacgcccgccacgatcatggtcttggccttggcgctttcatcctccaggcagttggtacacttgccccccaccacggacagcagcacgcccagagcagccacgatgatgctgatgatgacgagggcgcgggccgcctgcaggtcctgcggcagtgccagcagcgagtcgtacaccttgcactgcatctggccggtgctctgcaccacgcagttcatccataggccctcccagatggtctgcgaggtgacaatgttgctgccgatgaaggccgtcacgcgccacatgggcagcgcgcagcacagcatgacggccagccagcccaggacggccagcgcgatgcccattacctgtagccccatggaggccattgttcagcgtccgcgggagttgaggacctggaaggctgaggggatccggctgtgggggccgtaggattccaagcgctggggacggacttaacgttcgcagagtgcacctttgcaccgtgagtcaggagataaagccagtcctgatgcgcaagccagcaagtgtgagcagaccagttccttccagccgacagctgatcccgggaatccggaccggtccagcct

SEQ ID NO: 431980 - DNA, 702 bp, Homo Sapiens
cacaaagccacaggcaggtgcaggcgcagccgcggcgagagcgtatggagccgagccgttagcgcgcgccgtcggtgagtcagtccgtccgtccgtccgtccgtcggggcgccgcagctcccgccaggcccagcggccccggcccctcgtctccccgcacccggagccacccggtggagcgggccttgccgcggcagccatgtccatgggcctggagatcacgggcaccgcgctggccgtgctgggctggctgggcaccatcgtgtgctgcgcgttgcccatgtggcgcgtgtcggccttcatcggcagcaacatcatcacgtcgcagaacatctgggagggcctgtggatgaactgcgtggtgcagagcaccggccagatgcagtgcaaggtgtacgactcgctgctggcactgccacaggaccttcaggcggcccgcgccctcatcgtggtggccatcctgctggccgccttcgggctgctagtggcgctggtgggcgcccagtgcaccaactgcgtgcaggacgacacggccaaggccaagatcaccatcgtggcaggcgtgctgttccttctcgccgccctgctcaccctcgtgccggtgtcctggtcggccaacaccattatccgggacttctacaacccccgtggtggcccgaggcgcagaagcgcgagatgggcgcgggcctgtacgtgggctgg

SEQ ID NO: 431981 - DNA, 1612 bp, Homo Sapiens
  misc_feature (51)..(51): n is a, c, g, or t
  misc_feature (71)..(71): n is a, c, g, or t
  misc_feature (85)..(85): n is a, c, g, or t
  misc_feature (197)..(197): n is a, c, g, or t
cgcctgtgttgtgccgcgtctgggttaggtctatactgcttaaaaggcatnagacgggaatcatttgtttntcgcttagacgtgnaatgacataagggaactgggcgggtagagcaaatctttttcatcactgaatatatgtgacattttgagccagatatagcaatcacagggcacttagaataccagtcgttgtngcgggacggatagacctcgcagtgatcgaggtgtatgtacgccaagacagagtgcaaggtcctaatctttgtttgcattgcagtgagactgcacaaaagggcctttcaagccatgcatccatgcaggcatcacgttttgcggggggggcaaaggcaccatgtcccaagcaggggatatgtaaagggctatcacggaatactgggggagagggcctgcagacacagatttggggaaaaaggaaaaatggggaacatgggccagccccggatggcggcaagattccagaaggtcagggttaaagccattcgtggccagcaagaagccaagctccccacttccagccaccaccaccctgtcacttccgtcccctcccccaatatccagaggagggtggactctgttcttgctagcaggaggcggccttgggaagttgtccgagtgggccagagaggctgaaggctgctgccttcctgcctggctcagtctctgcccagtccccagtccccagcagccagtggcccgtggcagggccctcctggggtcacagcctgcgctgagctcagtccagggaagaacaaagcagagaggaacagagtggagccgtggcaccttacacgtagttgctggcagcagcagagcgggcagcagaatacttggcggagtaaggcttgtctgtgcggggtggacagttgcagcaaagcagccccccgccaaggagcagcaggccggaggcggcccagccgacgtagagcgaggcacccatctcccgcttctgcccggaggccaccagcggattgtagaagtcttggatgatgttgtgggccgtccaggacaccggcactatcaccataaggccggccaacaggaacaccacgcccgccacgatcatggtcttggccttggcgctttcatcctccaggcagttggtacacttgccccccaccacggacagcagcacgcccagagcagccacgatgatgctgatgatgacgagggcgcgggccgcctgcaggtcctgcggcagtgccagcagcgagtcgtacaccttgcactgcatctggccggtgctctgcaccacgcagttcatccataggccctcccagatggtctgcgaggtgacaatgttgctgccgatgaaggccgtcacgcgccacatgggcagcgcgcagcacagcatgacggccagccagcccaggacggccagcgcgatgcccattacctgtagccccatggaggccattgttcagcgtccgcgggagttgaggacctggaaggctgaggggatccggctgtgggggccgtaggattccaagcgctggggacggacttaacgttcgcagagtgcacctttgcaccgtgagtcaggagataaagccagtcctgatgcgcaagccagcaagtgtgagcagaccag

SEQ ID NO: 431982 - DNA, 430 bp, Homo Sapiens
cacatctgtagtcttggccaaatgatacactttattttgtggaagtagagaatcaagagaattggttctaggaacctgggttcgttcatcattgttgtttatttttttaaaataaataaataaatatatatatagatgctctgcaacaaactctgtgacagtatccttcagtagagaaagtttcttacttgtgagtacactcttttagaacatttacgggtggcagcagctttgctttagagtttagaagataatagaaggaatgactattcatgtccaaagtgaatggttttgtgcagtgaacaacacatggcgaggtactaactgagaaactttttcatgctttatgcctacctcttgtagttgttgcagagcaaatactaaattgtaataagatagctaggccttgcagaaacaaacagaaaaactt

SEQ ID NO: 431983 - DNA, 915 bp, Homo Sapiens
  misc_feature (32)..(32): n is a, c, g, or t
  misc_feature (69)..(69): n is a, c, g, or t
  misc_feature (106)..(106): n is a, c, g, or t
tgacccccatggacttttgcaaagtcctgtgnccttttaaaaatgctgacattggtcgctgtgcccatnagaaactccgtgaagatgaagatggagcagctccagntgaaatagttatccagcctgagccagttcccaccccagcctttcctacggctcccggccgagagcagcgaagctgcatctcgatgacagcctccaggcactgggcggctagtccgatggggcgcgctagcagcagcggctcgagagtctccccagggccgattcgcagaaccgccccttgggaagggtgcagttgcaggtcgcaggcacctttggggcaaggggttagggccgccggatggcgagccaggactcagggtcttcatgagtcgcacagccgactgtaggtggtaggcgcagtctcgggcctggaggagctgctcccgctcgcgatgcagccgcagcaacaccgcccggagacgctgcagcgcgggagggatcgggccgccacctgcgggcccccgcctccaggccgcagcatcagcctcgtagtcctcgctcacatccgccggcgtcggccaccacggcgtccctccagaagttccgctcggccagcagtgaacctcccagcgaagaccgcccgttcgacttctctcccactgctcctccccagtgcccccgggttgcgccctcagcgggggcacgataacgagtggaggcaggctacctgagcgagacgcctgggccatggggcggcgggtccagaacgaacctaacgattcccacttccctgcacggaccaacgcccgccgcagctcggacttcgccccatcgcaagagccgttttctccagtccgggagtcgcggggaccttcatggactctttcgtgctccgtaatgggaggcttctgcccaataaccccagtaggc

SEQ ID NO: 431984 - DNA, 1506 bp, Homo Sapiens
agaatgaaataatcagtttaatattatttatagacttgagaaagaacttgaattaaaattcagtctggagtctgaattagcaccatctgaatacagaaagaattctatgtacatgcacaaattagtttaattaacatatataggtaaaatatatttgtttgttttacttgatatacttgttttgacagactcttcctggggttacacttatttttattagttggctgggcatgatacaggttgaacgcccctcagttccagggccttggcaaaattaacctccagtggcttgcctgtgcctttggtgagcttcagggatctgatgcaacctcggaacggaatactggttgttaggccaaactgcttgaggtcatctgggaagcctccaacaaacacagggtcatttgtgtcagctgatgtagatgctgggtttgggctttgggcttccacctggttcccatcgactgtgagctcaatgcggtgtttgatcttgttggcagtgactttatgccattgtccatcacacaaatgccctggaaccccagcatcatagacagcagtgaatctgcccgcaccattgtccacatgaaacatcaacttttcatcaatcatttcaatacccattccatccattttttgactactgatccccagaagaactccagtcgttgtagttgtgcggaattcaaattctacaagaaggtccaatcccactttgaatccaccaactgctttggcaaaaccggttccgtcaaaatatgttcccctctgagcatttgcaaaacatgtcccaacatggaagctggaggtgggttgttccagatcggcaggggcctctgccatgtggagattcctgacgcagccatcaatgctataggtcactggaccaattcttcgggtagtgtagttgatgggtaacccaccaacatacagcattcccacgacatccaggatgtcggcttttttgggactgatggttctgttggaagccccatctacataaagaattccttcttgcttacttctcattatcttaatcttgtgccactggccatcattgattttggtggggatcatggtgtgggtgtccccactccccaagtcatagctgaagtagggcaatccatttctcagctgaactgttgcaaaatcagcatgattgatgcgagccatgtaaaaaagcaagccggattcagcttcggttcttacttccaactcaattgtgagacggtttttaactttggtgtcatcaaatgcaattgcaatgtgactgtttcttgaaagcccgaactgcttgctccctatcaaaagagctggttctgattctgcagcacaaggaccatgtgtcagaactggggtgggcgtaggaaaggctggggtgggaactggctcaggctggataactatttcagctggagctgctccatcttcatcttcacggagtttctgatgggcacagcgaccaatgtcagcatttttgaaggacacaggccttgcaaagtccat

SEQ ID NO: 431985 - DNA, 520 bp, Homo Sapiens
  misc_feature (46)..(46): n is a, c, g, or t
  misc_feature (333)..(473): n is a, c, g, or t
gtacgtaaaagggtgtttttgtaaatgcaaagattaaatctgacangcctctgaattgtagtcttgaaaacattagcaagttcttttaggtccaaggtagatactgcagttcacttagccaactttctgcattgagacatccttgccagggatcctgtcagttatgcgaagatgcggcacgagataattcctcttgctgtgatggttcgtcctcaatgacaggtcccttatagtatttaggtacaacaaggtcttttgtgcttggaatgcccttgaaaaagctgcctcacctgtttgtgaagggaaccccaaagagaaagggagaggaagggnnnnnnnnnnnnnnnnnnnnnnnnnnnnnnnnnnnnnnnnnnnnnnnnnnnnnnnnnnnnnnnnnnnnnnnnnnnnnnnnnnnnnnnnnnnnnnnnnnnnnnnnnnnnnnnnnnnnnnnnnnnnnnnnnnnnnnnnnnnnncatggtgatgggcacctgtattcccacctgcagcccgggggatccac

SEQ ID NO: 431986 - DNA, 1237 bp, Homo Sapiens
  misc_feature (306)..(306): n is a, c, g, or t
  misc_feature (982)..(1014): n is a, c, g, or t
  misc_feature (1160)..(1175): n is a, c, g, or t
tggcccagtataaagtcccgtccaaaaagggaattccttttggccccggaaataacagaaaatatgtcccccatcttatggtgggaggcatggttggccactctcccaatagaggcgcattcttgcccattggtggttaaggtattgcccttattaggtgccaccagtaggagggatacccccagaaaggcagctgggctttcaatttctgacattgatagtgggtagagaaaaatcagaaattcagcaaaaccatgccagagaagttccctatcattgtattcaaagccaaccttcacgtatgtnttgaggcttgcaaaatacagaatgaatacctaggagacgttctgtcaaagtgcaaacttttccccctctgaagggaaaatcaaaaaaattaatcagcccgacctaatttcaaaagtccaatcgcaaaattcacacactgcttgacttttcccaaatgatgctaaatgatggtttcgaaacaaatcatagcatcgttcttctaaccacctgccaccaattgtacaaacagcataccagattttttgatttttactgggtggctgatatctcaggttaggggaaaaatcatttttgtacttaatattcaaaactgactgtcccactgtggcatttttggagtagatggtgaatctccacaagaaaacccataagcacgctttcacctctggctcaaagcgagctaacagcccaggtttaaatccatgaaagcactgagtaaactgggaccaaactagctgctccagggccttgtttagttcaagtgcatccaactggcttattcttagcactctgtttgcactcttcgcattctcttttctggaagccatgtcttctctgaaggtctctttttcctgttcctgcagctccctcaagactggacagcctatagctatgacagtgggaatttttgctccaagttcttctgtgaaatccttgcctcatacttgccagaagnnnnnnnnnnnnnnnnnnnnnnnnnnnnnnnnnttaggagtctgcgaaacgcccacgctccacgtaactttctctgaaacattctctggaaagcttgtcttttcctagccgaatctggattaccaaggcttccggaactcgcaggcttccggagcgacgcaggagccggaagtggctgnnnnnnnnnnnnnnnngttacaccaacgagaactgcgctttagcggcgctgcgatcccgggaattccggaccggtacc

SEQ ID NO: 431987 - DNA, 1596 bp, Homo Sapiens
gttacaactgaggcatcaggtcttaaggtttaaaacagtctcataactcgtcacattatcatattatgtcaactctgaaaacaaacgcacactcatcccagagtctccaaaatctttatctttagaatccaaccttgttttaagaagtagtaaaatgaaggagcattgttagtagtcacctgacaaaagctgtccattattcttgacattaaaaattgaatgcaatgatttaaaaaacataatacattaacatttacataatatatttagaatcacatggtttccagtgattagatttcagtcatgcctggaaaggagaagacagtggctaggagcacattccttataaaggatacataaatggtatacttaggatgactaatattaagaatttaaacacggtgcatttttttcctcaaaggaagcaattttagtttctaaagagcatttacttctgacatctcgattcctgatttcagtggctgcagactgtgtacttctgtgccacacttaggacaagtaaagtacacgtcaaataagaaactactcttagcacagaaataacagaaaatatgctcacatcctatggtgtgaggcatggtgggccactctccacatagagcgcattctttgccactggtggctaatgtattgtcactattaggtgcaccagtaagaggaatacaccatgaagacagcttggctttcaacttctggacattgataagtggtaagagaaaaatcagaaattcagcaaaaccatgccagagaagttccctattcatgtattcaaagccaacttcacgtatgttttgaggcttgcaaaatacagaatgaatacctaggagacgttctgtcaaagttgcaaactttcccctctgaaggaaaatcaaaaaattaatcagcccacctaatttcaaaagtccaatcactaaattcacacactgcttgactttcccaaatgatgctaaatgatggtttcgaaacaaatcatagcatcgttcttctaaccacctgccaccaattgtacaaacagcataccagattttttgatttttactgggtggctgatatctcaggttaggggaaaaatcatttttgtacttaatattcaaaactgactgtcccactgtggcatttttggagtagatggtgaatctccacaagaaaacccataagcacgctttcacctctggctcaaagcgagctaacagcccaggtttaaatccatgaaagcactgagtaaactgggaccaaactagctgctccagggccttgtttagttcaagtgcatccaactggcttattcttagcactctgtttgcactcttcgcattctcttttctggaagccatgtcttctctgaaggtctctttttcctgttcctgcagctccctcaagactggacagcctatagctatgacagtgggaatttttgctccaagttcttctgtgaaatccttgcctcatacttgccagaagcttatgagtctgcgaaacgcccacgctccacgtaactttctctgaaacattctctggaaagcttgtcttttcctagccgaatctggattaccaaggcttccggaactccacgct

SEQ ID NO: 431988 - DNA, 442 bp, Homo Sapiens
  misc_feature (380)..(380): n is a, c, g, or t
atacctgcataaacagcattgtcccaagctatgtagaccacgagcacgtaagccagtgatgagccgtgaacacctggacactgattggatgacatttgcaaagaactgggcgaagcatctgggagcgaatgcttgcacttggcagcagagcggctggcgcgggagagccagggtcatcccaagaactctgtgtgatcccagtccaaggacaggagacagggctttccttgaagggaggtactgaatgaaaggtgagtcacgtaactacagcggagcgaaaaggaaacagagaatggtgaagtcaaacaaaggggcaggaagaaaaagagacaaccagcgttcctcccaccctgcagggagaccccttctgtcgtcttctngcagcatagtagttagtagggcggccgctctagagggatccaagcttaccgtaccggcgttg

SEQ ID NO: 431989 - DNA, 601 bp, Homo Sapiens
tcacattaccgaaaggccaagtaatgtggtgtgattactataattcctacaacaaaacttccacttagaatagttacatgttcccaaactatttttcttctgtctgccatgctggcttctgtatcccatggtccactgtaatcttttggtcttctttttttgcagtacagcagtcctcgtgctgctatccattgagtaggtaaaccaccaattcataggtggccatcataatggctgtgtttggaatctgtctcactagatgagttgtcagaccacgataaagagacccataaccttcttcttgaacaagcaaagatagagtctgaaaaaaagatctgtattttgttccctcttcacgtagtcttgttcttacaacttcatgtggatatgctatagttgtggcacaagtttttgaggtggcagcagctagcatcattcccacaaaatctgatgcttctttcacagactcttcatcattttccattgtagaagcagtcttatattccagtagtttttgttttatactttcatatataacaaaatggataacagtctctgatataccagcatatgaagcagacatgctcctataaaatccttt

SEQ ID NO: 431990 - DNA, 398 bp, Homo Sapiens
  misc_feature (48)..(175): n is a, c, g, or t
gagacggagtctcgctcttttgcccaggctggagtgcagtggcacaannnnnnnnnnnnnnnnnnnnnnnnnnnnnnnnnnnnnnnnnnnnnnnnnnnnnnnnnnnnnnnnnnnnnnnnnnnnnnnnnnnnnnnnnnnnnnnnnnnnnnnnnnnnnnnnnnnnnnnnnnnnnnnnggcctcctttaatttcttaaccataaatatcctccccccacttttattatggacgttctgaagcacataaaaatagggagcatagtataataaatttgtacatatttaacactcagcttctataattagaaacaaatggcccatctggtttcatctaggcctctttgctatcctttcatctccaactagattattttacagcaaattctagatgacattctgc

SEQ ID NO: 431991 - DNA, 2055 bp, Homo Sapiens
  misc_feature (210)..(210): n is a, c, g, or t
  misc_feature (214)..(214): n is a, c, g, or t
  misc_feature (656)..(656): n is a, c, g, or t
  misc_feature (1014)..(1014): n is a, c, g, or t
  misc_feature (1445)..(1445): n is a, c, g, or t
  misc_feature (1686)..(1686): n is a, c, g, or t
  misc_feature (1731)..(1731): n is a, c, g, or t
  misc_feature (1886)..(1886): n is a, c, g, or t
  misc_feature (1989)..(1989): n is a, c, g, or t
gagtgggaagctggaggcagcccagacctcctggagccctgcagtcctggggcagagacagaatcaggacacagctcgaggaattactctcacttccaccacccgatgtatggaaactgctatactttcaatgacaagaacaactccaacctctggatgtcttccatgcctggaatcaacaacggtctgtccctgatgctgcgcgcaganaganatgacttcattcccctgctgtccacagtgactggggcccgggtaatggtgcacgggcaggatgaacctgcctttatggatgatggtggctttaacttgcggcctggcgtggagacctccatcagcatgaggaaggaaaccctggacagacttgggggcgattatggcgactgcaccaagaatggcagtgatgttcctgttgagaacctttacccttcaaagtacacacagcaggtgtgtattcactcctgcttccaggagagcatgatcaaggagtgtggctgtgcttacatcttctatccgcggccccagaacgtggagtactgtgactacagaaagcacagttcctgggggtactgctactataagctccaggtttacttctcctcagaccacctgggctgtttcaccaagtgccggaagccatgcagcgggaccagctnccagctctctgctggttactcacgatggccctcggtgacatcccaggaatgggtcttccagatgctatcgcgacagaacaattacaccgtcaacaacaagaggaatggagtggccaaagtcaacatcttcttcaaggagctgaactacaaaaccaattctgagtctccctctgtcacgatggtcaccctcctgtccaacctgggcagccagtggagcctgtggttcggctcctcggtgttgtctgtggtggagatggctgagctcgtctttgacctgctggtcatcatgttcctcatgctgctccgaaggttccgaagccgatactggtctccaggccgagggggcaggggtgctcangaggtagcctccaccctggcatcctcccctccttcccacttctgcccccaccccatgtctctgtccttggtccatctaggtcccgctccctctccctctatgacaccccctctgcctgtttctgccaccctctgtccccgctcttgtttttcgcagctccgtcggcggcccattcctccctcatcccatcgtggtgcgcgccctatccacggataaagctctggcgtatcactcccaacactccgatcaatcactaccatccttttccctcctcgtttcctataccccccccgctccgcactgcacccaccatttgcgacaacctcctcgttcgttcgtcatgcaataataccccctttaccccttgctttcttcatactagtccattttccgtacgcgcattctctctccgcgtactcggtgtatatatncctcacaatgcctctaacagacgcaccgccccccactgcacgtagaattacaataaagcataccataccaacactcgctagccatctatcgacgcctgatagaccatctatcgctttcacacttctataaatactctcttctccgctcgccactgcacactcactgcacgtcccatattgtattactacctgtagtcttctaagctataccgttttgacctaacgtcatctcgcctatggnccatccgacacatgtcggagttaatatatgcccaccgcacgaccnccgctcgccctcacatcaaacttgtattacaacgttccctcttagctcacgtcacccttgcactccctagcaccatccctctaagcactcgcgcgcttgcatattagtgttattcgccgccacagtccactcttgccgctcccactaaccgtctnctcgtctgccccacactgcttgtgttcacctgtcgctgcagttaacgcaccgcctcggctattgatgcgtgccgatactcggttcgtgtcacctcttcgtacngcctatttcgtccactgagtaattcggtagcctctcctcctcttaactcttctcgttcctgcctcg

SEQ ID NO: 431992 - DNA, 725 bp, Homo Sapiens
  misc_feature (15)..(15): n is a, c, g, or t
  misc_feature (42)..(42): n is a, c, g, or t
  misc_feature (56)..(56): n is a, c, g, or t
  misc_feature (61)..(61): n is a, c, g, or t
  misc_feature (83)..(83): n is a, c, g, or t
  misc_feature (108)..(125): n is a, c, g, or t
  misc_feature (127)..(127): n is a, c, g, or t
  misc_feature (132)..(132): n is a, c, g, or t
tgtgtgttggttggnaggtgccacagggggtggtgggtaaanccaagcccggattnccccnttacccctaacaatccactccngtacacgggcattttagggaaattnnnnnnnnnnnnnnnnnnanttacnaccgtacacctagcaatttttagggaaatgcctgccaagactgaacccaaaaagatccatttcctgcctagaaagactgtttaccctagaatcctttaataatgagatccctatcctacagcagggttggattaattacacctcccagaatgtaatggttaaaggaaagaagtatcttttagacctatgagagaaaagaccctattttcactttattcctagtatctttgagaagtaaaattagttcacaaagcttgccagtaaaatttcagcaaccaggaactgtatataaatgagctgggaaatattccatttgtaatatatgaccaaaataaagcaatacagaatgtaggcatcctgcagcagaattccaagcttgtgcaattcacaaatttaatcataacttcatatgagaaaaaaatttctccattattttgaaaacatgggtgttctttgctactgaattgtacctgaaattcatcttcttccagtggaaaacagttggaatatttgattccacttgaaacatcaatgaaatagtaaaaataagatactggaaataaggggaatttttgaggctgattaaaaactat

SEQ ID NO: 431993 - DNA, 466 bp, Homo Sapiens
tttttcttttaagttgtcatttgaattcaaactctttggaaaacatgcataataatcttaatgatcccattgactagtttaaattcaaattgtgaagcatttgaaataccatgctgacagcactttccataaattactctcaaattcaatacatttctacacacaaacacacacacttttataagtatcacactcaaaaatcttcaaattacagtttctctttgcttgtcccatttatattgttatttggtgggataaactagagctgttgtgtctgcttacaaatttctggtattatttttcaaaaaaataatttagtggcagtcacaaagttttatatctcctcgggggtaaataggaactttgttggcggggttccgtggctttggtgtggggtgtgtgtttgtttgtatgtgcacatggggtggttggtaaatcaagcctgattttctcatttacctaacaa

SEQ ID NO: 431994 - DNA, 1536 bp, Homo Sapiens
taggagtgccgggtttaattggatttagcgccaggaaacgtttgagaaggtttttcacagtctgtagacatgtagaagggaattctgtatttccctcttaatactctctctctcagttcctttaggttttgccccatccaaagggaagtgagccactgactagtgtgtataaaatgacccccaggactcccacacatccacttctggcccgtcatatttcttgccctggaagagctcaggtgctgcgtatggaggactgccacaaaacgtgtcgagtttaccgccaacagtaaattcattgctaaaaccgaaatctgctattttaatgttcatatcggcatctaacaatagattttcagccttgaggtctcgatgtacgatccgtttctgatggcagtattgaactgcagacacaatctgtctaaatttagatcttgcttctttttccttcatcctgccatgtgcaaccaaatagtcaaatacttcacctccacttgcatattccatgattaggtagagtgttttttcagtttcaatgacttcgaataacttcactatattgggatgatttaaaatcttcattattcttacttctctgaagagcttttgtagacttgttggattcaactgagttttgtcaattatttttattgcaacctctctgcctgtaaggatatgtcttgccaattttacttttgcaaaattccccttgccgattgttttcaacagtctgtagtttccgatgtgaggttgttcatctgcacaggaggctatagagtttctacaccgagctcctgagcggctggtacgagaggtaacttcttgacgcccatctccatgtgacgtgtggttttcagtgtctcgttcattcaccgttggcaatggggtcctagtggacattttactgcactttaattctgcacaatgcgagggtcaaaacaaacagcacagccctaggaggccggcgaccagcgtcctcgagtccacggcagttccgaaaaggcgccgtggggagggcggctcccttccccctacggccgtctagatcccgggcctggcccgggccgtcccccggcgggtcccggggctcattctctccctgcctcggcggccgaggcgaggagaccgggagggcggcagtggcggagccgagcctgcgggcggcgggctgcgcttcggcccgccggcgtccccttgcctcagggcgccccgcgatcctgggccccctcacctccttctccactccctcccgtcgcaccgcgaatttcagctcgcgggcctccacacagcgccgccggcggcgcctgaaaacgaggaggcggaggaggatgtgaaggaagtggagcgcaagacaggccgccgcgggctgtgggcgccgaccatggagcgggctgcggaggaggcgcctgcgcccgactgcttctccctctctagcgagcttgctgcctcagcctccgccctgctggccgccgctgccgccgccgcaccccggcacctcagagcctcacggagccaagatgccgcccctcggcttcc

SEQ ID NO: 431995 - DNA, 2713 bp, Homo Sapiens
  misc_feature (2542)..(2552): n is a, c, g, or t
  misc_feature (2683)..(2683): n is a, c, g, or t
gagaaaaagtgaatttttaattatcttgtgaatctacttagaagaactactcgcaagcaatgttcacaactattaatttaaaccttttgcactaaaaaaacacaaaacaggtaatacaaaaccacaggcatgaactgtaaacctgtattaactatgaactggtcttaaggttaattcttagcagtcattcagtattttcctccttggcaactgtaatgttttagcaccggatgatctcccgcagaggtactagtaatgactggctgccagtgtagggagatgcttccatatacaccacttcacacacataccgtccactctcacacccacccagacgggaggcacatggagatggggccacacgccgactctcagggtaacggaagtagggcagggggcgcataggttgcacatctttaatgtagtgcattcgtagaaaaaaggccagctttcgctcccaggcgtgctctcgtcctcagactttaatttcatgatttagaagatgcagacgttattgcctaaatattattctatacatttccatcagtgttcaggaaaacactttaattgctacttaatttacatcataatcactgggttacagctttagctcattggcaattttggaagcaatatttttgaaggctatggatgtccccgatatccgcttaaaccggaccccgttcagagacagtcttggcagcttgcacacttccatttcccactgcacgaggttctccgcgtgcccatctccgtggacgcagaagagcaagaagcgctccctctgctcatagtcgcagttattggcgtccaacactttgcggatttcccgcatcatgtccccgggatccattgaactagtggttttcatgctccaggtgaagcgtagggatcgaggctttgcttctttgttttcatctttttgctcagcagatacattgcgacttgagccctcatatctcccgttcctctcatattcagttggaagcctctccttgtgagttttgaagttaatttactaaagagattagtggagcctcggcttcgagtctgggacaatggtgtggcttcatgggacaggctgggagaggcaggagggccattatatgttgcggttcgccgttcccggggctggccgtggaaagtgctacgactggcagtgcctcttgggaagcggattcgatctggggtggctgcactactgatactgtgtgttgaagcaactggagttctctgatcaggaatagtgctgttttctttgccattctgaatcactgaagtgtctatcagctgtagttctctcactgcaaacataagtatttcgtcgtgtcattccaccagatgctgtgttactactagggacagtggagcttttcttgcgttcaggaatatccgccttattaggattacttgcattcccaagcatgggactggctggagcaattccctttcctccaacagcactgccacttgatttccgggaggaaattccatcttctttgaggtcactatctgcagtgctggtctgactccttttcggatacgccacaacagaaggaatagctggtccagcatggtcactgtagcgtctttgcttttggcttgaagaaacacttctctgcactttgtggtgaggagactggccagtactgttgttgagatcactgctcggcctaaccttagcaagtgaaagattgctgctagaactggaatcactagcatccagctctgaagattttctccccaataacaaatatgtagctgtgatttcatcgtatttcatcttactaagagattcttgaatttcttcttgtgaatatcccattcccaccataatatctattcttttttggtctgagatgtctagctctggttcaacaaatggtttgagttcatcttcttcatgccctgcattgatccacctgtccttcatgatttgctctagagtgccgcgtttaattggatttagcaccaggaaacgtttgagaaggttttcacagtctgtagacatgtagaagggaattctgtatttccctcttaatactctctctctcagttcctttaggttttgcccatcaaagggaagtgagccactgactagtgtgtataaaatgacccccagactccacacatccacttctggcccgtcatatttcttgccctggaagagctcaggtgctgcgtatggaggactgccacaaaacgtgtcgagtttaccgccaacagtaaattcattgctaaaaccgaaatctgctattttaatgttcatatcggcatctaacaatagattttcagccttgaggtctcgatgtacgatccgtttctgatggcagtattgaactgcagacacaatctgtctaaatttagatcttgcttctttttccttcatcctgccatgtgcaaccaaatagtcaaatacttcacctccacttgcatattccatgattaggtagagtgttttttcagtttcaatgacttcgaataacttcactatattgggatgatttaaaatcttcattattcttacttctctgaagagctnnnnnnnnnnncaaacttttgtagacttgttggattcaactgagttttgtcaattatttttattgcaacctctctgcctgtaaggatatgtcttgccaattttacttttgcaaaattccccttgccgattgttttcaacagntgtagttccgatggaggtgttgtaatgcac

SEQ ID NO: 431996 - DNA, 1168 bp, Homo Sapiens
caggttacggaagtaggccaggggcgcatagttgcacatcttgatgtagagcattcgtagtccaaggccagctttcgctcccaggcgtgctctcgtcctcagacgtttcacatcaggatttagaagatgcagacgttattgcctgaatattattctatacatctccatcagtgttcaggaaaacactttaattgctacttaatttacatcataatcactgggttacagctttagctcattggcaattttggaagcaatatttttgaaggctatggatgtccccgatatccgcttaaaccggaccccgttcagagacagtcttggcagcttgcacacttccatttcccactgcacgaggttctccgcgtgcccatctccgtggacgcagaagagcaagaagcgctccctctgctcatagtcgcagttattggcgtccaacactttgcggatttcccgcatcatgtccccgggatccattgaactagtggttttcatgctccaggtgaagcgtagggatcgaggctttgcttctttgttttcatctttttgctcagcagatacattgcgactccttgtgagttttgaagttaatttactaaagagattagtggagcctcggcttcgagtctagggacaatggtgtggcttcatgggacaggctgggagaggccaggagggccattatatgcttgcgcgattcgccgttcccggggctggccgtggaaagtgctacgactggcagtgcctcttgggaagcggattcgatctggggtggctgcactactgatactgtgtgttgaagcaactggagttctctgatcaggaatagtgctgttttctttgccattctgaatcactgagtgtctatcagctgtagttctctcactgcaaacataagtatttcgtcgtgtcattccaccagatgctgtgttactactagggacagtggagcttttcttgcgttcaggaatatccgccttattaggattacttgcattcccaagcatgggactggctggagcaattccctttcctccaacagcactgccacttgatttccgggaggaaattccatcttctttgaggtcactatctgcagtgctggtctgactccttttcggatacgccacaacagaaggaatagctggtccagcatggtcactgtagc

SEQ ID NO: 431997 - DNA, 767 bp, Homo Sapiens
ttcttccccctccccgcttccccttcgcctttccggcgcggaattctccgaatctcgaggcctgtggcgtctggttccgttggggcagaaccatggaggaaaagccttcgaaagtgtcgctcaagtcttccgaccgccaaggctcggacgaggagagcgtgcatagcgacactcgggacctgtggaccacgaccacgctgtcccaggcacagctgaacatgccgctgtccgaggtctgcgagggcttcgacgaggagggccgcaacattagcaagacccgcgggtggcacagcctggggcggggctcgttggacgaggggtacaaggccagccacaagccggaggaactggacgagcacgcgctggtggagctggagttgcaccgcggcagctccatggaaatcaatctgggggagaaggacactgcatcccagatcgaggccgaaaagtcttcctcaatgtcatcactcaatattgcgaagcacatgccccatcgagcctactgggcagagcagcagagcaggctgccactgcccctgatggaactcatggagaatgaagctctggaaatcctcaccaaagccctccggagctaccagttagggatcggcagggaccacttcctgactaaggagctgcagcgatacatcgaagggctcaagaagcgccggagcaagaggctgtacgtgaattaaaaacgccaccttgggctcgagcagcgacccgaaccagcccgtgccagccggtcccagaccaagcctgaccca

SEQ ID NO: 431998 - DNA, 2194 bp, Homo Sapiens
  misc_feature (29)..(29): n is a, c, g, or t
  misc_feature (36)..(36): n is a, c, g, or t
  misc_feature (55)..(55): n is a, c, g, or t
cctcccatcggttaaaaggccccttgagnattccantctaacagcaaaaaccccnggaggaggccagagaaacacacaaacccacagtgaccttcatgtgtgcaaagtatagttgttaaaaacaaaacaacagaaacagaataaataggcgtggcctctgcggggcagtgccaaagcagagctccacatacttaggcctggggaggaagggctctatgctccaacaagtctagggctggcaggcagggagggaggtggggtctcatgtgttggccctcatggcaaagaatggagatctggtggggccgatggagggcttgagaaagcctgatcaagatgcggctgtggcctcagccccctcctctgagtcccacacctctgactgcaggtaatcagcaaagagagccctagcccggcgcaggacgcgccccaggtggtgttttcgcacaaggcggtcaaagtgcatggccagctcattataatccagcccattgcgcatgatgtggtcgcggtgctccagcaggatggccaggcagaggaacagcatgaatgggttcccccggccaaactcctggggtgggggcaggcccattggtggtacaggtggcagggactttccagggtctttcggggagcctacctcttgcatcaagggggatcctacagccatatcaccagtgggagaggcctcctgggtggatggtggagatgaggaagatggggaatcagggtgggaaaaggaggagagcagtgggtctggggagttcaataaaggctcagagagggacttggagctgataagggcagctgggtggggcagctggaccagagggtccctcctggagcccatgttatccctgagttgctggaggccatccaagctggcctgtctcaggagacgccccccaccaccaggcccctgactggctgtggccaggtggtcaacagcatcttcaaaggtactacctcctccaccagcaggcctcagcatgtgcctctgtcgcacgggccaccccctgtggccaccaaaaccagcgtctgccacttggctggggggtccaaccagctctacctcatgttcaggaggatcagggggcagcgaactccaagtgacctcaagcatgcggagggcatcgtcgaaggcgaactcacgcttgagttccagcagcagccagcggtaacagaagaagaggtcatcagcgcctgcctcttgcaggtattgataaaagtcagggtcagcgtgtcgcagcaacagcttcaagtgtgcaaacttggtggccatggcgcggccgtcagggtggaagttggcggccaggcgtttcatgatgccacaaaagcaaacaaaggcatggccctcatggtccatgacagcgaggatgggtgaggcaaggtcactcatgccctggcagtaggacacctgtgggtgggtaacggcataggtggtgagcaggtcgtgcagcgcccgtagatgtgggccatcctcaggccccgcatagtaggggtgggcccggtcagtgcgcagtacatccttgaggaccgtgctgcggatgaattccaggtcctcagggctcgctcgctgggcccactcgctcttgagctgctcatactcgcggctcttgcgtttcatgtagtccatccgctctcggcctgtcagtccatctggatacacgttcagcaggtaccgccacaccacctttcgcagcgagggctccacaccgccatgatagatccgcaggcgcaactcctcgggtcgggagagctggccctcgtggttcaggtacgtgtgaaactcagcatcgctcaggggtggcttgaagggcttgacatcttccccatacgaccagctcagcacttgttggaccttagacaaggtacggcccacctgagtgaggatggactgtgtaaagggcagggcggcagtcgtcagtgatgaccgtttctcagccagcaacacgtcggagccaatgacatctttggggctgattatgtcccagtcttctagcaatgggccttgactcggacccgcaccacctctcgctcctcctcatcagcggccgccgccgcttgagctcccacaccgggcgggggcgctccggagccagacaagtccgaggccccggaggctgttgccatcccgccgccgcccgtctcagggtgacggctgaccgttgccccccaccccggcgcacactct

SEQ ID NO: 431999 - DNA, 1109 bp, Homo Sapiens
gttgaaccgcccaagtgggattgtttccccgatgtcggcatgcagaaatatttgcagtaagggagaggactccaaaaaaaatttgttcctggaagtaaggccattttatatacatcccgggggttttaaactccccaaaaggacgcaaccctttcaagcaagttggtatttttcccccgaacttgttcccaaaaaggatttattttgggtccctctccctccaagtatggaaatttaaatggggaaattttctgacagagttcaaggtattatacccctaagccaaattggtcccttttcggtaaacaagtctgtggcgaacaacaatagttattctatcatgccttctaaaggggtctggagtgaagtcagtaggatctacagcattaggaagacgggacgctattttcaggattcagtgtggctcttagtacagtatgttccttttactagtataagacacgcaaatgatgtggtttgtatcacaaagagacacggttagaagcttgtttgtaagcaccgagctgacatcagcaaatccaaaaagggaatggtccgtgaagactgtctgaagccccattgtcttggcgtggaagagagcatcatgggccatagcagaaaaagaactatgtgaatggattatcgtgactctctcccgaacaaatatgtacctgagcaatggcagactgtgaaagagggtcgtggctgtagactggttgtacatgactttcagaggcaagtaatagactttgaggccactggtgaggtaacggatgccttttcgatttccataagcatgggtgacaattataaccttatgccctctttcaatcaggcactgagagagctggtaaatgtggctttccaacgcctcccatatttgggtagaaaaagtcagataccatgcatatattatgggtacgggttctacatgtgtaaagacttccagggctaacccgagagagtgtagctgaggcacggtggccattcccagctcctcctctacaggccatgctgagacggtttagacatcagttcttagagcaacccagttaagagatgtgtcctctattaccggtgagttccatggccgccagtgtccggacctc

SEQ ID NO: 432000 - DNA, 1161 bp, Homo Sapiens; identical to SEQ ID NO: 315170
  misc_feature (110)..(121): n is a, c, g, or t
  misc_feature (134)..(287): n is a, c, g, or t

SEQ ID NO: 432001 - DNA, 856 bp, Homo Sapiens
  misc_feature (26)..(26): n is a, c, g, or t
  misc_feature (44)..(44): n is a, c, g, or t
  misc_feature (53)..(53): n is a, c, g, or t
  misc_feature (56)..(56): n is a, c, g, or t
  misc_feature (66)..(66): n is a, c, g, or t
  misc_feature (68)..(68): n is a, c, g, or t
  misc_feature (73)..(73): n is a, c, g, or t
  misc_feature (100)..(101): n is a, c, g, or t
  misc_feature (142)..(143): n is a, c, g, or t
  misc_feature (240)..(240): n is a, c, g, or t
  misc_feature (609)..(609): n is a, c, g, or t
tcaggagaaaaagccatttccaatgngggggtaagttttcttcngcttggacnacnaggaattccngnttttngtaatggaaaaacttccggaattgcanntggtccccagaggccttttcagttccgggagccgggtgatnntggtttcccggagggcagccacaggtaccgggtgggagcgttcaggttgatggagatgctcacggtgcccgtgtaggtgtcttcctccaacaggggnttcacgtgcaggtcgtagtggactgggttgacgaagtccggcagtcgaaagtttttccactgtccgctctcatcctcactggccgggcagatgtcctggtcctgggcaggaggacctgaggggctggccgtggaagaaggcaggtgggaaggagctggcgcagtgcccggcccgccgtccccgctggagtcacacgatctggtcaagcccacggcaagtcccactattaatcctacacccaccaccaccgcacagagaatggccacatgtttcgtttgaatgcagtatctcttagagccctctctctccgcaaagttcatttttgcttccaaagtcaagtgttacacataaaaagatgttaaatttaanctaactaacgtcagcagactttcctttttaaattggaaggaatcccctgatttggcagcctgttttcgcttttcccacacccctctctctggcttcttgcgccttttcctctcccttttcacgttcccaccagccactcaggatgaatgcggaaacaaggggggtggaatgaggactccgtaagaggagccgagtgggaggaagagggctggcaagaagattgtcacagctccccttataaacgacg

SEQ ID NO: 432002 - DNA, 1419 bp, Homo Sapiens
aattaaagaaatccagtgtctcaaaaacttgtgaaaatgtgtttaaaaaacaaacggccagtgagcctgctacaccattttgcccatatgcctattgtaacttctgatgtcaagagacaatgcaaaagcctctgttttcacaggccctattatattaactctgacttacaactgtacctctctagagaaaaaacagaaaataaggaacaaagggaaggcagttttactagtgagaagatgcaaatcaaaagcaaactggaaagcaagagcaatagtaagggtgagatgagggactggagttgagactgcttgagaaatctggctgtgtagctttggtttgggggactgaggaagaggctggacatataaagtgcaatctacattggtaataaatggtcatccctttcttctgactcctcccccagctggtcatcccccacaccacgatatgctgcaggcacatttcgaggtttagaacggcagacaaagtcacagccatctgctaccaggttgccaagatcctgccagaaggctaagtggggaaactgctccattcctttggctcccactaccagtcgctggtataggaaccccccaacaacataaacagcaaccagtgatgcaaacgtgacaagtaagatggaacccacactgaggtgggagatctctggtgaacaggccaggctgctatccatctcaaagaggtagaaacaatcttggactttgccacgctcctcagacacagggttaaaattgtccgctagggtgtgtcgattgcaggagatcatcaccactgcacgacgctgctccttgccacagtggttgtcatattcatcaccccctttatagatcagcatgatccaattacttccgttgaagatgtgagtctcgttgagtctccctaccactgtctccttcccattacttttgttgatttgcaccaggcctgccccagaagtgtggttgccagcttcccggcacaccctgaagatgtagatgtatgtgtctgaaccctggcccacagtgctctcaaagcttttattaaacagtggtttcagcctcttcactagagccaactctttctctgactctttacccttttctcctaccaagtcgcaagttttttcttctgtctgccaggattctctcactgccacagccaggagtagtagtagcagtccagtcctccagcagctgtagaaagggaacatcgtgtcgtgggaaactggagtagccaaagctcagaatccccagtgaatacccttctggggatgggagacggggccagctaggggccggccgcagaccccggtcccagagctagtttcagaggccagcgttccccctagcgcctcgctgtgcccctcgtgccgattcaccacccggcctcgctacctagcctacttttggggtcgccgc

SEQ ID NO: 432003 - DNA, 746 bp, Homo Sapiens
  misc_feature (553)..(553): n is a, c, g, or t
gaacacacacgagggtggagatctcggtgaacaggccaggctgctatccatctcaaagaggtagaaacaatcttggacttgccacgctcctttagacacagggttaaattgtccgctagggtgtgtcgatgcagggagatcatcaccactgcacgacgctgctccttgccacagtggttgtcatattcatcaccccctttatagatcagcatgatccaattacttccgttgaagatgtgagtctcgttgagtctccctaccactgtctccttcccattacttttgttgatttgcaccaggcctgccccagaagtgtggttgccagcttcccggcacaccctgaagatgtagatgtatgtgtctgcaacccatggcccacagctgctctcaaagcttcttagttaaacagtggtttcagcctcttcactagagccaactctttctctgactctttacccttttctccgtaccaaggtcgacaagtctttttcgttctagtcatgccaggagttctgctgcacgtagccacatgccaggagatagtagtatgcangtccagtcctccagcagctgtagacaagggaacatcctcttcaggaactccagtgactactctcgctcatcatgtcctccagcctccattctacctcttagggctcactcagccagatctttggctagaaccatggtacaagggagaatgcgattccggctcctgtcacagacgcttaagtgtgagcccgctc

SEQ ID NO: 432004 - DNA, 1467 bp, Homo Sapiens
  misc_feature (42)..(78): n is a, c, g, or t
tgatgactactatggggactcggctcatcgcggtggcggcgnnnnnnnnnnnnnnnnnnnnnnnnnnnnnnnnnnnnnatcaggccaaatcggccgagctcgaattcgtcgagagcgggtcgttgcagtagctagtaggaaggggaggccattttccgtttctgggaggagtgaggggcaacgggtcggagaaaaaggaaaaaagaagggctcagcgcctccccgccgggccgtggacagaggggcacagtttcggcaggcgggtgaggtcgctgagggcccgccggagatgttttccttgtcgagcacggtgcaaccccaggttacagttcctctgagtcatctcatcaatgccttccatacaccaaaaaacacttctgtttctctcagtggagtgtcagtttctcaaaaccagcatcgagatgtagttcctgagcatgaggctcccagcagtgagccttcacttaacttaagggaccttggattatctgaactaaaaattggacagattgatcagctggtagaaaatctacttcctggattttgtaaaggcaaaaacatttcttcccattggcatacatcccatgtctctgcacaatccttctttgaaaataaatatggtaacttagatatatttagtacattacgttcctcttgcttgtatcgacatcattcaagagctcttcaaagcatttgttcagatcttcagtactggccagttttcatacagtctcggggttttaaaactttgaaatcaaggacacgacgtctccagtctacctccgagagattagctgaaacacagaatatagcgccatcattcgtgaaggggtttcttttgcgggacagaggatcagatgttgagagtttggaccaactcatgaaaaccaaaaatatacctgaagctcaccaagatgcatttaaaactggttttgcggaaggttttctgaaagctcaagcactcacacaaaaaaccaatgattccctaaggcgaacccgtctgattctcttcgttctgctgctattcggcatttatggacttctaaaaaacccatttttatctgtccgcttccggacaacaacagggcttgattctgcagtagatcctgtccagatgaaaaatgtcacctttgaacatgttaaaggggtggaggaagctaaacaagaattacaggaagttgttgaattcttgaaaaatccacaaaaatttactattcttgggaggtaaacttccaaaaggaattcttttagttgggacccccagggactggaaagacacttcttgcccgagctgtggcgggagaagctgatgttcctttttattatgcttctggatccgaatttgatgagatgttttgtgggtgtggggaaccagccgtatcagaaattttttttagggaagcaaaaggcgaatggctccttgcgggagatataattggctggaataaaatacattttgtgtgggag

SEQ ID NO: 432005 - DNA, 1245 bp, Homo Sapiens
  misc_feature (37)..(37): n is a, c, g, or t
  misc_feature (42)..(42): n is a, c, g, or t
ttagtttaaaaacggaaccaaatccccaggaactgcngggcngaaaaatgtttcccaagcggtaacctcaccaaccgcctgctcgggccgcaacccactcaatctgcccacctcccagccgccaccagtggcatgtcgtccctgaaaggcaaaactgcaggaggaactgggcaaccacaggcttgtggtcgctgactgtgtattccatgtggctgcggtagctgtgctgcgtcacctggagtcggtggctcttccgtcctgaggggctgggacccccacctggagccttgaccttccataggatacggtctgtccaagctggcttccgtttcttggcactggtatcgtatttgttggtacccacatcaaacttgaaggtgggagcgaagttgaggggcccctcctgaaagcccttcagaatgggccaggtgttcttggccatgttgagctggtccttctcccagagctgatggagctggtcactgtcgatggcaaacttgacaaagtgcaggtcatagctctcaatgcggaagttcaggtccccgaaccagaacacgaggtcatgatccaggatgccctgtgcgcccggcccttggaactgctggaggctgaggatggtctggaagttgtctttgcgctgctccgccttgtccatatgcgcaggcaagtggcagttcaggaagcagagcatgtgcccgaaggccgccaggcgcacgctcacgccacccttgttaccccagtagccgcccaggccagtgcgcgtgcagtcggtctgcacgtctcgcaggaagggcaggtggtagtacttggcgaacagcagcaggatgacaccctgcatcctcaccgaactcaccagcacgaagttgaagggccctagcgcatccatgaacagctcactccactggtccgtgaagagggcgtccttgagtcgcttgttgagcatggagttcacttcctgcaaccctatggcgatcatgtctgcgccgtcgctgtcgtcaccaccgcccaggtggaggagggatgtgacatcgtctgggggcatggcagtgcccacgttccatgtgaccacagtgatccttggttccgagggtcctagggctgcgttcttctttgctgggagctgaatacttgagtccaccttggagggtgccccagtttgggcaacaccctggggcatgggcagggacccaggcgagcccgggtcctggcctcctgctgccctgctgctctggccctcatgtctgc

SEQ ID NO: 432006 - DNA, 633 bp, Homo Sapiens
gaggtctggtagaatttaattcctaatggatgacctccaggattgggacatctgccagagctctcccatcatcccagatgggggcctgggtggggctttgctgattgtcacagttgaggtgccaggactgagttttgggggaccccagttgtccacccctggccaggacagagaggcaggtgcagatacagctggaggagcagcaggagagaggcaggtgggcttgcaaaagattgaggcagaatggtggtcaccttggcccatctgcctaccccaccctcagggccccaggcccccttcctccagcccccgatggccctggggactaggagacaggctgttgggcgccagggcctcccgatcaggtccccaggagccaccaccaccagggtctacagtctctaggcgcaaggcgggcaacaggcccaggcttcgaggcacagctggtgggaaggcccaggggccaggcaacccagagggcccctttttactactgccccggctgctgccattactgcttctgtcaggagccactccggacaggcggcgggctcttgggtgaggggttccggtggcacccacggggttcacgggatgaggcccgtagggaagcccagggaacctggccagccc

SEQ ID NO: 432007 - DNA, 629 bp, Homo Sapiens
tttttttacggttgaatggcattttgttttttcaaactggatccatcagctctgcctgactcttttccctctgcaccggtttctagctgacattcggtacttcttcctggcattacattgtttacggtagagttcaagttcctcgaagtacttagctctcaggagagccactctttgctcataagggtgcttctccaggtctgtcgctgttgaccacatcttccctgtggccttggccacctgcaccaccgaccagttcgggttctccctcttcagctgagcatagtggtcttggcagaagagtaggaaggatgatggaggccgtctgggtgcctggggatcccgctttctccgtttcttcctcttgccaacataattcatcatttcttcctggtatcgggctttgtcgagtttggccagggcttcatatttggccttttcatgctttgagatggatctccatttttccgaacactttctagagaactctttaaagccaacgtaggtatttggctgctgctccttgaatttgtttcttttttctggattcagtaacgtggacaggagagactgttgttcccacactccaggagcaatctagaaagtgctgtacttgcagcgaatttttc

SEQ ID NO: 432008 - DNA, 756 bp, Homo Sapiens
  misc_feature (644)..(644): n is a, c, g, or t
  misc_feature (647)..(648): n is a, c, g, or t
  misc_feature (668)..(669): n is a, c, g, or t
  misc_feature (671)..(672): n is a, c, g, or t
  misc_feature (676)..(676): n is a, c, g, or t
acggttgaatggcattttgttttttcaaactggatccatcagctctgcctgactcttttccctctgcaccggtttctagctgacattcggtacttcttcctggcattacattgtttacggtagagttcaagttcctcgaagtacttagctctcaggagagccactctttgctcataagggtgcttctccaggtctgtcgctgttgaccacatcttccctgtggccttggccacctgcaccaccgaccagttcgggttctccctcttcagctgagcatagtggtcttggcagaagagtaggaaggatgatggaggccgtctgggtgcctggggatcccgctttctccgtttcttcctcttgccaacataattcatcatttcttcctggtatcgggctttgtcgagtttggccagggcttcatatttggccttttcatgctttgagatggatctccatttttccgaacactttctagagaactctttaaagccaacgtaggtatttggctgctgctccttgaatttgtttctgtaattcagcaaaaagtgaacgtaagaagagacatttgccttaggctttagctggatttcttttcccatgttcgtgagttcaccttttttctggattcagtaacgtggcccggngcnncttcctttttttgtaacggnncnntctngcccccgcgttcgaaagattccttccctttcccctcaggggttggcaggaggggccctgtccgggatctctgtgcgcccg

SEQ ID NO: 432009 - DNA, 760 bp, Homo Sapiens; identical to SEQ ID NO: 140435

SEQ ID NO: 432010 - DNA, 875 bp, Homo Sapiens
caacagctcaaattatttattgtcaaaccatgctgtctatgcttaggcctttaggactactagggtcgtgggagcctcaaagtgtattctgcttggtccaggcccttcttgggcttgatgttcatgcgtttccagacttcagctgtggtgcggtctgctttggtgaccccactgaagtcgaacgtggtgatacgggacagggtgcacagcacatattgcctataccctttctcttcctccatggggttcccatggagtgtcaggctacggagccgaggaaggacagccagcttattcacctcccccaggcgctggatgctgttgccgtgaagatagaggacactcaggttgaagaaagttgttaggacagggtcaatggaagtcaggtcattaaaggacaggtcgatccaggccaggttctctgggtgctccaacagctgtgaagccacctggttgaagtctctcagatcattgagaacattgttattcagccacagggactgggtcagtgatttccccgactttgaacgcttcagtggtcgtagtcctgtccttggctcctcatttaccagatcttgaatgacgtggatgcttctgaaggagtagtcaagagggggctcctgtaccgaagtgttcatatagtcccgtttgttcatagttcaggccatcattcaaaggtgcaagcaggtgccctgggagtctgggttcagcctgtcactgatggctgaaactccaccattaggcattcattcctgtgggttcagggattgtttccggttaaaatggaaatactccccgcagtcgcttcctctccagtcttggcgtcccactgcctcagggttactcagagcaactccatggcaactgctttcccc

SEQ ID NO: 432011 - DNA, 1065 bp, Homo Sapiens
  misc_feature (43)..(43): n is a, c, g, or t
  misc_feature (53)..(53): n is a, c, g, or t
  misc_feature (73)..(77): n is a, c, g, or t
  misc_feature (79)..(79): n is a, c, g, or t
  misc_feature (85)..(85): n is a, c, g, or t
  misc_feature (87)..(90): n is a, c, g, or t
  misc_feature (93)..(96): n is a, c, g, or t
  misc_feature (98)..(100): n is a, c, g, or t
  misc_feature (368)..(368): n is a, c, g, or t
  misc_feature (498)..(509): n is a, c, g, or t
cccgcggcgggcaaaacgaaatgggttttaggaaagcttcctncgaagggccngaaggcggcccgacaatggnnnnntntgtttntnnnnttnnnntnnnttgggatctgagaatttgttattcaaaaatacataaaaaattgttaaaactaaccattaggttaaacagccccattaaaaatgcacacagatctgaacagacgcctcaccaaagaagatctacagatggcaagtacacttacaaaaagatgctcaacatactagagaactgaaaaccacaaaaagatagcacagctggtctatatctcttagaactgctaaactctttaacaaatgacaaattgctggaggaaaaacaagaactcttntcattgccggtggaacacagtgtataagaccaaaatatgccaccccaaaatataatggtaggaaaccagaatatgcaaccccaaaatatgtccctttggcttaagaattattccaagctaattattttgnnnnnnnnnnnntgctaacaaaggaagttgtgaaaacagagaagttacacttgtgtaaggaaaatttacatctataaaggaaatcaccatttaaaagctacctctctcgacaccaagaagagaaggataactaaatcactaaagagtcttatcaatggagaatgcatggacttaagtctgtataatgaaccttacccttgtctaatgtgcttttgctggttaactccccaatactgcacctcaaatcttctttctttaagttgaagacagtatttatgcttgaattgaaagccacctgttggagatttactcatttttccctgaatatctcccatgtaaccataaggtatacgtgtttttcaacttttctgtttttctcattttaatctgtcagtttttacagagcatcccatctaagaattccaaaaacagaaaattatttttcctcccctattacaacttgggcatttttttccaaagctaaacaagtctcaccttacaatccaaaaataacattccctagtattttgacaactactttgatgttacttccaatcaaaagctacca

SEQ ID NO: 432012 - DNA, 1111 bp, Homo Sapiens
  misc_feature (323)..(345): n is a, c, g, or t
  misc_feature (1084)..(1084): n is a, c, g, or t
ggggcagccgcagtcacagcctcagccgcagcggccgtgctacctaggtgatagcggagcggctgggtaggaagcaattgttctcaaacttcactagccccgtcggcgcggacgcttgtcgagaatgcagattcctgggtactgccagatacgaattgagcataccacaaaaaagttctcattttgtgtcctcccatcccattctcctcactaaccaaaggctaggaattatctgtgaatgtaggaccactggatttgcagtcttcatctgacactgtggagagtttctaggaatgaaacagatatatggccttgggtccccnnnnnnnnnnnnnnnnnnnnnnnaatagagacgagcatctcactatgttgcctagggtagtcttgaactcctggcctcaagcaatccccacccgactccgcctttcgaagtgatgggattacaggcgtaaaccaccacgcctggcccgaaggtgctttaacaccaaatctgaaaattgttcagaagagaaacattgagcatgaacaccatctgtgcgagtcatttacttattgcccttcccctctaaatctaccttctgtactcttcttccctgtaatgatggggctagttgtcctcaaactgtttctcagacttctttttaagcttgcttcctgttcagttctgccaataggggtcactagagagagactgggaggcagaaggagagaatatgcttcctgttttttctgttcttgttaatgttgcttacaggaccagcaatgcttcttcacctagagacacttctcccagcagtggcagtgccacttgagcttctttcagcactactggaatcagcctcagtgattggccctgtacccgctcagagattatccacagcagccagatggttctaccttccacaaagattgtggttgcaattctgggcttctaagttctggttacttcatatttttccttttgttcctccagccctagaggtggtagctgctttctgaagttattatttcctagatgacttttggtttttcagcctttagtattttgcttttcagccctctaatgcctgtataaccaatttcncctgtaataaataaatttcctccattg

SEQ ID NO: 432013 - DNA, 677 bp, Homo Sapiens
  misc_feature (135)..(161): n is a, c, g, or t
  misc_feature (384)..(459): n is a, c, g, or t
gcattacatagtgcaaacaccaaaaagacagagctattaacttagtggtgcttataaggaaaactaggcaagaatgcagaaaatgccttcctctttcctcatctagtgagctggccacattcaataagttgttgnnnnnnnnnnnnnnnnnnnnnnnnnnngcgaaagactgaagttttattattactcaattcagtctcccaaaaagttattttaaattgctgctttcttcccacttgatgaaaccacatttgctgctcttgtgattctctgatcggaaatatttggaaaatttcatgttttctatatattgacagtgcattttatgccacctactcaagtgtatgtagaaagagatgttttgggccaggagcagttgctcannnnnnnnnnnnnnnnnnnnnnnnnnnnnnnnnnnnnnnnnnnnnnnnnnnnnnnnnnnnnnnnnnnnnnnnnnnntgacctcaatttcttagtgctgagacaacaggggagctaactccctatcccccatcacacacagaaaggaagcctcaactacgagttgttactttattagatagtagctctgccatcacagcttcccatctaccgcctaactctgcaacagaaacatttcccaggactgactggaaagaggaatcttatctaaagatactgtagttacaagggctgat

SEQ ID NO: 432014 - DNA, 1039 bp, Homo Sapiens
gttacaaaaatcacctcttggttttatttctttttatattagtttgatacgtgaatgttagtccaacttaatttttgaaggagaaacaaaatgaaaaatgttttttaaaaaacaaacagtggtatctcttgtcatgagttggatgcctgtgactgacatcaggtattgccaagtaataaacattttgccattcaactctaaatcccttattagcattagttttaaaggaaatgttacagcttttatattatttgatttggtatttaataacagttataagtacaatggtagacactgaaaaagaaaacccttaatagaaaagaaaaagacaatttaaaattagattttgttgaagggtgttataagtgcaactttatccatatgcattccttttaaggcattttcattgtccaaatatctcaacatgtacatcaaggtttatattataaaatgggctccttttgtattcattcaagacttaaagaaaaaatacatctcaggactaagtgtagctgaaaagaaaaacacaaaaattcaccactcacaaaaagtaacttaaaatacaaaagtcatttagtatacattattactccccattgtaattccagatttggtacagtatctttttcatttcctgacataaaccattaagacagcacaggctgtagtacttcattgtgaggtggctacaactctataatatgcacagtgattttaaaataggctttttgcatgccttgcatgaaaggtgctacatacaaacctgttttgtggaactctttgggtaaccaccaatttaaaaatttggatgaaagcatttccacatggacagatctgaagcacattattggagctctgagccaaagctattaccctgtatattgatcttccggttcctgagggtaggtgtggatttgataccgccgatatttagctgtcggccccgttggaaatgaaatggcccacttccgggggtttattgtggcgggatgttggggaaaacgtctcacaagtctccggcggggaaaaatatgccccg

SEQ ID NO: 432015 - DNA, 399 bp, Homo Sapiens
  misc_feature (339)..(339): n is a, c, g, or t
  misc_feature (383)..(383): n is a, c, g, or t
acgaaaagaaaaagacaatttaaaattagattttgttgaagggtgttataagtgcaactttatccatatgcattccttttaaggcattttcattgtccaaatatctcaacatgtacatcaaggtttatattataaaatgggctccttttgtattcattcaagacttaaagaaaaaatacatctcaggactaagtgtagctgaaaagaaaaacacaaaaattcaccactcacaaaaagtaacttaaaatacaaaagtcatttaggtatacattattactccccattgtaattccaggtttgggtacaggtatcttttttcatttccctggacataaaccnttagggcaggcacagggctgtaggttactttcattgtgaggggnggggcctaccacttcc

SEQ ID NO: 432016 - DNA, 800 bp, Homo Sapiens
gggtttgttgacagcggaggcggcggcggctgcaaggctccgagccgtaggagccggatcgggggaggggccgggcccaggagcctcagccccgccggcagccctaagggcaaggcagtggctctgccaatgatcctgtgagtattcaggaatcactgttgcccctggggatccttgtcctggagtggcccacctgcttgcccccagcatggcgtccgacactcccgagtcgctgatggccctctgtactgacttctgcttgcgcaacctggatggcaccctgggctacctgctggacaaggagaccctgcggctacatcgggacatcttcttgcccagcgagatctgtgaccggctcgtcaatgagtatgtggagctggtgaacgctgcctgtaacttcgagccacacgagagcttcttcagcctcttttcggacccccgcagcacccgcctcacgcggatccacctccgtgaggacctggtgcaggaccaggacctggaggccatccgcaagcaggacctggtggagctgtacctgactaactgcgagaagctgtccgccaagagcctgcagacactgaggagcttcagccacaccctggtgtccttgagcctcttcggctgtacaaacattttctatgaggaggagaacccagggggctgtgaagatgagtacctcgtcaaccccacctgccaggtgctggttaaggatttcaccttcgagggcttcagccgcctccgcttcctcaacttgggccgcatgattgattgggtccctgtggagtccctgctgcggccgc

SEQ ID NO: 432017 - DNA, 1755 bp, Homo Sapiens
  misc_feature (192)..(201): n is a, c, g, or t
  misc_feature (203)..(231): n is a, c, g, or t
ttccctttcaccaaagattcccccaaggttggccagtttttccccagtccaggaaggttgtaaaaaggacgggcccagtgcctaagcttaataattcgagtcccctataagggacccccttggttcaagaaaagctgggttcgcgaaagcttggccccttgaagggatattctagagcgggccgcccttttnnnnnnnnnntnnnnnnnnnnnnnnnnnnnnnnnnnnnnnatgcaacaaattttatttagcagtcccaacattcagcacaaaaagtttacagaggatagaaagtgcattaataaaagccagtctttaccaaaagaaaacagaaaatatattattgattcaaaatattttacacttgaatgataaactgcaataacttattctgggcacctactgataaaaggaagagaagaatactttaagaagagctcaacctccagctggtatcagagaagtcagtagaggtcactgagaccggcagtctttcttgctttttgcattagtgccctcagctggaactgtttacgggacagaagacgtacatgcttcaggaagacatccaggtctatcacgccccttctcaaggcttctcccaagtaaaagatagtgtcttcaatagcgttttcttctgcatacagattcaggatctgtttgtataagggagctgtgggaatgataacttcatcgatatcattgttttcagactgattttccattttttccagagcagaactgagttcttcatccttctttttcaaaagttctatgtttttatcaacctcggctacttcttgatctaaacgggtaaccatctcttccagtttctggtgaccctttttcaggtcttcttctgttcgtttcaaggcattgagctctgcctgggcacgatccatttcctccttcatccgccatctcagtttgtcactgaccgcagagatgagagaggctcggatggtgtcctcgctgattgtgccatccctactgggaccaacagtggtcacaggaggctgagaagggtactgagaacttgttgtggcaggatatggaccaccaggtgggtaaggacagcctgggtaaccactgggattgggagggtatccggatgggtatggagagattccacctggcatgcctggcatgtaggaagtatttggtggccccgttgcctggtatggcggataggatgccgaaataggacgagagaagactggaggttcatctccaaataccacaatcatgacctgaataagccccaacaagtctgactgtgggtgtttccattcatgtagataaggaagatatatcttcccatttgcatcaacatgctttcctgttttaatagtcattgaactagtaggcttaacaaaacagatagggggattatatgggtatgtgtccagtagccataggcatattggaatattgtatgtattacctctataaggcacagggattgttccagtgaggttcattagttccctggaactgccatcgttaaaaacatatgaatccaaaacaggtttgagatctttgtatagagtaataacattgacagtttcacgtacagttaggtctctgtatttgtacttggacaccattttcttgagctggctctccgacaccgccatgacggccgcctggcgactcccttccccgcaggcagagggtcagccgctgctgggctgccccagaccgtcccacacaatcgcacacccccaacccggcctcaaacaacaggaagtcggc

SEQ ID NO: 432018 - DNA, 917 bp, Homo Sapiens
  misc_feature (253)..(348): n is a, c, g, or t
  misc_feature (703)..(768): n is a, c, g, or t
  misc_feature (829)..(867): n is a, c, g, or t
attcgagctcggcaccccacctctaggggctcttagcttttcggtgtttacatttttactatgttcaagtcgccgtttctcaatcctccgttttgctttgtcataagccctttcttctttagtccgatcatcatcagagtcatattcagaatctgagctcatttctttacttggctttttatctaatgtcttccctgaatccttctcatctgtcaccttttcatcttcctcatcaccttcactgccttcactnnnnnnnnnnnnnnnnnnnnnnnnnnnnnnnnnnnnnnnnnnnnnnnnnnnnnnnnnnnnnnnnnnnnnnnnnnnnnnnnnnnnnnnnnnnnnnnnatgaactttgtttccttctactttttctgtctcctcatcactggccatagcttcccaatcatccaatccagcatcctcagtatcttcttcttcttctggttcaacaggaggtggtgtctcttccttttctggtactccttgttccataacttctacagcagcacataattccattgattcagacacttctttactttctagctgctgtggtatttttttcctctttttatcttcataaattggcctcttctttggcaaagagtcttttgatggcacttcaacaccctgagcttgtagcagtttaagagtagcttcggctctggctctggcttctctctgggatttagttaaaagnnnnnnnnnnnnnnnnnnnnnnnnnnnnnnnnnnnnnnnnnnnnnnnnnnnnnnnnnnnnnnnnnnttgttccaatcgttcctcttctttacgcttggcttctaattcttcaagccgttttatacgnnnnnnnnnnnnnnnnnnnnnnnnnnnnnnnnnnnnnnnaagcttagccagagcttcttgcatagctttaacagtggctttgctaggtc

SEQ ID NO: 432019 - DNA, 554 bp, Homo Sapiens
  misc_feature (78)..(145): n is a, c, g, or t
gaagagagaagaggaagaacgtataaaacggcttgaagaattagaagccaagcgtaaagaagaggaacgattggaacnnnnnnnnnnnnnnnnnnnnnnnnnnnnnnnnnnnnnnnnnnnnnnnnnnnnnnnnnnnnnnnnnnnncttttaactaaatcccagagagaagccagagccagagccgaagctactcttaaactgctacaagctcagggtgttgaagtgccatcaaaagactctttgccaaagaagaggccaatttatgaagataaaaagaggaaaaaaataccacagcagctagaaagtaaagaagtgtctgaatcaatggaattatgtgctgctgtagaagttatggaacaaggagtaccagaaaaggaagagacaccacctcctgttgaaccagaagaagaagaagatactgaggatgctggattggatgattgggaagctatggccagtgatgaggagacagaaaaagtagaaggaaacacagttcatatagaagatcaagcgttgagggggatacctctagagatcgaccatcagccaatca

SEQ ID NO: 432020 - DNA, 1051 bp, Homo Sapiens
  misc_feature (965)..(965): n is a, c, g, or t
  misc_feature (970)..(970): n is a, c, g, or t
  misc_feature (998)..(998): n is a, c, g, or t
tcctatgtcgaccggccgccgagttagatgtgggtttgggttggggaatagcaatttaggttattgatttagactttagtcaagctaattagctccccctttagataagtacatgttgcacatgtgcacctacttgtaatctcagatatttatgcacacaagtgtgaaggtttttcagggagcagagcatctgggacaggctgattctgagctaaacagggctcctttaaggcaatatgaactgttgccttctataaattgcacattgaggaactctaatagacaaagattaggtgtcaggcagaaaacactcattgtaaatatactattagttgataaacataggactttcttattccccagtttttctttatcatataatttaaatatttattcatttgtatttaaagactacctacacatagatatatgattccaaagttatactttctccatccccacattagccaagtgaatacagggccaaatgggttcttggaatgataataacaaagcattacaaagtgggtccccttggttccagccttgtccagagtttttggttatatatttctatttattacaatttaccttttaaattgtacaaataaacctttgtgtggacagagccaatgtttcaatcttgactgagtacacgaaaacatactttggaactgatcctcattttcgaaattggttctaacttattatccatttccgatgtctgaaattctcttacttcctgctcacaactctctttctggcaaagttgtttcgtaatctgtctcaatgactataatgtaaaattaaagaagtaaccatgcttctcaagggggaattaaaagtgtttattgaattttactcaggctaattgtttggtcagaaattcctaaggccacagctttgggggggttcgtgtaggatgtacatgggtgggtggggttataaaatattggggacttaangcagncttggtctatggtattttatctttgctntttgggtggacttaagggaatgattttatttggattttaacccttcttttctg

SEQ ID NO: 432021 - DNA, 589 bp, Homo Sapiens
ggggcccggttgtaaaaagccagcccaatttggaaggccttcttggaaatttccgggggcaatccagagtttttgggtttggaaaaatccaaaggttaatctcttttgggaggcttcctttttcctatgaaagtcaagtaatataatttcccttgccttttgagggacagcttttgggggtgatttggtttttttgaagtctttcacaggccagccagaattcaatattttcttcacagaattccgactttaaaaaagccctgaatgcagcaagaccatatttgctggctagcagctcgtcaaatgcttctgaccacagctgtgcttcctcaggagaaggcttgatgaaagcttgctgtttgctttttttgccggttttgggcttcccaggagtagaggaattttgtaagaagtagctcaaacgggtcttccaatcttttaaaagggtccgtttcatcttttctcgcttctcctcgctcttgtggccactgcctgcgctcttgtccatgggtctgcagtcgtgttgaacagccaagaacatagcactttgcattatcgttctcccgctggagccccggctgtttgcccc

SEQ ID NO: 432022 - DNA, 1480 bp, Homo Sapiens
  misc_feature (1391)..(1427): n is a, c, g, or t
ttttttcaatattatttatcaaaataaatttattaaaagtattcaaagaccacttcaaagtgtagctgccttcaagacagatttttggcactcataacggacactgcagttttcaacaccatagcactcattctatttcacacatcatttttaacaatgcaaacacggaccatttcagttttagcattacatgagacaacagtactgatgatctgtggtcataagaacttcaataccgttgcacatagtaaacacttcactgttactgaatcctaaactaaaactactatgtggtaacatggatcgatttagggaaagatgtacaaccagctacctaaggccacataatcccagatctattgattttaaatgcttttggaccaacagtattacattgtctctttcatcatcttacattcctgcttttcagagtgagacaccacgttcagaccacctattcccttcttgcgttctgtacacagtgagggaagctgttctgataccagcttctcctagtcagttactggcttcctgattcactacccaactttgaatcaatagttctgagtgatgtttcctgaacacccaggctgaattcaaggtcagtctttatggcaggtcacagtccttcccctcaggaaaaagaatgaaatgtcctccatttctgggctcccttttacatttcatgtagcatgaggctctgtggtgatttgtggctttttacacaagtcctggtagaattctgactccaagaaacgaggataagagttgttctccatcaagctgtatacccttttctgggcagttgtaaagcagccacttgtagcttcttgtatattctgggcaatcagagttttggtttgaaaatctatgtttatctcttttggagcttccttttctatgaagtcagtatatattttccttgcttttgaggacagcttttggggtgatttggtttttttgaagtcttcacaggccagccagaattcaatattttcttcacagaattccgactttaaaaaagccctgaatgcagcaagaccatatttgctggctagcagctcgtcaaatgcttctgaccacagctgtgcttcctcaggagaaggcttgatgaaagcttgctgtttgctttttttgccggttttgggcttcccaggagtagaggaattttgtaagaagtagctcaaacgggtcttccaatcttttaaaagggtccgtttcatcttttctcgcttctcctcgctcttgtggccactgcctgcgctcttgtccatgggtctgcagtcgtgttgaacagccaagaacatagcactttgcattatcgttctcccgctggagccccggctgtttccgctctcgacgaattcgagctcggccgatttggcctgatnnnnnnnnnnnnnnnnnnnnnnnnnnnnnnnnnnnnncggccgccccgcgatagagctccagttcgccctatagtgagtctatacattcc

SEQ ID NO: 432023 - DNA, 460 bp, Homo Sapiens
  misc_feature (367)..(367): n is a, c, g, or t
  misc_feature (408)..(408): n is a, c, g, or t
  misc_feature (416)..(416): n is a, c, g, or t
gttcaatattatttatcaaaataaatttattaaaagtattcaaagaccacttcaaagtgtagctgccttcaagacagatttttggcactcataacggacactgcagttttcaacaccatagcactcattctatttcacacatcatttttaacaatgcaaacacggaccatttcagttttaggcattacatgaggacaacagtactgatggatctgtgggtcataaggaacttcaataccgttgcacatagtaaacacttcactgttactgaatcctaaactaaaactactatgtgggtaacatgggatcggatttaggggaaaggatgttacaaccaggctacctaagggccacattaattcccggnttctattggatttttaaaatggcttttggggcccaccggtnttaccatngtctcctttcctccatctttacctttcccggcttttcaggggtg

SEQ ID NO: 432024 - DNA, 3004 bp, Homo Sapiens
ttttgctttgttacagattttccaagcaaaggttataaatgctcaaacctcaaataatggatctccgcatggatgtactctgaagtcatggaacaccaccttcttagttaacctttcagcacaataagccataacatatagcttttggctgttcacaattaagcaacagtgaagggcaaagttagcaagaacaccagattattttctgtagcacaccgttccattaactattattatttaaactgccctcattttatgtttttttctagccccccacaaaaatgaaaaaaccctgtctcatcctcagattaagcattttctccatctccctacacaaccattgtctcctttcatctgtcaatttctggggttgaatttcccaacttcagtagaaatgataaaaaaggcaaccgctggagtgtaccataaggagacacaagaagaaaggtgacactaaggctacagtgcacagaaaacagaccaggtgtggcttcgactgtgcggacctgcccactagcctatgctacagatttgaaatgtctttcactttgacatgacacacggtttatattacacaaaatgaatgaaacgacaatggctaaaaataaatgagacagcctgcacacaaaaagatgatgactgctactttcctcccatcagaaaattactcaaaaagggagtatttaaaggaaactcaaatcaggagaacccggtaggcatcagaggttcagggcaccaaggccttagggcgggaacacttttcaacccaagccaggcttcaggggcaagcccaccaacagaccccaatttccacaggggaggcagatcttctatacctacagtgacagaaaatacactaaagtgcagtataaaatataaaaaggtttgattctgaatagaccaactgctaattttccttaaaaaaatttttaatttggttgagtaaaaaccaaattagttcactgaatctcattttgtaggtaagagtcttatttgcaatacgaaaactggagcttatgactgctttgattttctctgtagcacaggataaccagtattagtggagaacactacaaaaggtggcttgtggtgagttctttgcatagtggttttaaaaacaacctagcatcagaattaagagacttctttaaaactcacctctaaaaaagctgtttaagtataaagatatatctcattaggaaattctattatgttttatttggttaacagataaaatcgcagacgaatcaacagtatagaattatagcagcaaaactggttttaggtgttgtgtacaaacataaaagcaaggaagcaaagatctccaagtggtgtgatgtggtaagcagatggccttgcaccaagtcagtgtatctttctacatcactaggcacacacctctaccactaaggaacattatggtaaatctgaatgttctagataaaaatcaggagtgctcatcaatggttagtcagttgttaagtcagttaaatcaaagaaattcagtattaagtatacatgccgattcttggaaatcaattctaacattagtggttagggagaaagaaaaggaagacattcacctcacaaaacacagagtgtgacacagcaatgaaatacatacgttaaaagtacttcatacaaaaacacatcaaagtcttttaaaaattaaattctcaggcacaggtactgttaaaatgtggatggcaccctcccaaggattgaaaacacacagctggatcatgcatctggaatgttttcttttttatccaggaaagtgttttctctgacttcttgatatgtgcacatcaccttacacgtggtgcccgagagccccgccatcgccatccccgccctgcatctgcatctgcatctgcgcctgcatccttgcaatcatctcttgcatgcggcggagctcagcttctttttccagcaagatctggtctttattcatgtcctcattctccactttcctgccgcctctcttgagtctctcagaacggaagttttcataatgaaggtcctgggtcacctcctggagatcctgcatgtgggtgatgagcatggttctcagcttcagaaagtcattgtgctctgggttctccacttccacaacaccccaggggtagaggcggcctctgaccttctttcctttggcttcaatcaactgattggatccaaccacagagaatgggatgctagccttgagaagtctagtctgctctttaaaatcttcatcttcatctgattctgcatcaggtaagtgatagattttgatgttatgttcttcaatttcatccagaatccttttcttcagccgctcccgttccttcagggtgagagtgtcagcttttgcaatgacaggcacaatattcaccttgttgtgtattgccttcataaacgccacatctaagggcttaagtccatgtccaaaaggtgaaataaagtaaaagcaacaatgcaccctattatcaatgatgtgccgcctgttcaagccgctctcgtcatgcaggtacctctcaaattgctcatcaatataggagataattgtcttaaaacaatctctgcagttgatagcgtcaccatagccaggggtatctaccactgtcaggcgtagcttgacccctcgctcttcaatttcaacagttgaagcctcaatctggacagttctttcaattttttctgctgctccaggtatgactctttctgggtacagatcagttaggaataggctgtttatgagagtcgattttcctagacctgattcaccgaccaccatcagtgtgaactcaaaaccttttttcactgattttcggtgaacttgattggggaggtttgcaaatccaacatagccaggtgtttctggatttataaactgagttggctgttgcttagacatcttttgtgaagcttcgtccgccaaacagcccgagaacaggcgccgaccgaccgcgccgcggacccgcccagcgctcgcggtccgctcacagcccgccccatcccg

SEQ ID NO: 432025 - DNA, 954 bp, Homo Sapiens
  misc_feature (118)..(144): n is a, c, g, or t
  misc_feature (172)..(172): n is a, c, g, or t
  misc_feature (909)..(909): n is a, c, g, or t
gggcgccgcacaacaaggggggggatattgatagagccggggggcgggtatggggcagactcgatattatggcggggtgaaaaggtgacaagggggaacacggatattagtgggaaannnnnnnnnnnnnnnnnnnnnnnnnnnagtttgcgccagtgaaaaattgtgggtntggtgaatatctaaaacaatagtgctttattgataaaaggttagtttaaatggatacaaaattgctgtgtaaaataagtgttttcaaaatacatttctataggtagagactatgtcttagtaaaagagcagttatctattatcaaaagtatctatttagatttgggtagtaaaaccaaaggggatcagaagtgtagcagtgtgggtcctccctccctgcatagctgttaccaggaggcagcgtgcctgaagtactttcactcacatatgcggggcttagtcactagcaaacttgtttttcttttttacagattttccagcaaagttattaaatgtcaaactcaaataatggactccgcatggatgtactctgaagtcatggaacaccacttcttagttaccttcacacaataagccataacatatagcttttggctgttcacaattaagcaacagtgaagggcaaagttagcaagaacaccagattattttctgtagcacaccttcattaactattattatttaactgcctcattttatgttttttctagcccccacaaaaatgaaaaaaccctgtctcatcctcagattaagcattttctccatctccctacacaaccattgtctcctttcatctgtcaatttctggggttgaatttcccaacttcagtggaaatgataaaaaaggcaaccgctggagtgtaccataaggagggacacaggaggaagggtggacantaggggtttacgtggcacgggaaacggaccggtttgggctttcga

SEQ ID NO: 432026 - DNA, 550 bp, Homo Sapiens
  misc_feature (46)..(46): n is a, c, g, or t
gtccaccgaatccccattttgtaggtaagagccctaattggcaatnccgaaaactggaccttatgacctgccttgattttcccctgtagcacaggataacccagtattaagtggagaacacctacaaaaggtggcttgtggtgagttcctttgccatagtggttttaaaaacaacctagcatcagaattaagagacttctttaaaactcacctctaaaaaagctgtttaagtataaagatatatctcattaggaaattctattatgttttatttggttaacagataaaatcgcagacgaatcaacagtatagaattatagcagcaaaactggttttaggtgttgtgtacaaacataaaagcaaggaagcaaagatctccaagtggtgtgatgtggtaagcagatggccttgcaccaagtcagtgtatctttctacatcactaggcacacacctctaccactaaggaacattatggtaaatctgaatgttctagataaaaatcaggagtgctcatcaatggttagtcagttgttaagtcagttaaatcaaa

SEQ ID NO: 432027 - DNA, 398 bp, Homo Sapiens
tttttaaatttgggttgaagtaaaaaaccccaatttagttccacctgaatcctcattttgttaggtaaagagtccttatttgccaatacgaaaactggagccttaatgaactgcctttgattttcctctgtagccacaggataaccagtattagtggagaacactacaaaaggtggcttgtggtgagttctttgccatagtggttttaaaaacaacctagcatcagaattaagagacttctttaaaactcacctctaaaaaagctgtttaagtataaagatatatctcattaggaaattctattatgttttatttggttaacagataaaatcgcagacgaatcaacagtatagaattatagcagcaaaactggttttaggtgttgtgtacaaacataa

SEQ ID NO: 432028 - DNA, 642 bp, Homo Sapiens
  misc_feature (579)..(579): n is a, c, g, or t
cggtgagaaggtgagaagagacaaagtagaaaccaaacagatggctaaaggcagaggattgtgagggtctgactgaagcagcaggggatgaattcaggaaaccattcacagaaaggtagaatcaggaggacttggataacttactgactttggaagaaaagaagtcaaaagatgaccgagttcctaatccttgaaagcctagggaagatggtaatgcttgagataaggcatacagaaaagaatggatgaagacaccctgggctacttacccaacctgatagattaagacagtataaccaaatctgccagaaagaactaaagatatataatgaaaggccatcttctgaacacttgaccattttctactgcctctaagaatctccttcctccttgtcattaagttagatgttaatgctgttaggcaaaattccagaccaggtacagagaaggtgagggagtctattcattcaccactggagggcaatgggaaacttgacaaagcctgtctcatgatgcttacattctagagttgaagggaaacacaaatgttaatttcagatagtgatttaaaatatgaangaaatatggcaaacagaccaactggggtgatcatagaaagctgcttctgaaggagttggaatt

SEQ ID NO: 432029 - DNA, 697 bp, Homo Sapiens
  misc_feature (569)..(569): n is a, c, g, or t
  misc_feature (588)..(588): n is a, c, g, or t
  misc_feature (645)..(645): n is a, c, g, or t
  misc_feature (666)..(666): n is a, c, g, or t
ggggagacaggtggtggctacgacggcgaagggagctgagactgtccaggcagccaggttaggccaggaggaccatgtgaatggggccagagggctcccgggctgggcagggaccatgggctgtggctgcagctcacacccggaagatgactagatggaaaacatcgatgtgtgtgagaactgccattatcccatagtcccactggatggcaagggcacgctgctcatccgaaatggctctgaggtgcgggacccactggttacctacgaaggctccaatccgccggcttccccactgcaaggtgaccccaggcagcagggcctgaaagacaaggcctgcggatccctggctgttggcttccacctctcccccacctactttctccccggtcttgccttccttgtcccccaccctgtaactccaggcttcctgccgatcccagctcggttctccctgacgccccttgtctttacagacaacctggttatcgctctgcacagctatgagccctctcacgacgggagatctgggctttgagaagggggaacagatccgcatcctggagcanagcgggcgagtggtggaangcgcagtccctgaccacgggccaagaaagcttcatccccttcaattttgtggccaanagcgaacaagcctggaacccnaaccctggttcttcatgaacctgagccgcaa

SEQ ID NO: 432030 - DNA, 629 bp, Homo Sapiens
  misc_feature (511)..(511): n is a, c, g, or t
  misc_feature (520)..(520): n is a, c, g, or t
  misc_feature (591)..(591): n is a, c, g, or t
  misc_feature (604)..(604): n is a, c, g, or t
acaacagtcatcaacagacatttattgaactcctgatgtgtgccaggccaggcaccaaggaggagcacacagaggtattagataaagtcctggcccttgaggaacttctggatgatctgaggaaagaaaagtaggtgggcagaagcttctgtcaatcccaggcttctcccctctctctgtggtctcaggaaatgggagagccagaaaggggtaccttgtacagtgtccaagacatacatgcacaggctacacatgtacaagacatgtgcagagtccacgcaactacaggacacgtgtacagacacaaggtgcatatgtgtcacatgtgggtgggattcatgtgcagagtccatatgtgcataggccatgtgactatggcacaagaactccatctccccaagtcaggctggagagaaagggggagaaccccatggcctctcatggcctctcaaggctgaggctggtactggcctctgtggccgttgaagaatcctccaagcacactgcgcangtatcaaangtgggccggcctccgggcgctccttccaacacaacctcatgatttggtacagtcctctggacagttgtcanggcgcaacatgcngtaacctcgctccaagttctgaatc

SEQ ID NO: 432031 - DNA, 902 bp, Homo Sapiens
  misc_feature (687)..(696): n is a, c, g, or t
ctcttttcttaaaaaaagaggatttttaatgttatctaggtagaataataaggtggctgttggggaaagattttggagaaacatttcccaaagatcgcaggtggtgttgccccatcaccatcaccaaaaaggggggtttttaggggaagggcccttggaccgagaagatttaccccaaaaagtgtaaaaaaaggttgaataaaattttaaagggattattaaaattgggttttattgttaaaaagccaatttcaaagaataaccccagttaagaattttgaattcccaattgttaccccaaattccaccccaggaagcaagttaaaggcccttttacttttaggaaccagggcccattaaacaaggaggccccctccaaggctatgattcaaactcaaaaaagggaaaggactcttaggtctccttcaggtcagtacagagggcatcgtaagatcaaagcactgtgccaggtatcacagtactgctacaacactgaggtataactgggcaaattaaagttgaggggtaaaggaagatctccatattcatattgttttgtgggtgtacttaggtgactgaaactctagaacagctgcctttaatggcagcacggtgtaagacaagtctttattaaagagaaagaagtttataaagttctctatcaaggtccccctaaatcttcacaannnnnnnnnnaaactttcccaccctccccctaagctaaagctaatctgctgatatataagatataatcttaatctgtggctactggcaaattataggcactccttccaagtagctttgatcttctgcacattaaaaaaaatcccaacaacatgctatgtaattcatatacccaattttgcattctaggtagaatttcattactactctaaaactcc

SEQ ID NO: 432032 - DNA, 783 bp, Homo Sapiens
  misc_feature (295)..(295): n is a, c, g, or t
atgcacctgacttacattcttacattttttgagagctatgccacctcgagtgctcctgaggctaagcagtgttccttgggctaaactttgaacacaaagtaactgactgaactggttttcccctgagctgaccgacaaatggctgtcttggcagaatctaaatgaggaaaaaattatcttgatatagcaatgcctacaaggctgtatgaccaatatcttcatcctaaataagtctttaagagatacagaaatcaagctagaggcctgcaaagaaaggtggtaaagatagatgatnttatttcttttactcccaattttatttattaatatacaaaatctaattcctttcaggcccaaattacaatatttacataaatagcagctcagcagcctttgccacttgtgtgggtttaaatatttgttgcaccccttaacagctgctgaaacattgcagggtttccacttgagcaagaccactacaaaaaaagatcccactatctctctaagcccacacctgggaattcacacaaccaaagtactctggctccaagggtcttttctggtgctatggtcatgagtcactgtcactgtggtaatttagagtttgttcttatttattcctttgcgaactatgagaagtcagaaaatgcctatactcttcatggggaagtacccaaaagagtgtgaactcaggggaaaaccagttcagtcagttactttgtgttcaaagtttagcccaaggaacactgcttagccaggagcactcgaggtggcatagctctc

SEQ ID NO: 432033 - DNA, 499 bp, Homo Sapiens
  misc_feature (408)..(408): n is a, c, g, or t
  misc_feature (471)..(471): n is a, c, g, or t
agtgtgagccaccacacccaaccaggttatttgaacatttttaagtactgtattttctctattgtaatattgactgtcatctctgtgcaggttttttagtggttgctctaggttgaaacgctttgaattcttaggtatctaagagtgagcattttctttttttgactgctatactctcaccagttgccagcttctcatataaatattgtaaatgctctcgtttaggtaactcagcttctggagttgagggaacttcaaaatcagaagagctctgggaatctgcatttgtgctaagatttagcaaacttttttcctcgggtatatgtgtctcactgcttagagtagttggttctccagtactaggaactattgtcacatctttatctctgcttttcaaatcaagagtanagtatcctttgggcaaattacattttgttccatggagaaaaggaaggaatatcccctttgatnggttggtccggtagtcagctttggccaa

SEQ ID NO: 432034 - DNA, 742 bp, Homo Sapiens
tcacaagccaaatagagtggagtgcccaggtggctgatcttatggtcaatgttgcccccataagctataagagagttgacacactccacgtggcctctcctagcagcttcatggatgggggatgccagatcactctcaggttgtacgctggctgccgtgctgcagaagcaaattcacacgatcccaggtgccgctgacacaagcattatacagtggtagtgtgccagtctgcgtgtcacaccattcacctgagctccatgctttaataagatcttcacacaagagagatgacctccaagacaggcttcatggagtggtggacacatgatctgccgtgatgatgttcacagcccacccctgtctgatgaggttcctcagagacagctgatgtccgtggattgcagcttcatgcataggagaccaatcagacacagcatcgcccatctatgggtttgataagaagcctgatgccaggaaagtcccttggccccgcgggcttgctcccatccatgcccccttgtttgccatccatgatgctctctctgtaagcgagcaagctctgcgctccacttcagttgctcagcaacagtccaaactccatgctccccctgctctctgaaaaattccagttctgtggctgtctgagctgcacacgttctggtcacatggtctgcagcaaagcacagagcaggcagggtaatctgagtgctacctgtgatcagagagaggcatgcgctcgtgt

SEQ ID NO: 432035 - DNA, 1409 bp, Homo Sapiens
gcagaccatttgaccagaacgtgtgcagctcagccagccacagaactggaatttttcaggaggcagggggagcatggagtttggactttgctgagcaactgaagtggagcgcagagcttgctcgcttaggagagagcatcatggatggcaaacaagggggcatggatgggagcaagcccgcggggccaagggactttcctggcatcaggcttctttcaaacccattgatgggcgatgctgtgtctgattggtctcctatgcatgaagctgcaatccacggacatcagctgtctctgaggaacctcatcagccaggggtgggctgtgaacatcatcacggcagatcatgtttccccactccatgaagcctgtcttggaggtcatctctcttgtgtgaagattttattaaagcatggagctcagcacggagccagcgttcaacctgagagtgatctggcatcccccatccatgaagctgctaggagaggccacgtggagtgtgtcaactctcttatagcttatgggggcaacattgaccataagatcagccacctgggcactccactctatttggcttgtgaaaaccaacagagagcctgtgtcaagaagcttctggagtcaggagcggacgtgaaccaagggaaaggtcaggattccccacttcatgcagttggccaggacagccagtgaagagctggcctgcctgctcatggattttggagcggacacccaggccaagaatgctgaaggcaaacgtcctgtggagctggtgcctccagagagccccttggcccagctcttcttggagatgagaagggcccccttctatgatgcagttatcgccgccttagaattcggaagtgttcttggaatccagcagcatcataagataaccaaactcgtcctcccagaggatctgaaacagtttctcctacatctgtaaatgcatctagggaatggattcacaaacgatgtgaaaacagtattgagtgttgtagccactagaagttttaaaatcaagttggatttatagagtttgactagttttttcgattagatttgtatttgttataaacttgtttatggagtttgactaatttgtttctattcaatttgtatttgttaaactcaagccagggtggaaagacactgcatacgtttgtattagttagttagaaggcatgaagactgtttttccctgacttggagagtgtcataagttattgttgttgcatatctagcgtgcatgccaagcactttctgcatcatctaatttagccctcacagccacgtgggtcaagatgtccaatctttccagagtaaggatagaggagtcaaattcaaataacaggttttgctgacattgaacttatgtgatgacttgatacgaggcaggcttttataccacta

SEQ ID NO: 432036 - DNA, 1632 bp, Homo Sapiens
  misc_feature (130)..(190): n is a, c, g, or t
ttaaaaaaagtttattttccacactatttgtacagctgtaaactcaaggaatcatccaatacttgtacaaatctgggagaacagttaataagcaccttcagtggtttccacagtttaagaatttaccatnnnnnnnnnnnnnnnnnnnnnnnnnnnnnnnnnnnnnnnnnnnnnnnnnnnnnnnnnnnnncatgatgaacatttgatatagagggtttaatatgaaacgataaatacaaaaagtgagactaatttatggatttgggctacgtaaaagacctacatggtcctcgaatcttgtgattcttggggctatatttgcctctcaagacaaactccaattattcaaggaagactttctttcaattcaggttccaatgtactgcagaagcaagtgaggacaaagtcaggagaaggtggggcagagaggctgagtgtactggggtttgaggaaaagaggagagactcttttccccaaagagagtatcaggcaaattcttccatgttctcaagtataagtggtctttggcaaaatgtaccattttctttttggagttacttaagagttttacttattgctgttcttaaattccttcccctaccacttcctcttgggcttttttatttctcttgttgatcaatctcttttttgtgatacttttcattgaatcatctcgactcctttatcccatcctttactgactcaaactccttatgctgaacttttcaatccaaaatttctattgttttaggactctgggaagcagttgataaaaagataacacgagctactgatatggtcaggagatgttttctaaacaaattgtagaaatataaacatgaaatgtggcaatgatccctttaattagatcattgagcaataaaggatatgaaccattagtataaatattcaattcagtctttccggattgtgttgttagataagaatacatccaaaaagggccacagatcgagggagaaaccaaggaggggtgaggtcatggttgagtgtaaattggttctgtcatgtggaggccggaggtgagggactgtggtgggacatcatctggtgccagccccatcctgtacctcagataggtctccgtgaaaaggagggacatcagtgcaagcagtggggctaaagaccagcacagcaacagagactagaaccttggatgcaagtattttgggcaaagaggaataattagtaatctttggtataatttaaggcacatcaaaaaaatcccctattctcaaatatctgacctacaccttgaaattcctaccattggacattcttttgatttaagcctttaactaacaaatgcccaatatcctactgctcaaatattgacattctatctgggaggggctgctcattatcatccaccaaatgcccatagatctctaggacagggtaggttttgatgaaaaagcagcgcatgaatattataatgggggtcttagacaagatgatgatggtgaggaactgaggagtaaaactataggactataataaagaagaaattcagagcaccaaaacaaaacattaaggaatgctaatttcctccttaactcccaacttttcctagtcaggccccagctcataggtcaaggagctgacaggacggt

SEQ ID NO: 432037 - DNA, 657 bp, Homo Sapiens
  misc_feature (229)..(238): n is a, c, g, or t
  misc_feature (296)..(494): n is a, c, g, or t
gagtacacattcagggcgccttgaatttgtgctcaagtgtggcccaaataaactctctacttagagaaactgtgtctccgctcgttttcaggccgacagtttccaaaatgttagtattcagcctaacatgagaaaagtcacccatataaaagtgaggggggaaaagcaaatacaggataatctcaattgtatataaaatttatatacgtaaggacaaagatacatagtnnnnnnnnnnttctggcaggtattaaggctgaaaaaattaaaacagtccagagcggtctggctcaggnnnnnnnnnnnnnnnnnnnnnnnnnnnnnnnnnnnnnnnnnnnnnnnnnnnnnnnnnnnnnnnnnnnnnnnnnnnnnnnnnnnnnnnnnnnnnnnnnnnnnnnnnnnnnnnnnnnnnnnnnnnnnnnnnnnnnnnnnnnnnnnnnnnnnnnnnnnnnnnnnnnnnnnnnnnnnnnnnnnnnnnnnnnnnnnnnnnnnnnccagcttaattcacgtaaattccagacaaacgtagaaagtggctcctttagtaagccacttgcggctgctgctcatcagggttcgcctggggccactgagaccacgcgccggtgcccgccctcccgctgcggtccgattttctgaaccaaccaggcgcttccg

SEQ ID NO: 432038 - DNA, 325 bp, Homo Sapiens
aaagatgaatatttattcactttacaaagagaatggtattaaattgccataaacagctccatttatagacaaatataactgtacattacaccagcagctggttcaaacttgctttcccaagatgcttatatggctctggctcttaagatgagcacacaaatctctgttctgtcactggtattaaaaactccctcaaagataatggttttgttttacatattcacaggtgggaaaaaataaatccatctgcccagccctttcttagaggtgagcttccatgtgcatgtcccctagtgagcactaagccaatatcggctcattcttt

SEQ ID NO: 432039 - DNA, 567 bp, Homo Sapiens
  misc_feature (197)..(257): n is a, c, g, or t
attttgactgttctgtcagcatgaaaactactaggtttcttcccagcttaaagagcaactttaaaggatgctgtaatttgttaattttggaatcacatttcagctgataacttctcaaatatttcagcataggctgctgtgcatgtagatagatatagtgaaataatgacataagatggaaaaatctcttccgtttnnnnnnnnnnnnnnnnnnnnnnnnnnnnnnnnnnnnnnnnnnnnnnnnnnnnnnnnnnnnnatagcactggagcctggaactcctgactgaagcaatcctcccacctcagcttcctgagtagctgagtctataggtagtgtgccagtatttgaaaaatcccaatgtatctgattcactgctgctgcagaatattttccaagctctgaatgtatattacaattattcgggccaggtgaaatgcctgaatatttcagagacagcaactagcagtctgggaacactgggttggagctatcaggcctgcacagaagtagtcatgcccttttgtactaatggtgtcgatgacatgtttgaacctcactcatggaac

SEQ ID NO: 432040 - DNA, 2591 bp, Homo Sapiens
  misc_feature (149)..(161): n is a, c, g, or t
  misc_feature (173)..(208): n is a, c, g, or t
  misc_feature (225)..(367): n is a, c, g, or t
gttgtgtggagattacacaaccctgttttttctttttgcgacgtgtttttcttggggggaacacgaaaggagcgcccactttctctttttccttttattgggcccccgcccgcccccacgagaaggttgtttaaaaagttttttttgtnnnnnnnnnnnnncccaacaaaaannnnnnnnnnnnnnnnnnnnnnnnnnnnnnnnnnnngtttagggttcgtgtgnnnnnnnnnnnnnnnnnnnnnnnnnnnnnnnnnnnnnnnnnnnnnnnnnnnnnnnnnnnnnnnnnnnnnnnnnnnnnnnnnnnnnnnnnnnnnnnnnnnnnnnnnnnnnnnnnnnnnnnnnnnnnnnnnnnnnnnnnnnnnnnaaggtccagctgtattatttatttacagcacagttcaaagtcattaaatccggtacaaaagaaatggctctcacttcctggattggcaccagacatcctaccagctgcaattacatcattttttatctatcttctgcttttactttgtgtagggtagggatggggacttacaaatgggccaaagacacttcaacctcaaaaccaaagagaaatctctgcttgcagagatacaaagaaagtaactctccctcttatgaaaagcaaccaggaactctactccagttatgagggccactgatggtgtgggagagctatcaagaagattcttcctagacgtggtgcaaagacagtgagaacccaggaaatcacattcatgggacacttgctcttaccgtcatcaccctctattctatctcaactttggccccatcaaatctaatgataaacaaaagaaggtaattacatgtagaaaatcaaagtgaatgggaatgtggtggtgtgaacataaaagaagaaattgaaaacaatcaaaagtttctcagtgctgctttcccgcactgtcatagaaatctctgatccaattcttcatatgtctaacttccaaggagcgggctaacagcacagacataggatccaaggcattcttggtgcggagatctaagtggtgggccccctctgagatggtgactgcaaccagagtgtctgtgatatccttagttactccacctcctgaccaggggtctagttcaccattgctgaaaacaatgtttgtgtgtgaactaatgtttttgcctccatacatagtagtgatccaggagggccttggtctcacaccccactgttgaaaacagtcatcagaaagttcctttaagttccatgagtgaggttcaaacatgtcatcgacaccattagtacaaaagggcatgactacttctgtgcaggcctgatagctccaacccagtgttcccagactgctagttgctgtctctgaaatattcaggcatttcacctggcccgaataattgtaatatacattcagagcttggaaaatattctgcagcagcagtgaatcagatacattgggatttttcaaatactggcacactaccttgataggccaagcaggcaaaggctgtaaaaagttagaggcataaggatagtccaccattgccagattcacccaggtttcagagatccagtctttcaaatgttggatgtcctgagaagttaatgggctgcataagtgaagggctccagtaagccactgcaaaccactgccagtatttgagagtcgattaatggcatcccaggacctgtggatgctctctgaacaatgtggaccgcttttcctaaaatctgtagttacgatcttcataaatacaccacaaggtactaaatcctcaaactgccagataggggcagaagctgcaagagctccaactaccatatgaggatatttcatcctaaaccaggcggcaagcatgccaccataggagcctcctatggcaatgacaggttgattttcagctcctgggattgttcttttcaagtgtttgattaactctgcaaaatcagccagagcttgttctgatgtcaggaaattcaagtgtctggaatccttgaatgagttgtcaccaaaggggagagactctccatagtatcgatgttcagcaaacaccaacatagctttcagttcctcagccacatcccacatgaaccccgtgttattacaaaaccagataatgtccccttcattaccagtgtagaaaagtattgatccaccatttttcttccagtatttatcagctactaggtaccgctgattaaaagttttcacagtattaaatccaaaatgatcaaccttctgttggaagtagagaaccgaatagttcttggctacagccgggagggatgtggggttggttggcaagtgtaggctgccgagggcccttaaggccggccggagggctatggtggcccagggcgccagaaaagacagaagcaggagcaggagggctcggcggcccatggctcaggctggagactgcagtgcgggtgggagggcgaaaaggaggccagcagaagcgcacaggctaagccctgcccagcctgcagctccgcccgccgcaaaaccgctcctcccaggggaaacccaaagccagccagctcctcagagacgccgcccaagccaggtcaccacagccactccgcccccatccccgag

SEQ ID NO: 432041 - DNA, 511 bp, Homo Sapiens
  misc_feature (31)..(31): n is a, c, g, or t
  misc_feature (106)..(106): n is a, c, g, or t
  misc_feature (211)..(211): n is a, c, g, or t
gggtccggttcacccatgccggaaaaacaangtttgtgtgtgaaaccaaaggtttttgccccccccatacatagtagtggaccccaggagggcccttggtcctcanacccccactgttgaaaaacagtcatcagaaaagttcctttaagttcccatgagtgaggttcaaacatgtcatcgacaccattagtacaaaagggcatgactactntctgtgcaggcctgatagctccaacccagtgttcccagactgctagttgctgtctctgaaatattcaggcatttcacctggcccgaataattgtaatatacattcagagcttggaaaatattctgcagcagcagtgaatcagatacattgggatttttcaaatactggcacactaccaaacaccaagacaaacggaagagatttttccatcttatgtcattatttcactatatctatctacatgcacagcagcctatgctgaaatatttgagaagttatgcagcccttgttccaagcttg

SEQ ID NO: 432042 - DNA, 371 bp, Homo Sapiens
  misc_feature (313)..(313): n is a, c, g, or t
atagcactggagcctggaactcctgactgaagcaatcctcccacctcagcttcctgagtagctgagactataggtagtgtgccagtatttgaaaaatcccaatgtatctgattcactgctgctgcagaatattttccaagctctgaatgtatattacaattattcgggccaggtgaaatgcctgaatatttcagagacagcaactaggcagtctggggaacactggggttgggagctattcaggcctgcacagaagtagtcatggcccttttgttactaatgggtgttcggtggacatgttttggaacctcantcatggggaactttaaagggaacttttctggatggactgtttttcaacagtggggggt

SEQ ID NO: 432043 - DNA, 494 bp, Homo Sapiens
  misc_feature (389)..(389): n is a, c, g, or t
  misc_feature (454)..(454): n is a, c, g, or t
  misc_feature (471)..(471): n is a, c, g, or t
ttttttttaaggtccagctgtattatttatttacagcacagttcaaagtcattaaatccagtacaaaagaaatggctctcacttcctggattggcaccagacatcctaccagctgcaattacatcattttttatctatcttctgcttttactttgtgtagggtagggatggggacttacaaatgggccaaagacacttcaacctcaaaaccaaagagaaatctctgcttgcagagtattacaaaggaaagtaactctccctcttatgaaaagcaaccagggaactctacttccagttatgaggggccactgatgggtgtggggagagctattcaaggaaggattctttcctaggacgtgggtgccaaaggacagtgaggaacccggggnaaattcacatttcatgggggacatttgctctttaccgtcatcaccctctatttctattcttcaantttggggccccttcaanttttattggttaaacaaaaggag

SEQ ID NO: 432044 - DNA, 1011 bp, Homo Sapiens
gttctgaatgcagtgatggggaatggtctgcttctttgcctcatcgattggctggtacagaaaaagatcaatcctcaagtgatgaaagctgggagactctgccaggaaaagatgagaatgaacctgagctacaaagtgatagcagtggccctgaagaagaaaaccaagaattatctcttcaggaaggggaacagacatccttggaagagggagaaattccttggttacagtacaatgaagtcaatgaaagcagcagtgatgagggaaatgaacctgccaatgaatttgcacagtcagctttcatgttggatggtaacaataacctggaggatgactccagtgtgagtgaagacttagatgtggattggagcctatttgatggctttgcagatggactaggagttgctgaagctatttcatatgtggatcctcagttccttacctacatggcactagaagaacgcttagcccaggctatggagactgctctggcccatttagagtctcttgcagtggatgttgaggtggccaatccaccagctagtaaggaaagcattgatggtcttccagagacccttgttcttgaagatcacactgctattggtcaggaacaatgctgtccaatctgttgcagtgagtatattaaggatgatatagcaacagagttgccctgtcaccatttctttcacaaaccttgtgtctcaatttggctacaaaagtcgggaacatgccctgtgtgccgccgtcatttcccacctgcggttattgaagcatctgcagctccttcctctgagcctgatcctgatgccccaccttcaaatgacagtattacagaagcaccctaaaccttgacagttgaaatgagatcagtgtatcaaagtaaatctgcaaattccttctaaatttcatgtgcaaataattatatataaatatatttaagcgtgctattatatagtatatgccatagtttagaaagaatattaacctttcaaactaaatttacgtttgcac

SEQ ID NO: 432045 - DNA, 316 bp, Homo Sapiens
gtataaacattctgatttaataaatggtatgaatatatattttgcatactttacaataaagaaaattttgaaagaaaatggatctaaaactttgtttccctccaatttacatagtaaagtcaactgcatacagttctttccatgtgtaagttttacatttgtattttctacaattaagtaaatctaaatgttaaattttaacacatatatccaattatgtacacaattacaatgtcaatttataagtcaagcttactttacaatcataaattacaaaaaaacgcactatgaatcccttctgtcgtcttctcgcagc

SEQ ID NO: 432046 - DNA, 842 bp, Homo Sapiens
attgttctggaaattttatgtttacttaaaaccttgtatataatagaaacataatccattgagcctttggataaacaaaattttcggagtttactcataatatattcttcaaattatcccacacaaaactgcttagaaagaatgtgttaaactatactgatgatttaaaaacaagcacaacaacgtaaagaatcttcctctatttcaggagaaatgatttactgtgaagttatccttttaacatctttggtgtcaattctgggtgaaccaggatggtcgctttctgtctcgttcaatgatcctcttgccctgatcttgttcagacggtgtctctcctgtgtacagcaccacagtctctatggtgggagccttaaaagggcccccttcttgcttccctatctgtcgtctgatttctgcagtctccttgcacaccttttcatagcagtaggcacaaaggacatgtttctgtttcaggtgaccacattcaggacaaacgtctatgttgttcttaactttaataagcttctgcggatttcttctcctacaccggttaacttcaatggtgcgtctatttttgggagctgccatccaaaagatactgtccaaaaggctggaattctctttacttccactggtatcatttgctggctctgtaaacatggctgggccctgtactgctaatgctggtccccacggaggactgggaaagcccggccggctctgcggaagcttccgtagcagtcgctcccagtagtttcgaagcactccccgggccgcagaccacggcgaaaccaccaagaccagcatggccagcgccattttccctgctggaagaccccgct

SEQ ID NO: 432047 - DNA, 819 bp, Homo Sapiens; identical to SEQ ID NO: 128045

SEQ ID NO: 432048 - DNA, 854 bp, Homo Sapiens
  misc_feature (84)..(100): n is a, c, g, or t
agatgctgattgtttgggtcacttcattatgttgacaaattccttatttgatatttagtatttggagttaggggaaatgagtannnnnnnnnnnnnnnnnacataactacaactgctgtgtttaagtaaagataccagattcaggttggctgaattctagttctagtttttctctaattcaaactcagtgttgcttgtcttcagtcttcctgttaaagtgaggtggaactggatggtgtatgatgacctcatgtagcctgaacatcctaagaaagttaaaatgtaagcattgctcctgtcagtggttatttgttcgttatattgcctcatgttaaaatacgtttttgtttattgttttaaagaacaacatagacgtttgtcctgaatgtggtcacctgaaacagaaacatgtcctttgtgcctactgctatgaaaaggtgtgcaaggagactgcagaaatcagacgacagatagggaagcaagaggggggcccttttaaggctcccaccatagagactgtggtgctgtacacaggagagacaccgtctgaacaagatcagggcgagaggatcattgaacgagacagaaagcgaccatcctggttcacccagaattgacaccaaagatgttaaaaggataacttcacagtaaatcatttctcctgaaatagaggaagattctttacgttgttgtgcttgtttttaaatcatcagtatagtttaacacattctttctaagcagttttgtgtgggataatttgaagaatatattatgagtaaactccgaaaattttgtttatccaaggctcaatgattatgtttctatatatacaaggttttaagaaacataaaatt

SEQ ID NO: 432049 - DNA, 1151 bp, Homo Sapiens
  misc_feature (547)..(555): n is a, c, g, or t
gggatacatatacacaaatatataagctttccccatgaaatattgagtttttaaacactggcatgtttttccccccttgcagtatagtggtagattggaggatcttttccatttattgtattggctctttcagcacaagtaatcctgatatcttcattttttttccttctgtttgattaaaaactgcatgtgtgtacaatgatcttttggcatacttccattgcattaacagtgaaatttccttttatacatgaccactgtttcagacctgtactgctgctataacagttaacctttctgttcttaatttgataatacttgatttccaggactgtttcggcataactaattttaaacagttttcagatagtgaatatgagtagtctaataagaacagtttttttccatgtgaagcaactctttcaatgtatataatgttagtgtgtttctttctaaatttaggatagaaaagtgaatagtgtgcaaaaagtatagctacattgcatctgccattgaaacataaatggggtatggaaacgttcaagcnnnnnnnnnctctttatgcaggtatagataagctttgttttgtaaatgcacaaagtccaatcattgaatcaacttaatttttttatgtacttgaagtcattttattactctttaacactcatgctgaagttctgatatttggttgaaatccatggttttactcttggcatattggtgggctcttgtgcatattaatatattagactacatgcaaatacagtctgtcttgccatggtctgttgaagtgcaggtttgatccagccagtatagaactagctctgtaggggtgaggaggactgtgctgtgtatcatccttgattgtgttccttcaaggagcattgcactgtaagtacatcagaatgacaaattgatgaactgcaacagtatctttttgtcaatgttccacataatgcaaatgccatacgttgtgtgaatattatgttggaatacagtgctgatatctgtggaaaaccataacgtgcctcttaactttaacatagagtaatacatagttctgtatcttgaacacgtgagcttacggggtacgaatacgccatatgctaagcaatcggctaaagaaaaccggacattaacaagtcgcaccg

SEQ ID NO: 432050 - DNA, 1918 bp, Homo Sapiens
  misc_feature (1896)..(1896): n is a, c, g, or t
gcgtttccccgcggcggccgttggcgtcgcagcgcgccgggcgaggacgaggagtgcggccgggtccgggacttcgtcgccaagctggccaacaacacgcaccagcatgtgtttgatgatctcagaggctcagtattcttgtcctgggttggagatagcactggggtcattctagtcttgactaccttccatgtaccactggtaattatgacttttggacagtccaagctatatcgaagtgaggattatgggaagaactttaaggatattacagatctcatcaataacacctttattcggactgaatttggcatggctattggtcctgagaactctggaaaggtggtgttaacagcagaggtgtctggaggaagtcgtggaggaagaatctttagatcatcagattttgcgaagaattttgtgcaaacagatctcccttttcatcctctcactcagatgatgtatagccctcagaattctgattatcttttagctctcagcactgaaaatggcctgtgggtgtccaagaattttgggggaaaatgggaagaaatccacaaagcagtatgtttggccaaatggggatcagacaacaccatcttctttacaacctatgcaaatggctcctgcaaagctgaccttggggctctggaattatggagaacttcagacttgggaaaaagcttcaaaactattggtgtgaaaatctactcatttggtcttgggggacgtttcctttttgcctctgtgatggctgataaggataccacaagaaggatccacgtttcaacagatcaaggggacacatggagcatggcccagctcccctccgtgggacaggaacagttctattctattctggcagcaaatgatgacatggtattcatgcatgtagatgaacctggagacactgggtttggcacaatctttacctcagatgatcgaggcattgtctattccaagtctttggaccgacatctctacactaccacaggcggagagacggactttaccaacgtgacctccctccgcggcgtctacataacaagcgtgctctccgaagataattctatccagaccatgatcacttttgaccaaggaggaaggtggacgcacctgaggaagcctgaaaacagtgaatgtgatgctacagcaaaaaacaagaatgagtgcagccttcatattcatgcttcctacagcatctcccagaaactgaatgttccaatggccccactctcagagccgaatgccgtaggcattgtcattgctcatggtagcgtgggggatgccatctcagtgatggttccagatgtgtacatctcagatgatgggggttactcctggacaaagatgctggaaggaccccactattacaccatcctggattctggaggcatcattgtggccattgagcacagcagccgtcctatcaatgtgattaagttctccacagacgaaggtcaatgctggcaaacctacacgttcaccagggaccccatctatttcactggcctagcttcagaacctggagctaggtccatgaatatcagcatttggggcttcacagaatctttcctgaccagccagtgggtctcctacaccattgattttaaagatatccttgaaaggaactgtgaagagaaggactataccatatggctggcacactccacagaccctcgaagattatgaagatggctgcattttgggctacaaagaacagtttctgcggctaccgagtcatccgtgtgtcagaatggtcgagactatgttgtgaccaagcagccctccatctgcctctgttccctggaggactttctctgtgattttggctactaccgtccagaaaatgactccaagtgtgtggaacagccagaactgaagggccacgacctnggagttttgtctgtacggaaga

SEQ ID NO: 432051 - DNA, 950 bp, Homo Sapiens
ccggaccggccattcattctgggagccataatcctgtgattcttttatttaagttttaaaatacattaaaattttactggttaatcataaaatattttatatttgaaaataggatggcaatctttatttttccaagatatttgttggaaaaaatgatcgttggtattattttttctttcagctatattccatggtatctttaaaattgttcagaatataggacttttactaaaaaaattcaattgtcagagtctaaaaaaacaatgtcctcaggaatacttcagaaatagaaggtatgcaatcccttagtggggggcaaacacatttcagatttcgtctttatttaaaaggatcttcagtctacaacatttgcttttttcgtgctttggaaaatatccttgtgcagataagttcttctgtttgaaacaagcatgaaacattggtccaataacctaagaatgtggagatttcttgatattctgtattaattaaagttctctacatgtctcaaatggagatcacaaaacatgaaaaggaagaaatgaaatatcttttcttctgggatgagtgtcaattttaatgtataattgtcataatcaatcagccaaaagttacaatctgtccctcagagacattgggggaagctgatggatttccagtaaggaactgtggtgggttcaaactcaggctgccacaaatacattgatatggtaggtaggaagtaggactaaatttgaaagaaacttatgggataaagttcacaattttaaaaaggttgccctccaagtttttttgtttgtttaaaaactagagtgatttttaagtaacccttatatttaaggctgcaaaaaatgtacaaggagtatgttttcaagtaaagggaacataattcctcaaaaagctgttgaactggagttatgataggttatgacagagagcatgatcagtgc

SEQ ID NO: 432052 - DNA, 960 bp, Homo Sapiens
  misc_feature (47)..(47): n is a, c, g, or t
ctcttttttgttcccgcgccccaagccgcctttttgccccatccccncgttttttaattctatgccccgctctgttttcccacccctccttgttctgaaggccccctgtaccccgctctttagagccgccccttgtccccccacccaggtagctggcttccccgtttcagccccccgcagctctgcccggttttctgacgtcttcaggaaccgcacgctgctgggaccctcggcgccccttctcatggtatttgacctcgtagtccagcacagccccactgggtgcccggggaacagcccaggccaggctcaagctgctgggtgaggaccgcgtcacccggatgtcggacactgcaggaggtacctctcggtcagtggtgacattgacaggctcaaatgggacgggccccgtggctaaggaggataccccgttcaatgcagtgacctcaaaggtataggtgaagtcaggacgtagccctcgaaccaccacccagggctccaccaggtcccgggggccggggtcaaaagtcaggtctcccccgcagggcgcacaggagcctccgggtcggcactcccggcagcggagggcgtaggtgaggtcctctcggccaccagactccaggggggcactccattccaggtgcagggaggagccgttcaggcgggaaaccacgctccgcggagccgaaggaggggtggtgcagggtgcaccccgggggtctgtgcgtgcccggaagtacccgacgcggcactggcagacggctgatccaatggtgttagagtggctattggctgggcatggctggcaggacccttctcctgacaggggcttgaaggtgccctgggcacaggctcggcacttggtgttcccctcagctgcctcgaaccccggagcacagctgcagcccgtgaccggctgttcggcccactggcccctcgtgccgaattcgccacccaggc

SEQ ID NO: 432053 - DNA, 428 bp, Homo Sapiens
  misc_feature (388)..(388): n is a, c, g, or t
  misc_feature (396)..(396): n is a, c, g, or t
  misc_feature (413)..(413): n is a, c, g, or t
ccaaaaatttatatctttgccatttattttttaaaatcttattcaaaatattaaataatagtttcagatatgaaaaaaattactgcaataaaacggttcaggggtatttccattgtgcttcccttccctattaggaaagtacactgtccgcccaagagacaggatggacggccttcttccagctctacataaagcgcaagcccactggctcacccgggtcctgcttaacatatattagggctatgttttctaaaaagctgtagtgacacttgtaagtcaaccatggttcaaatcacatatttacatattgatcaattctttatgatagaaagacagacataaatgaatcccatagtaaatactttccagttgccataaaaaacaaaancaaagganaacaagtgtgggggganaaaaggtaattgtac

SEQ ID NO: 432054 - DNA, 1245 bp, Homo Sapiens
ggggcccgggtccagggattccatgggggcatgacaggggcttgccgtttccacccacaaaaaggcacttttcatttaaagtttttaaaccagctcccacgatttttctcctccaagcatcgggccgtgctgtacaaatgggggtcccctttgtaggaaactttttgctgcaactcctccagtttcttaatttgttgacgggtctgaagttgagattctgctaatgacgttatccagttttctagccgatctaggcagatgtggggcgggcctccaatgcaggcaatctgttgccgcctcttccagtcagccagctcctcgtccgtgagagtttttctgcacgtactccatcgctgacaaaagccccgccagctcactcacgatgcttctccgcatctggtccagcgcagtgagcatctgttccagctgctgcatcttctgcctggtcactgactggttgtttccattcagatcttgcatgtctccttgactcttgagggttttatagttgaaatcaaagtcatcctggagattctctaccactttcattttctgttctagatcctgcactctcttccggacatcctgaaggtgctgctccagcatctgctgcttctccgtcaccacggctgctgtggggtggttggcctggcccccttgctgggccgcagtggctgcagtctgtagaaggcgtgattcttcccacaggcaccgggccacaatccgggcaatctccattggcttctcaagatacctgctctgaagaaactgcttgattcttcgtagattgtgctgatagagaacattcgactcttgcaggaagcggctatactgctggtcaatctctcccaggagattatgaaacaccaaagtggcatgtgattctttgctggccgcatatgcccaatcttgactctcaatccaaggggccagaaactgccgcagctccattgggaagctgtcactgtagagctgatggagctgctccaggtaccgtgtgtcaagctgctgtagctgattccattgggccatcctgctgtttctccggcagaggccgagaggccggggctgcgcgtgtgccggggacgggcggcgaggctccctcaggccgaagggcctctccgagccgagggggagagacagcgccaagccggggtgcctgtccaggatccggttggggcttgttccctcggctgcgacgacgccgtggtcgacgaatccaaaacagttccgaccgtaccagct

SEQ ID NO: 432055 - DNA, 917 bp, Homo Sapiens
gctcggagctgtttgtccagctgtttctattcgcacccggagcagtacagccagaagggggccgagccgaaggtggctggctttaggcgctaatttccaactcttttcctcacagcttgtcttttccaggcaccctggagtcccctcaggccagctcggtgggcgcgcacctgccagccgcccctgacctcgcaggccaggcgacctccgagcctgagaagatggcccagtccaagctcgattgccgctcacctgtcggcctcgactgctgcaactgctgcctggacctggcccatcggagtgggctccagcgaggcagcagcggggagaacaacaacccgggcagccctacagtgagcaactttcggcagctgcaggaaaagctggtctttgagaacctcaataccgacaagctcaacagcataatgcggcaggattcgctagagccggtgctgcgggacccctgctacctgatcaacgagggcatctgcaaccgcaacatcgaccagaccatgctctccatcctgctcttcttccacagtgcctccggagccagcgtggtggccatagacaacaagatcgaacaggccatggatctggtgaagaatcatctgatgtatgctgtgagagaggaggtggagatcctgaaggagcagatccgagagctggtggagaagaactcccagctagagcgtgagaacaccctgttgaagacccttgcaagcccagagcagctggagatgttccagtcctgtctgagccctgaagagccagctcccgaatcccacaagtgcccgatgccccttgtggttctgcggtgaagtggctctgtcctcagggtggcagtagcactcttgtttacctagtccttcccagttggtttggctcccaggcattttacgagaggaccttaccct

SEQ ID NO: 432056 - DNA, 2515 bp, Homo Sapiens
  misc_feature (369)..(369): n is a, c, g, or t
  misc_feature (546)..(561): n is a, c, g, or t
  misc_feature (568)..(569): n is a, c, g, or t
  misc_feature (571)..(571): n is a, c, g, or t
  misc_feature (573)..(573): n is a, c, g, or t
cgttctcctacattccgtgttaggcacagcgcgggctctgtgccttattgaaccatcactcattttcggcttttcgtagggccttctggtatattatcatcctgaaccgtgaaaaacacataggaaacgcgccctctcccgttatgtggtttattacgcgagcataattagtgccgcctccgcgcggctttttttcgtatgtcgtggtggggagaaccgattacgcggcatctgtggcggccttagcttcggtttgtaacagagggaatgtggggaatgtcgatcttatgtgagtgtggcggggcgttctgctgcgctgcttagtgacttatggatacgggaattccctgccggcggcggttatgtccnctgcacgcattttatttatgtttctctttgtggtgggggaaatggtcggcgcaacagattggtaactcgctgtaattacgggggaaggggggctggtgattttggaccggttctgttttataaagattttaatgtggatttttgactgtaggagtgttgttatggctatgcgtttgnnnnnnnnnnnnnnnnaatatgnntnantattagaaaaacagagcaaagtttattgaaatttcaagctacatttggaaaatcaaaatccaaatcctggaaccatacatcaggataaggtgtcaaaaagtggaaagtgttcactctcacaaaacccgctacagacaagctttctgggcacacctcccaggctccattggatcaaagccatccccttgttcatccctcatccacagtaggacaccatccttctgttcacttgaaagttttccacaataattacaaaacaaaacaaaaaacgttttcaaatgacactgtgaagcccaaactgatcttctctcaaccccattctatgtagtcagcaccagtgaatggtgggtttggcattcaaaacaggacttcacgtttcagtggacagctggggaaagggttgcagcagcaaggcatccgtggccgcattcagaggctggcccccctccttgcctttactctcgagtcttacttaacctaaaagacaaactgggtcaacttggtaaatgaacacagtcaaagacttagccataagaggtaagggaccagtcaatactcccaaggctggttaggcccttcaacatgtaggtggatgtgtatatgtatacatcgctacactaagatacagatctagccctatgggtatatatacgcatttatggctatatagaaaaactatgccaatactaaccaaacagaactttgtaagcggtcatcccaaagctgtaatcccacactgggctgtgcacaaagccatgcattataccatattaaccaacagaaggctgacttggctcaatctctcccatctgtgtcccctgccttcacgaaacagaggagaagagagaggttgcctctgcttaaaacacaagtggcttcttcataggaacagtcgttgtcaggtgaagctgttgaagatgtccatggagatgagaaacagaccccttaaactttctggagcaaactggtgtcacacctcaaactacccttctcctttgccagttgcagctaagttgcccaggccctgggagcccccagggcgcagtagcattagaggctcactggcttggtgttactaggccccatgcaactcagcctccagagacctgctcttgtcaggggtctgtcgctggagtggacccaggtggccatgtccttaggacatctcttggcaccagctgtgctaggtgtaaagttctcctcgtgagatgatgcttggggagccaaaaacaaactggaaagaactaggtaaaacaagtttagtggctctgcccaccctgaggacagagccacttacaccgcagaaccaccaggggcctcgggcacttgtggggattcgggagctggctcttcagggctcagacaggactggaacttctccagctgctctgggcttgccagggtcttcaacagggtgttctcacgctctagctgggagttcttctccaccagctctcggatctgctccttcaggatctccacctcctctctcacagcatacatcagatgattcttcaccagatccatggcctgttcgatcttgttgtctatggccaccacgctggctccggaggcactgttgtccagcttaacggaaaccacatcccctccaagcagagaagagaagaaggagatggagaaattgtgcagctggtagaccgccacctccatgggggtctgatacatttcggtgttcatggctcgggctgctaggaagctctggccgggtttcgtgcggggctgggcggctgggcggctgggtggctgctggcaggctgcgctgggctgggctctgcgctggagtccggccctgaggctaggagcggggcgaaggctgcagaacgaacccaaagccaagcaggcgctccagctggagttgaagggaagtgactcgaggggtgtcacctcgtatgtcacaactccacgccgccagatccgggaa

SEQ ID NO: 432057 - DNA, 1021 bp, Homo Sapiens
  misc_feature (938)..(974): n is a, c, g, or t
gaaacaacagggggtctttccttgtcccctcaacaggagagggtcccttaaacaggttctaaagacatgttcagacttgaaatgccctgagatggaacagccctaactttgggaacaactggtgtcacccgccaacaccgtccccttgccagtccaacaaagttgcccagcccatggagcccccagggcgcagtagcattagaggctcactggtcttggtgttactaggccccatgcaactcagcctccagagacctgctcttgtcaggggtctgtcgctggagtggacccaggtggccaatgtccttaggacatctcttggcaccagctgtgctaggtgtaaagttctcctcgtgagatgatgcttggggagccaaaaacaaactggaaagaactaggtaaaacaagtttagtggctctgcccaccctgaggacagagccacttacaccgcagaaccaccaggggcctcgggcacttgtggggattcgggagctggctcttcagggctcagacaggactggaacttctccagctgctctgggcttgccagggtcttcaacagggtgttctcacgctctagctgggagttcttctccaccagctctcggatctgctccttcaggatctccacctcctctctcacagcatacatcagatgattcttcaccagatccatggcctgttcgatcttgttgtctatggccaccacgctggctccggaggcaccggctctgaagctagctaggaattccttctcggctggtaagcttccggccttctcccaagcggcgcacggcgctcggccagccccctgcccagccctgtctggtcctgcccgccgcccctctgcctccggctgcctctgcggctgcagcagctggttttcacggcgcagcccgctctcgacgaattcgagctcggccgatttggcctgatnnnnnnnnnnnnnnnnnnnnnnnnnnnnnnnnnnnnncggccgccccgcggtgaagctccagttcgcccatatgtcgtaattcc

SEQ ID NO: 432058 - DNA, 480 bp, Homo Sapiens
aagaataaatttgggggcagaatttccagaatagtagctctttctccccataacttgtgaggattaagagaaaaatgccccaaactccatccttctcatgggccccttgtcaaaccaaggtgactttctgaggtagccactcactgggtgccagaaaaccctgagcctgtttatccagaattctctgtgcctgtgccataagcaaaagttttgtgtctttagcagagatgatattgttccggggtttggctttccctcacccccaggggcacagtagatgctaatgactttgtaacggcagcagggggtcatgacagggagctgctgtgtgttgaggagagaaggcatgtttctttcttcattgtgtggagagcgtcacaagccactctctttccatctgcccatcatactgggagttgttcagatggccaatggaggagcaggctgggactaatccttggcagggctccgcacaagggc

SEQ ID NO: 432059 - DNA, 3110 bp, Homo Sapiens
  misc_feature (423)..(423): n is a, c, g, or t
tttttacccacatcagttccatttattcttcgtacaaatattttacagttttatttttaaatcatttacacatattcatacaaagaaaaataaatttcaggatggaatcctgggaccatggtagtttaaaaagaaaatctctctgatcattagctactaaagacaaggcaagaggcttagcagtcatttctgggggttagtgtatctccccatgcaggggacaactgagaagaatccaagctgctccctcatcttccttcgatctagatgggggaaggggattttccaatgctctcccctagaaacatttcaagaagtacagcaaaggcttatgggtaacacttgaacctatttgctaggaaatctgggcaagattgcactttcttgaaccaattttctattaacagttgggctcaattcccnattcacagggtgcttctaagggggatgaggggattgccgcactcaccatacccccttcccacttgctctgtcctcccaccaacgttcctgaatacagcccttgatctcttctgatctagtccctccccgctcccacccagcctcatttcacaagcaaaccttcctcctatgccacacacccagacactctggtagcaattgggccctggcagctcctgaggaccgctgcagtgatgacacaggactattgcatcagcatcgtgctcacagggaatcagagctcagccaggagaggtccaagaatgacagaaccatgagcactcctaccaaaactcagctctgctcagccaaatcaacaattcaacccaacaggccaactcctaacacatcccatccagacagacattagaggcgcacagcagatgaacctcctacttacactgcccaaggaagctggactatcaattcccagtaaaagtgggggaaaggacagacattacagatgtggtagaccctatcagaaatggcagctgatgataacagttaccctaaatcgtggggtcctacccaaaaagcagcaccaagaaagggcatgatgagcagagagatctgtagctggatgtacagcccttgaattaccaagggactcagagatgacacagctcattttcctacaattatgtaggaactagaacacagactacccacccctacgttgaggcagctcctgaaaggccgtaccgcttatggtcatcagcccgcccccttggtaggcccatttggggagagggaatcacatccaaagcggggatccctccaggtggacactcacagggcagcccgtcccactgtcactggggcaggccaaacatagttaggagggtggacagatcccgcgcgtcggctgccccataggcatcgctctggcctaacatagacaatgccaaacgcagggtgctccagatgttctccgacatggcacctccttcaccccgggggccccggcttttcctctgcatgttcagggcctccagaaagtgctccacagcctcccggtgagccccgaggttgatgcagctgatgcccaggttatagcgggaccggatatagccaggctggagctcgagggcccggcggtacgcagctactgcttcttcactctggtttccattggccagggtggcgcctagcttattccacagcaaatagtcattgggacgaacgctgagggcagctgtgaagcagtccacggccttgtcatactccccactcaggttgaaaaggactcccaagccacactgcacatcagggtcaatggaggtagggtccagccgcacagctgccaggaagagctctttcacttcaagaaacagggagtcagacaagagagatcccaggatacgcttgctggggcccagtcctgccccaccagccccttcttcagcaggtgtcaccagatgggcataggctggtgtgtaccgcagccagtctcgtagggtttcacaggcctgtcgctgcagggactcgttggtgaagctcacagccagcgccatcagtgctgtctggttatctggctttagctccagacacctccgcaatgcactgatggctaatagttcttgttcattctctgcctgggtggtacccagatactgccaagcttccatgtgcttaggatcctgctgaccagctgcctcaaaaagcagcacagcatttggcaggtccccctcctgaaggcgccgcagcccttcttcaaaaggctgagggtgatcacgcaaggggttctcctcctcaaactggtaccccttatcataggtagctgccgtaaggtcatcatagtcagaaagcccggggtgggcctcagcatcccgttttgccatttcctcccaactttgcctgcaacttgtcccagaaatcgacatcaggattctatagctgacttggctggttcaaactccatatcaaggggcagatgtgtttactggtcttgtgaactggtcaacccaggcatctgatgtaccctcagaattagccaatttggggtcatccactttggccacaaagtcactggccgtgtgctgcagatcctcctcaggatgatattcatcataccagcgatcggtggctgttccctcaggttctcccagccacagcttctcctctgattgctccaaatattcctcagcccagcgggcaggggacacagacaaggggtctgtaacttcagagatgaattcttgggaccagtcagtctcattataatcctgagttacatccacagcatctccagctgcaagaaactcctgggcccagttctcagacaaggccaagtctgccacaccaggggctctctggggagcctggcggaagtttgactgctcaatctgttgcatctcagccaggaggtcatccatcttgaaggtctgaggggcacgggacacaaggggtgcattctggtcctgcaggaattcagccaccaatgcctcagaggccggggctccggggggccaggggccaggcctcaatccctcctgccgaagggccttgtcatgggtgaagtgcccggcgagcttcatgagcgggttggcacccccgcattcggcctccaccagctcccgcattgccatggtgaccgccagctctcgccgagcgccgcgccgcacgacgcaccggggcaccaggtgctg

SEQ ID NO: 432060 - DNA, 840 bp, Homo Sapiens
cagcggacgtcaatagctgactgggctcgttccaactgccatatcaaggcaagattgtgtttacctgatcttgtgaacttggtcaaccccaggcatctgatgtaccctcagaattagccaatttggggtcaatccactgttggccacaaaagtcactggccgtgtgcttgcagatcctcctcaggatgatattcatcataccagcgatcggtggctgttccctcaggttctcccagccacagcttctcctctgattgctccaaatatgtcctcagcccagcgggcaggggacacagacaaggggtctgtaacttcagagatgaattcttgggaccagtcagtctcattataatcctgagttacatccacagcatctccagctgcaagaaactcctgggcccagttctcagacaaggccaagtctgccacaccaggggctctctggggagcctggcggaagtttgactgctcaatctgctgcatctcagccaggaggtcatccatcttgaaggtctgaggggcacgggacacaaggggtgcattctggtcctgcaggaattcagccaccaactcatcttcagaagctactcccaaaggcttggaggctgcctcagaggccggggctccggggggccaggggccaggcctcaatccctcctgccgaagggccttgtcctgggtgaagtgcccggcgagcttcatgagcgggttggcacccccgcattcggcctccaccagctcccgcattgccatggtgaccgccagctctcgcggagcgccgcgccgcacgacccgccggggcaccaggtgcatgcagggaattccggaccgggtaccagc

SEQ ID NO: 432061 - DNA, 1579 bp, Homo Sapiens
cgttttttcggaactcagcagctctatttacataacagcgtcgcccacaccccgtggggcctctcacggcttcttggctttcttcacggaagatgagctggaggccgactcccgtcgctttctcgaattgggcgtgaggggtgcgcccaccacatcaatgatggtgtccttggggtcaggaccaagtccgggttcagtcactgccggctcagcagaggccgggcctgggcctgatgctggtgtggcagggccccctagcacaccagcccgggccagtgcctcatgacggtgccgcagcatctgcagctcatactcgcagttggcacaggcctgcttgagctcgtagagcaggcaccaggtcgtcttcgcagctcattgaacatgtgcaccagctcctccgtaggtgtcgggctcagctccacaccaagctccagcagcatctgttccagggccttgatcttcttctgtcccacagagcttggcagcttcatccgttggctccgcagcgtgacacctgcagacttgaagtctggaaacttgatgcctgcagtctcaggaacagccggcttctcagcctcctttttctggggtagcttctttttgggggccttgcgttccgtgcgccgctgctctgcagtggtgtctgccgctgtgatcagcttctgcaggtcctggctgcgtttctcccgctccttcttccgggcctcaatcttgcgcagctcctgtagcaggtactcctcctctgccacctgctctggggtccggttgtagagacgctcaagctgttccttccgccgtcgttcgtgcccagcatcaaatactggtatcttaaggtctgtgcctggcacagcccgcacgttggcaagcttagcacagatgtggtagtaccgctccttcaggtcttccacagaacgcttcttgaactgctggtggtcataccggtcatggataacaacaaaacgcaggtcaaagcggcggctgaggtcaaagaggtggtcagtttctgccttagtccaagcatcatcgtggagataaagctggtactcctgctccgagtacacaggcacctgcacagtcttattgaacctggcaaaggggtagtccttgccctcctccgctgcacgtcgccagtggaagaacattgctccgtccttgcgggccgggttggtgaatggcatccacttccaaggccgcaccttcttggagcccaacttggccttcactgtacggtatccctggccagtgtcactgggtagcagtgggggtgcatccttcttgtcagagtagagcaaggcatagacttcccggtgcatgccctcgggcctcttgaaagtcagtgtctcagaggacttcttggattttttcttgtccgggttgataatgtccttcttgctgatggtcccagaggctgcatccccttctggacccccgagttctagaatgtcccgtacatccgcgcccgtagccatcgcgcctgagagatgggggagccaccggaggtcaagggtcagtgcctgggtccggcagctgcagcccccactaccactcccccgtccccgcaaagccgcggcagaaactt

SEQ ID NO: 432062 - DNA, 1060 bp, Homo Sapiens
ggcctcatcctggccagctctcttgccagtactcctccttcggccacctgcttgggtccgttgtagagacgctcaagctgtccttccgcctcgttcgtgcccagcattcaaatacctgggatcttaaggtctgtgcctggcacagtcccgcacggttggcaagcttagcacagatgtggtagtaccgctccttcaggtcttccacagaacgcttcttgaactgctggtggtcataccggtcatggataccactatacgcaggtcaaagcggcggctgaggtcaaagaggtggtcagtttctgccttagtccaagcatcatcgtggagataaagctggtactcctgctccgagtacacaggcacctgcacagtcttattgaacctggcaaaggggtagtccttgccctcctccgctgcacgtcgccagtggaagaacattgctccgtccttgcgggccgggttggtgaatggcatccacttccaaggccgcaccttcttggagcccaacttggccttcactgtacggtatccctggccagtgtcactgggtagcagtgggggtgcatccttcttgtcagagtagagcaaggcatagacttcccggtgcatgccctcgggcctcttgaaagtcagtgtctcagaggacttcttggattttttcttgtccgggttgataatgtccttcttgctgatggtcccagaggctgcatccccttctggacccccgagttctagaatgtcccgtacatccgcgcccgtagccatcgcgcctgagagatgggggagccaccggaggtcaagggtcagtgcctgaagaaggaccaggctcaggtcagggggcggggccaatccagacctaagcggaggcgagttgaaggggcgggccaagaggagaagggtggtccaggtcaggtcggggatctgcctgtgccccaccgcttggatgttcctaacggccccttcagccacctgggccctcgcacttccgcacctgggtccggcagctgcagcccccactaccactcccccgtccccgcaaagatcccgggaattccggacc

SEQ ID NO: 432063 - DNA, 558 bp, Homo Sapiens
  misc_feature (490)..(490): n is a, c, g, or t
  misc_feature (530)..(530): n is a, c, g, or t
cttttcggggacgggggagtggtagtgggggctgcagctgccggacccaggcactgacccttgacctccggtggctcccccatctctcaggcgcgatggctacgggcgcggatgtacgggacattctagaactcgggggtccagaaggggatgcagcctctgggaccatcagcaagaaggacattatcaacccggacaagaaaaaatccaagaagtcctctgagacactgactttcaagaggcccgagggcatggcaccgggaagtctatgccttgctctactctgacaagaaggatgcacccccactgctacccagtgacactggccaggggataccgttacagtgaaggccaagttggggctccaagaaggtgcggccttgggaagtgggatgccatttaccaacccgggcccgcaaggacgggaggcaatttttttttccattgggcgacgttgcagcggagggaggggcaaggattacccttttgnccaggtttcattaagatttttgcaggtgcctgtgttattnggagcagggagtaccagtttatttttca

SEQ ID NO: 432064 - DNA, 548 bp, Homo Sapiens
caaagcattaggattataccgtgtgagccatcatgcctctgttaaagtttttaatgtcctgattaatatgtgattcagattagtaagactaaaatctatgatcatatcccatcattttgaagcttttaaaaatagataataatgatttgttacatgcagcttccatctagatgcataacgttatttctggaaatgcgggccacctacaatgtaaagcaggctaaacaaggcagcttgtgatttcattttaatcagaaacacaccaaataggcatcatggcagcagatctggctgctagtgttttaaatacagatggattgttaacatctttattattcataattgtctgtcaatgttctctggatgatcaagaaactctttgtgcctcaccctaatcactgaagtaatgaaaggagatacccgcagcaaggactgcaactgtaaatgctgcaatcacacctatgttttgctgaattttcaataacattgtagttttaattggttgttttggttgttcatcatctgtgttgtccaatgaagcttgaccc

SEQ ID NO: 432065 - DNA, 691 bp, Homo Sapiens
  misc_feature (411)..(411): n is a, c, g, or t
ctagtcaacaattttattttaaagtttttcaaaatacaaaagttagcaaaaagctgaatatttacaattatgtcataggttactattaacagtgcagaggatagagtatgtaagaaagactttgaagaggaaataatatacaaagtacaataaacagcaaggttacatgtcatcgttttgccaccgtacagaagtggaaagtgccgacctggagaggtcaccgttgtttcatttctctgtatccagaaaggaccgtctccttaaatccaccaggggaggaaacagcctcctgtggaaaatgctgtcttctcaggagcattgtatctgcacgtgccaatcacagttcctcctccgttcgcaggtactgggtacagtctggaaatctttttcagctgagcaagcgtttaatcntttctggaacacataggacatgtgctttcagtgtttagcatgatcttcaattctgagtatagagcaggggagtcacaatgtggacacaccgtccagtcatctttcgacatgtgtcgacctgttgcaatgcaatatgggatactgtttttacatccaggacagaggagttcacactctggagaagaaatttgcagaatggacatggagtcgtggcctcttctatctcagatatatcgggtctcctgaccattccctcgatcttctttttgtatttggcccc

SEQ ID NO: 432066 - DNA, 815 bp, Homo Sapiens
caggaggaaaataatataatttccctttaattgaaaaaatgattctggaccttcagaggtccagttaaatctcctggtggaatgggggatctttctaaacccgtgttgttccctctcttcaaacagctggagctgtacacagatggaaaaacatttggtcagaaagcagcaaattagtgtttttcaggaccgaattcggctcccgcagctcctgcatctccattcgtctagattttatttcttctttgcattgacatttttgcagacccagttcatgccatcctgaacgccctctcctgtgagagctgagcaagactggatctgccagactcggtcgcggatggtatgcaggttcagtccttctgcaatttcagaggcaggggctgctgtgagcaaatcctgcttattagcaaagatgagcactggcacacaacttagtttttcttcctccagtaattccgctagttcctgacccgtctcttcaaatctttttctgtctgcactgtcgattacatatataagaatatcggtattttcaaaataattcttccagtatggtctgattttcctctgtccaccaatgtcccatacattcagtttaaaaccttgtgattgtacacttttgatgttgaaaccctgtgtaggtgtgatgtggctgatgtcttcagatgcaagctgcttcagaagagtggtcttgccagcattatccaagcccaggagaagtattctcacctcctggtctggtgcacttttcaacttgcgcaaaattgagagcaagcccatcctcccgccgagtccctcctcctcctcctccc

SEQ ID NO: 432067 - DNA, 843 bp, Homo Sapiens
  misc_feature (440)..(488): n is a, c, g, or t
agtatctgtctcttcaaatctttttctgtctgcactgtcgattacatatataagaatatcggtattttcaaaataattcttccagtatggtctgattttcctctgtccaccaatgtcccatacattcagtttaaaaccttgtgattgtacacttttgatgttgaaaccctgtgtaggtgtgatgtggctgatgtcttcagatgcaagctgcttcagaagagtggtcttgccagcattatccaagcccaggagaagtattctcacctcctggtctggtgcacttttcaacttgcgcaaaattgagagcaagccccagatagcaggctgagcgacgtcccattccctccttggctttaagcgcagtgctccgccctgggcctggggacgggagggggataaccggccggctccaagggggcccaggcccccacactcaccannnnnnnnnnnnnnnnnnnnnnnnnnnnnnnnnnnnnnnnnnnnnnnnnttaccaggggcaactgctgcggcgccacccccgacgtccctcgcacgcacagctgaggagctgagcagcaatacggggcggggtgcagctccgctttccccagagtgcgcaagtgcgctaaggcgcccgcccacgcagtgggcgggctacgggagctgcagaggccgccgccggctcgcctggaccagggagtggagaaagcctgcccacgtggctggcgggagcctcccggcctgggattggtcgaaaaggaggggcgtggggcgggcgtgggggcagttccccagcccaggtcctcctctcacccgggccagttttcaaggcgggctgtaactggtggcatttgtcatccgga

SEQ ID NO: 432068 - DNA, 1205 bp, Homo Sapiens
  misc_feature (257)..(282): n is a, c, g, or t
ttttttttgtccaaagagtgaggattacatacgtagtctccgacctgcaagacgatgagatggtttaattatctgccttttctccccccacccccacccagcagcttcctgtcggacagactgaagcctggctgggctagtgacggtaaaaatcactgacagcaccagcaaacactgtctgtggtttcaaaaccatggagggaatgcaagggacgggtcagtaaataaatgaactcagcaaagctgcttcttcctcnnnnnnnnnnnnnnnnnnnnnnnnnnagaggaaaaaaaagcccactggaattgtctaaactgcaatgcaatctcttgctcatttaaaagatctcattttctaatcatgtgctttgagacatttaatactatttcaattatgcagaggaaataatataattcctttatttgaaaaatgatactgaacctcagagatcagttaaatctactgctggaatggggattctttctaaaccgtgttgttccctctcttcaaacagctggagctgtacacagatggaaaaacatttggtcagaaagcagcaaattagtgtttttcaggaccgaattcggctcccgcagctcctgcatctccattcgtctagattttatttcttctttgcattgacatttttgcagacccagttcatgccatcctgaacgccctctcctgtgagagctgagcaagactggatctgccagactcggtcgcggatggtatgcaggttcagtccttctgcaatttcagaggcaggggctgctgtgagcaaatcctgcttattagcaaagatgagcactggcacacaacttagtttttcttcctccagtaattccgctagttcctgacccgtctcttcaaatctttttctgtctgcactgtcgattacatatataagaatatcggtattttcaaaataattcttccagtatggtctgattttcctctgtccaccaatgtcccatacattcagtttaaaaccttgtgattgtacacttttgatgttgaaaccctgtgtaggtgtgatgtggctgatgtcttcagatgcaagctgcttcagaagagtggtcttgccagcattatccaagcccaggagaagtattctcacctcctggtctggtgcacttttcaacttgcgcaaaattgagagcaagcccatcctcccgccgagtccctcctcctcccccccgct

SEQ ID NO: 432069 - DNA, 1008 bp, Homo Sapiens
  misc_feature (545)..(600): n is a, c, g, or t
  misc_feature (851)..(887): n is a, c, g, or t
aacatactgttgatatcaagaacctgtttagtttacattgtaacattctattgtaaaatcaactaaaattcagacttttagcaggactttgtgtacagttaaaggagagatggccaagccagggacaaattgtctattagaaaacggtcctaagagattctttggtgtttggcactttaaggtcatcgttgggcagaagtttagcattaatagttgttctgaaacgtgttttatcaggtttagagcccatgttgagtcttcttttcatgggttttcataatattttaaaactatttgtttagcgatggttttgttcgtttaagtaaaggttaatcttgatgatatacataataatctttcttgctaaatatgtatgtacagagtatttggaagttaagaattgattagactagtgaatttaggagtatttgaggtgggtggggggaagagggaaatgacaactgcaaatgtagactatactgtaaaaattcagtttgttgctttaaagaaacaaactgatacctgaattttgctgtgtttccagnnnnnnnnnnnnnnnnnnnnnnnnnnnnnnnnnnnnnnnnnnnnnnnnnnnnnnnntcaaaaagcagttctgcagctggttaattcatgtaactgtgagagcaaatgaataattcctgctattctgaaattgcctacatgtttcaataccagttatatggagtgcttgaatttaataagcagtttttacggagtttacagtacagaaataggctttaattttcaagtgaattttttgccgaacttagtaactctgttaaatatttggaggatttaaagaacatcccagtttgaattcatttcaaacnnnnnnnnnnnnnnnnnnnnnnnnnnnnnnnnnnnnnccttctgttaatcttttgtattcacttatgctctcgtacattgagtacttttattccaaaactagtgggttttctctactggaaattttcaataaacctgtcattattgcttactttgatt

SEQ ID NO: 432070 - DNA, 1214 bp, Homo Sapiens
  misc_feature (22)..(22): n is a, c, g, or t
tgatttaaaaactgtattacanggttaatgtgtgactttaatccagtagtagcttcagtttcccgctgggcccctaattagtcttggaattcctctttttcctgcaggaccttttggttttgcaaaactttgcttgtgtgcatgctgctttgggatgtacttcttcataaaggaagtctgcagtcaactcatccccattgtctatctcgatctttctaattacatccatttgtagttgtctttctacaatttctagcagacggctcttgcagctagaatacagcatccgctctcttatactgcatgtgtatcccaggcattgaataaataaaaactatggactctaaatagtctccttcatgggaatgtttatacagaaagaaatggtaacgagctgaatccttgggaatcctctttggcaaatctttcagttctgtatttgttgtgttggccaaaattataatttcattttttatatctatttccaactgcacatagttgagctgtctattattcaatttttccaaagcctgaaaggcttctcgagaaatgggaaatgctactccttgtagtgtttgatgcttagtgtccacacccacgtcagtctgtacctcattgattttaatctgtcgtagttcttcctcagctgcagtcagtggggcaggggaagattgtgacagcaagtattttttatatccatgtaatgatacatcttcctttactgttccaaatacttcatctttaatgtggccacctccaaattccttcttcagagttgctcttgttgctgcatacaacattttttgacgaacatgagaatgatctggagaccatgcaatgaatatccattcatatccctgggcattctgagaatctaacctgaataatatatagcatggttgtttgtcctccaacaggggtaaaacaaaggaatcataatccttatcccaggaatctgaaggctgactatatgatccaatcacaagttgctcattttcaatagatattttcagaagtctgtactttccatttctggctctggcaaagatctctttaacatcttcacttgcttggatgccggtctggtgggacatggcggcggccgctagctcccggctccggcgctgagtgcagccagcggccccggccggcggccccaggaagtggctgctcctccgccggccccggcgcgtcatccgcccgcgacccccgct

SEQ ID NO: 432071 - DNA, 548 bp, Homo Sapiens
  misc_feature (511)..(511): n is a, c, g, or t
cagtcctcctctcctttttattttaggcactgttcaatactgtatgccttctgtattttaatggagtggatagcattgttttcttttacagactagcaggctactgggacctaaaaaggtctgttaatgtcatggccttgaaacagttccatttatgctggttaagagatcccttaagaagttagaaggcttaagaactgcttcatgtgaacatcccttattagttacaaagttatattcacagttttttaaaaatgtgtcaaaataaaggataactctgtattacagctttcacagtagctatgtggacaatgtgttatttccattttgactctctaaaatagctacatcctaaaatcagggctatctttaacaatagcaagatagcaatattatatacaactcagttatgagaccctttagttattctccattaatgcttcttagtttgtaataccatacctcacagtaggtagaacaatgaaaacttctgcaggtgtgtaattttganactagtcctctaaaaattccctattactcctatagca

SEQ ID NO: 432072 - DNA, 907 bp, Homo Sapiens
  misc_feature (50)..(110): n is a, c, g, or t
  misc_feature (786)..(786): n is a, c, g, or t
  misc_feature (808)..(808): n is a, c, g, or t
  misc_feature (855)..(855): n is a, c, g, or t
aaaggtcagctgattagcaaccttaattcttctttgtaccctaattacgnnnnnnnnnnnnnnnnnnnnnnnnnnnnnnnnnnnnnnnnnnnnnnnnnnnnnnnnnnnnnaagctcaagaaggttaagatgaaaagctgttactgccacttgatgacaggtggttgaggatatcattgcatccctgctgaaaccttcatgctggagtgtgtgtgattagtgggccgaatgcaatatttctctaaggcatagaatgagactcagtactttcccctcacctcgctacaggctaggatgcctagcagctaagtctgtgctgaatgttattaatgagttaactactaattatatgagctgattccatcagaatatacctgaatgtatataagtagtaggcagctaatatattcagataaaaatcattttgaacaaaactgaaaatatagccaaattcaaaatatagtttatgtaaataccatatccatttttttcctttcaacaccttgatatctgcattcaaaaattttacttttggcaatcactatagtagttaagttggaaggtaatttttttacagaataaaatatactgatggaactcctatgaaactgacaaataaacctatttgagtgggcatatgaggtaatactaaatatcttttttttgcttttatagaaagctagtcaattaattgtttcctttacacaggttttcatgacaaatcattgagattagtcatgccaactgttgagcaggtggctctcctccttggcatcctgttccttangtacttccaaccaatgtcatcnttactcaagagagagaattcttggcagtgaaacacaatgtggcttcncaaaaatttggggggattaagcatccacaatgtaccctaatgtgaaacacac

SEQ ID NO: 432073 - DNA, 1149 bp, Homo Sapiens
tttcaagagacaaaatttaatatatgcacacagttttatatataatgcagcatcacaccatgtagggcatttactcttattttatacattcagatatgtttgaaacacttcttaaggctacaaaacagaacatagaaaaataaacaggaatatattcaacacttacaaaaagtgatatgataaagaatataaagtactagtttccttttaacacttcaaaagatatgtatatatacttttttttacaagtaacatcacaaatgatcacatcttcacatgctcttaaagtattatttgtactcagtgtaaggctattatcgtttttcatacataaaattttctagctctgtaacacaatgcaatttttaatccattcaagtaagttcaaccccaaagttgccgcttcccagcattaagacatgcacccacccctcttctaagattttctaaaacttgtatttcggggagaaagacctcttttaaaaaataatcccaattagtgggagagttaatggctgacattagtagcaaaaccttagttatctgaaaatagcatattggaaatgagacattattaggattttaaacaaacaatagcatttagacataaagtaggaagcaaaatacagtaaacagaaatagtgtagccaaatatgcattctcttcagctacactagagtggaccttgcttagtacccttaaagtaaaaagacaaaacatttacctcatctaaaaatgaaggtaaaacgaaagaggcaaaaataaatattgctagtttctaggatggctgaatgttttctaaaccagaaatggttagaaaggaactttattgcaccaagtcaatcataagcaagtttgcagttcacaggcattttaattcaaccttgagtcacaaaggaaacaacacgctgcaagaatacagtctgcattaaataagatatatcagcattgtggtctgggaaaacctatgcttgccaggacaaggcagggtctgagcttaggtctgccatgaaaatgaatttgtgggttatcagtaaacagtatgaggactacacagatgccagcatcctgctgccaaggagacatggggcaagagttgaagatttgagaggaaatgaagagacatacacaacaccaaagcggcacgag

SEQ ID NO: 432074 - DNA, 732 bp, Homo Sapiens
gggatgactgagttgaattcactgtctagtcagcaatgcctgcttctgagtttggcccagagagaaggtattgagtaagattttaataactgtaaaaagtaagctggataagtaaaatcatgatggatccaaagcacagtttcttcatctcctgataaagaaagtcaaatgcttgataaattcagagtcacagatgtgagcatagctatattcttttaaacgagaggtagagtgacctagcactaagcaaatgagctgaaatgtcggaaacagagtccatcagcttatttggccacacgatcccaaactagttttatcttgggaaatggccctgtcctcagcattcccttcttgtgctggtggggccagtgaagtcttgatcttatcaggaaaaaggccacaccaagtgcgagttttcccagggttgactttccagggcccttattcaaatgaaacaacagaagctctttcacatttctgttgccccttggccacttccacagacagacattaccaagcatcttagaactgtcataagataggtcatgcctgaaatagatcttgaccatatgagagtcccagaaatcagcagggcctggacaaatagaactaagagagaggcagaggcaggaagctgcgggtctatcttgtaaagagtttagcatcactgtgagaagtgtgtgtccaaaattaaattaaactagaagcacaggtgagttattggcaagtact

SEQ ID NO: 432075 - DNA, 1723 bp, Homo Sapiens
gtttgagatctttgtattttgttaacaaacactgagatccatcgaagctgtgtgggtcctggcagaggtcagcaaaggggtccttggggcctgcatcagctcagaagcccagacccctccctgacaatccttgcctcatcgctcctgtggctaagatacttcttcagccctttaacaggattactggtgtatgtgagacagccactagcagcccctgccctaccggcctctcccccaacccttctccacatacatcacccccgccaccaagcaggcagcactggggcttgattccacccctcccagaggatatggagaaagccccacatctggagagggacagggcaactgcatttctggcaaatgtggtggcatgaggctgccagtggcttgacagttcaggatctccaggtgcgtagctgggccccatagcctcctgtcctccagtgaaaagatgagaagactctgctccctgggagtcctggagatcctggtgactaggtaccccaggcttctgctggtctccactggggtaaaaaagcggcctggcctgggccctggccccactcacatatgttctggatgattctgcaggcagtggatgaattcacccactggctggccctcgtagcacaccttgtacacagccatgaacaagggaaacttgtctaccaggcccttgtgctggaggatgctgtatagctcccgggctgtctcgggcccctgcagtttctgcccattcagcaactctttctccagctgctcaatggactttcctgtacgcgcaaaggcctcagccactttccggttccgccctccatagcaggtagtgatcaggtcagcaacaccacagctctccaagaaggtggcagaggacacagggccactgcagaagagcttggcgaaggctatcatctccatgagtcccagccggatcactgccgccttggtgttgtcgccaaagcccaggccatcacagaagccagcccccacggccactacattctttaaggctccacagatctctactgtgtccacctcttgcaccactgtgatacggaagtttggtgtctgcatcagctctttcaggagttgtccctgggccgggtccttgcagccaatggttgtctcacagaacttctcatcagccacctcgctggcaatgttggcccccatcagcacactcatggggatgccgaggcgctccccaatcacttccgagatgagcttcagcccattggggccctcgtctacccccttaataagagatatgccagtggcgtttgccttcagatggcccttgagctggtcacagatcttgccgatgaactgatggggcaccacaaagatcaggatgtcagcatcctctgcagcctggaccacatctgggacagccaccacatttgggggcaacttgtgccctggcaggtatttgacattctcatgctgcgtgttgatgatctcagtcagctttttgcctccaatgtcttcctcaaatacccacatggtcacccgtgggtcaaactgtgccagctgggctgcattgccacccacgatcttggcgatggctgagccccagttcccggagcctacaatgcagactttcttgctagccatggtgccgcgtctctgcctgagccggctcagtgccacactccctagctcctctgccggctaggagcatttaactccaccacacgtggatcccgggaattccggaccc

SEQ ID NO: 432076 - DNA, 2413 bp, Homo Sapiens
  misc_feature (178)..(186): n is a, c, g, or t
  misc_feature (2316)..(2316): n is a, c, g, or t
attatgatgtttctccatatttggcattgctgtaaatggctaacatttactgccaattcggtacaaatgtgtggtttggtaataccagaacagcaaatttaaacgaaaaaataaaagttaaacatttccacacaaggttttacagtctgacatttcactgcgtaggtaaaaagacacnnnnnnnnnaactacagattattattcagcatgaataaaaaactacaacttttatttttaaacaggagtcactggttttaatttttacacattttaaaattactgtgataaaaaataatgaaaaagcttcttaataatgccatacacagtataatatagatttgtccccattatatagcatttaatatacaaaatagaatattgacacacttgaatctatatgtagttaagcaagttatttgaggagggtattttcatacagcctttcatcagaaaataaaatcctttcagacattttctagagagaagcaaatcctttcctgaaaacctggtcactaatcctgggtggaccaggttgcttgaaaatagtctgggaaattacgaaactccacccaaagggtttaaagtgtcctccttacacttttatttcccttctgacactaaaaccagacacacacacaaaaaaacacattcacctacagctacagtcagggagtgaccagccaagatggaaatctcactgaaggctaccatggttctggaagtttgacagatcaatgtattgtataacaatatttttcattccatggtgatgtagttttcagggtttttaaaagggaactaaaattatgagacttaggtgaaactggaattgctccctgcctctgaattctgaagggagcgtggctttccttcatggcatgcccagagctcatcccatgctaattatccagcacttcatagacacaaatcatgttagttttccttttggggtggccaaggtttcctcccatagttttaggcatttggatatatataccccaaaagtgttatgtcctaagtgcctcagttctgcttgtatagtatcccacagaatacctacaaacactaaaaatacttttcaggatttgttgtgagtaaccaactctcactgaagttactacaaacttcaacagtttgggttgggatggccagataacacatacataggaaataaatctgctttcaaacagcaccaccatatagcacttaaatccacaattaaacataattaagatgactttcttttcccccacgtatcctaaaagggcacagcttcttttcccatttaatgaaaagcctcctatagttgtcgatgagcatcagttgacttattattgacaacgaagtgcacataatcttctttttctcattgagttctattttttgagcgccaagattgttgggatgaaaatcagattaatgtgtgaagatgtgctttctggttttaacccacataacattcctataaaggaatgataatcctacgttttagaagctctttttgaaacttaacactgtcattgataagaatattcaagcagttttccttaggcacccaaaaatttatccagccgggttacacaccatcttaaaatattacattcccttttagagagcattcaaaaagcaaatgattgtttttttattaaataatttctccaaaatactgaaaataacaaataacattcaaaaagcattcaaagaaaacaaaaacatgtcctcattttatttggaaataaactcttgttgtaggatagaaaggaattagtgtattattggcaacctatgagattctgcactatttacatattgctggtacctctatgcaaactattgccaaacttctgaagcttctgttgtcattcaactgctgggggagggctgtatgtgaaagtaacccgctattagatggtgcctttaaggatgtaagcaccaccttcctgtctcctgtttacatactttacatactttagtgcaaggggagattgagtaaactaaacctgcgctgacagactcactgttggaatgagaagggtggtcagaatgggaggcagaggataacttcctctgtaatctcactgggtcagagcctcagcaaccttcactgcacacaggaccagtctccatctccctcttcccctagagcaaactgtttggtttctgagaccatcgctgcctgtatgaatgcatgtacaaactatagatcatataggttatccatcagcatttttttgacccctacacaatatatataacatgtcatgataaacactcccatctaaagatcactcttatcttacactatacaagctactntacaatcatcgtactaaatggcatgcaaagctgcagtactcgttccctcccagattagtgaataccactatgatttacatcctgaactattatctaa

SEQ ID NO: 432077 - DNA, 1362 bp, Homo Sapiens
  misc_feature (14)..(14): n is a, c, g, or t
  misc_feature (25)..(25): n is a, c, g, or t
  misc_feature (46)..(46): n is a, c, g, or t
  misc_feature (58)..(58): n is a, c, g, or t
  misc_feature (77)..(77): n is a, c, g, or t
  misc_feature (105)..(105): n is a, c, g, or t
  misc_feature (121)..(121): n is a, c, g, or t
  misc_feature (151)..(151): n is a, c, g, or t
  misc_feature (208)..(276): n is a, c, g, or t
  misc_feature (393)..(406): n is a, c, g, or t
  misc_feature (1282)..(1318): n is a, c, g, or t
accccctgcgaccnagtgaagactncgcccctcctaaaaaaaattngaattggccccncctgtggtgggtgccaacnccctgtagtcccccagcctactgggaanggcctgaaggtggggnggattgccttgaaggcctaggagggccccnggctgcagtgagttgtgaccccgcccctggacaaaagagcgaggcccctgtctcccnnnnnnnnnnnnnnnnnnnnnnnnnnnnnnnnnnnnnnnnnnnnnnnnnnnnnnnnnnnnnnnnnnnnntaagtatgagaccaaacaaggcccagcttcgtttgctgtaacttgaacaaggctggtgacctgttggtctcatggcagaaaaaacaacccagagaaaaatcaacactgcagagtttnnnnnnnnnnnnnncaaaccttataatttattaacaaaattcacattgtacaaaagtacaacgataactgtacacctgtttctctgcaaatgtcacttggtaaattactatcatcttttatagacaggcaaaactggacacactttataatctttctgataaatatatcgccactctgcatccggcctggataatgctcttcaggacggcataggctggagccaattctgcatcatggtcgaggcctatgtcatggtgctcaagctcttcatcccgaaatttctttatcagctgaagaagttcctcgtatttttcagggtcctcctccatcagcgtcctgatctggttgttgtagtgatgtgctatgctctcttccaccgccacggtgcaggccatggcaccttccttcccgagcaaggcggtccccgcccccagtgcaaaccccagcacgttccacaagggcatcagaactgttggccggaccctgaacataaccatcaactcattgaactttttcaaatggtccttttcttgatcccacattttctgaatgactggcccgacgctggtccgacccaggacagccatctgcccggcatagatgcggtttgctccatattcgcctgcatgatccacccggattattcgatccacagctgcccgactgatattgtctaaagtcattcctgaactgcgaaatctgacactggttcttcttccataagctgagagggaccgccgggcccccgggcgcagccgccaaaggcggggagccgccgccgccccggcgcaactcattgccggaactaaaaaaagcaaccacttcgttgaacggaactggccaatagtccgctctcgacgaattcgagctcggccgatttggcctgatnnnnnnnnnnnnnnnnnnnnnnnnnnnnnnnnnnnnncgccgccaccgcgtagagctccagttcccctatatgatctatat

SEQ ID NO: 432078 - DNA, 1564 bp, Homo Sapiens
taagaagccaaaaaattaattttattgagtaaagaagttcattcagagcttacacagatcataagaatactttagattataacagctggaaagaccaatagctgactggaaagaagaaaggaagcagtttctattttcaatgtagaaaaaaaatctaatcgctacaaaggtcttgtaaaatcctcaaaacaaggtctagccaagtttattgtttggtaatcctcggtctttcttaaggggaaaaaaagcaagatttaatgtgaatactactggttacaactaatataacagcttgaaaaaatcatgacacagaagcataaatataatataaaaagacaattttaaaattgtattgtaggaatataactataataagtggaaaagatacattaaaaccatcagtgtgttacacttgttcaaaacagaactcataaggcagaccaaaactgatgcaagttaaggaaaatggtctgtttttaggaagcatgtccagacagacaccacaaagaaatgccaacagagactatgtggtcccctcttgttactagtaatgtgtcaaaggtggagtgactgggttaacagcctaagctttctccaaggatttgtagtattctgtcagcacggtccaagccttgggagccatgaaaccttcaggtggtttctggccttctcgagcaagtttgcgcattcgtgttcctgaaataaattcaaagtcttcatggtgttcagagtcatagtagtccatacgcttctttttcttgttgtaagctgcaactcgaaagggaactatttccaaagtgattaaaccaggggccatcgtcagcactttggcaccatgacttggctcataaagatccttccctgtttctggatgaggcatgccagcagggtctcgtccaacaatgtaaaagttggctcctgcaaccatccgtgctctgcaatgccactggacctcagttggtccagcatacatcatgggagatgggaagatggccaccactgtcgtctcaggattcagaactccttcctccaacactgcagcatgctgcttcatacgccacatcaaaggaacatcgtcatcctttgtccagccacccagagggtggaggaggaggacagggcgccggtagcccctctctagaagttgcttatgggtatcctgcattaacagggcatgtccattgtgcactgggttgcgtagttgaaatgcaaagacagcatcagcattcatatctttaaatttctgctttagctcagtaggagtaagacgatactgatcaagaccatcattccaataaactcgatccaagacttgaagatgtcctccaatcagccaatctccttgttccatcaccatcttaatataggggtggttcttgcatctcgttccgccactgtcgggcacagcggtcctctgtgcctgggctcagaaaaactcgtggattgcggaagaatcggccatcccgggcgaatgcgggagcgcggagcccggcctgttgtctgcggggcgccgggcgcggtgcgcgcggcgcgctggtgtccgccgggtgccccggctcccgtg

SEQ ID NO: 432079 - DNA, 279 bp, Homo Sapiens
aatttgcctaccaccctgtctgtcccctcacttcgccctccccatttgaaataaaagccccagtctcaacttccatcacctcggcgctcccggagccactaccggctgatggaggagaaggggacccgggggctggcaggggccaccggcgagggaccgcatcctgcgtctcccccgtgatcccggccccgaccgcggagttctgcaacacctggaggatctggaccgggtgctgggggtgggggcggggacagaggaaggaaaggcaccccgagcctt

SEQ ID NO: 432080 - DNA, 1033 bp, Homo Sapiens
  misc_feature (198)..(209): n is a, c, g, or t
  misc_feature (280)..(325): n is a, c, g, or t
  misc_feature (338)..(405): n is a, c, g, or t
  misc_feature (563)..(662): n is a, c, g, or t
cccccccagggggggcgccacaaaaaggggtgttgtgttgatttctcccccccggggggggagtatttccaggggggttttcaccccaaaacccccccgctttttgggagagaggggttttttccccacttgtgggggcgccggaaaaaaggtttttttaaaggggagaatttttccccccacccttttctttttccnnnnnnnnnnnnggggcccaccggggcgcggggggggtttaaaatttttgtattatttggagaagcctcccccctttggggannnnnnnnnnnnnnnnnnnnnnnnnnnnnnnnnnnnnnnnnnnnnnaggaaacttcccnnnnnnnnnnnnnnnnnnnnnnnnnnnnnnnnnnnnnnnnnnnnnnnnnnnnnnnnnnnnnnnnnnnnggggggggaattccaaaccctttggtctttggcccccgggttttctttgggaaaccaggtattggcccagttccccttttccttccgggggccggggggccaaaaagaaatgttttagaaaaactttttcgagggggcgagggggggcggacaagggnnnnnnnnnnnnnnnnnnnnnnnnnnnnnnnnnnnnnnnnnnnnnnnnnnnnnnnnnnnnnnnnnnnnnnnnnnnnnnnnnnnnnnnnnnnnnnnnnnnngcccttggaaattgacactttatttttaagctctattacatataatttccctccccattcccagagatactcaactattatagattattagctaacaaaacaaaaaccagtgaatgttgtaaaaatgttcaagttcagtaagaagctgtgttttctagagacaattctagagttcaatttccattgactttgttagattcattggatagagaaatctttagatctgaaggttccacgttccagatgttttgggcatattctttaattgttcggtcactggagaatttccccgaggcagctatgtttttgagtaccattgggttccaggcctttggattcatgtacagctgactcactttatcttgacactt

SEQ ID NO: 432081 - DNA, 1363 bp, Homo Sapiens
ggtccggaattccttggatcccttctgagacgaaggtgtgttggggaactgaagcagtttctgtgggcggacagggaaccctgcgtttctactgtgtgattctgccaccttcctggcccgacgccatgggagtgacttgtgtgtcccagatgcctgtggccgagggcaagagtgttcagcaaaccgtagagctccttacccggaaattggagatgcttggggcagagaagcaaggaacattttgtgtggactgtgagacttaccatacggccgcctctacccttggcagccaaggtggagtatggcccctgtgtggtagctagtgactgctggagtctgctgctcgagttcctacagagttttctaggcagccacacaccaggggctcccgcagtgtttgggaacagacatgatgcggtctacggcccagcagataccatggtccagtacatggaactcttcaacaagatccgcaagcagcagcaggtgccggtggctggggattcgttagtgatgagcagctgccagctgagctctgtcaccaggggtactccacaggaggagcaggtgctgactttcaggtccctggaccccagaaacccagggtagacatggactctactctccttctctggttctcagctgtggcttttgttctggggctgagtcccctccccaaccccctgactctcacacatagccccccatcagctgttttactccgtgccttactggatttggcctggtcctcaagaatggtaattatgaagagtggagaagtttggaccttgcctccttttaggggaaaggtaggacaggaatgtcccctgcctggtactggtgggggaaatagtccgtatccccaactattaaggatttgtcccaggccaatggtgaacatgctgcattttatgtttggattgtgctgtaataagagcctcttccttccctcagaggatgtggctgggcttctatcctagagatggagtagaaggcacaactggtttgatagttactatttactgacctgttgctgaagtgatttgcgaattgactttcctagggtgttgcctgagtcctttgaaactctccttctgacatctttcccttctgtagtgaaatatgtcaagccaccaggccaacctgcatataagatcgaagtaagttaaatactcacctaactaatacgagaggtaatcagatggtctagggcagatatacctctaacaaggtaatccaggaacattaggtacccttcatggtcttatacaggcaattccccagtatgttaacttacccataagatcaaagcagacacaatcagctccaaattctgaataccaactggagaacagagagagaa

SEQ ID NO: 432082 - DNA, 912 bp, Homo Sapiens
  misc_feature (737)..(737): n is a, c, g, or t
ggggtatttccggagtcccttctgagacagaaggttgtgttggggaactgaaggagtttctgtgggcggacagggaaccctgcgtttctactgtgtgattctgccaccttcctggcccgacgccatgggagtgacttgtgtgtcccagatgcctgtggccgagggcaagagtgttcagcaaaccgtagagctccttacccggaaattggagatgcttggggcagagaagcaaggaacattttgtgtggactgtgagacttaccatacggccgcctctacccttggcagccaaggtcagaccgggaagctgatgtatgtgatgcacaactcagagtacccattgagctgtttcgccctctttgagaatggcccttgccttattgctgacaccaactttgatgtgcttatggtgaagctcaagggctttttccagagtgctaaggccagcaagattgagacccggggcaccaggtaccagtactgtgacttcctggtgaaggtgggcacggtcacaatggggcccagtgcccggggcatctctgtggaggtggagtatggcccctgtgtggtagctagtgactgctggagtctgctgctcgagttcctacagagttttctaggcagccacacaccaggggctccccgcagtgtttgggaacagacatgatgcggtctacggcccagcagataccatggtccagtacatggaactcttcaacaagatccgcaagcagcangcaggtgccggtgggctgggaattcgttagtgatgagcagctggccgctgagctctgtccccaggggtactccacaggaggagcaggtgctgactttcaggtccctggaccccagaaaccaggtaggacttggactctagtctccttcatctggtctcagctgtggctttgtctg

SEQ ID NO: 432083 - DNA, 2079 bp, Homo Sapiens
aaactggcctgtaaaatccttacttccttttgagtctctgatggccacaacatttcatttgagatgtttggcagtcacagcttcaggggttatggttactgattatctaaaccccttaggtcagaatgaacaaacacagttcatgtaaacctggctgttattggagtcctctgaccaagagataatagtgaagagtgtggagagcctgaatgcccatggtggaaatgctggaaaaattaaaggtaagaaataaaacatagcacaggagattcagagggctgggatgacttctgagctgctctctatacccaaggccctttcaatttctagctgtgaaagatttttcatgcactgtggtgcctgatgtttcctgcaatttgacaaaaataaatactttacacaagaaaaggatgcaaggcttctacgttacactttggggatgctcaggagccaaggctcctgcttggctttcatttcacagggcctgcagccttgtctctggaaggtgctgattaggactgggaatggcctcctctggtcgagactctctgacccctaagtaaatgaacttgttcccatcccagtctccaaacagatcccaacactacgtttgtttttctatatcctgattgtcacacctggaagactctccttagtatacatgaggcttactgccatgagaccaaatgactagagagcatcttttaagagaagcttgctcattcaggaaaaattaaggatttggtacaaactgcaggccaaagggaagctgacatattgttttggtgtgtattcttgaaaacgcatcattaaatctacagtcccttgtcagcatgctgacttttacgctgcctcaaggagtcttccaccacctctgtgtcagctgggcagggttgctcagagatgccttcttcagcctcctcaggctctacttcctcccgggtcacaccgtcctctcctgggggcccctgatcattggcctcacttctctcctcatccacaccagcagccaagttgtcctcctcctcttcttcctctgcttcatcctcatcgccaagatcttctttctcttcttcatcatctacaaggctgtctttgttttcttcttcatttgaatcatctttttcctcctccgcatcctgcaactgttcagctctatgagcctcctctgatctccgattctgctcagaacgctcagataaatgccttggaagtggcacatagaaacattctgatattaccaccaagaccagacccataaaaaggccaaaaaccaaggtggctatgacgaaaaagacataagaacaccaagcaggaattccaagagtcactgtgaaatagttgtgaagatgccatatcttgccagagatgctaaaaagaccagccattccagacatcgttagagaagccggggatttccagccagtcagaggctcgactgattgccatttcttctctaagatataattctgcaggtcttcgaagattcctgggccacgataacggcggaatatcccatcctttgcatgaaaaaatgctgggagagtggtgacaaagaagcggccactcaaacctggttcttgaatgacatctaccttccccacactgatctgaagtatttcaccattctttgcaaaagcctcccattctgaatcagtctgctggcaggatggacaccatggggcgtaaaatttcagcatccactcgccctccatcaccagcgtccagttggaggcggtcatgggctggacccggctctgctccggcggcagcgcggcctcctcggggcctgccgtcgccgccacagccgcgatccaggcggccaggagcgccgttagctgcgggccgcagcgcccacccgccatgttgggcgccgagcgaggcttctcggcggggagtgtggggaagggcagcggccggcccgcagcctcgctcgcccgccgggtttttcaaggaagcgggagacgcaagggccaccccgcctacgcctggcggcgcagactggcggtgctcgcaatgccgcggaggacgccacctcttatcgccgcttgcccgtcgaggccacatcccaagaattcc

SEQ ID NO: 432084 - DNA, 885 bp, Homo Sapiens
ttgtttcacttgaatccatcttgttcctcctccgcatccgtgcactgtgttcaacttctatgacctccctctgatctccggattctgctcagaacgcttcagataaatgccttggaagtggcacatagaaacattctggatagtcccaccaagaccagacccataaaaaggccaaaaaaccaaggtggctatgacgaaaaagacataagaacaccaagcaggaattccaagagtcactgtgaaatagttgtgaagatgccatatcttgccagagatgctaaaaagaccagccattccagacatcgttagagaagccggggatttccagccagtcagaggctcgactgattgccatttcttctctaagatataattctgcaggtcttcgaagattcctggttcttgaatgacatctacgcttccccacactgatctgaagtatttcaccattctttgcaaaagcctcccattctgaatcagtctgctggcaggatggacaccatggggcgtaaaatttcagcatccactcgccctccatcaccagcgtccagttggaggcggtcatgggctggacccggctctgctccggcggcagcgcggcctcctcggggcctgccgtcgccgccacagccgcgatccaggcggccaggagcgccgttagctgcgggccgcagcgcccacccgccatgttgggcgccgagcgaggcttctcggcggggagtgtggggaagggcagcggccggcccgcagcctcgctcgcccgccgggtttttcaaggaagtgggagacgcaagggccaccccgcctacgcctagcggcgcagactggcggtgctcgcaatgccgcggaggacgccacctcttatcgccgcttgccccccccgct

SEQ ID NO: 432085 - DNA, 1109 bp, Homo Sapiens
tttgggttgacaaattttctttacttatgcttgtgtccacatgattgtaaaaaagcaaacagtgccaatggccactttggtaaaaacacacagtgttcaaacctatgaaggattacatcctttggacaggttttattcccaggatatcaaaccccttggccatgacagcagctactgcttcacatagcagcatacgccacatgttcaccttcaatatttttccagtctgtctatctttctccacacagtagcagctatcatagaactctgtgaaagcagttgccagctcatatatataatcacagagagtgtggagaaataagtcatctaaaatcttttgcagaatctcagggaaccgtaaaatgcaccggcctagtttccattccttctcatgatccaaaagaatcttggtttctcgagcagctttttggagcatttcttcatcaatattggccagacgtgcaatagacctgattctagtgaaggcatacaacaagtaagcagctgtatttcctctgtcatctagcattttgtcaaaggagaagatgtagtcattcaaccggttatgggaaaggtcagcatatttgatgcagccatacgcaacggatgtctgagcagcattcaattcctctgcagttaagaccttgtctctttctttttccttcaacttgtccatggatcgttttagtccttctcccagaagatccatgaggcgcactgtttcacccgaacgtgttttaaactttttcttgtcttcccctagcaccacaccaaatccagcatggaagactcgagttactttagggtcataccaaccaatcatttgagcagcagcaaatattgtctggaagtgcacagattgtccattgtccacaacatagataatcatatctgctttttcctcaaatagtctttgtttaatagcagccaggtcagatgtatcataggtataacctccatctgattttactatggttaatggtatggaacaccctgggacaaatacaatctttctgccatcatccacctgcacaaatccctcgtgccgatttcagccacccgggcctcgtacctagccggtatgtttttcttcctcccctccttaacaa

SEQ ID NO: 432086 - DNA, 476 bp, Homo Sapiens
aactaacacactgaaaaggctcgcctccttaaaattccctccctcagtatcaaaacctccttccttagaatcccttataaaagacctgaagatccccccaataggaggtgaaactgttagataatctggaaatttgtcttgcaggtgagcgatgagcatgcccaaaactggtcccccagtctcctacatgatttaacctaacaccaatcagagaatatataatcattttttaaataataaagatggttaagttaaattagaggaactatattccattaggaaccactaatatttacatgccagtacatcaccatttagtaatatctgtttacttggttgtttcttcaactggtctgcaaactccacaagagatgaaaactatgtctgttacattcagctctgcatactcaagtactagaggctgcacaaggcaggcatccagaatttgctgaatgaatgtgcctcgtgcgaagctt

SEQ ID NO: 432087 - DNA, 1530 bp, Homo Sapiens
ttcaaaattttggtccccaagggaattcggtttttaagtccccttcctcccccaggaagaattcccatgggggccggcactgttttccaccccgaaacggtgtttttaactttttttcttgttctttccccctagcaaccacaccaaaatccaggcatggaaagacttggagttacttttggggtcatacccaaccatcattttgagcagcagcaaaatattgtctggaagtgcacagattgtccattgtccacaacatagataatcatatctgctttttcctcaaatagtctttgtttaatagcagccaggtcagatgtatcataggtataacctccatctgattttactatggttaatggtatggaacaccctgggacaactacaatctttctgccatcatccacctgcacaaatcctctatcttcaaattcctttacaatatcattcatcctatcttgatagaaggattcccctctctctattaaagagacgtccaatgcatcatagattttatttaactcttggcgggagacatcacagataagcttccaagcttttgtaatatctgggtttttaccctggagcagaactacacactgatatgctcgcttcttaaattcctcctcagtatcaaacctcttcttagattccttataaaagacctgaagatccccaataggaggtgaaactgttagataatctggaaatttgtcttgcaggtgagcgatgagcatgccaaactgggtcccccagtctcctacatgatttaacctgagcacgtcataccctgcaaattcaaagaggcggcttatactctctcctatgatagttgacctcaggtggcctacatgcatctctttagctatattaggggaggaaaagtcaactataacctttttattctctcccagagcaggtagttgaactccattcactagaagactggtcaattgttctgatacaaaatcctttcttaagtggacattaataaaaccaggaccagcaatttcaactttttcaatacattcattgtctgggaggtgtttggtaatgttttcagcaatttctcttggattaactttctgttccttggttttgagcatctgagaaatacccatagcactattacactgatagtccccaaacttggcctgctgacttggtgtcactagcagaggaggattttccaaatctggatatgcagccttaattgcatgaccaaagacctcttgtaggcggctaataatgttaatcatatttttagttggtttgttcctttctgcctgaagactctttcgaagaatattcagtcgatactttaattttaaattttcttcttgtaactgctccaaatttggagaagctcctaaacagccacagtttttcaaccggtcaatttcagcagtcagagatttaatctcttcttcctgctgcagcagccgcgcggagcactcagacaccagtatgtccatcctcccatcagcgtctcaccctcggccgattaacacccgcctcgtacctagccta

SEQ ID NO: 432088 - DNA, 455 bp, Homo Sapiens
  misc_feature (364)..(364): n is a, c, g, or t
  misc_feature (381)..(381): n is a, c, g, or t
  misc_feature (396)..(396): n is a, c, g, or t
  misc_feature (422)..(422): n is a, c, g, or t
  misc_feature (440)..(440): n is a, c, g, or t
ttttttttctggttgacaaattttctttacttatgcttgtgtccacatggattgtaaaaaagcaaacagtgccaatggccactttggtaaaaacacacagtgttcaaacctatgaaggattacatcctttggacaggttttattcccagggatatcaaaccccttgggccatgacagcagctactgctttcacataggcaggcattacgccacatgttcaccttcaatatttttccagtctgtctatcttttctccacacagtaggcaggctattcataggaactctgtggaaaggcaggttggccaggcttcattattattattaattcacaggggagtgtgtgggaggaaattaagggtccntcctaaaattccttttngcagggaattttcanggggggaccccttaaaaattgcaccngggcttggttttttcccntttccccttttcaag

SEQ ID NO: 432089 - DNA, 1086 bp, Homo Sapiens
  misc_feature (35)..(35): n is a, c, g, or t
  misc_feature (56)..(56): n is a, c, g, or t
  misc_feature (78)..(78): n is a, c, g, or t
  misc_feature (140)..(140): n is a, c, g, or t
  misc_feature (153)..(153): n is a, c, g, or t
gacaatgtcagtgacctgagcacctctggctgtcnttgctgagaaaggcagcatgntcctggagtatcaaggaaaagntatcttttccccagaaggcagagagacttcttacagcatctttattttttctgactttgtcntgttttaatttantccactttaacttcatccctgccttcgttatcacttctttgatccagacttcatctaaatgtgattctgcttccagtgaatctatgtcaatatcagtgttcaataaagcttcatatacataatctgtgtttttttccattgccctggccagttcctcaatagtcattccaatccatacttctaccacctttttagattttgttgaagataactgagatttccatggtccttcttccttttttgttactagaagcctatactgagataaagcagccccattgagcacatctgttggccagggccaggcacacagttgagctgtccacacagggtaagcagatgaaaacccatgcctccactgtcttaatgctcttctttgacacagactgtgcagttgcctataaatagtgtgaaatcgtagcaagttctccaacttcagtagcttctggttcatgtttctctctgacagtcagtgttatctggactcagcaagtcacttgtttcctatgggcctcattttccggatctcagaaaggtaaaaataaatcactgcagaaaaattacggatctggggtggctcgcctcaaattggagcccagaaggccttgggcccatgggaggctgggaagtgaggacctgcacccacagccgcgcgcgaggaggggaagccggccagccgcttccgagagaacagtgcacatgccttcgtgaatgcctaacgtgggctcacgcagggattaaatgcatcttggaaaggcttccgaacgcacaatgtttatgaagttcgcgtgatttgtgccactgacacgttaggcgaaacaacacacaccacctgcaccggacaacctggttaagggatcctacccacttaactcctacctacagccccgggcccctggattctgagcacgggcggagatcaccttctccgct

SEQ ID NO: 432090 - DNA, 1139 bp, Homo Sapiens
  misc_feature (1058)..(1094): n is a, c, g, or t
cccacggcacagcatttcgtacttctgtctctctggcaggtaatccacagcaaccccttttttctttggtgtagttttctgatcagattggtcatctgaagcagacttattgacatctttttctttagccattatatactcaaaatattttaagttaccattagctctctgatgttcaggatctagttcaagaagcttctttgtgagcaaaagtgccttatccaggtctccctgctgatataccgcatagctcaaataatctagaacagagactttatctatggtagaaatctcgccttcatccagttgccttagggcttgttccatccacagttccgtatggtaataatctgcttctgtataggccactttgcccaactcaaagcagtcctcagccgttagaaaagatttgtgtttcactcctggaagattaccctttgagatggtatctgtatccaaattgtaggtatcctggagacgtaacagagctttggctgccccaacctgatcttcatcattaggaaaagtactgtctctgaatggttaggttagagataaagccatctgacatatccttaaggaccagattctccaactcactccactcagtattcagacgtttcattaatttgaatgcatttactggatgcccaacaaatccttctggatcttttgtcgctgtactagttagccgatctaacttctctgcccatttttttatttgttctaacttgtcctcttctgccttaatataatctttcagagaagtcaccagatctttctcagtatggatcaaatcagtcatctgaccaattgaagtaaaaaagcctggatgagccaaagactggggaatgcagaattcctataattaatatataccagatcatcttggaagatttaattttacaggatcacacacctggaaagtgtgacgagtagggcggcgcgctcttcagcccccagtcgcctccactcggagcggctacttcctaccctcagcccgctggcggcgcgactccgctctcgacgaattcgagctcggccgatttggcctgatnnnnnnnnnnnnnnnnnnnnnnnnnnnnnnnnnnnnncggccgccaccgcgtaaactcccggtccctatatagtcaacatca

SEQ ID NO: 432091 - DNA, 1509 bp, Homo Sapiens
  misc_feature (557)..(578): n is a, c, g, or t
cttctttcacataaaaaggattaaccccggaagaggcccctggtgataactctcggggggggaaaacccttcccggcccatggggttttaccaattgggttgggtaccatgccagggggaaggagtccattcttttggttccattaaatattccagattccgggaagcaaaaacacaagcaggttttgcacctggaatgtcctaaaggatctccacccccagagcaaaatgcccataggaaacatccaaggagtactgcagtaggggtcatttggtcaatccagggtgtaagttcttgaaaacctggtattgcctttgcccatttcactgctgcaatcacttgccgccttcctaacatgttgagcgtagtcatgatcctccaagttgagtctggaacagagctatcatatcctgcatataacacttcaggttcaataacctccaacagtgacaccagggtaggggtgagttgtggtaacgttgcaggaactattgttttgttaccaggattttcagaggtttcttgtgagactcctgtagtggcctgctgaattccnnnnnnnnnnnnnnnnnnnnnncgagcttccaggttcattccagcctgaggacattttcgatagcggcatgctgggcagttttttcttcgaattttatcgatgatgcaatcattccttccagcacttaggtaattgtgctgtccttccactgctcttttgaggaaaactttacagcttccacaagttaggactccataatgacatcctgaagcttcatcagagcacacccaggcagagtttgggaggtggtcctgttgttgctgttgaggagctggatggaggagagcttacatctggtctcatgctggggcttgaatagccattagaaaaaactgttcgacccagggaagttcagagtccccagagaagtcaagttgtcatctccagatctttggcacctattccaattttcggaaccaacgggaattggtggaatgacattaaaaataggcttctgatcctgctgttgagaaagggatgctgtattcatgtcatagtggtacatctgtcctccagaggtactcacaccatgaacagaaatggcagacattttattaccaattatatttgctccaggaaagcttgcctgacagtaaactgtgcccagtttctcttgcttaattaccccaggggtgcagagttcgatgaaatcttctttttctgttttcacttggggcagtgttacattactaaggggcttgacaaaaccagatctccattatccttaattttggttttagtgtccggtaaaatgagaggcttgcagtcctcattcgagtttccttccaaaaggaatgaatcgtcttctcccgccagaggagaaagcaaacagttttcatctatcaacaggtctgatctccaagactctcattcgtctctttacctggggacccagaagaaaactccaaatcctgcaaaatgtcagagtgcttccgtcgacggaatcctgtgg

SEQ ID NO: 432092 - DNA, 1424 bp, Homo Sapiens
ccaaagtcccaggaaaggttttaattccagtccttggaatctgagaagcagacaccaaaaactgccctgagaacacctggggggcctggcattttgcctccagatccagccagggtggacagacccccagataatcacgtctgactcagagttcccgcacagtggaaactggctccctggccctgaggccggacagcctgcatccaacatcagcaagaggatgtggctttgacttcggctgtcttctctgtcaggggagccccaagagatggatcttcaggagtgggaggtggcaggcggctcagggatggagacagcagccttgcctggtcaggtcagctccacggccacagctgtgcaggcctcgaggagggcagaggaggagtccaggccagtgccagatggagtgggagggcccagcagcaccacaggagcctggctgggcagaccctgaggggcctgtgggtccgcctgtttgcaggaggaagacgagaatcctgggtgcagtgccagctgctctgagggtccccctggctgtgaacagcagggtcaaggtccatccgattttctcttctgaggggacacagctgccctagcctttttgatggctgtccagtcctccaggatgtcgatctcttgaagcatgtacacgatgtatgggccagaaaccagaggtgccttcttcctcttgctgggcggcagggagtcccaagacctggagctgcctctggcgtgcagtttgtcgtcccaccattcagagctgaggtccaggctctggcggtcctcctccagcctctggatccgctcctgcagctccccctgcagcgtgtcatagagcagcagcttctcactctccaggtgctgtttggctccctgcagctcacattcgtacttattcctgatcacatccagacagaagcccttgtagatccctgccacctgaatgcgaatcttgaggctccgctgcagccccccaaggggctccgtgtattcaggggctctctcagcccccacttcctccagccgcaaccgcagctgactcagtcgttccctgaacaacttctcctttagctccgagaactgcttctctaggtccagcatctcactgacacactcgctgcggcgtcgctcatagtcctcatcatccatctcggagctctcctcttctgactctgtctggctgccgctccgctcctcctcactctcttcctcctccccattcatctcagcagcagaatcaccctctgcttccatctcttctgtgtctttgcttggaggctggacaggcatctggactcgcggggactggagcctctggcctcacgacggagattccctgagagctgcccgtggttgccggtaccggctgctgccgccggactcccgtaggcgctgcgcggctcccttttcttcgggaggccccc

SEQ ID NO: 432093 - DNA, 878 bp, Homo Sapiens
  misc_feature (209)..(366): n is a, c, g, or t
cgtcttgatttcttgtttcgttgattgggcacttcttgggttttctgtaggttgcatattgtctctgttggtgcaccctgtcgcaatcatcgttaacccgctcctttttatatcatgctaggcactccccagcctcctacacaccatgcatgttaggcacactatacatggccccttcacacaagttacatcggtcacacagccccgtnnnnnnnnnnnnnnnnnnnnnnnnnnnnnnnnnnnnnnnnnnnnnnnnnnnnnnnnnnnnnnnnnnnnnnnnnnnnnnnnnnnnnnnnnnnnnnnnnnnnnnnnnnnnnnnnnnnnnnnnnnnnnnnnnnnnnnnnnnnnnnnnnnnnnnnnnnnnnngcgggtacccaccactcctccccagagctagcccttactggcctcttgtcccagagatggatgatgaggactatgagcgacgccgcagcgagtgtgtcagtgagatactggacctagagaagcagttctcggagctaaaggagaagtgagcgtggggacaccttgggctgggtctgctaggatctgggatgaggaggtggtgggcctggtactgggcaggcgtggttggtgcccaggaagtgcgcgcctaacaccgggctttgctgtggaatgggtgctgggtatgtgtttgcccaagagcgatgggtgagcaaatgggtgcacggctgcctttttaccacgcaggttgttcagggaacgactgagtcagctgcggttgcggctggaggaagtgggggctgagagagcccctgaatacacggagccccttggggggctgcagcggagcctcaagattcgcattcaggtggcaggtctgtgggtggttctataccctcttcccatcccacgct

SEQ ID NO: 432094 - DNA, 655 bp, Homo Sapiens
ttccaaaataatccttaccactttgtaaaccatttatagctttgaaagtgttaagtgattccttcgttattatttatgcatgttcatgaacttctgctgtacattggaataggagttaacacattcacatttactgtctattttcttgtgtgccttatgagatggcttttctgactgtatctcaatagtctttctttctatgcaggtttataatcagtacaactactgttttctaaaatactactactcaaggctcggagtttgtatttaaattacactgaccaagtaacaatgtattccatttcaggaactgaatatttgactgttaacctttttcccatacgtccagtgtggcatggagcatatggacttgacagacatctctcacccagacgcccacgtgtgaacacacccacatccacatctctgggtggaaaccagcctagagtggggacgacgctaatggtgttgctttagaaccgtcttttcttacccttttagactcgtgttttgtatgagacaccattgcaagaaaattttatccctccggaagtattttattactaaagaacaaaagcaaaaaaagcttaaattgcactggttaaagtacagtttccaacagctgtccttcctcagtactctaatggccactcca

SEQ ID NO: 432095 - DNA, 1018 bp, Homo Sapiens
aaacactcttagggtgccggtccttggcatgactcttgccattctaattggaattagtgccaccctcagcttggattttgaacaaggccttattctttcaggaagacaactaatggatgatagcaagttcatccacttactgggcttgtgccatgagcaaaattcaaagtcctgtatatctttcattgtagatttttaaatactccttttcctaaaaaactcaagggtttaaaaattgctattttatattttaaatgatattgaggcagctacctacaatttctatgtacattttgttcccccccgtcgtcgtgccccccaaattacgttccttttgacgttttcctcatctgctgtttgtgacaagtcatcagccagatttcctgactgacacatacgtatgatcagtgcaggagagacctgcgcaccacaggctgcaaactggaggttctgttctcatggcagtttgggcagtaacttttgagagaggccaaaaaaaggaggatgacatgctgtctcctctcttcagtatagacattaggctcttattcagaaaggatttttctttaaaaatgtacttactttactgaactacttacaggcacatttcttcataaggccacacctaatccaaacaagacagtctcccaacactgaagttccaaaataatccttaccactttgtaaaccatttatagctttgaaagtgttaagtgattccttcgttattatttatgcatgttcatgaacttctgctgtacattggaataggagttaacacattcacatttactgtctattttcttgtgtgccttatgagatggcttttctgactgtatctcaatagtctttctttctatgcaggtttataatcagtacaactactgttttctacaatgtatttcattttaggaactgaatatttgacttgttacctttttcccatcctttcagtgtggcatggagcatatggacttgacagacatttcttacccatactcccacctttgaacacacg

SEQ ID NO: 432096 - DNA, 617 bp, Homo Sapiens
  misc_feature (11)..(11): n is a, c, g, or t
  misc_feature (21)..(21): n is a, c, g, or t
  misc_feature (60)..(60): n is a, c, g, or t
  misc_feature (101)..(101): n is a, c, g, or t
cctgtttacantgatacaagngaccattttcaggggctgagttaggttgggagttggggnttggttggtagtatataacaaaacatcacactaaaatagtngcctagtttgacccaacattctgtattataaggtctttctataccagtgagttggggagtgcagacagaaggggaataattaagatggaatttacttagatttgtcagttatcttcatcgatatactttaattttttggacaacttgaaatttaacagttaccggtatttctaattactttaatgcacttggaaaactacccagaacagaccatgatttcttcttgtccaagcaaacaaaaatcaattagtgtcagtttcattctgagcattgttttgttttgcctacaatctgtttaagggcacatgtgacacttattcatacatgtctggcactgcaatgttcctgtttaactaagatgtcataggcctatgtttgcctgaaatgcccgtctcacaaaaaggaaaacacagaacaggatggaagagagtgggaggcatgaggacttggcacgggctggtagacgtgtgggccttacagtggagcaggctggagtctgtgtttacaacttcgttt

SEQ ID NO: 432097 - DNA, 605 bp, Homo Sapiens
  misc_feature (547)..(547): n is a, c, g, or t
  misc_feature (552)..(552): n is a, c, g, or t
  misc_feature (576)..(576): n is a, c, g, or t
  misc_feature (578)..(578): n is a, c, g, or t
gctatgctgttgttccactctgtctatacattgtttaatacaggatggcacacaataccattcctggttaaatgtttcacataacaagcgccaccctctactcctccaactcctgtctcaggtttgacagctatttttttaacctaatttgcgcacgccaagaggatttcacctagtaacaacacggagagacatccgatgcgtacaaagacgtggcatgaaacgctgcaggtttattgtctctataaaaagatcgttaaggtcgagcgtgctaacgtgtgcggtactaactgtactcactacgccctggtcactttatagcacaggtccgaggcaaggaaagaagttttacaaacaaaactggtcaactgttctatcttctactcctggaaaacaataaaggtccactttcaaaccatttggacgcacttgctccttctaaagggttagggagtcccggcagatagcgtacccctccccgcccagcagcagagagcaaagtccttcctgccgaccaatctgtcgtcttctccagcatatagtatanccggncgctctacaagatcaagcttactncncgtgcatgcgacgtcatactcctctaa

SEQ ID NO: 432098 - DNA, 855 bp, Homo Sapiens
  misc_feature (673)..(673): n is a, c, g, or t
ttgcaaagatctcagggtttattgttgaaggagaagatgaaggaggtggtgaagtgctaggaaaataaattctagatgagaggcagtacatgtccctcagccagggcaaggcacccctctgggtgattccatagggagcaagcaaatgcaatttgcctcattcccaggtgagttggggtcctccccagggttgcagatttacttcctcttcctgggaacacccgccgacctggggctcctgggtgcctaacagagccaggcttttcctttggcaaacctgtaggtgtgcggaggggccatgacccatgacacagtcttctgtctgtgtgctcctggctgcttctccattccatcaggactaggctcagcctccactcctgagacctctcccagctgcacaccctgctcccctctggaccccagttctgctgtgctggttgcacctgggctgtgtagccgctccttctccagagcccgtctggtgagctccagttcatcctgcagcctttgctgttctgagtcccgctccaggacagaggcttgtaggaacatggctacctcctgcagactgctgacactggccttggtctgcgctagggagagtgccaagtcctgggccttctccctccactcaatctccctggcttctgtctgtctcagggctgcctgtagnccgctccagctcccgctgcagcctgggctctaaagaatcaagttttagagattgttcctccattggggaggttttgtggctgtggggtaaggcttccaggttgttcctttgctgggtctccctcagctccagaatctcctgttccttttgggctagagtcagctgtagctcccttacacccc

SEQ ID NO: 432099 - DNA, 915 bp, Homo Sapiens
ggaaggcaaagatctcagggtttattgttgaaggagaagatgaaggaggtggtgaagtgctaggaaaataaattctagatgagaggcagtacatgtccctcagccagggcaaggcacccctctgggtgattccatagggagcaagcaaatgcaatttgcctcattcccaggtgagttggggtcctccccagggttgcagatttacttcctcttcctgggaacacccgccgacctggggctcctgggtgcctaacagagccaggcttttcctttggcaaacctgtaggtgtgcggaggggccatgacccatgacacagtcttctgtctgtgtgctcctggctgtggctgctacctggaggcggcttgggtagtgctggggctggggtgtagcaggactggccctggggatgtcagactttgagtcagggactcatccagcctgcgggtctctgcctccaggacagtggcctcaggggcctgggccacggcaagaagtgagtgtgagaggctgtggtgcaaggcctgctagctcacggctggtctgtgctgagcgggtgatgtagtcctgcttctgcttccgctccaaagtcagctgagcttgcagcaggacaacctctttctgcagttcagccacacacttggcatctgagttcttctgtcctctcccatcctgctgtgtgggtgaagaagccgtggccttgctgatctctagggaccctgcctgggccgcacgcatggcctccctcttcagcttcctccgttctcgctccacctgctccaaggtactccgcagctggacattgtggcgctgcagcctgctcctgtcaatctccagccgggccactgcttgctgcaggtgttcaagcctttgtactccatgactgcttcttccattccatcaggactaggactcag

SEQ ID NO: 432100 - DNA, 605 bp, Homo Sapiens
  misc_feature (587)..(587): n is a, c, g, or t
ttatatttctggaatggctaatttttatttaattctgtaagcctaaggtaaaaagcataggcagtaacttttactagtcaataaaaagcagttctaccaatccactggtaattaatacactaaacagagttggaaagcattttactgaaagcaaaatatttagagaaaatagacatttatacaaaattataaaatgcttgtaataagaataagtgcatttcaaggaaagcacaaacttaatttatagagccagttaaagctttaaaaaatttaagtggaaattgaaatatgcaaaaatgtataaacattctacaaaagatggtcattcttttcctgagtatactaaagctatgaaacgtaaggtgacaaaaggaaggtagaagcttgggaactctttctcaagggcattttctttctacacactgcttccctccttcttcatattcttgcttggaaatccacatctgttgaaaggtacccaaagaggctagaatggagccgccaatccatgagctaaacctccgttccactgttgtattatttgcaatcaatttcaaccacatacttagaagaattttctaaaacanctctctattcaacctatc

SEQ ID NO: 432101 - DNA, 1368 bp, Homo Sapiens
atgtgataaaagtttgagatgcacagttttattaatgctatatctgcccaaattccaggccaggattcaaggccctttctgcttaattcagcaagactgttgaaaacaaaaaaggattcaaggccctgtggtcggcgtggtcaggcgatggttgctgtctccctgtccttctgccccaggtggtaatgaacctcaggaagtgcccttagtctctctgcagcctgctcaggggtgaggtccctctgagcctgagcaagcatttcgtagccaaccatgaatttccggacagtggcagagcgcaggagcggagggtagtaatgagcgtgcagctgccaatggttccagttggccccagcctctgatcctgtgggagccccatgccagcccatggagtagggaaaggacgtctcaaagaggttgtcatacttggtcaagagcttcttcatgatggaggctagatcatcacgctcagcaggggtcagctcaggtagccgccgcacatgccgacggggcagcagcagtgtctggtagggccatgttgcccagaaggggaccagtactaaccagtggctcactggttaggaccagacgttgcgttcctgagtagctcctggcggctgtactccattagcaggggctctccatgctgactcttataggcctgctgagatcgctcctcacgctgggcaatatctggcaggaaactgctggcccataccctggcagtggggttgggggttagaacagcccatcatggcacctttgttttcaaagatctgcacccaagggtactgggcacccagctcctctgtgactgaggcccatgcatcaacaacagcccggatctcagggaccgacatgagtggcagcgttacatccgaccaggggtggaagcacatgaccttacagactcctcgagcagactttgcttggaaaaggggatgatcactgggtcctggactgggggcatcaggctgcagagctgggaagtcgttgtcaaacaggaaggtgctatcgtactggggattcacctctccgttggctcggatggccccaggacacagagggttgagagggtcatggcggggcactgtcttcagaagctggggctccacttgaccctgccagggccgcttcatgcggtgagctgacaccagcacccactcatcctgcagcgggttgtagcggatatgctgatggtcgtttgcccggaaggttgctgctgcggcgtccgcctctgacgcctgctggcgttgctgaggatcggttccattgcgcgacatgaggccaccgggggatccgctggaaaattctgcagggccgtgcctcacctttcactttctccgtccacaccccccttctgtcgtc

SEQ ID NO: 432102 - DNA, 876 bp, Homo Sapiens
gactcgctggggcgcggagccgagccctccccttccttaggaagctttcgtcccctccgaaggttggaacgctcatcccgagccagaccgacaaggcgtacagtctgcaggcctaccatcagcatatccgctacaacccgctgcaggatgagtgggtgctggtgtcagctcaccgcatgaagcggccctggcagggtcaagtggagccccagcttctgaagacagtgccccgccatgaccctctcaaccctctgtgtcctggggccatccgagccaacggagaggtgaatccccagtacgatagcaccttcctgtttgacaacgacttcccagctctgcagcctgatgcccccagtccaggtaacctggctccaactgctgctggggaggagggtggctagacctcttgagggacttctgctgcagagagtgatactcctttacctcaggacccagtgatcatccccttttccaagcaaagtctgctcgaggagtctgtaaggtcatgtgcttccaccccgtggtcggatgtaacgctgccactcatgtcggtccctgagatccgggctgttgtagatgcatgggcctcagtcacagaggagctgggtgcccagtacccttgggtgcagatctttgaaaacaaaggtgccatgatgggctgttctaacccccagccccagtgccaggtatggggccaagcagtttcctgccagatatatgcccaggcgtgaggagcgatctcaagcaggcctataagagtcagcatggaagaggcccatgctaattggaggtccagccgcaaggaagctactcaggaaggtgggacagagccaagccctgtgtcccaaaggaggtccctaactttcttatcccctg

SEQ ID NO: 432103 - DNA, 861 bp, Homo Sapiens; identical to SEQ ID NO: 127882

SEQ ID NO: 432104 - DNA, 539 bp, Homo Sapiens
  misc_feature (234)..(266): n is a, c, g, or t
ttcagtttaattccatttattattctttaaggatacatacatggagataaagtgatgaaagacaagaaggctatggtcaacacaaagttcagtacaggggttccctctatcagacagggatagagataggttcaggaaaccgcacacggtacctcaaaggaaaggcaataaggtgggtggtaggcacacaggggtttgtttattgtcattattattactctttatactttagcnnnnnnnnnnnnnnnnnnnnnnnnnnnnnnnnntccattgcatgtatgaaattttttaaaaattcaaatggcttataacaaaaacaaattatgtataatgtctcaaatggtgaatcacagcctggaggctcttaatttacctccactctatcattgaaccctggctaaaactgctgctttgtttctattcccctcatacttgagagtagagatattgccctgctctgacaacacttaccacattttaggggcttgatccatgctgacagaaaggatgaaccggcacgagcctgcagcccgggggat

SEQ ID NO: 432105 - DNA, 1141 bp, Homo Sapiens
  misc_feature (379)..(379): n is a, c, g, or t
  misc_feature (693)..(702): n is a, c, g, or t
agcgggcttttatctgcggacccgccgggagggagccagatcccagcgatcttccccgacggcagcgctttacccagaggctgccggcggctcgtagctgggttcagctctgcgtccacgccagcccggagcccggggggcaaggggtctgtcccgggcgcagcgagaggatggtcatccgcgtgttcatcgcctcttcctcgggcttcgtggcgataaagaagaagcagcaagatgtggttagatttctggaagccaacaagatagagtttgaggaggtggataccacaatgtcagaagaacagaggcaatggatgtacaaaaacgtccccccggaaaagaaacccactcagggcaaccccctgccacctcagatatntaatggcgaccgatactgtggagattatgacagtttttttgaatccaaggaaagcaacacagtcttttcatttttaggcctgaaaccacggttggcatcaaaggcagaaccttagagaagaagagtggaagatgacggagatgcattttgaagcacccctggtactcagcacacacatgcttacctaatgcatcactgtgacaaaagccacacgcattatcagtaactttgcttggccacggaaaaggtgtttttgaaagatgtggctataatgagaattgcatgattgctttaaaccaaatcaggtggtggannnnnnnnnncttattctatttgcctgcagttgcctcactcacctggaaataccgtcacctgttacaggtgtactttcttaatgactgaaagataagtgggtagcaccgtcagagagaaaatgttggatctgccctaggttatagtagatgccggaattgcgtaaacccacttctctttaagctgcctggattgcacctttgaaatatgtctgccaagttgttagaatctttgaatcagaaggaaaaaaagcagcgctggttgacaaagggtgttgaagatttttgctgcagaatcagttacaaacatcacagttcccatgctttgtaataacacctgggtgaaaaagttagatattctagacttgttttagtaatggaaactcttacctccacatattgtcctacagatgtttccagaaatccctgttgtaacaatcaagtgatcaga

SEQ ID NO: 432106 - DNA, 2143 bp, Homo Sapiens
  misc_feature (46)..(59): n is a, c, g, or t
  misc_feature (71)..(71): n is a, c, g, or t
  misc_feature (74)..(224): n is a, c, g, or t
  misc_feature (847)..(847): n is a, c, g, or t
ctttggggggccgggccccccaaaaagttgtttaaaaaattttttnnnnnnnnnnnnnnccccacattttnttnnnnnnnnnnnnnnnnnnnnnnnnnnnnnnnnnnnnnnnnnnnnnnnnnnnnnnnnnnnnnnnnnnnnnnnnnnnnnnnnnnnnnnnnnnnnnnnnnnnnnnnnnnnnnnnnnnnnnnnnnnnnnnnnnnnnnnnnnnnnnnnnnnnnnnngaccattttaggaaaccttttattgcaaatgccattctgcatattgatttttgacagaaagtatcagaaatgcttctttcctgggaaaaggaatataaatgacagcaagacacattttagttgctactaaagaacagcattattttcaatcattttaagtcgctcatttaataagcaaggtataaaacagattaaaggtgggagcctgcaaaagggtaattaaaaaagtgtttcctccccgggaaacagcactgtttggtctgatcaaatgccgaagctgggatctgattctgggtgccgtctctcgctactggagtgctgaccagcaggctgcccatcacgaaaagaggttgcaaggccaggcccccaggtgcgctgggatttctggctggctctacttggggccagagaagggggtaaaggccttgtcacagcctgccatgcatgcttcaatctcttccacagtgcggggcacgcaggtcagcagctctatgccgctgtcagtcaccacgacgtcctcctcgatgcggaccccgccaaaaccgcgaaagcgctgcaggaacctcgcggttaaggaaggaggcgcgggccgggtccgcccgggcctcattccaggaggtggntcgatgaagtagatgccccggctccacggtgagcaccatgcctggcctgcaggtgccgtgcagtgcgcaggctccgcaggccgggctcgtcgatgcgctccacgccctctgggtagcctcccacgtcgtgcacgtcaatgcccaggaagtggccaagcccgtgaggcataaacacggcccccaggtgagcctggaccatggcgtccacgctgccgctcaggatgcccatgtgggccagctcctccaggtggatgcggtcagccaggcggttgcatgtcaggccaccagacacctggcttcatggcacccatgacggcacgggagttccgcagcactgcctcatagacggccttttggtctgcagtgaacttgcccgttggcgggaaaggaggcaggtgatgtcggaagcgaagcagtaatactcaccgcccatgtcgaacaggcacatatccccattctggatcgttcggtcgttgggagctccggcgtgtccgtagtgtagcacggctgagttctcaccactgccgcagatgcaggtgtaggagctgtggcgcatgccgccccgggagtagcagtagtgctcgaagaggctttccaactcatattctttcattcccacttttacagccttcattacctcacggtgggcctcgctggagattttattggtatagcgcagaacctccagctccatatccgtcttaaacactcggcactcaacgatctctgggtgaagaatggtattgttgacttcgaacttgctgatgccgtcaaaggaggcctccctgcagacactgccgctgtccgtgttgacgccacgcaaagtgaggaggacagagggcttctgtgacgtcaggacgctggcaatctcatctacgtactggacgtcgtccacggcatacttctccttgaagtgctccttggaatggatctttcccatccaggtggcatggctggcaggaagcctgggcacaaacagggtcgacttcccagtgtcaacatcgatgacaccatagcagcctggctcagtgacaccgaacgcccagtgaaagaaggactcctggcggaagaggaccccggtgtcggtgcagtagcgctgagtctcctccccgccctgcaggaccacgatggagccggcctgcacagcagggttcttccgcagccgctcacacaggcgctgccggttcaaggcaaagagcgccagcggcaccttcagggtttcattccccagccaaaacgagggtccggtggccgccgccatgttcgcccggcaccggcgtcacgtgaagtgccccc

SEQ ID NO: 432107 - DNA, 1024 bp, Homo Sapiens
  misc_feature (67)..(67): n is a, c, g, or t
  misc_feature (90)..(90): n is a, c, g, or t
cctcccatggccgggcacgcgggaggctccggcaagccaattgcccttaattagaacgggccctttntggttctgacagtgaaactttgncgttcggcggggaaagggagccaggtgatgtccgaaagcgaagccagtaatacttcacccggcccatgtcgaaacagggcacatatcccccatttctggatcgttcggtcgttgggagctcccggcgtgtccgtagtgtagcacggctgagttctcaccactgccgcagatgcaggtgtaggagctgtggcgcatgccgccccgggagtagcagtagtgctcgaagaggctttccaactcatattctttcattcccacttttacagccttcattacctcacggtgggcctcgctggagattttattggtatagcgcagaacctccagctccatatccgtcttaaacactcggcactcaacgatctctgggtgaagaatggtattgttgacttcgaacttgctgatgccgtcaaaggaggcctccctgcagacactgccgctgtccgtgttgacgccacgcaaagtgaggaggacagagggcttctgtgacgtcaggacgctggcaatctcatctacgtactggacgtcgtccacggcatacttctccttgaagtgctccttggaatggatctttcccatccaggtggcatggctggcaggaagcctgggcacaaacagggtcgacttcccagtgtcaacatcgatgacaccatagcagcctggctcagtgacaccgaacgcccagtgaaagaaggactcctggcggaagaggaccccggtgtcggtgcagtagcgctgagtctcctccccgccctgcaggaccacgatggagccggcctgcacagcagggttcttccgcagccgctcacacaggcgctgccggttcaaggcaaagagcgccagcggcaccttcagggtttcattccccagccaaaacgagggtccggtggccgccgccatttcgcccggcaccgatcccgggaattccggaccg

SEQ ID NO: 432108 - DNA, 866 bp, Homo Sapiens
  misc_feature (12)..(12): n is a, c, g, or t
  misc_feature (76)..(76): n is a, c, g, or t
  misc_feature (119)..(119): n is a, c, g, or t
ttcgggtccgtngggaaaactccggccgtgtcccgtaaatgtaagcacggctgaagttcctcaaccaactgcccgnaagatgccaggtgtaggaagctgtggcgcatgccgcccccggngagtaagcagtagtgctcgaaagaggctttcccaactccatattctttccattccccacttttacagccttccattacctcacggtgggcctcgctggagattttattggtatagcgcagaacctcccagctccatatccgtcttaaacactcggcactcaacgatctctgggtgaagaatggtattgttgacttcgaacttgctgatgccgtcaaaggaggcctccctgcagacactgccgctgtccgtgttgacgccacgcaaagtgaggaggacagagggcttctgtgacgtcaggacgctggcaatctcatctacgtactggacgtcgtccacggcatacttctccttgaagtgctccttggaatggatctttcccatccaggtggcatggctggcaggaagcctgggcacaaacagggtcgacttcccagtgtcaacatcgatgacaccatagcagcctggctcagtgacaccgaacgcccagtgaaagaaggactcctggcggaagaggaccccggtgtcggtgcagtagcgctgagtctcctccccgccctgcaggaccacgatggagccggcctgcacagcagggttcttccgcagccgctcacacaggcgctgccggttcaaggcaaagagcgccagcggcaccttcagggtttcattccccagccaaaacgagggtccggtggccgccgcccctcgtgccgacttaccacccggcctcgtcctagcctacttttttt

SEQ ID NO: 432109 - DNA, 416 bp, Homo Sapiens
cattttaggaaaccttttattgcaaatgccattctgcatattgatttttgacagaaagtatcagaaatgcttctttcctgggaaaaggaatataaatgacagcaagacacattttagttgctactaaagaacagcattattttcaatcattttaagtcgctcatttaataagcaaggtataaaacagtttaaaggtgggagcctgcaaaagggtaattaaaaaagtgtttcctccccggggaaacaggcactgtttgggtctgattcaaatgccgaagctggggatctggattctggggtgccgtcttctcgctactggggagttgctgtacccgtcaggtctgccccattcacggaaaaggagggttggcagggccggggcccccggggtagcgttggggtttttctgggctggg

SEQ ID NO: 432110 - DNA, 506 bp, Homo Sapiens
  misc_feature (469)..(469): n is a, c, g, or t
gaccattttaggaaaccttttattgcaaatgccattctgcatattgatttttgacagaaagtatcagaaatgcttctttcctgggaaaaggaatataaatgacagcaagacacattttagttgctactaaagaacagcattattttcaatcattttaagtcgctcatttaataagcaaggtataaaacagattaaaggtgggagcctgcaaaaggggtaattaaaaaagtgtttcctccccgggaaacagcactgtttggtctgatcaaatgccgaagctggggatctggattctgggtgccgtctctcgctactgggagtgctgaccagcagggctgcccatcacggaaaagaggttggcaaggccaggggccccagggtgcgctggggattttctgggctgggctctacttggggggccagaggaaggggggttaaagggcctttttcacagcctgccatggcatgntttcattttttttccacagttgcgggggccgcagggt

SEQ ID NO: 432111 - DNA, 880 bp, Homo Sapiens
cggtccggaattcctgcggattttatttttcccttgatttattaaaaatatacaatgacagaatcaatctgggaaactggattagaatgcccccagcaatatacagtacaagtgttaaaatgtctatatctagcaaattttgcttaattcagtccaaggaaataattctaacagtggcaaagtaattatgtacaaagaatctttgagatcattaagtatttatattcagaacaatgctggccctaagacagtatggtgagcacaatttaaggcaaaaaataagcaggaaaaattcctactgacaaaacttaggataattttactttatgggtattgcctcattcccaaccactattactggatcgttttctgaatgcttatattttattaagacacaggaatttaaaattaagtcatctgtgcttttgattagaagaatgtacttttcagtagtgaaatacagagtatcttaccagaaaaacaggaagctgaaatttatcattcagaactacagcttgtacactacccggtccacagagccgagcaataacttctttacccaaaaagtttgcatggaagataaacagcaggatgccagagcctgaaaatgggagatgtgtgtgaattacttcaaaggcaaccttcagtccccagaggaacactcaacaccagatggaagcaggcccctgagctgggcctggtcagacaggcatcacccactctgcctggaggctcagaggaggctggccctctcaaagctcgtgtcacctggcatttttcaaccacagaactctttttaccttttgccccagtaatctctgccggacagttccctggaaaagactttcgtatgatttttctacactgaaagttattttaa

SEQ ID NO: 432112 - DNA, 985 bp, Homo Sapiens
  misc_feature (49)..(353): n is a, c, g, or t
  misc_feature (826)..(872): n is a, c, g, or t
ttttttttaagcacataatttcaccagggctagtagaaaatttcaagtnnnnnnnnnnnnnnnnnnnnnnnnnnnnnnnnnnnnnnnnnnnnnnnnnnnnnnnnnnnnnnnnnnnnnnnnnnnnnnnnnnnnnnnnnnnnnnnnnnnnnnnnnnnnnnnnnnnnnnnnnnnnnnnnnnnnnnnnnnnnnnnnnnnnnnnnnnnnnnnnnnnnnnnnnnnnnnnnnnnnnnnnnnnnnnnnnnnnnnnnnnnnnnnnnnnnnnnnnnnnnnnnnnnnnnnnnnnnnnnnnnnnnnnnnnnnnnnnnnnnnnnnnnnnnnnnnnnnnnnnnnnnnnnnnnnnnnnnnnnnnnnnnagaaagtgaagtctttaattttcttaaataatcctcatatgtactatccacattgtggaaaaactgaaatacgcagtctggacactgcactgagattccggcatactggcacagacacagctatgtcgcatcttacagactacaacagacaacaggcttaactgcaagaggtttacagacaaaactttacatagatgtgctagaagaattccaaactgctgtcaaagagagtataggaatcggtctgaagagaactccgcccagtcccttctgtttggtcactgcagctgcactctgtatgcacctattagcaacttaaccttggcagagggtgcttctgtcaaccttatgaagagtttattgggacctgcaacagggctgaatgagtaaacaaaatgactgtcatttttagtcccaggtagttaggaggctgaggtgggaggattgcttgtgcctgggaagtcaagactccnnnnnnnnnnnnnnnnnnnnnnnnnnnnnnnnnnnnnnnnnnnnnnngagaccctgtcagaaaaacaggaagctgaaatttatcattcagaactacagcttgtacactacacggtccacagagccgagcaataacttctttacccaaaaagtttgcatgg

SEQ ID NO: 432113 - DNA, 615 bp, Homo Sapiens
  misc_feature (26)..(26): n is a, c, g, or t
  misc_feature (90)..(90): n is a, c, g, or t
  misc_feature (583)..(583): n is a, c, g, or t
acctacaacagacaacagcctaactncaaggggtttacagacaaaactttacaaaatgtgcctagaagaatcccaaactgctgtccaaanaaagtataggaaatcggtctgaaagagaactccgccccagtcccttcctgtttggtccactggcagctgccactctgtatgcacctattagccaacttaaccttggcagagggtgcttctgtcaaccttatgaagagttttattgggacctgcaacagggctgaatgagtaaacaaaatgactgtccagaaaaacaggaagctgaaatttatcattcagaactacagcttgtacactacacggtccacagagccgagcaataacttctttacccaaaaagtttgcatggaagataaacagcaggatgccagagccttctggtatgttctgtgggggtttgtaattgaaatctgttgaaaaatctggaccctcacagagtcgatgacatgcgattggaaaaactggttctagcagagcaaggcgagcttcaaagtaatcctttattgtctcttctgctactcttgaaagtgtctctaaatggttcttcagcaantcgtacacaagcacattgttagcactgtcgca

SEQ ID NO: 432114 - DNA, 522 bp, Homo Sapiens
  misc_feature (484)..(484): n is a, c, g, or t
gatgacttgaccctttttgacttcatgatctggtacaagctacatgaaactccgttgcgccttttctagtctgtaaaatcatcatgaaatgtgcactaataacgtggagactatgcagatgaaatgaaaccagctgcatagagcacagagctcagagcctggcctttaggaagccttcagttaagggttcatgatgccatggtgtctgtcgtcatcctctttatcctcatcatcaccttcataatctttttgttgttcttagggaatagtttagagggactgattcccttctatcatgggtgagatgtctatgaaaaggacaaccagtgggggaggaaagcaaaattttgaataagatttctgagacccccagcacaaccaagaacagaaactgcacagtctgctgagcggacagtttgcacattggtctcctcccatctgcccaccacactctcctgtttgtcctgaggaggaggaaaccaancaaggctcccgtccgtttctcagcactcacttgaaggg

SEQ ID NO: 432115 - DNA, 844 bp, Homo Sapiens
  misc_feature (179)..(180): n is a, c, g, or t
  misc_feature (244)..(244): n is a, c, g, or t
  misc_feature (481)..(482): n is a, c, g, or t
ttcccaagccctcttgtccttgcccccgggttttccttagggaaaacaggttattgacccaggttcaatttacctaaaggggcccggggggccaaaaggaagggtttagaaaagttttttcgagggcccgaggcggcccgacaatttttattgttatttggggtggggtgagtgtatgnnttttgagcactgatcgatgttcttttttaatcctgtagaatttctccacatattcagaacgtcntaaaagctccacaaaatcttcatcatgagtgattaccagaagctggaagttccgctgctgtgagcgactttttattatctcaaccagagcatgtgcaagagattccatgttttctcggtcaagatttgttgttggctcatccaaggcaatgatgccacagttgaggcagaacgtttcaggcagggccaggcgaatgatgagtgaggctaaataccccttttgttcccaagcactgcnnatcgtcctcgcatatccaaggctgtgtctcccttcagcatcaccactcggtagttataattccgccttttatcagaagctgatacattttcatcggcatcagaccgtatttctatgtattcaatatcttgtccacgataggtacttcgccacaggtcacgtataattttattgatttcttccattttcatactgtgaaatttcattattgcttggtcaagagtcttataataaatatccagatccttgttcacaagttctgttgtcctcataacaatcatcatttctctatacttttcctcagcatcccgaaattgtggttctcgaagttctttcttaaaatgaataatttcttcttcataa

SEQ ID NO: 432116 - DNA, 1196 bp, Homo Sapiens
  misc_feature (18)..(18): n is a, c, g, or t
  misc_feature (1008)..(1066): n is a, c, g, or t
  misc_feature (1103)..(1111): n is a, c, g, or t
ccggcaagtttttccggnctgccattggcgccttgggccccccttctgggttgggtgcccgtttcttttgggcagggggggtttttccaacctttccccgtggcttccacaaacctcccctgcgggcccgggaagccctccggtcctgtgaggaggcgtgtacttctggctcctttctcctttttttccctgctggatttggggccagttcggttaatcgggatggatccccctggcccatattttggggcttgtctgtggcttgactatggggttggttttctttttgattctaggctttactcgttcaactgcaggcaggggcggtaacttcttcagctcctcaagaacagctatggcggcatttttctttgaaatcttcttgcttttcccttcaccttcccccacaaactccccaaccgaaaccttggtcacaaagttcttcatgtggggtgggccactctcccgggccacctcgaaattcacaggcaagttccgtttaagtgcaatctcaaacacttgacttatttcagatttattgagattttcttcttcggattctcttccattcacctccagcctctctggcaggggctcattctgcaggatcctcaacgctttggcagcagcatcgtgtttcgcagcctgtcttgtctttcctttgccattaaattgctgtcctcccacagaaagttccacttgataaagtaaaggtggaactggaaatgggtaaaagtacctcgggggataagcacctcctctcatgttgtagttataggtggactgcatccgagagtaagggtcaacaggcttatacattggtttttttccaagtttcatgcacagtgcatttagttctacagtaggggttatgctttcttttttaaaaagagggcgttccaggaacaatgttgtctttgttcagttctgagaggttaagtggttaataaactctggctgctgctccgagctcgtcccccggccggcggtcctgggcggtggcggcgnnnnnnnnnnnnnnnnnnnnnnnnnnnnnnnnnnnnnnnnnnnnnnnnnnnnnnnnnnncggagtggccgtggaggaggcgggcgccgccgggccnnnnnnnnnaggcggtcaaaggaagcgggagccgagagagacgcggcagccgccggcgcaaacgctgaagagccgctcaggcgcccgcagcccc

SEQ ID NO: 432117 - DNA, 1335 bp, Homo Sapiens
  misc_feature (1144)..(1202): n is a, c, g, or t
  misc_feature (1254)..(1254): n is a, c, g, or t
  misc_feature (1279)..(1279): n is a, c, g, or t
tctggctccttctccttttttgcctgctggatctgggccagtcggctaatcggattgatcccctggccatattctgggcttgtctgtggcttgactatgggttttgttttctttttgattctaggctttactcgttcaactgcaggcaggggcggtaacttcttcagctcctcaagaacagctatggcggcatttttctttgaaatcttcttgcttttcccttcaccttcccccacaaactccccaaccgaaaccttggtcacaaagttcttcatgtggggtgggccactctcccgggccacctgtttcagagggaaagactcgaaattcacaggcaagttccgtttaagtgcaatctcaaacacttgacttatttcagatttattgagattttcttcttcggattctcttccattcacctccagcctctctggcaggggctcattctgcaggatcctcaacgctttggcagcagcatcgtgtttcgcagcctgtcttgtctttcctttgccattaaattgctgtcctcccacagaaagttccacttgataaagtaaaggtggaactggaaatgggtaaaagtacctcgggggataagcacctcctctcatgttgtagttataggtggactgcatccgagagtaagggtcaacaggcttatacattggtttttttccaagtttcatgcacagtgcatttagttctacagtaggggttatgctttctgcagctgcactggtggatgtaatagatgcagagggtaaagcagagttttgaatgggtctacctgcattttcagagggcagagagctagtagtagaaggaatactcatcaaaggctgtgagagaagagactggttcttgttcagtatttggctccctgagagagcagcagatgggttctgaacttgcacttgaacttgagacatggtcactttcaacaaaagtgaacaaatgcaggtaaacagctttcagtgcaggttaattcagtgctatgaagtctaaagttctaccttttttaaaaagagggcgttccaggaacaatgttgtctattgttcagttctgagaggttaagtggttaataaactctggctgctgctccgagctcgtcccccggccggcggtcctgggcggtggcggcgnnnnnnnnnnnnnnnnnnnnnnnnnnnnnnnnnnnnnnnnnnnnnnnnnnnnnnnnnnncggagtggccgtggaggaggcgggcgccgccgggccggggggggaggcggtnaagggaagcgggagccgagagagancgcggcagccgccggcgcaaacgctgaagagccgctcaggcgcccgcggatcccgg

SEQ ID NO: 432118 - DNA, 692 bp, Homo Sapiens
ggaaggtggtgtacacaaaaccttttcacatattgggggcttaccgctccaaattgctactgatcctttaagttcacaatatagaatttcttcaccaattaagtaataaccctcattacaaataaagtgcatctgataaccaaactcgtaagtcccatttgcagggactgcttggccatttaaaggatcccgtatatatggacatgtttctctataacaggcgtcatctgagacaggtagccatgtatgattccgatcacaaatagtatgggtggcaagaggaggtatatagaagtatccttttttacacttataatctactcgttcaccaatctcatagtagggttttggtttaccaatgagctccatagcttcaaatgttggtggctcctcacaggcatcggagaaggagtacagcagcaacaccatggccgccagaagcaacccaggaaagcgccaggaaggaaagggacactcgcggcggccgggaggctccatgcgcggcgcggaagacgctgttatttctccggaggaaagcagagaaaccgagagccagccgagcagggaagtcccttctgggtccagatatgggacgcaacaatccccaactcacaaagcatccagtgctgcaggacaggtgggcgtggcccgaccgctctcgacgaattcgagctcggccgatttggcctgat

SEQ ID NO: 432119 - DNA, 850 bp, Homo Sapiens
  misc_feature (729)..(729): n is a, c, g, or t
  misc_feature (806)..(806): n is a, c, g, or t
  misc_feature (818)..(818): n is a, c, g, or t
ggtcccgaagtccgggatatcgtcgacccacgcgtcggtgctaggtgtttgcacacattatttgtttaggcttcataacagccctacaaggtaacactcctgtgtgtatagatgacagactcagaaaggttgtgtagcttgccctggttgcatagttaaacgagggctagaaacaggactaggagtcaggcctgtccagctggaaaacttgggttttctagaaggggtaccctggcctcctgcggagcctgctgtgggactctgcagaacacaattcaaggccagactgaacactagcctgaacctgccctgagaatccctctaagccgacctactccacagctgtcctgactgtgtaagcgagatgatgattagtgatcagacgaacaggattcctgtcattggtaaccctctcaaagtatttggaaaacagttcaattttcatctatttcagaagcacgccgggtgtctattgaggctcacctgcattgaattccttccttttcatgtgcgatctcccaagattgcattgtggagtgttttcgaatccattttgaaatccccgtggcgtgcgctatgcaggcctcagtctttttccattccattcttaactctactttcgacggaagcagtgttttaaccccgacactggcttgcctaggaccttgtgctctgcacaactagcaagggcccggcaggatgtagtgaaattcttgctctcgtgtccanctggacggtgatggctttcaagtccttggctgttgggagcttactataaatgttcgtcttggctacaaactctccantctttcctcggnactctctcagcattgccaccactgtctttcct

SEQ ID NO: 432120 - DNA, 1288 bp, Homo Sapiens
ggaggtaaacatcggggttatgttgtgcagcacgatctgctccagctcgtcatgctaggcccggaaaacctccaccttctcccgggtacagctggtggaactgtcttgcaaggcagtggaaacgggcttcgaagttttccatcatctttcacggatgtttcagaacattccatgccctgatccagcgcccatgactgggtcctcagctgattccactgctcgtctgccggccaggtctgtcttgcttcccaactaaatacacctggaagagagatgcctggtagcctgtgaccgagccttctcctagccacttgtctgcagttgttgaaggattcttcattggctcacatcatagacgagacataagacattggggctctcccagaatttatcgcagcatttccgaaaacagctccttgccagcagagtcaagaaatgaagagttccacactgtctcccgtgtcaggaactggcactgtcttcaccacctaatccattacctgttgtcagggtgtagctttatctggaaatggggctccatcactgcggaagatctgtgccagggcggtcttgcccactgctgggtctcctgcacaggatgcatttaggctgccaagcttcaccatggtaaccaacactccccgcgagccgtacccagaggacaagagcggctgctagagacgcgagtgggtggggcttcgggccctgggcttggcctgggacggggaaggtggggaggggaggggctgatctcaagggtcagtggccgcgacgggactggggatgaccgagcccggcccattcatgggcacgggcggcaggatatcgggccgctgggggccgggatgggcaggggagggctccaggtgggcccggctcgaggcctgacacggcagtctgaaaaggtgcaagcgagcggacacggcctgtgctccccgcccagcccctcagcacagccctacccagagggttcaaggaaggacgatccggctctcctccgatcacaagtaccgggccggatgcactctccaagcaaccatagcccacctgccccgcctcctcctcctcctcgctgaccctcgattggttgccgccaaaagctcccaccctcaaggtctcacaaaaatccaatgggagtagagagctgggataacagccttttcttgagatgcaattcgtagagttatcagttcttcaagttcagtctgcttgacgagtggttgtaattgacgtcaaccagctttatatcccgcccccgctgcgcctgagagtcccgagataaagaagc

SEQ ID NO: 432121 - DNA, 815 bp, Homo Sapiens
tgtttagtggcgcccctcgattttcttcatatcacaaccggttccaattgaggtacacacgtcagatatgccattcttcgacattttctcctaattttatttaaagccatcattatatattaaaagagcagaggtaattctgtcttctccggttgtgcagcacgatctgctccagctcgtcatgccagggcccggaaaacctccaccttctcccggtacagctggtggaactgcttggcaaggcagtggaaaggggcttcgaagttttccatctctttcacggatgtttcaaaacattccaggccctggcccagcgcccatgcccgggcctcagctgagtccactgctcgtctgccggccaggtctgtcttgttcccaactaaaacacctgggagagagatgcctggagcctgtgaccgagccttctccagccacttgctgcagttgttgaaggattcttcattggtcacatcatagacgagacataagacattgggactctcccacaatttatccagcatttccgaaaacagctccttgccagcagagtcaaaaatgaagagttccacactgtctcccgtgtcaggaactggcactgtcttcaccaccaaatccattcctgttgtcagggtgtagcttttctggaaatgggctccatcactgcggaagatctgtgccagggcggtcttgcccactgctgggtctcctgccaggatgcatttggctgccagcttcaccatggtaaccaacactcccgcgagccgtacccagagacaagagcgctgctagaacgcgagtgggtggcattcaggccc

SEQ ID NO: 432122 - DNA, 598 bp, Homo Sapiens
  misc_feature (33)..(33): n is a, c, g, or t
  misc_feature (44)..(44): n is a, c, g, or t
  misc_feature (55)..(55): n is a, c, g, or t
  misc_feature (60)..(60): n is a, c, g, or t
  misc_feature (63)..(63): n is a, c, g, or t
  misc_feature (69)..(69): n is a, c, g, or t
  misc_feature (75)..(75): n is a, c, g, or t
  misc_feature (84)..(84): n is a, c, g, or t
ttggggtccccaaaaggggttgcaagccctttnccgttggtaantggggatcggngtctntgnttcggngatatntagtttgtncagttgggtgatcttttgtaattcctaggaggtaatgcatttttaatgttttctgaagctttgtaagtgtgagagagggacaagaagtgcagttctgttctggaattccttattgctttcaacggacactctttgtgaaaaatccaagtaatattttagttcaaacttgatcttgagccaaggcccactgccacctctgggatgggagtcggacctacataccaagtgacaagttcaccttaacatctgcttccagaatggctttgattcagccgtgccaggcaacagaacagggtcagactcctgctctgttattggcttgaagactaggatcccaaaggggttggaggcagggaatatttgaaaattcagactggaattccaggccaaaagctcaagaccaccagcctctcctcctgcctggaaaaataagcctttgtgaaagactgatttaccatgtacaattgtgattgtgaacgttgttgagtaaacctccagactttctctaaaaaaa

SEQ ID NO: 432123 - DNA, 985 bp, Homo Sapiens
  misc_feature (937)..(937): n is a, c, g, or t
  misc_feature (949)..(949): n is a, c, g, or t
  misc_feature (952)..(952): n is a, c, g, or t
  misc_feature (956)..(956): n is a, c, g, or t
  misc_feature (960)..(960): n is a, c, g, or t
  misc_feature (963)..(964): n is a, c, g, or t
  misc_feature (967)..(967): n is a, c, g, or t
  misc_feature (971)..(971): n is a, c, g, or t
  misc_feature (975)..(976): n is a, c, g, or t
  misc_feature (982)..(982): n is a, c, g, or t
cgcagtactctaacggtttaaggtagcgaggcctgggtggcgagcgcttgggagttaggttgtttgccggcgtagcggccagcgcctgagcccgcccttgatcttcgctgtggcatggcggacgaggggaagtcgtacagcgaacacgatgatgaacgcgttaatttccctcaaagaaagaagaaaggccggggtcccttccggtggaaatatggtgaaggaaaccgtaggtctggaagaggcggttctggtattcggtcttcccgccttgaggaagatgatggagatgtggcaatgagtgatgcccaggatggtccccgagtacgatacaacccctataccacccgacctaaccgtcggggtgatacttggcatgatcgagatcgcattcatgttactgtgcggagagacagagctcctccagagagaggaggggctggcaccagccaggatgggacctcaaagaactggttcaagattacaattccttatggcagaaagtatgacaaggcatggctcctgagcatgattcagagcaagtgcagtgtgcccttcacccctattgagtttcactatgagaatacacgggcccagttcttcgttgaagacgccagtactgcctctgcattgaaggctgtcaactataagattttggatcgggagaaccgaaggatatctatcatcatcaactcttctgctccaccccacactatactgaatgaactgaagccagaacaagtagaacagctaaagctgatcatgagcaaacgatacgatggctcccaacaagcccttgacctcaaaggcctccgttcagacccagatttggtggcccagaacattgacgttgtcctgaatcgcagaagctgtatggcagctaccctgaggattcttggaagagaaatccctgagctattgtccttgaattgagcaaaanaggtgtacaggnggntganattntannttntcanaagnnccaacntga

SEQ ID NO: 432124 - DNA, 973 bp, Homo Sapiens
  misc_feature (16)..(16): n is a, c, g, or t
  misc_feature (22)..(22): n is a, c, g, or t
  misc_feature (34)..(34): n is a, c, g, or t
  misc_feature (42)..(42): n is a, c, g, or t
  misc_feature (59)..(59): n is a, c, g, or t
  misc_feature (70)..(70): n is a, c, g, or t
  misc_feature (91)..(91): n is a, c, g, or t
tccaattcccaaaaangtttanggaaccttccangttgggtnccccttcctgaaacaangcctaaaacangtccatcccaccctgtaacanccctgttgttgcctcaaagttccaaggaacaaatacctccagggatgttcctccttcaaatgattcctcaggggtagctgcccatacagcttctgcgattccaggacaacgtcaatgtttctgggccaccaaatctgggtctgaacggaggcctttgaggtcaagggcttgttgggagccatcgtatcgtttgctcatgatcagctttagctgttctacttgttctggcttcagttcattcagtatagtgtggggtggagcagaagagttgatgatgatagatatccttcggttctcccgatccaaaatcttatagttggacagccttcaatgcagaggcagtactggcgtcttcaacgaagaactgggcccgtgtattctcatggtgaaactcaataggggtgaagggcacactgcacttgctctgaatcatgctcaggagccatgccttgtcatactttctgccataaggaattgtaatcttgaaccagttctttgaggtcccatcctggctggtgccagcccctcctctctctggaggagctctgtctctccgcacagtaacatgaatgcgatctcgatcatgccaagtatcaccccgacggttaggtcgggtggtataggggttgtatcgtactcggggaccatcctgggcatcactcattgccacatctccatcatcttcctcaaggcgggaagaccgaataccagaaccgcctcttccagacctacggtttccttcaccatatttccaccggaagggaccccggcctttcttctttctttgagggaaattaacgcgttcatcatcgtgttcgctgtacgacttcccctcgtccgccatgccacagcgaagatcaagggcgggctcaggcgctggcc

SEQ ID NO: 432125 - DNA, 2326 bp, Homo Sapiens
ttacgaaatacaacatcactctttatattaaaaagtgcagaacacgaaatacaacatcactctttatattaaaaagtaaggaggtcctggggttaagtacacaaagcacctaagtccttcgggtagtttagtgtcagttctacaaagtaagctttggcttcctggcaccagtgaggctcaatcttctgaagtcttccagaaggcaggcgaggagagggatcaggcagccctccctccctcggtcacagtcacggggcggcctcgggccagacaggaggagatgacagacgacaaccagacggtaatatccaaggactatttacaggggggactgcttctgaggcatgactacgatcacttcatgaatgccacttctgggatctcgcccttggccttgagatgagtgaaggcctgggcagatctggtgtagtcccagttgttgtcctgaaggcacttctgggaccactcgaggttcatgccagactgggtagagaatgcttgcaacatttcctgctgctctggagagagggtgggcaccgggctggaggaaggcgtgggtgcaggcatagcgaaggctctttggatctcttcagaactggcattccgcacaaatagctcatcatttacaatacatagccctgaattgctagcaggaacagcaatgaatgtccgggtgaaggctcgcaaagaatcccgggactttccgtccacttccttgaagactccattgacagaaaaacacagcaatgtgcttgtctgggcgcttatgtctaccacgaaggaattgacgtcgtgctgggttttgggcaactcattgaggaaggcaacaacgttgagacgcgtgtgcttcagcagccggaaccgcaaggtagggtctttaagcttcttcacatttctgctatccttgaaatactcggctaagctgcttcgggcagggttctgaggaatgaaaggaatgctcagggaacagcaggccccatcatggtaggcatccaggagcccttgccggtctccagagtcgtaaattgcatagtactgttgcaggaagtgcaagaccagactcttcaagttttctgttccaaaatagcttcccttgcagggcggtaacgtcgtgggggcttcaacatcaaaggcaattggtgggggtagctcatggccatccaggcgtagtaacttgggaaatcgttcgcgaatggcgctgatgtaggtggactggtctcggaaggtgtcacacagggagtttccatcgagccagagctcttctagcttcagcccctttatcttgtccaattcccgctcagacttcaattcatttccagaaaggtttaggatcttcaggttgggtgccttctgaacaatgctagacatgtcatccagcctgtacagcctgttgttgctcaagttcaaggacaatagctcagggatgttctcttcaatgatcctcagggtagctgccatacagcttctgcgattcaggacaacgtcaatgttctgggccaccaaatctgggtctgaacggaggcctttgaggtcaagggcttgttgggagccatcgtatcgtttgctcatgatcagctttagctgttctacttgttctggcttcagttcattcagtatagtgtggggtggagcagaagagttgatgatgatagatatccttcggttctcccgatccaaaatcttatagttgacagccttcaatgcagaggcagtactggcgtcttcaacgaagaactgggcccgtgtattctcatagtgaaactcaataggggtgaagggcacactgcacttgctctgaatcatgctcaggagccatgccttgtcatactttctgccataaggaattgtaatcttgaaccagttctttgaggtcccatcctggctggtgccagcccctcctctctctggaggagctctgtctctccgcacagtaacatgaatgcgatctcgatcatgccaagtatcaccccgacggttaggtcgggtggtataggggttgtatcgtactcggggaccatcctgggcatcactcattgccacatctccatcatcttcctcaaggcgggaagaccgaataccagaaccgcctcttccagacctacggtttccttcaccatatttccaccggaagggaccccggcctttcttctttctttgagggaaattaacgcgttcatcatcgtgttcgctgtacgacttcccctcgtccgccatgccacagcgaagatcaagggcgggctcaggcgctggccgctacgccggcaaacaacctaactcccaagcgctcaggaccgaagtgtccctacgccgggcgcccccgcatttt

SEQ ID NO: 432126 - DNA, 1000 bp, Homo Sapiens
cgatctcagtggtccctcggaccaaagctagactgtcaacccaccctgcacagccggtgtgctccaagtccaacaccaatacctcagggatgttctcctccaagacccttagggtacctcccataccagcttctgccgattcaggacaacgtcaatggttcttggcccacccaatcttgggtcttgaacggaggcctttgaggtcaaaggctttttgggaccatcgtatcgttttgcttcatgatcagctttactgttctacttgttctggcttcagttcattcagtatatttgggtggacagaagagttgatgatgatagatatccttcggttctcccgatcccaaatcttatagttgacagccttcaatgcagagtcagtactggcgtcttcaacgaagaactgggcccgtgtattctcatagtgaaactcaataggggtgaagggcacactgcacttgctctgaatcatgctcaggagccatgccttgtcatactttctgccataaggaattgtaatcttgaaccagttctttgaggtcccatcctggctggtgccagcccctcctctctctggaggagctctgtctctccgcacagtaacatgaatgcgatctcgatcatgccaagtatcaccccgacggttaggtcgggtggtataggggttgtatcgtactcggggaccatcctgggcatcactcattgccacatctccatcatcttcctcaaggcgggaagaccgaataccagaaccgcctcttccagacctacggtttccttcaccatatttccaccggaagggaccccggcctttcttctttctttgagggaaattaacgcgttcatcatcgtgttcgctgtacgacttcccctcgtccgccatgccacagcgaagatccagggcgggctcaggcgctgccgctacgccggcaaacaacctaactcccaagcgctcgccacccagcctcgctaccttataccctggagagtactgccgtcc

SEQ ID NO: 432127 - DNA, 485 bp, Homo Sapiens
  misc_feature (217)..(217): n is a, c, g, or t
  misc_feature (264)..(264): n is a, c, g, or t
  misc_feature (360)..(360): n is a, c, g, or t
  misc_feature (412)..(412): n is a, c, g, or t
  misc_feature (430)..(430): n is a, c, g, or t
  misc_feature (448)..(448): n is a, c, g, or t
  misc_feature (455)..(455): n is a, c, g, or t
acaacatcactctttatattaaaaagtgcagaacacgaaatacaacatcactctttatattaaaaagtaaggaggtcctggggttaagtacacaaagcacctaagtccttcgggtagtttagtgtcagttctacaaagtaagctttggcttcctgggcaccagtgaggctcaatcttctgaagtcttccagaaggcaggcgaggagagggatcaggncagccctccctccctcggttcacagtcacggggcggcctcgggcagnacagggagggagatgacagacggacaaccagacggtaatattccagggactattttacaggggggactgctttcttgagggcatgacttacgtttncactttcatggaatggccactttctgggggatcttcggcccttgggcctttnaggttgagttgaagggcntggggcagattttgggtnttagttncccatttgtttgttccttgaagggcaccct

SEQ ID NO: 432128 - DNA, 457 bp, Homo Sapiens
  misc_feature (337)..(337): n is a, c, g, or t
  misc_feature (364)..(364): n is a, c, g, or t
  misc_feature (369)..(369): n is a, c, g, or t
gttttgcagcttaaatttcttcaatttaagggtacatcaacaaggaatttattgaaatacagtgtatcatacaaatagaatattcacatgaaatgatcaaaggaaggggtaaggagaaaagtattaaaactgaaaatttacctagtgaataagtggacataacaattgagaatctatccacttcatgtcacttatggaaacaacacattaagattaaactacatgtttgctagagtaggagaaagtatataccacagggaccatcattactctagagtgggtctatgcataactcctcaaaaagaggccatcgttggtgtttatgtgctaaaagttngtgtattttgggcttctgagaaccatnaaaantgactcaaagaatagtttcaaagagtaaaagaagaaatgcgtgacaattgaagacatggaattaaattggtttgtctctaactgccca

SEQ ID NO: 432129 - DNA, 1058 bp, Homo Sapiens
  misc_feature (352)..(352): n is a, c, g, or t
tttggccaggaacccaggaggccggggccagcttggtcaatgttgcctttccagttggttgatgagctgggcactcagaattttggtgagggcagagagaggcccttcttttttcataaaggggcagcaatgaacatgctgagggtgtcccccgtgttagggcagttccaggatgtcgtagtaatggccatcgggcgtggtgaactcagtatagttgaacttgttggttctgagccatcatgggcacagagacagtgctgccgtctgatttgtggaagaggcggcggtgggtgctggagtcggggaagggagtcttccactggccgttgaagtagagggcattcaccagcanccagccgtgtcagctggtccacggctcctttcccaagcaagttgctgatcataccttttgtgtgtgtcttcacccagtcattgatgatgaatctggctctctccacctctgaaaagtccacttgcttgaccgtgctccggaacagcctgaagaagtggggcatgaagccctggaccagcttcagatcccgctggacgaagatcgcgtctgtggtgctgatctcatccttgttccatggccccatgagctccttgtacagatgccggagggcgggggccatgcccttgtcatcaatcttgaatcccatagctgcttgaatctgctgctgggtttctcctcctgttgtcagctggagcatggccaacaccgaggccaccccatagggtgagaaaaccacgttgcggtccttggaggcctgcgccacctgctgaaacaccctcaccccgaagtctgaggccaggtgggccacgtaggatgggggatggtgcacagcagacccttcaccaaagacaagggccaggcccaggactaggcaggtgagggctggagacatctgcatcctgaagttctcagaggtgccttgcgattggcggttcgtcctgctctggcggcggctgctgagctgcaggaattcagctgctggaggggggcgtgtgggtcttcttgacagcgctcttggccctgcagccaaacacagctgtgcccc

SEQ ID NO: 432130 - DNA, 581 bp, Homo Sapiens
  misc_feature (32)..(32): n is a, c, g, or t
  misc_feature (43)..(43): n is a, c, g, or t
tcctaaaatccataaaaaagttcagaatgctnaaaaagcattntcttgaaactcttctttgggctttttcaactatttctcgctgatgcctaccatatacctctttgctatcagcctcagtgatatatttgtaggcttcatcctccataacaaagcacataacttcctcccatggctgccctggtgaaatgaattgaatttttctccaaagtctttttgaatttttccttcatttccaccctcctcttctcggatatcagatgctgtacatggttctgatagactttttcagcttctaaagtgctcaggaggtcaaatggaatccgcctatcattaattttgtctatatggtcagtttcatcccaaggagttttttctagcaccacaaaacataactggaaatctgctctcttttccattaacttcaaagcttctgaccaattcaaatgttcaatctcttctagatttggcaaaagagtgttaaaagctcttggtaaagtatttatatactcttctctcctttttcttatatgttcctgtttaagttgttctatatgttttgagaatgtatttctggcccc

SEQ ID NO: 432131 - DNA, 537 bp, Homo Sapiens
taaaatatttatttacagtttccttcttggattttggcctagaaataactttcttaaccctaaactggacccattttcacttatattttctcagaatttttcatttcatattttatgttaatttaaaagatgagagatcaaatatggctttgtttcgtattagctgtctggtttggggatgttacttaacctctctgagtctcaatttcagtttcctaaaaaaacagatataatgaataccagcctattggagttgctatggcaatgaaaagaaatcatttatacaacacatgtgtcatggtagaatctggttaataaaggtgaccaaaatgttagctatcactttgagtgctattgttatacttggtagctagtcgggtatgagcagggcaggaaagggctcccatacctcacaccaggagtgttgggagaccatcaggtgatggtcaggtggttgttaactgtctctctgaagtaataattggtctcagctggcgccagggaacggcggtctcctagtagatagaaaacacctcc

SEQ ID NO: 432132 - DNA, 832 bp, Homo Sapiens
ctatcccacagcagcaaggcctcaggtgcaaaagaatatgttggtcaaagccttgactttgcaattgctagcctgttttgcccaactttctatgaagctctttctgaccccatctgagctttggtttgggagggtcataagaaattcaggctgggttgacaacagggtcatatcagcactgtaaaactctttattaaaaataataataataatcacaccagtacctgccagaataacttccgcccacttgcccacaatccagggaattcctatttagggccgtggcctaatttgtgaaagaggccaagcctaagtttttaagaatgccttaatccagggagattacactggtgggccacagtactgccaccacacagaagttcaggttacaagcctcttccagatccttatgcttcagggagagaagacaagttggaaatccctagacccaagtccagggcaagggaagatgctttcctgttactgttccccagggacaatcatctttgcagaggaataatgttgcagcccagcagtccttttcctgcccagcgtgttggaacaagtctaagctggtgtttttcccccctgcggatcactgtcacattcaggggcttcccctcactgtgctgcaccacactgccaatgttatgcagtgactggaagttctgggtgttcacagagccgaactccacaatctcatcatccacttgcagacccgcgatgctggctggggagccggggctgatgctgttcactttggccagggccctccacgggccttcgccaaagcgaccgcgtggccgacgcgcgggtcgacatatcccgctaa

SEQ ID NO: 432133 - DNA, 1104 bp, Homo Sapiens
atcgcgttcgcggacggctgtggtgttttggcgcatgggcggagccgtagttacggtcgactggggcgtcgtccctagcccgggagccgggtctctggagtcgcggcccggggttcacgatgtccgacgaggaagcgaggcagagcggaggctcctcgcaggccggcgccgtgactgtcagcgacgtccaggagctgatgcggcgcaaggaggagatagaagcgcagatcaaggccaactatgacgtgctggaaagccaaaaaggcattgggatgaacgagccgctggtggactgtgagggctacccccggtcagacgtggacctgtaccaagtccgcaccgccaggcacaacatcatatgcctgcagaatgatcacaaggcagtgatgaagcaggtggaggaggccctgcaccagctgcacgctcgcgacaaggagaagcaggcccgggacatggctgaggcccacaaagaggccatgagccgcaaactgggtcagagtgagagccagggccctccacgggccttcgccaaagtgaacagcatcagccccggctccccagccagcatcgcgggtctgcaagtggatgatgagattgtggagttcggctctgtgaacacccagaacttccagtcactgcataacattggcagtgtggtgcagcacagtgaggggaagcccctgaatgtgacagtgatccgcagggggggaaaacaccagcttagacttgttccaacacgctgggcaggaaaaggactgctgggctgcaacattattcctctgcaaagatgattgtccctggggaacagtaacagcgaaagcatcttcccttgccctggacttggggtctaagggatttccaaacttgtcttctctccctgaagcataaggatctggaagaggcttgtaacctgaacttctgttgtggtggcagtactgtgggccaccagtggtaatctcccgtgggattaaagcattcctaaaaaactttagggcttgggcctcttttcaccaaattagggccacgggcccctaaaataagaaaattccccctgggatttggtgggccaaaaagggcgccgggaaaattaatttcttgggaagc

SEQ ID NO: 432134 - DNA, 783 bp, Homo Sapiens
cttcactccaaagagaaacctattaagtcattatctccaaattaaaccctcacaagtaacagttgcaagaaaaaatggcaagagattatatttttagaccaggtggaattacttaaattttaaagcctgaaaattccaatttgggggtgggaggtggaaaaggaacccaattttcttatgaacagatatttttaacttaatggcacaaagtcttagaatattattatgtgccccgtgttccctgttcttcgttgctgcatttttcttcacttgcaggtaaacttggctcttaataaacttttaccacaaattgaaataaatatatttttttcaactgccaattaaggctaggaggtttgatcacctcaacattggagacatcacttgccaatgtacataccttgttatatgcagacatgtatttcttacgtacactgtacttctgtgtgcaattgtaaacagaaattgcaatatggatgtttctttgtattataaaatttttccgctcttaattagaaattactgtttaattgacatactcatgataacagagaatggtggtattcagtggtccaggattctgtaatgctttacacaggcagttttgaaatggaaatcaatttgcctttctgttacgatggagttggttttgatactcattttttctttatcacatggctgctacgggcacaagtgactatactgaagaacacagttgagtgttgtacaaactggacatagcagcacatactacttcagagtccatgatgtagatgtctggtt

SEQ ID NO: 432135 - DNA, 722 bp, Homo Sapiens
gatttaatcgtctatttattaatgcatttcaagtttcaaaaaaccttacatctttgcacaatactttattttttgcaatttttagtaaaaatttccaaagtgaacaaaaaaagatactgtataaaacacagtggacattaaaactgacagtagtattagatctcatttgtcttgatccttttatattaccacatcttgattcgcagtggaaagagttcagtgcatgtatctcttttcagaaaacatttaacttagactcaaaataaaatagggcagtgtgtgtacctgccaaaatcctaccacaggataacattacaagcaaaaaatttacatgttccaaagtctaccacactcaagaagttactaagaactcttgcagaataaaagtcaccattttagaaatgcaaacccacttccaacctttgcacagtccaaaaacaaaggcatttaaatgatttaaaagcaattacatacatatctacctacttgtttgtttagaattatttatagtctatctggggtttcatgtacaaaatttgtctctaagtcatgtacaaaaggctgtatttggaaaaagtcaccacatactgtacaagtttgacaaggaagagatcccgttattttctccctcagaccaccgagtgcctagaatgtatgtggctctcaaggactgtccccaggactttgtggcacggtctaaagattatgccaacacactgttc

SEQ ID NO: 432136 - DNA, 1314 bp, Homo Sapiens
gtgattcagggtaagttgtatttggtgccagaattttaaagagcactattttgacattaaaatgtattcttctctgtattaatggcctacatcttcagagttttcaatgctttctaaaagtttcctctttggaaagaagaaatctgaaagacctatcatgccgttcttcctggcgtctatattttcctttagagaggcaaggtaggattccgtctccaagggagacacatctgagtctaatctggccaagtagcggtaaacgtaggaaaacgtcttgaaggggatgcgagcgggcccgccctccggatcgtccgtgaggatctcgcacaggtgcttcagcgcagtgttcaaggacccaccaagcatgctgcatccaagcgctaaaaagtttatccacttgattttgttttcacaaggatccagttgtaagagcgctttgaatttttccttcggcaggcacaagttcttccacttctgctcaagatctgttaattccacataccgcttgtggtgacactgcttgtgcaaaactttcaggagtccttgagtcaggcctgtgtctgttttctgggttgccgtgggcatttccattctgtcctttacaggaagtggatctcctctcgacagagctgaaaaatagcccgcggaccaccgcagcacgtcggccggctgggtgcggatggcagccttggtgaattgcttcaggatgtccggcagctccgggggaatgtggatctgctgagcgcagaacatggtgtcgggaagcggcatcgctctccgcagaagggaccaggctggtgaatcgcggcgcgccgctcctccgcgggcttcgggagaaattcggaccaactgccactccaacaacaccctagaccctgcagttccctagcgccagccgcccactacggacgcgctcggtatccaggcacccgggacgcgagcaggccccgcccctggagccgcgcacgcgcacgcggccctgagcgaggcggggctgctcccgggctggacaaggaggtgctggcgtagtccgactagcagcagccgctgctccccggtggttcagagccgcgcgagctgagcgtttcgcctacaaaagcatcttcggatcggtttcccaccgccgaatgtgagcggcgaactcacgaaggactccctcttccccttgctctggctgcgtgaggctgaggctaggggactcgggcctgctaggagggaagcgggttaagtgaaggggctgatcgcctgggcggcacgggccccgctgcgggacccgcctgcgcctggggccgctatcccgggaattccggaccg

SEQ ID NO: 432137 - DNA, 1172 bp, Homo Sapiens
  misc_feature (1161)..(1161): n is a, c, g, or t
tgtgtaccgcgtaaactccggcccccctcggggggattcttgaaggccccgccccccgagcagaggacgcatagcaggcggcgcgagccgctcggcacttttcttctttgggatcccgggtaagtttgatttggggcccgaattttaagaggccctttttggcccttaaaaagtattcttctcggaattaaggcctccatcttcagagttttcaatgctttctaaaagtttcctctttggaaagaagaaatctgaaagacctatcatgccgttcttcctggcgtctatattttcctttagagaggcaaggtaggattccgtctccaagggagacacatctgagtctaatctggccaagtagcggtaaacgtaggaaaacgtcttgaaggggatgcgagcgggcccgccctccggatcgtccgtgaggatctcgcacaggtgcttcagcgcagtgttcaaggacccaccaagcatgctgcatccaagcgctaaaaagtttatccacttgattttgttttcacaaggatccagttgtaagagcgctttgaatttttccttcggcaggcacaagttcttccacttctgctcaagatctgttaattccacataccgcttgtggtgacactgcttgtgcaaaactttcaggagtccttgagtcaggcctgtgtctgttttctgggttgccgtgggcatttccattctgtcctttacaggaagtggatctcctctcgacagagctgaaaaatagcccgcggaccaccgcagcacgtcggccggctgggtgcggatggcagccttggtgaattgcttcaggatgtccggcagctccgggggaatgtggatctgctgagcgcagaacatggtgtcgggaagcggcatcgctctccgcagaagggaccaggctggtgaatcgcggcgcgctgcgaggaagaagggcggctgtcggctacgacgcggtggacccgctagcagcgcggggcttgcggccagggccgcctcccatcccgttcccgaggttggggccggattcgcggggctcttacccgctcctccgcgggcttcgggagaaattcggaccaactgccactccaacaacaccctagaccctgcagttccctagcgccagccgccactacggacgcgctcggtatccaggcaccncgggacgcgag

SEQ ID NO: 432138 - DNA, 819 bp, Homo Sapiens
  misc_feature (769)..(769): n is a, c, g, or t
gtgtcatcccccttcgtaatgaccttctcaattgacctgagttacagaaagtggccccagtgagagatgactgcccttaataagtataaaatttcaaaaagatctggacttaatatgatgacttataaggagcttagaaaatgcaggttacatttatatctacctataggattttatccaatgttgacttagccatggtagaactcttaactgcatctacacactatattgctcttgtaaccaaagatgctaatgagtgtatttgaattagcttctcctaggaggggtgactactttgctaaagagtatgaaaaatgttttgatggaagggacaagtttggttggtagtagagtgtttgtagcttatctggtaaagggaattgagtgcatctgcatgcatagcacaagtaatccatcttctggcggttaactagagaaagcttatagtcagaggctcttgtgaatgcactgaagactgctgtgtctcaggagtttctcttgatgatctaccttttctgaattacttgaaaaggccaatgtgcttggttcgagctttttagtgaatatttacaatttcctgcttttatctagaaaagaagcaaaagggaaatatgaaagcagtatatataaaatctgtgctttggaattgatatttgcatttggtgattgttttttatttgattcagctaaattttatgtgttgaatccttactctagaataactacttttggaactggaagggggaaatctgtaaatggaaatttattnttatgttctgaaatttgagggtttaggaattgacttttgtgtaaagaatg

SEQ ID NO: 432139 - DNA, 1820 bp, Homo Sapiens
  misc_feature (1796)..(1796): n is a, c, g, or t
ctgggtaccccatggagagcccagaaagccacttaaagtgttgtgtgtttgagccctcagtcgtcctgacagggcacaggagctgcggccagcccttgcccaccgctttttatttggacacagatggggagccccccaggctcctgctgagaccccccacatatcctcatatctagcctgagtatctgtcctgcaaaatgacagaggggctaccagtaggaagccatcctcccttccttgtgagatttgcctgcagggggaggatgggacctcggcagagaggctctgagaagaggtcagggaatggccactccaggggaggctctgcactgggagcctgaggcatgtaatgcagcaggcaggaagtgttgccaggggcctggagtacacagtctgagccgtccaaccactggtgtgtgctgtctttcggcacttctgactgcagggcaggcagctccagctggtaagggtcctcactggggagggcacgaagctggcgggacaacactccatgctcagctggcaggctcccccttgtgtcagaggagtacatagcaggtacaaggaggaggcagaaggagactagtaggaccaagatgcaggtgctgctgctgctggttttgtttgatatctcaatcaccatggcctggagtttcctcagttgatctagaagggacaaattctgttcctccagaagctgtactttgttctgaagctccatattctgggctgtgtatttcaagaccctgctctctaaacccccaacatacaccttctttttcctgcggctctcttgagcagatcttttatttcgaatcttcctccgcacacgtttcagaatttgttcctctgtcttagtgagaggaagtgtctcaggcagaataagcccctccttctccaatagactcttctcctcatctgtcagtactagcctagcaatctcctgctctgccagctcctccatatgctgtggagtcatctgggtcccctcttttctacagctctcactctctagatccatagagacagtttcccgtgggagggagtaggtgtggtcatggtggacaaggcaggggttggaggagctgagaatgttcaacgacgctgggggactcagcagggagcacagcaaatcatctacttcccagtcgctcggtacctcagaaagcggcagcgcccagtccagtggggccctcacggcctcatcgggtgccgtccccaaatctccactttcctctagcaggaaggccagcaggtcttggtcaccagcatccaattccagctccatttgggacaactacggaaagggtgggccaccgggccccaacgtccgaagcccagacacgagccccaggccagctgtaggcctcgggcacctatccactgtccctctacggccgggattccccgccggcggctttccatagccctctccggacccgcctcccaggctcaattctcctcagcctccaacgcagcgaaagtgacgcaccccaccccgtggcactgtgggacttggagttccctccaactgagaagaggcttgggtgcagcgccacgtcccaggggctatgcaaatgtaggggacggccctgctgccgcctcgcaccccgagggcgggggttccggggctccggctccgccttctaccccaagctagaaaaaggaagagttctagcctgaaagggaactcgggcgtcgtcctggcgtcctctccggattgcgccgcaccctcgcttcctgccagggaggggctgccggccgacgcgtggcgacgcgcggtcgacgatatccantaagcgggcgtacgcctgctggaa

SEQ ID NO: 432140 - DNA, 228 bp, Homo Sapiens
taggttagactttatggaagaggtaagactggaacgagtcttaataattttagatagagtggaggtcatataagatggaaaaaattgtgggcaaagttgggtgacaggaatgtataaggaattcatatgctactgtaagttggaaggtaatttttggccagatttcataaaactatgttaagggatcaggactttatctcacaggtatagagaattaaggagatatta

SEQ ID NO: 432141 - DNA, 507 bp, Homo Sapiens
  misc_feature (18)..(18): n is a, c, g, or t
  misc_feature (33)..(33): n is a, c, g, or t
  misc_feature (43)..(43): n is a, c, g, or t
  misc_feature (57)..(57): n is a, c, g, or t
  misc_feature (74)..(74): n is a, c, g, or t
aatggttaaagctgtaangggtgaacaaccctnccccctaacngggcccactccaantccccacctcccttccngggaccccctgaacccacgtaaaataccctgtttaaaagttccctcccatctacttcccccatatccatatggaaaaacaaagacttccatcctagttggataatactgaattcgatctttagccttctcttcaatcccatgactcaatagaagttttgtttctgagaattattttcatccgatgataaagctgtgtgtacatagtcatcacaaaaatgaaagcagcatggatacaacccagtggtgctaaaaggagaaacagtgtgaacgaagcatgattttggtaaccacaacagttgttgatccaaggacagtgatggtccatcttcatcacacatctgttacactttctgcagtgatgtgaacgtggtgccttgtatgcttggcagactttacaatactggagatacatggtatcctgagaaatttccg

SEQ ID NO: 432142 - DNA, 448 bp, Homo Sapiens
  misc_feature (424)..(424): n is a, c, g, or t
  misc_feature (438)..(438): n is a, c, g, or t
ttttttttgattatacccaacatccattgatctttatttgatttgacaaaatctgcatttttaaaagacaggtaacaaaatctgaggttatactgaatctgacaaattgagttctatagtatctagaatatcatataagaaatatcaactgagggaaaagagaagtaccacatgcagatgctcctgggcaaggggggaactgtatctgcaggtgaggtccagagtgtgcagtgcataaggaaaatcctacaggaaaatgccgttaacttacttgggatggaaatgtttttcctttgaggggggagggaaggaggtgggttaaagaggggggcagggattttcaaagggcatatggcaggaatgggctttcttccctttttccaaaatggggttaattaaaaattatttttaaatcctggggccnctaggggggcaccntttttgaggg

SEQ ID NO: 432143 - DNA, 1246 bp, Homo Sapiens
  misc_feature (499)..(499): n is a, c, g, or t
  misc_feature (1210)..(1210): n is a, c, g, or t
  misc_feature (1217)..(1217): n is a, c, g, or t
  misc_feature (1223)..(1223): n is a, c, g, or t
ttttttatacccaacatccattgatctttatttgatttgacaaaatctgcatttttaaaagacaggtaacaaaatctgaggttatactgaatctgacaaattgagttctatagtatctagaatatcatataagaaatatcaactgagggaaaagagaagtaccacatgcagatgctcctggcaaggggggaactgtatctgcaggtgaggtccagagtgtgcagtgcataagaaaatcctacagaaaatgccgttaacttacttggatgaaatgtttttcctttgagggggaggaagaggtggtaaagaggggcaggaattcaaaggcatatgcagaatggcttctccatttcaaaatggtaataaaaatatttaaatcatggcactagggcacctttgaggaaaagaacatcttaaccagagtaggctcattgcataattctttagtaatatgtaccattttccagtaattaagcagacttaaaggataatgttgttntaacagcagctatctatttttcttctccccctctggggcttgatctgtttcagcatcacagggacacttttccacacattttctagggaaccaaccccttattcttgaaacaccttctataaaggaatcatcaagaattttgtctccatataaccagtatcgtaaacctcttgtggctaaaatgaattcccctttttgcagctgtattcgaggctcttcggtgcagggacttgtgaagaaggttttgattcctttattcagagggcagcaggcaccactataatcttctattactttatagcgaacacttctgactctcttttctgctttttgtttcaactgttctattgttaagctgtattggtgacagccttctcttactggccactcaagtccatctccttcagggacccctgaccacgtaaatacctgtttaaagttcctccatcctccttcccatatccatatggaaaaacaaagacttcatcctagttgataatactgaattcgatctttagcccttctcttcaatcccatgactcaatagaagttttgtttcctgagaattattttcatccgatgataaagcctgtgtgtacatagtcatcacaaaaatgaaagcagcatggatacaacccagtggtgcctaaaggagaaacagtgtgaacgaagcatgattttggtaaccacaacagttgttgatcccaaggnacagtgnatggtnccatcttcatcacacatctgtta

SEQ ID NO: 432144 - DNA, 618 bp, Homo Sapiens
  misc_feature (42)..(43): n is a, c, g, or t
  misc_feature (75)..(86): n is a, c, g, or t
  misc_feature (128)..(235): n is a, c, g, or t
  misc_feature (237)..(237): n is a, c, g, or t
gtagaaaaaatttcttttgggcgggggggcggcgcccccctnnccgggggtgttttttttgtgttgtggtgggtnnnnnnnnnnnntcagtgtgtgtcgtggtgtgttggtggtggggtttgttttannnnnnnnnnnnnnnnnnnnnnnnnnnnnnnnnnnnnnnnnnnnnnnnnnnnnnnnnnnnnnnnnnnnnnnnnnnnnnnnnnnnnnnnnnnnnnnnnnnnnnnnnnnngngacataatcatttttatttgatttaattgataaataaatacaagagaactgttgtgaaaccactggcaatatagtaaattttaaagattttatttcaacttcactcacttatatttcttggaatggggatatatacattattcaccaataaatgctaatgctttaaatttacaattaccctatttgtagaaacctgaagatcattccaattaaatgaaaaaaaattgtacaaaaacgttcttttgctcttacaattcaaaatacattcaaattcacattcttacagcagccaaaacctttaacccaaaattcagaactgcagtcctacaagtgaacaaactagtgttttaattttaattatcatgattgttgttaacactg

SEQ ID NO: 432145 - DNA, 1355 bp, Homo Sapiens
  misc_feature (1298)..(1298): n is a, c, g, or t
  misc_feature (1302)..(1302): n is a, c, g, or t
  misc_feature (1311)..(1311): n is a, c, g, or t
  misc_feature (1316)..(1316): n is a, c, g, or t
  misc_feature (1341)..(1341): n is a, c, g, or t
  misc_feature (1343)..(1343): n is a, c, g, or t
ggacacagcatcacccattgtataaaccctgaaatcagtgccggcgaaatttaacatttcaaggacatatcggttacctccagcccaatgtttacgcctggaacttcacatagaatatgtgcctctccccccacattattcacactaactctagagatttggtactcaatccatattttccttccagtttttgttggtgtgcaggaagaggatatttttagtttaaacccgagccaataagattaaaaatatttgtaccagtagtttaaaatctttcggattcactgtacatttttatcagtttgaagggaaataacaaaaactactgacacattaaagcaaaaagtacttacttgctgaatcttggcgataattttggttttttcattcttccccacgtagtctgaaagcttcttcgttcttctcagctccttggctgcccaccaacagctgcgcctctgcctctttaatgacgttgagccctgcctgtgttcccgacaagtcttccttattttcaaactccatgcggatgggatcatacggtggcaaccccatggggtaaacaatcatcaccgcgcctcgaagctggtccaaggcatctttcaccatctccatggtaacacagacaccggcttccacttgtttcttagatattattgctttggcttcttctatagtcttctttaacacttgcttcatcttctcatttggagcttgcccattccttcgtccaatatcatcctttttaaacactgcacctccgctgggtacgcatttttcaccccattcatccttcaatttcaattcttcaatctgatcatcggtcagtccttgcatattaggagggagaaatatgccatgttcggctaattcttgccatttctgagcagaggcgctgcaccttgagccgcccattatagacccgggccacctgcaccgtgagctcctccagctcggtactcccaggcgcctgcagcaggaactggctctcgtcgccccgcttcacgtgcagcagaaccatggcggtcccgccgaggtcctgccggccgagggtcgccggatcgccagcagctgcgacgcactaacagccgctcacagtccggaatcccacgctccctagcccgcggtgagcgggggaaacggcactcgctcccggaagtggatgttgccaagagcaacagtgaagcagagttaaagagccgccagttcaagctcagaacccgagtgggggaggctggggtgcaccgaggcccagcaatccaagcccgtacggagctgcggccggggaaaccacccanacantttgagagnacagntgattctgagcggaccgacggaagnanatttgcaatccc

SEQ ID NO: 432146 - DNA, 1993 bp, Homo Sapiens
  misc_feature (114)..(125): n is a, c, g, or t
  misc_feature (566)..(566): n is a, c, g, or t
  misc_feature (580)..(580): n is a, c, g, or t
  misc_feature (589)..(589): n is a, c, g, or t
  misc_feature (607)..(607): n is a, c, g, or t
  misc_feature (615)..(615): n is a, c, g, or t
  misc_feature (645)..(645): n is a, c, g, or t
  misc_feature (660)..(661): n is a, c, g, or t
  misc_feature (677)..(677): n is a, c, g, or t
ttttgactaggtatttattaagttctaaaaccttgaataactgctattttaaaaattcacactaaaagaaaactagaaatgttaacatcttttacagagggcagtaagtggccnnnnnnnnnnnnttaaattataattgcctaggagaaaggtgagctaatctctttggaagtgtcatcagctggtgaacttcatcttggtctccactttatgtctttcactccatgaaaatgtcttttcaaagcagtgttatccgcccatggtgagtttaaataggcatcatcatcattttcttccaatctcttgagctcctcttgtcttctgtgatagtacagcatcagctgcttctgctcctcactgctaataataggctctcgggctggagctccctgtcccctttgctgaatcttggcgataattttggttttttcattgtttcccacgtagtgtgacagcttgttcgttcttcgtcagctccttggctgcccacgacagctgcgcctctgcctctttaatgacgttgagccctgctctgtgttcccgagcagtctcaggtattgcccgcnggctatgggtgggngccagcacntgcagaaagcccatctgncccctgcnaccttgaagctcctcttgtctttctgtggntagtacagcatcagnnctgcttctgctcctcnactgctaataattaggctctcgggctggagctccctgtcccctttgctgtatcttggcgataattttgttttttcattcttccccacgtagtctgaaagcttcttcgttcttctcagctccttggctgcccaccacagctgcgcctctgcctctttaaatgacgttgagccctgcctgtgttcccgacaagtcttccttattttcaaactccatgcggatgggatcatacggtggcaaccccatggggtaaacaatcatcaccgcgcctcgaagctggtccaaggcatctttcaccatctccatggtaacacagacaccggcttccacttgtttcttagatattattgctttggcttcttctatagtcttctttaacacttgcttcatcttctcatttggagcttgcccattccttcgtccaatatcatcctttttaaacactgcacctccgctgggtacgcatttttcaccccattcatccttcaatttcaattcttcaatctgatcatcggtcagtccttgcatattaggagggagaaatatgccatgttcggctaattcttccatttctgagcagaggcgctgcaccttgagccgcccattatagacccgggccacctgcaccgtgagctcctccagctcggtactcccaggcgcctgcagcaggaactggctctcgtcgccccgcttcacgtgcagcagaaccatggcggtcccgccgaggtactgaggcgttgagaaggccccggctgcgtggcccgcgggtcctgccggccgagggtcgccggatcgccagcagctgcgacgcactaacagccgctcacagtccggaatcccacgctccctagcccgcggtgagcgggggaaacggcactcgctcccggaagtggatgttgccaagagcaacagtgaagcagagttaaagagccgccagctcaagctcagaacccgagtgggggaggctggggtgcaccgaggcccagcaatccaagcccgtacggagctgcggccggggaaaccacccacacagtctgagaggacagctgattctgagcggaccgacggaaggagattcgcagagccccttcccggaagtgactgttgtcgcggcaactgccaaaacacagaccaagtcgctgaaggggagggcggacctcccaatcgactggtctggggcccgagatttccactcagggagatacgtgggctgagatgggagttactagatggggaacgggaaatacggcgggaaccacaatcgcgcagttccgcagctgccgccccacaaccgctccatcccgggaattccggaccg

SEQ ID NO: 432147 - DNA, 314 bp, Homo Sapiens
ctcatttcagtttcttagatatcattgctttggcttcttctatagtcttctttaacacttgcttcatcttctcatttggagcttgcccattccttcgtccaatatcatcctttttaaacactgcacctccgctgggtacgcatttttcaccccattcatccttcaatttcaattcttcaatctgatcatcggtcagtccttgcatattaggagggagaaatacccatgttcggctaattcttccatttctgagcagaggcgctgctgtggtgggcagccaaggagctgagaagatctcaaatgagccgtggata

SEQ ID NO: 432148 - DNA, 466 bp, Homo Sapiens
  misc_feature (67)..(189): n is a, c, g, or t
tgggctcaggcaatcctcctaccttagcctcctgagtagctaggactacaggaatgtgccatcatgnnnnnnnnnnnnnnnnnnnnnnnnnnnnnnnnnnnnnnnnnnnnnnnnnnnnnnnnnnnnnnnnnnnnnnnnnnnnnnnnnnnnnnnnnnnnnnnnnnnnnnnnnnnnnnnnnnnnnnnnnnntgagccactgtatctggcccatattcttttttaagaaaagatgcagaggtgttaaatattaatatcaaattgtccaggcatggtgtttatgaaattgtgtgccctctgacaggcaaccaaacacacacgacttcatttctttattaattcctgcctcatcatcttttctcattgatgctccttaatgtcaaagggatctctctctctcacacacacataagaccaaaacaaatatcttgaacatgcgaaaaaatagtctacgcttttgaatagtgtg

SEQ ID NO: 432149 - DNA, 756 bp, Homo Sapiens
agcattttcttctaggtttctacacattttcttcttatatccacttttaaaatactatgtttaccatgctacttcttgattaatcaattttaaacagtatctattcatttcctattgtggcagaggaagacttaagaaaaactaaaagtggaaaaaatgttttcattcattgactccctccctcagcccctcctcccacctgcaatgtagaactggcctctgaggcatgtctgaggaacacagttgaaacattggctctgaggatctgatcttcagatcattttcttctgttcatgattaagctactttttaagagtcaagcaccaggagcctaaattactgtctcccttggggctgatagctactctaacatattctagatcttctccaaaaatgacaaaatgcttttattgctttcttttggatctaatgtaccacatgtgacgccactatcggccttagccatctcaatgttttaccagcttaaatgcacacctactaacaagataaaaacactcccaaaacaggtgtcaggctaagtatatgggcagaggcaaggaaaatcagataggtggactccattaagatttcattccttgtgatagcctgccaactcagcaatgcactagtaattaaggggctttaatgtacttaagccagttcagggaataaaagacattcagtagtttttgaataaaggcatgtaagaatgaatgggaagagaaacagaggtaaattgggaatcttggatagatt

SEQ ID NO: 432150 - DNA, 490 bp, Homo Sapiens
  misc_feature (418)..(443): n is a, c, g, or t
atggctctcagattttgtgccctgataaaaagtcttcacctaccaaaaaatcatgataatattcttttgttttcttctaaattatgtgttttaatatttacttgtattttattttgtgcaaaccttattcaagtataacatacccacagaaaagtacatgaatcataagtgtataatttgatgaatttttcacatgaaaacactgttagcatcaagatcaagagataatattataccagaactccagaagttatttattatacactccctacatgagccctctgcagcttgcatagtctcagttgactgactcaagtttaaaaattactttaagaaaaagatctgagtaaaagttatttccttataaggaaactgaatagtactattcggctttctaattatgtttttcatcatatannnnnnnnnnnnnnnnnnnnnnnnnncttttgatacagagtctcactctgtcaccaggctggattgcagtggg

SEQ ID NO: 432151 - DNA, 1394 bp, Homo Sapiens
agcgggagggcctctgtacggcgccgcgtagggtctcggccgcagaacgtggccgagaggcccgggcgagacttcgggaccgtgtcctgagcgctctccatgcgcccggcgcgagagaatttcaagattgtggagttggactgaatgctgcacagttcaaacagctgcttatttcggctgtgaaggacctgtttggggaggttgatgccgccttacctttggacatcctaacctatgaagagaagaccttgtcagccatcttgagaatatgtagcagtggtcttgtcaaattgtggagctctttgaccctgttaggatcctataaaggcaaaaaaatgtgctttccgggtgattcaggtttctccatttcttcttgcattatctggtaatagtagggaactagtattggattgaatgaatagtcttccattttggaaacgttcatccactctcatatttattttttggtgcctgcatgtttgaagactgaagcaggctaaaagctcttgatgaaatttgagggtgctgaagatgttcccactaatttccagccatcacctttggtggggtgggcttcggaggacagtctgtctgaacctgccagtgctgaccctgcagcactttcagcatatgcacatcaaagttggagaccgcgctgaacttaggagggccttcacacagactgatgtggctaccttctcagaattaacaggggatgtcaatcctttgcatttgaatgaagactttgcaaaacacaccaagtttggaaatacaattgtacatggagttttgatcaacggacttatctcagctctcctaggaactaaaatgccggggccaggctgtgtatttctttcccaggaaattagctttccagcccctttatatattggagaagttgttttagcttctgcagaagtgaaaaagctgaagcggttcattgctattattgcagtgtcatgttctgtaatagaaagtaaaaagactgttatggaaggctgggttaaagttatggttccagaagcttcctaatcctgaaatagatgttttaaagatgcaacctcaaacaccaatgctgttgttaaagagcctatggggaattgctgcactttaccaaagaatggttgataggcccagaagcccatcttagttaggggaagggagcaggaagagggttgttcaaatgcccactttccagtttggccttatgcattcatagcagacttgagtgtatgcaggatttcattatatgaccatgaggttttttgatttgtataattgttttagtaagttcaagaaagtagcgctgggaccacggtggcttcaatgccatgtaatcctggcaactttgcggaggctgcgtaccggcggagtcaacttgaagggtacgggaa

SEQ ID NO: 432152 - DNA, 1125 bp, Homo Sapiens
ttcagtcaatgcaaaggatggacatcccctgttaattctgagaagtagccacatcagtctgtgttgaaggcccctcctaaggttcagccggttctccacttttgatgtgcatatgctgaaagtgctgcagggtcagcaactggcaggttcagacagactgtcctccgaagcccacccccaccaaaggtgatggctggaaattagtgggaacatcttcagcaccctcaagtttcatcaagagcttttagcctgcttcagtcttcaaacatgcaggcaccacaatataaatatgagagtggatgaacgtttccaaaatggaagactattcattcaatccaatactagttccctactattaccagataatgcaagaagaaatggagaaacctgaatcacccggaaagcacattttttggcctttataggatcctaacagggtcaaagaggctccacaatttgacaagaccactgctacatattctcaagatggcctgacaaggtcttctcttcataggttaggatgtccaaaggtaaggcggcatcaacctccccaaacaggtccttcacagccgaaataagcagctgtttgaactgtgcagcattcagtccaactccacaatcttgaaattctaggcagactttcatgtagtggtactcggaagggtttttgtaaactactctttcatatgtggcagcaggggcaggcatcttttccagtgctgatcacacctcgcgccgggcgcatggagagcgctcaggacacggtcccgaagtctcgcccgggcctctcggccacgttctgcggccgagaccctacgtcggcagcctgtacagaggccctcagcgcccagggatcggagaggacaagctacccaaggcgcaccgcccgccccgcgcatgcgcccgggtcgcggccaactgagacggctcccagacaaccgccgctctttggaaggcttccacctacccactcttcgtcggactagcctgacgcctgaccagactcctattcgccgcaaggacccgccaaggcttggggctccccggcagcagccacagctgggcccgagaaactcctggtgtctttacgtttggcttctcctcgtcccgccccacgagcccgct

SEQ ID NO: 432153 - DNA, 2157 bp, Homo Sapiens
ttttttttaacaaatccaaagtttaattattaaggattacaaatatttttagcagtgtagttaggcaatccaagcctggacttccacttcattcctactaaactacttgcagagctgaggaggcaggagactagagtacagagagcattttagttctatcacaaaggtctagaactgtctctacagtcacaggaagaaacaggtatggcaccgtggccagaagggggtaggtattcacagagagtgggtatcaaggtgtcaaactttgtcttctgatagttttccagagattcctgtagagaagggagcagggagagcctactatccgaaaccattccctgaaccctctgaattctgaagcatgtggatttctcagtcttgttctacccatcccctttcccagctttctgctccttcccactcacctttccttccccctggccattttcttcctcatcagagtctaaaaccaagtcccctatggtaatgacggagctgcacagagacggaggacacactgtaggagggaaaccagaatcaaactactacttctagatgaacacaggctcttgagagtccccaagagaggaggctgttgatccaatcctgactcagactacctacctggcttcctggccctaggaggtaataatgatagtctcagggggtccatgtagcaatccaagcaattcctgaggtgagagcaagcaaagaggataggatgaagggaaggcaggcaaagaatgtgctcctagtaagaagcaactctgttccactcactccttttgctctgtggcaggcaagtcaactgggttctccttcagagcccttccccccagggtctggcatggactcttagacttcccagtggaggctgctcttgtgcccatggctaggtctgctgtgtatatcgcatgttcttccttgctctcaggcttagatatgacctgggttggtgagccgagattcctaaagggaaacagcatgactgtggggcgctccttatggcctcccctagtggaggcccattgggactgaactcttcgtcggcctagaggggccagattgaagtgtcggccagctagaggttctgggtgcgtccttgaagatggtccctgaggaagatgtgtgccaggcttggcttttggcaggggattgtggagtgctagtctttgttgctgaggaggattctgttccatgggctcagccaggttcactgagtcagtaacagagcactctggaagcagccaccccatgtccacaccatattgtctccaggcaagagaagaggtgatagagactccaggctgcatccaactcagcacatcctgaagctgctgtgcctgcggtgtaggcagtgctttctccagctgacacaagtactcaaaaagcagcttttccatggcagccagaaagggttccccatactcttgttcaagttcctgcagcttcgaggccaaatccacaggagcctctgacagctgcttcacctgctggtaaaaagtttcctgtgcctccaaaatcttcctcagatcctgctttgtagccttgggatcccgcactataggtccagattctggaaagtggtgattcagggctttcaggacttgggcccaaggccggccctgcaggatcagctccaccaccaccttggcctttaggcccatacaaaggcgttcgtggtgccggtagcgaaccaagccaggggcaacagcgcgcagagatcgcagaaactccagtactcgcggaaaatgttccacgcagcgtccgcgcacaacctgccagctagccgcggcggcgaagcgtagagctgcgggacccgccaccaggggcgtagccatggtcggcgggctccgcccggaggcggtccctccgggttcctcacccggatgggtgaggctttccgatcactcctaggggcggggcttctggcaactccctgtcgctccggtctgtcggctctgggtacctcgcgatctgactcggctcccttccatcggcccccagaattctgggggagggggtcttctggctcgggctggaggagcctgagtggagaagctgaccgtctccagtggcactgggtcgctcagctttaaacgtcgccgctgtctcgagcccgagggtgcctcacttccggctccgctactagcttcc

SEQ ID NO: 432154 - DNA, 726 bp, Homo Sapiens
gtttaaatcaggttctgactctagaaagtgctacaggggagaatgggtgaattctattaataccaattatttcaaggagtaagctacattttccataaggttatcataaatcgacttttcagtgtttctaagagacacagaaaatttgaaaccccaatagatttctctttgttaaagtttgtttttatatgcctggaaattgatgtgtgcaggtccatcaggagatatgtaagaggatgttcatcttagcatcttttttgctggtgaggaattggagggaacctggaaaccccttcatctcttggagaacaaataggtacaatgtaaaggatgcgctttatggagattgtggagcaggtagatgctgcagattcaattatgcattgcaatgtaaattgattttaaagtcataatggtcaatggaaagtacagaacagaatgtgatatataataccatgctatgtatgtaaactaaaaatgtgtgcattctaaaagaatacatattttgctagagtacctatatactaaaaaatgcatgcaatgattgaagagacagcttatttcaaccccaagcaatcagaggccactacacacaggtgtctaatggttagtccctcaaccatatgttggttttaagaaaaatcaaggaccccaaaaaccgaccacctcacttgctttttatcaatcccccctttttccctttttcccggaaaaatttaacctttt

SEQ ID NO: 432155 - DNA, 280 bp, Homo Sapiens
ctaatgatttttctactgcatagcttcagttggaaagtagtgaatctttgtgacaatcttctcttggtttacagaaattgctggtagctaactttgctttgaagtcttaaaagttcccaaacagactccaaaatgaaggcttggaactggaacagtgggggcctctggaacttaggagagattccaagtgcatgttatgggaaaagtggcttgttaaaaaaatataaagacatctgtctttcccccatctgactcagtaaaaatgtctctttcccagagg

SEQ ID NO: 432156 - DNA, 389 bp, Homo Sapiens
  misc_feature (150)..(204): n is a, c, g, or t
aattgcagaattaagaatttatgtatgtcaaaaagcaccataaacaaaatttgaaagcaaagcacttggaaagcatatttgcagcatttcttgacaaaaataatattcttaataaaattacaaattgataataaacataccaatatcaannnnnnnnnnnnnnnnnnnnnnnnnnnnnnnnnnnnnnnnnnnnnnnnnnnnnnntgttattcgcgaagaatcaaagaaagttaaaataacattgacatactattatcccagctaccaaattgggaaagatttgataagtgatgatacctagtgttagggtgcaggaaacagggtactctctaggatccccttctgtcgtcttctcgcagccgtacccttctgtcgtcttctcggagccg

SEQ ID NO: 432157 - DNA, 1187 bp, Homo Sapiens
  misc_feature (505)..(505): n is a, c, g, or t
  misc_feature (507)..(507): n is a, c, g, or t
  misc_feature (509)..(510): n is a, c, g, or t
  misc_feature (556)..(556): n is a, c, g, or t
  misc_feature (563)..(563): n is a, c, g, or t
  misc_feature (828)..(828): n is a, c, g, or t
  misc_feature (1009)..(1063): n is a, c, g, or t
  misc_feature (1181)..(1181): n is a, c, g, or t
cgttgcggatgacactgctgacctatgtagctggagtactaatcaggcatctgacctgcactgtcatcccctgcctggacttttgcgatggactctttgggggaaaaactaacgctttttaattattgcgaaagcatcatgtgtgtattgcagaagttttaggaaaaaaaggacaaaatccaatccataagcttaccacccaagacaaacgtgtattcttttgaatataccttttagttctttttggtgtaaatgtacacacgcacacacagttgtggatttttttaaacataaactggatacactgaatatactctttaataacttttcaagtgtgtatttatattttagaatatgtgatcctacacagattcagaatttaaaaagttcaaatctgttctgtagttataagttaatgttgtccctaccccgtctgccagcatctagtttccctctaatttattttgcatcctagtggagatgcttacacattgtcaaacatatncncnnattcttttatcacacacaaatggcagcatattggacactttttgtnttttgcnccttctgttccttcacttaataatatcacgaacattttcggcatatcaaactttctcaacagcatcttcattgtatggatggaccctttttttatcatcaatcctcaaatagtgattatttcatttgttcccaatcttcattgtaaatagtgttgcaactgacattcttgtagctaaattttgcacatgtctataacgatttccttaggataaactccaagaagagacttgcttggctatttttaagaattttgatacatcgtgntgccaaccaccctccagaaagtttgtaccaaaacgctctcctatttggatcctagagagtaccctgtttcctgcaccctaacactaggtatcatcacttatcaaatctttcccaatttggtagctgggataatagtatgtcaatgttattttaactttctttgattcttcgcgaataacannnnnnnnnnnnnnnnnnnnnnnnnnnnnnnnnnnnnnnnnnnnnnnnnnnnnnnttgatattggtatgtttattatcaatttgtaattttattaagaatattatttttgtcaagaaatgctgcaaatatgctttccaagtgcttgctctcaaattttgtttatgggcttttnacatac

SEQ ID NO: 432158 - DNA, 1261 bp, Homo Sapiens
  misc_feature (980)..(980): n is a, c, g, or t
  misc_feature (1011)..(1028): n is a, c, g, or t
  misc_feature (1032)..(1034): n is a, c, g, or t
  misc_feature (1058)..(1060): n is a, c, g, or t
aacggggtagggagaagattacctccgaccaacggagcagttggtaccttttggaaatttggtacccgtgtagggattaccatatcctaaaattataaatacacacttggaaaagttattaaagagtatattccagtgtatcccagtttttgtttaaaaaaatcccacaactgtgtgtgcgtgtgtacatttacaccaaaaagaactaaaaggtatattcaaaagaatacacgtttgtcttgggtggtaagcttatggattggattttgtcctttttttcctaaaacttctacaatacacacatgatgctttcacaataattaaaaagcgttagtttttcccccgaagagtccatcgcaaaagtccaggcaggggatgacagtgcaggtcagatgcctgattagtactccagctacataggtcagcagtgacatccgcaacgtacggaattaaatcacagttcttgttttggggagggatgaggagaaggaagctgaagatttggtagggagaatgaacctggttttgtgctctaaagcctttgttggacaaatgcacagaaaattcagccctatcaccccaaacatcaaccaataccccaggtagctttttctctttgggattatttaacttcaggtcacagtgaatggagttccagtaagcctgtatatctaagtcaccaaacaagcagatgacctggacgcttgttctatgaggttctgagaggctgtcttcatttcgttctggtttttgatctttctacatgggatggctacaatcatatcctggattgtccagccctgccccagcacactcatgtaaacaagacctctctcctgtctctgcatagggaataattactcggagtccttcctgacgcacaaagaccaagggaagaccctggcagtttgaactcattctccaggtgacctctacccttctcttcatccttcagatcctaacaaaccatctgccaaatnacaaacgttctaagttggaggcttgggaatnnnnnnnnnnnnnnnnnncggnnngtttgaacacattcccgtgtgggnnnatagggtagttttgggttagggtcatgtaaagccagctaggaggaagaggaaagacagcataatatagtagggattggggagaatgtggcagctgaaatagcttcttccttttcctcttctccagagagtgagctctaggtgagtaatggcaggcccctcaatatttctagcaccttcctgtagcccccgttgaaagcctt

SEQ ID NO: 432159 - DNA, 367 bp, Homo Sapiens
ttttttttatgtaatcaatcattttattattttcatcaacaaccaacacagcaacacaaattgacagccagtcctcaagggaaccttttttgaagtgaagagcaaggccctgaatgagctacctacatggaacatagtatttgcaatatgcaaatggagacctaaaggctcatgacgggaacagaaggtggctgtatacagaggaacagacacgaagtggagttatgggaagttcaatcaacaattggcaacaagctaggtcagtagtttacgaaagtggtcatctatacagtgcctgagtttgggttctgggcctggatcatgtaagaaaggcagcaaagtctgggtgccatgaatcacacctgca

SEQ ID NO: 432160 - DNA, 563 bp, Homo Sapiens
tgagccactgcgcccagccccaatatgtcttaaagggggtttgggattaaagtacagttttccgctgaggaaacctaaggtcttaaaggggttttgggatcaagtgtcctgttgaggaaaactaggtgtcaccatgcattagtcttccccgcattacacaaaaggcaggtgtgttcccagaaaaattaaagatggtcttacaagaagtacaaatgtgccaacaccaggactttggggaccctggttctggccctgccacttgttactctattactttattccacatgtcatctgttactttggaaaaacaaacctgggagtaacaccttactgtctggttctcaagtggctaagtggctctgagcaagttttaaatccggcatcgcaagtaccctttggagagggtttagggcctgagaaaggcagactccaccgagtgtctgtccatctgtccggacagcaccatgtggctcagcatgcaggccaggccgcgtgcctgggtttgactcccatcgccggcccttgctgttagttccggacagttccttggtgcctgtgtgctg

SEQ ID NO: 432161 - DNA, 1078 bp, Homo Sapiens
  misc_feature (564)..(564): n is a, c, g, or t
  misc_feature (992)..(1028): n is a, c, g, or t
agaggatcccagacgtgcgctggcgaggttacttttttacaagtttggaattggaatgttcttaatgttgttgaggttgacttcttgcaagctaggatcattggctttcatctgctgcaggcttatttccacatttgtgggatttggtggttcctcaaatactggctttactttttcacctttgacaacatttctgacaggtcctttgccacctttattgttggctgtttcttcatcgaactttggattgttgagcaaattgtgtactccaaggacagctgcaagatcatagagttcggtgtcagaggcactggccaaagcttcttccagttctgggtcaagggtcactttttcttctttacgagtttctataggcttttctttagggataaagactctccctttcttttctccagtgaagggcacaaagtcctctctgtctttctgttccaaagcctccttctccaggtacatgaggaggtgctcgcggtcaaaggggccggtggctgccttctgtgtctggtctttctgtcgaaatccagctggcagcatacatgaggaggngctcgcggtcaaaggggccggtggctgccttctgtgtctggtctttctgtcaaaatccagctggcagcatggcactctcaggatctaggtcatctagaacattttccaactgtttcagttcctcttctgagagtttgccaagaagctcatcttcatcaatgttcttgtatttctccagctctttttgaaaggggagtgccatggcttcttataagcctttctcatgggccatgcacatttaaatggtccagtttcctgagacttcagaataccgtccgtgcgctcatcccggagccggctgtgttggccgtcagtccgtcagccccggtggagcggggccgggagaacaggggcggcgccgtggccggggcgagcgcggcgatcaacccgctctcgacgaattcgagctcggccgatttggcctgatnnnnnnnnnnnnnnnnnnnnnnnnnnnnnnnnnnnnncgccgccaccgcgttgaatcccaggtcgccctatagtgagtcgtatacaa

SEQ ID NO: 432162 - DNA, 1194 bp, Homo Sapiens
  misc_feature (49)..(61): n is a, c, g, or t
  misc_feature (239)..(249): n is a, c, g, or t
ttttccaaatagtttaattaaaaaaaggtaaagaaatctgaaaaaactnnnnnnnnnnnnnaaggaacgggcaaacccaaaaaagcatatagtgtgagtctactggctcagtcacaaagaaacaccaccatcaaaaagatatttaagtttaatacaaattttatacaaagaaaatgtgaaaaaatacttccatatgctaaaagcaattatgcttcacaaataagggccagctaggctannnnnnnnnnngacaactgcaattcacaaatgttctttctctcctgttttcttctaatactctcttatttcttctctaatatgggtaactagctggaaactgtacagttcgcatcctcttaacaatgaagagaaagtaaacaagactaaaatgtacaacaaaacgtactggaatgatatcgtacaattaattttctcatatacatacatcaccttttgctttttcatcaatgctttttgttttacacaacatacaaaatggctctacagcatacgtagtgtacggacagcatgacgggccttgctttctctcatactgcctgtgtttcatgcttacataaaaacgtgaaattccatcatataaataatacgtacatgcttcatcccagactcaaacgtcctctgcgtgcaccttgcctttgagtccttgcttccaagaagcacagcatctctgaccaagtgtgtgtgagtgtgtttaaaggaaccacaaagcaaagataaggtttctctttttttcagagttcatgatcctaagactttctgtgttctctcctgtgactgagctgagtgggggttgtttttttctcttctgtaaacaaggatattgttttttcccttttaggagtagagtcatcatttcaatcacatgaaagaaactagcttctccctgtgtccgtctggtccggagagcttgcgttttaggaacgtggtaacgtagtagctgaaaggagccaacggcttgatgggatagtctgtgccgaaactcccgatcccaacatgctgcgtacagacacacgagcgaaaacggttcgccctcccctgggtatccaaggatgaggacgtgagtatgaaagtggtccccgggcccagtatccattccgtcgtgtgacagacaggctaactgaccatcccttctccaataccaaaacattcttttttgttgttggggttggttgc

SEQ ID NO: 432163 - DNA, 628 bp, Homo Sapiens
ctcataaggaagagctataaaaaggtggcgtatatattgacactactaaaacagatctgccaaagagcctgttgaatttttctttgtaatgcaactttttggagccaactgtaagtgtcaaggctaaggatgaatggatagctgcaggggttggtgggggaaggttcttacggtgtcatcacaccacttttgacacttcaacactgaaggagtgctactagggtgagtttgattagaatgattctagcagagtgtcaaaaaaagaaataatacatagtcaatgaattgatacattgattaatagtaaaaagtagaatcaagccatgtaccatttttgtagagagagtggtgggcagatcagttgtcaacatggcatccagtagtagcaccaaactggtcgtgtagaactcagtgtctgacctgtaattggttgctattccaggtcttctgttacccttcttggggaagcaccagaggacctacaggaacatcagtattccttagaggagggattgatgtgctcaggcatagatcctgagtgacaagggtggaagtagcttgggaaagttacttaacctctccaaacatcagtcttcttatctatgaaatggttatggttataacagct

SEQ ID NO: 432164 - DNA, 684 bp, Homo Sapiens
ttttttttaaatgtaataagaagtttattggatttctaaatataataaagtagttgcaactcttttacagaaaaaagaaatataatttccatattcattcttatagagcattgaaaaaacataattggtagagaaaactgatagaaggtaaatagaaaaacaggttttaatatagtcagataatgcataaacacaaaagaaaatacctaaatcacttgcttataacagattttattctcttattttcatactgaactatgtgtgctattttggatacatcagtgatggtttgtaatgtagtgaataaatgcaatttgctaagaatacaagaaaaaagagaaacctatattttaggaataccatggctctgtcagtatcacacatatgaaaatagacatattctttatatgtttttgtgtgcctttccctaagtcagggaatgttattcagactagcagctcatcacggtggggctatgattgtgcttagctagtaggaagtgctgctcttagtagacacatttagcatagagaaaacccggcttctcaccatctccgccttatctatccacttgtaaacaccatttaacctttacataagactatcttccatggtcataatcatcagattgaaactcagagcaaagccatgctgtgtttcttcccagtccatttgtttccaagg

SEQ ID NO: 432165 - DNA, 2086 bp, Homo Sapiens
  misc_feature (102)..(249): n is a, c, g, or t
  misc_feature (2004)..(2040): n is a, c, g, or t
caattggcaaaactttccaaccttcccggggttttccaaagtgatttttccttgccctccaggctttcccgagtaagcctgggaattaccagggcgccccgnnnnnnnnnnnnnnnnnnnnnnnnnnnnnnnnnnnnnnnnnnnnnnnnnnnnnnnnnnnnnnnnnnnnnnnnnnnnnnnnnnnnnnnnnnnnnnnnnnnnnnnnnnnnnnnnnnnnnnnnnnnnnnnnnnnnnnnnnnnnnnnnnnnngcctatatcaatatatcttaaaatttctaagccactatctttaataaacatgtgaattattaatctcatctgctactaataatgactataagaaagaaatctggagttatttaaattaatatgaatgaaaaatggaacagggaattcaggttaaagaaaaaagctcagtgataaaatattcaataacactaaaatatagaatatatattaaatttaaataacgtcagccaactttcctcaaaatatgtcatatagacactaaaataactgtaagtcagcacatttatatagtgattatatactgcgatgacattcagcattctcttaaaagggcaaatttcaaatttgaaacgactttcatttttctctaggtataatttctagatacataacaatgcttgcattgagaatcttgcaaaaattaaaaaccctgtatcatcatcaaatgagagaatttatcagtgaatgggagaaaacatactattcactgagaaaatagaatggcaaagatacacagataaaagagaaacaagaagaatattaaacagtattttacagttcctagtgttagatggtagaatgccaggaccttttgtgatactgcccatcttgtcaaggacaggacatgtggaagaagagaagccatttaagtttcattaattaaaacgatgagaatgtagccaccgattacatttcacactaaagtctaactttgtctaaatacagctaattctactaaggccatattaaatagtttgatcaagggccactatttcctctttaaactaggatttctttattccatagtgaccctaggtgactataatattttattcatctattttcagaaaactgataaaaaatgtcttcataagaacacagagatactctctatctctaaaaagaaactgtacaattatatattagctacagaaataatcccagtgctttagaaaacaaaggccactttctgtagagagctggcatacactgtgatttttttgaccaatttaatatttttcaggactaaatatcattttaatctaacaatttaaatgtaataattgcatttcacatggcaggaaaactcaccaatttgtaaaagcaccacattctcaaatagctatggtaagatcaaatactcatcaaggtcaaagattgaatatatctccctaagcatttactttgctttatgaaatttgattttcaatgaaaatgaaatgttttcttatctaatttcctttagaaatacttaattatgttctttagttctcaggtaatgaccttttaacatgaaatttaaatatgaaggctattctggtaattcattcattttcaatatgccagttcagggaaaatgtctgcatttccaggacttttgccagagttgtagattttaaagttaaaaagtacaaagacttgttgtattctagaaaactcattgcttctgagttggtgcatcacaatatggcacattttctacaagaaggtctttcctagggaccagttctcttctattttcttagaagaagtttcacttttattatttttgaattcttcatttatctttattctggctgcttctaatgctctggcatcatttttaaaaacttgttgtctggtcctgtgcagtgttttaaagagctgtaaaaccttgactgcccgtcccatggctctcctcaccgcggccgctacctccagagcagtcgagagtccgctctcgacgaattcgagctcggccgatttggcctgatnnnnnnnnnnnnnnnnnnnnnnnnnnnnnnnnnnnnncgccgccccgcgtgaactccagtcgccctatagtgagtgtatcatc

SEQ ID NO: 432166 - DNA, 887 bp, Homo Sapiens
tggcatacactgtgatttttttgaccaagtgaagatttgtcaggactaaatatcatggtaatctaacaattgaaatgtaataatggcatttcacatggcaggaaaactcacccaatttgtaaaagcaccacattctcaaatagctatggtaagatcaaatactcatcaaggtcaaagattgaatatatctccctaagcatttactttgctttatgaaatttgattttcaatgaaaacgaaatgttttcttatctaatttcctttagaaatacttaattatgttctttagttctcagtaatgaccttttaacatgaaatttaaatatgaagctattctgtaattcattcattttcaatatgccagttcagggaaaatgtctgcatttccaggacttttgccagagttgtagattttaaagttaaaaagtacaaagacttgttgtattctagaaaactcattgcttctgagttggtgcatcacaatatggcacattttctacaagaaggtctttcctagggaccagtttcagtgtattgtggtctgtgtgaataccttgtataacagatgttctgagtaataattcaacatcagaacctattttcattagctcttctattttcttagaagaagtttcacttttattatttttgaattcttcatttatctttattctggctgcttctaatgctctggcatcatttttaaaaacttgttgtctggtcctgtgcagtgttttaaagagctgtaaaaccttgactgcccgtcccatggctctcctcaccgcggccgctacctccagagcagtcgagtagccccgcctctcagcaaccaatcaaagactggactccgctctcgacgaattcgagctcggccgatttggcctgat

SEQ ID NO: 432167 - DNA, 3225 bp, Homo Sapiens
  misc_feature (285)..(297): n is a, c, g, or t
  misc_feature (463)..(472): n is a, c, g, or t
  misc_feature (643)..(735): n is a, c, g, or t
  misc_feature (1091)..(1091): n is a, c, g, or t
tgtttgtgtcatagccgacacagggggggtggaaaatattatttattcgtttacgcatgaagctaccctgaggatccagtgtgtttgtagttattatacgcacggcgggggcagaggaagatatggatgtggtgtgctttatacagtacacaccgcctggtggttgaaggggaaaggtttttcccccacaacaggggggggcgagaagatatagtggtgcgaaataagggaattccccccacgccactttttttggtgaagggtataggggacccaccgagggannnnnnnnnnnnnaaaatgatggtaaaataataggaagggccgcccccgcagggaaacacccccccgcgtgtgaggggggacttccccgggaaagggaggcccctgaagagaggcccccctttttggggggattttgttatcaagaaacaggccctgggtgtacccgccccggggcggnnnnnnnnnnattggggggggaagtcccaaccgccgttgttccaatagcccgaggtttttttcttgggagaaacgattggggcccaagggcccctttaccccttgggggggccggggcccccaaaaggaaaggtttttgaaaaatttttttaagaggcccgaggggggccgcccagggttnnnnnnnnnnnnnnnnnnnnnnnnnnnnnnnnnnnnnnnnnnnnnnnnnnnnnnnnnnnnnnnnnnnnnnnnnnnnnnnnnnnnnnnnnnnnntttttaggattacacactttaatctgattgacactgaggaagtagggaggacatgaaagaaatttagttttagctctgctttatgcataaccagatgctccttttctaaaaagtatattgaggttttaaaaaacacatttatcagaatacttcaggaaaccatactatgtgtaatccaggaaatacactatttgcagaataggaaaatcatcactggcaacaaaagattaaaacaaaaataaagcaccagggttctgagcagttctaaggtgagtatatcagcagaaatagtgtaaatgctcttgactggttgctatgcaaacatgctaatgaggactagtccatgtcttataatnttataattaaacatgtttctttggaaaaatggcaatattgagtggaagagaagctgtccttttagacacccagcttattggcctgggtgagaacaactttgagaactggcatgaaagcagaggtctcactgaagttgctggtgctaactatgtgggtatgcatggtcaatccttctgagtagtttcgagtttcaatgctccttgcaatgttgtgtaaaccactggtgattgttggtgaaagtgtctgttccctaagtttatcatacagaaactccaaacgtttgctggcatcatctagcttcctcttggtttgagggtctgttgctgaagaaaggcagcgctgaataagatcctcaaatgtggtctttagaatgaggtgctcatctggaataggtttcttggtaattttttttgttggcaaagactgcacatgctggaaggtatttccaataggagcccctggggcaccttcaatattgggctttgaaaaagatggtggcatgcctgtttgaccaagaggttgctgtacgccatggaagggctggccacctggaagatgtggctgtgggaatgaagactggcttgacagtggtactggagctgaaggctgttgctgcagcatttgtgactgggggtcacccaacgggttcatgattggtgatgtgatgggaacaggaggcatgaagttttcaggcatcttcttctttttgggtactctgttcaaagctggagggtcattccaaccattctgaggacctgttttccaggagcatgcaagctgacctgttgttccaggaggcagtgcataagctgaagatgatggtggagctcctggtccgccatgctggaaggatgctccagaggaagggggatggagggaaagaagtagcagggctggaggtaggtgaagaggcctggtgctgtgctgcgtacagctgagactgcccagtataggaagaagcagaagatatgtaaggggtgttagggtaagcgtttgaagtaggaggagcaacaggctgctgaggtcgatacattgctgacccccctgttccgaagggatacggctgggctggttgataaggctgtggctgtggataaggtggtacctgggtgtgcatatgacctggagatgtgggaagctgaccagcagcatttggattaacatttccatgcattatgaaacccggaggtggaggattttctccatggggataatattgttgagtttgaactcttggcatctggtggtggccagcaactggtccaggcctgcccttggggagctgctgtttctcgtacggaattttaggtgattcatgtcctgctacaggctctccttgtgctctacaaagtctgtcacgaagctgcatgatatttggctggttggtgttgtcaggaagaaaagccaaggctgcagcaatactgccctgagctgccaacaaattggcatactgactcatcttcgcagccaagagaactcctacagtactagtgtccatggcttgagtgagttgcacagcttttcgcaggatgacaactttctcaatcagatcctgaagtgacaaagggtggcttccatcttgagctttagtccaacatgcaactaatttctctacattccctgcacaaatatagcagagacatgcttgagtctgcaggaggctatctccttcattttcaagcctggttcccaaaagatcacaaagggctgaaaattcatccggctttgcataagtcaatactgcagctaaagcctctctccaatttttaagatcacaagactcaacaatctctttccagttcttcatcaccactgcagtgatgagcctggtaattttgctttgggattttgcgaagtattttttctgggttcgagccaagagttcttgtccacctgctatggccaatataatggcatcggccatgcggttatcatgtaaacaaaggtcaacagcactctcaaaattgcccgtcagcaaagcctgagtaattaaaccatcaatgtccccactgacagagatattaaatgttcctccagatgagggtagaaattcagattcttctttttcctctttaatgtgctctcccaagagctgctcttcagcagcagggctctcctccccatcactctgcc

SEQ ID NO: 432168 - DNA, 542 bp, Homo Sapiens
  misc_feature (468)..(476): n is a, c, g, or t
gactcaacaatctctttccagttcttcatcaccactgcagtgatgagcctggtaattttgctttgggattttgcgaagtattttttcttgggttcgagccaagagttcttgtccacctgctatggccaatataatggcatcggccatgcggttatcatgtaaacaaaggtcaacagcactctcaaaattgcccgtcagcaaagcctgagtaattaaaccatcaatgtccccactgacagagatattaaatgttcctccagatgagggtagaaattcagattcttctttttcctctttaatgtgcacattggctccatccactttgttcaaggccaaagcaatcttctttcctagatcttcttttctgtatcctagaagttcaaggtattttccacgagaatcatcctcaaagtttaccttcaaaaaggaccacacatttttctcaaattcagtctgagaagcatcaannnnnnnnnggcaataattgataaatccttgtgactgcacagcctgctgaagttggtctgatcggctgaggaacc

SEQ ID NO: 432169 - DNA, 2043 bp, Homo Sapiens
  misc_feature (158)..(158): n is a, c, g, or t
  misc_feature (377)..(377): n is a, c, g, or t
  misc_feature (408)..(408): n is a, c, g, or t
  misc_feature (505)..(564): n is a, c, g, or t
  misc_feature (626)..(635): n is a, c, g, or t
acgtcgtactacacctgaacgcggagggcgcggagtgcacgagcaggcgaggcaacgtaattaagcgctcgatgatgtggcgtaatgctcagaggagtaaatttatagatatgggacggcggtgcgagagttgacgcgaggaccttagtcgtgaggancgtgatccacggccgcgttgtgaaagtgggggcgcgagatacactggacggcgtggagagaggatcgctcgctgttgccacggcgatctaggagtggccggaatcacgttacacgtaggtgatagagtcgcgcgggttgcagtggggtcggttcggtacgaggtgcgcagaagaaggaggcggatgggtgggcgcgcggggtgggtgcttcatatctantttatgttggattagatgggagtagaacatnaggggatgtagataagcaatatgagtaggtgcgtcaaagtcggtttgtgtggagaggttttcacggggccgacagcggcttgtaggcggcgagagannnnnnnnnnnnnnnnnnnnnnnnnnnnnnnnnnnnnnnnnnnnnnnnnnnnnnnnnnnnctgcatacaactgggcgcataagggccataggaggaatgtgtccaggggagggtggagggtnnnnnnnnnnccacggcggcgtctggtggtgggagcggagccgagcttgactgcggcgtttgtttgtgcgaggggtaaggctggggtgagtagagacaaggcgcacacataatagggagatatatggcgtagtgtagggaaggggtcctctggtcgtcccgttagccgttccaaaggatgcgcagcgagatgagaaacagcaggttgatcgaggttcggtctgagacccatctgtgattcctcgctgtatagaataggccgttattcgcccgtcgaacgaagcagctgtataagtcagcaggatttcggggactccgctgaatatcgaagcaccaccgtgtgttggtgtggaagttccatatcacacctctcctgtgtttggattggagcagagaattttagcttcttttccacagctcagtaacaattcaggatctgccatgctccaagcaattgccaaaatccccctggcatggttttccaggacacgaagtggagaggaagcaaatcgaagatcccacatctggatcactggtaaccggtcatcctcggaggcaaggacctatctgagtagcaaacatcaggatgccatgccaaccccagaacaatgcattctgttactatggtcactgactttgatgattggctcatttttcctaagatcccatacagtggcccggccactgggactggctgatgctaaaatatgctgaacttgtctgttccatgcaatgcagctgatatcttctggcggctgtgttttggctcctggtgtcattggggttgcaaaattatttagatcccatatgtagatttcagattcattagcaccagaagctaccagattagtctggaaaatgttcacatccaaggctctcactgggccagtatgcttgtcattctgggcaatcacaacttccttgtctccagctataattttagaaggatcatagagaataatatttccattttcaccacctgcaatcagaactccagagacatctcctttggaatccattttataaggcccccaaatcaacttgtggtacctgtgagaagaggagaatgtggcacaagatttcatatccaaggatggatcagagaggtctaattcaaatatctcaagggaagcattcgtactaaatgttgcatccaattgctgagcagatgttcctgttgctaggtaaatggggtgattctgggcagggctccatgcctgcatggctgtacgatctacttcctttaacttcatcctgctggcgaggaccttcggcagccggatcctgcgttagtgcagcgctcgtcggactctcccagcattcgccgccgcccctcctccccggccagggccacctccacgttccgttccaacgtggcagccgcagccgcagccacgccctgcgcccaacacttccgct

SEQ ID NO: 432170 - DNA, 635 bp, Homo Sapiens
  misc_feature (267)..(302): n is a, c, g, or t
ttttttttgtgatttgtagattttaaaaagtttctaataaaatttgtcatttaagtttatttacaatataccctgccacgtatgtaaatgcagttaaatataaagcacatctcttaccacaaagggctgaaaattcatccggctttgcataagtcaatactgcagctaaagcctctctccaatttttaagatcacaagactcaacaatctctttccagttcttcatcaccactgcagtgatgagcttgagaaacgaaaacaaaggannnnnnnnnnnnnnnnnnnnnnnnnnnnnnnnnnnnttctgactaattaattgtgtcaagtatttcatgccaaatgcagcagcaaaatgaagtatatttttgaatcaaatgacataataatggtattattgttcctcaagaaacaacagcaacaacaaaaacaactgacaacatatttcataaagtgctgagaaggaaaaatataaggtgctatcagaacctttaatagaaaggtgtgacctggtcagatggatcaggaaaaactgcccaagcatgtagacttttgacacgtgatctgaaggacaagcaggaattaacttcatcaagaaggaaaaagccttccaggccaagggaacgacagatgcaaag

SEQ ID NO: 432171 - DNA, 771 bp, Homo Sapiens
  misc_feature (63)..(63): n is a, c, g, or t
ataatgcccctctgcagctttgtcttcatgcccttcgtattccctgctggatagttgcctgtnagcagtctctagtcgatctcggaggtctctgttgaaatcatgaagtcttctaatctcgccttccaatttgtttctcatggccttgtccagcgattctcgcttggtggtagacttgaccagactttcataggcttccgaaattctctgaagttctttttcaaacttgtggagcttgtcggcattgtcgtagtaaccctgaagttcctggtgaagcacccggttctcctctgttaatatctccaccatttgctgggctcgctccacaatcgcaaaggcatctggaccaagctgctggctgggggaggcggcaggcgggggctgtggagcacccagggccatcgggagtggaagcggcagggagacagagtgcagtggcccgctggcggaagaggtctgggaggacatggggctgtgctgctgcatggttgatgggaacggaagttggcatgggcggctcgttaccccatactcagggggtggctggtaccgcagacggccacatctgttctcacaggctgaggagcagggtagggcttgaccatctcgtggagcatcccggggtgctggtcaccataaaaaagtccgtgctcctgggtcttgctgactggggacatcatttgcttggtcttgaaggggtactcaggtggaggaccccgagggtccagcactttacctgcaggctgggcaggggagggcccccctcctaca

SEQ ID NO: 432172 - DNA, 1076 bp, Homo Sapiens
atgttttgtttgttttttaatcattaagagtttttgtacaaaaggtgatggttttttttcttcattttaaaacaccagggtgtgggggagggatgcaaacaaataacaaaaaagatgcttttgtaacattattttccctgtttagaaagaaaaaaatcactccaatagtattgaaaagtccaaagatgaaatagtttcattttcttttcctaaggcttataaaaggccccctgcctgttgattccatccctcttttgtgtccagtggagccatgttactcttcagtggcccaggggttcactattaaagaaagatcagtccaggtttctgggcacatggcctaaacaggaagatggaagcatcagaggattaaaaacctttccccacagaaatgtgggcaagaagacacttccctgagccagcagaagggacaggtgcagcagcattccacacccagcgcagaggacagcagagccctcgatgtcccacttctgcttccgttccctttctagaagattgaaaaaaaggtcaaaaccacatgcctgtggagaaagtgcgacatgtttagaaatactggtagggaaccaggagtaagaaaagctttaccagcttttactacaaatggatgaaagacatcaggatcccaccaccgcaaggtaaagtgacttcccttttctggaacccctgtggcacaggagtaccaattttcctttccaacgaactggatttctggataggcattttggctgtatgtggacagataagaccacagtccttagcccaatcccagctatacagtcaccccaatttccacaaatgatgtgatggtaccgtataatcctgtaattgggaaatttcacatttttcctgtcctaatctcagaggtgggagaagcaagtctagaacatctccaggctcagactaaacgagagtacttggactgcaaccaagtaatcactgcaaagtagttccaagcagcaagaaataccagattctcatggaggctactatagggtacagaataacaacatgaaagcaatcaaccctgtataaataatgtttctagccattttttt

SEQ ID NO: 432173 - DNA, 428 bp, Homo Sapiens
  misc_feature (31)..(32): n is a, c, g, or t
  misc_feature (44)..(45): n is a, c, g, or t
  misc_feature (52)..(52): n is a, c, g, or t
  misc_feature (56)..(57): n is a, c, g, or t
  misc_feature (249)..(275): n is a, c, g, or t
gttgatggagaatgttttatttatgtaattnncatctgtagagnngcttctntccnnatctttatatttgtctccctcttctcattgaactgcaaaattcctgaagggatgggacctgggatgtttaatgcaaaccgtacattctcagcagagcacaagtatcaaagggacattggatatattttaataatgatctaacacaagcaaaaataaccactgaaaatataaaactcaacaagagacataagnnnnnnnnnnnnnnnnnnnnnnnnnnnttcttattttagaatgatgctatatgtaacttgtaaaatatttaagtttttatacatgagattatattggtttccttatttaaagaaaaaaattacaattaagaatggaaattaaaatgtaaaaccaagataaatatttttggcttttggact

SEQ ID NO: 432174 - DNA, 696 bp, Homo Sapiens
  misc_feature (76)..(76): n is a, c, g, or t
  misc_feature (585)..(585): n is a, c, g, or t
  misc_feature (589)..(589): n is a, c, g, or t
  misc_feature (620)..(620): n is a, c, g, or t
acagagtgataactttatgacagcaacacgtaatggctgctgaggacgagggaaggctgccagggtctgcccctgnaaggcgtcggcggtgaggtgcggggacgttccaagaaggggctaagccgagagcggacctgaaggagcaggcactcttcgggcaggctgccataggtaggggaaagatgaggacaccccaagcgccgagtaccagtttcagcaaaggtgcagagctgtggtataggggtgaggcagcagatgaggctggagaagtgggtagggccacctaagctttgtaaaccctgccaaggagctctgtcccaaagaccgttggagaacatagaaggattttgaggaaaggaagcttctggtctgagattccaagaggcgagtttgggggagcagcacgcggggtgtgagttcaggcaggaggatctttcatctcagttccctcgcagtgctcacctgctccaggggcgtctgacctcgggtctcgccctccctcccaggtgggtgttggggggaaaaagtctcgcctaggggaaagagagccctcttttatcgctgtccacaaccccagcggtcctncctnccaaccaggagctctaccatctctctccccnggggagaaatggagagacccccatgctccactcctccctcactcgctaagataggcagccctcccagaatccgtgt

SEQ ID NO: 432175 - DNA, 491 bp, Homo Sapiens
  misc_feature (67)..(115): n is a, c, g, or t
gcttaccgcaggcagtagcaggtacagagtaagttctcaataaatatctctataaacaatagaagtnnnnnnnnnnnnnnnnnnnnnnnnnnnnnnnnnnnnnnnnnnnnnnnnnattctttcaatcattcttcctatgatctggtttctagaattctcactatattaatcaccctcttatggaagctatcttgtttactcaacattcttcttaacacgtagttataacaattcaatactatgtggtgtatggagattttgctttatttgaagataattattttaaggaagtctaaacagacaagcgtctgctgggaaaaagctagtctacctgcttatataaagagctggcacttacaaaacccattaactttctcaaaataccaccctttaaacattggggaatgtatggttaagagaacaaaaataacagcaaataaggagtgatcagccaggtaagagaagaaccaggatagtgcagtattatgatg

SEQ ID NO: 432176 - DNA, 847 bp, Homo Sapiens
gccatttgcatgtcatctgtattgtcacatgaaatgcacatccaaaacgggtgacttggaaacgacctattaggtcacacggagtccggcccctgggggcaaagcctcatcgatgcccacgggcggtggccagcactttcctcgggctgtggcgtgtgcacccggcctccccagcggagagtcagctcacaccccaggccctttagctctctggcagcagctcccaaaacgcacttgaggaaccaataattccttgggggttaatagctgttccccaagaaaagggttctgtggtcaaataagtttagaaaacatgggttaaagaaggtttagcaagaagcttttctatagggcttgtcagagcctttacggcaataacggcctttgtgaatgtccaacttggggacagagtgtgcagcacttccgaaagttattgaaccacaaaacccctttcccacaaaagcatctcgcaggctggtgtcccatgggcacccgttggaaagtgctgccctaagctgtcgatgaccgctaatggcaatggcacctgcatcaggcagtaggttgggggcattttggcaggcgtcgtgctgtggcgtgatgggcacagccaagaactcaacagtcatgatgatgaaaggacaagacaagactcggcccctcccaccatcctgatttttgctgttcccagagcagaagctaaatagggctgtcccatgggtgggtcctggctgcccagagaggagacttggagtccagcaagggcagagctggcactgcaaacacgcttgtctcggagggtgctggttcgcagctcagcaggagggagatgagtggggcgctctgactc

SEQ ID NO: 432177 - DNA, 551 bp, Homo Sapiens
  misc_feature (126)..(134): n is a, c, g, or t
tttcagatatcaaataatattttaatttctgaatactttcaattttccttggaatataacacacaaagactcgaccaaacagttcagttattataacttttacagtatacagaaatgttgcacttnnnnnnnnnccttcggtttttttaaaacacaaactgtaaactctaagatactgaatcaatcacgttacctataagtgccaacagtgttatttttgtcatgctgatttcaatggtattttttaaaaagggaaaatatcaacaattataatacaaagggtttgcaaatatacaaacagatataggattttcataacaattcaagaactaagcggggcccaattcaaattacaaaagttcactttttattcaatacctcagcatgtgtcttggacacattccttggctgccaataaattccacagttcattctctttctttaaatattttttaaaagctaggtttgtcatggtttcttttggggaggggcagggtaggggaagttaagtgttatatgtggttcctccagttctctaattaaagtgctcg

SEQ ID NO: 432178 - DNA, 2564 bp, Homo Sapiens
  misc_feature (258)..(298): n is a, c, g, or t
  misc_feature (468)..(527): n is a, c, g, or t
tgatgttacctgaggagtgtgcggggtgatatggcgttgtggttcgggttggcgagtgcgggcggtgaaacatcgtgctggctttgacgcgggggagggctatttgggagggaaggaagtcctgtgggagtctgtgagtacgttaaggtataagtagcgaggtatgacacatcggtggggggctggggcgccttccgtagggttagcggcgacgccggcccaaggaaaggggccttcagggtttgttcgaattatacnnnnnnnnnnnnnnnnnnnnnnnnnnnnnnnnnnnnnnnnnaaagggactatgcagtggggagggaggtttgaagagggagggtctatggacccaggtcagtttgacatgttccgggacccagtatgggtatcggctgtatggctatttaaattgatcaaaacctaaaaggtagtgtttagccatatttcagatgttctgtagctaccttnnnnnnnnnnnnnnnnnnnnnnnnnnnnnnnnnnnnnnnnnnnnnnnnnnnnnnnnnnnnatagtgtgtagagaacatatggttctcaatctggtggaaaataagacagtttaaaggggtctcatttattgtcactgttccaaatgtacaaaaaaaattagaaaatacccccaactcaaccccacccccacaacatttcccccaacacaaataatttttcccaaaaccacaaacataaactggtcctggtatttccataaacagtgcagctaagaaacagtttagagaaaatttaacaggattcagattatatccattctgtcctctcggccctgagaggtaataattcccatatgggtcctagtcctccccaatggttttcccatctctgatggaagagtccttttacaaagtggtgtttggctactgctttagagatcctcctgtgccttcttcttcttcttgggtttttcttcttgaattacaggggggtttgtagcttctctttgtagatagctaataaaatcacttaattcacggccaccttcatatttctttggatttagcttcttgttggctggagagaagtatatggtaggaaaacctctgacttcatatggagaaggcacatcattggctgtggcatccatcttggctatgacgatatttgggtctttgctgagcttctcgccaagttctttatacttgggctccaggttcttacagtgaccacaccaaggggcataaaattcaatcagcacatctttattttcattattcactatttcatcaaaattctctgctaccactaccttcacaggcccatcattgctctctgggataggttcagacttcaggtatctcttcagattgccatcaaagtaatcctgcaggaacctctccagagccttcccatcacgcgagaactcctcctgcatgacaaacttctctcctttagcagttctgatagcaacaacaggaatctctccagcagtgctctccaagccaaaatcagaaagttcatggctaaaggttttgcggctagctacagcaaagttgagtttgtgcccagcatccaggaatttctttgccaccatcattaccctgtttctccagtagttggaacctttagcgttcttttcatagtccacatcatagtaagcaataagtaagtccttgccctgtatcaaatctttattgtcttctgtcatgtgagggcagataccaaaaatgttttcctggataaactttttaattttgccactggtcattttttgctctgtatatgccacagtcttgtcctcaaacttgttagtgagatgtgaaggacgaaataagatgataccctctccattatcatcatactcgttcaccagagactcaacattcgtatgtgcaaatcggtagttatccctcaagttgctggctgcttttaggaactcggagtgagcctcactgaatgaatcatcgaaaaaacctactatagaggcatctttatcactaatgaatttcttaaattcttcctcagtcctgagaggcactgaagctggtcctgcctgcttcttcaagtggctgacaattccatcagcagtcctaggtccatcataagcacctgcttcttcaccatctctaaatatcttcagggttggatatccactgactccatatttattacaggtgttagtgttggcagtgcaatcaacctttgctaatgggactattccttttaatctggtagctgcagcttcatactcaggtgcaagtctcttgcagtgtccacaccagggggcgaagaactcgacgagcatgaggcccgcagagcccgtgtcggagatgcgactctcgaagttgtcgtccgtgagttctagcacgtcggaggcagcggcgaggcgggccgcggcaagaagcagcgccacacccgggaacagcgctaggcggcggaggcgcatggcggcgaggtggggtggggacggccggaagggtcgcggctcggctgggactgcggaggtcgggcgcgcgaccactaacccgctgcttgcgctcgcgcgtctggcccaggcggacctgcagccggaggtcccaaccgcccaaacccgg

SEQ ID NO: 432179 - DNA, 968 bp, Homo Sapiens
  misc_feature (167)..(218): n is a, c, g, or t
  misc_feature (583)..(599): n is a, c, g, or t
  misc_feature (767)..(812): n is a, c, g, or t
aacaaaagcagcatctacattttttttgataaagactttttatgccaggaatggattaattaccaacaaaatttatactaatcaggctgatgtcaatctatttttgtaatgtatcattaacaaatttattttggaaaagataaaaatattgccccttgataataaannnnnnnnnnnnnnnnnnnnnnnnnnnnnnnnnnnnnnnnnnnnnnnnnnnngatattctaagacaaaaaaatggttaatcttcagattaataaattaggtcattataataataaattaattttttttaaagttcagcaacctctgtccaagtatttacaacaatacttgaaagttcctttacaaaacagaacacattttcttttcacgttaagcatactgggtatctgtgtctttcacaacaagcatttttaaaagaaaactcaatgcacaaatgggttaattagtataaaagtgctaagggctgtttgaaaagttaccactatagtatacagtcagttatatttgaggcatactacaacaaacttccagcttattgtggacaatattccagtagttgtttcaaaccattgtttgnnnnnnnnnnnnnnnnntccaggagctgattagtgatgcagataagaactgccatcaatgtctctggccagtgagcaaattgaaaaccaactgaaagcaaatccaaatgaggaagattttaataaaggaatacccttctccatagcaggtgcaatgctgactgctcaaggcgtgcgtgcgcgcgnnnnnnnnnnnnnnnnnnnnnnnnnnnnnnnnnnnnnnnnnnnnnntctttccaattaaactgcaggtagaatgagattttgtgttattcaaaaaatttgtaagtgatcaaaagcactgctatggaatgcctgtttatctgcctttgttctggttaaaatctcataaaaatacattcaacaggaaaacataaattgtatgtg

SEQ ID NO: 432180 - DNA, 487 bp, Homo Sapiens
  misc_feature (456)..(456): n is a, c, g, or t
  misc_feature (469)..(469): n is a, c, g, or t
attttgtatttttttattgatatatcatagttgtacaaacatttggagtacatgtgatactttgatacatgtgtgtgatatacaatgatcaaatcagggtaatggggatatccatcatctaaaacatttatcttttctttatgttgggaacattgcaattcttctcttctagttattttgaaatacacaataaattattgttaactacaatttctctaatatactatccaatattagaacttactccttctatcaattgtatttttttacctatcaaccaacttctcttcatttccccccaatcctatctactttaacagtggtttttgaagatttaaatgaagcagactgcatgaaagtacctgcgtcaggattttgcacataaacagttctttgggaaatactttggaatcaacgaatgaatggtacgaatttattctaactgggcaggaaacntatgcagatttcnagctggtaaaggttttgg

SEQ ID NO: 432181 - DNA, 727 bp, Homo Sapiens
  misc_feature (636)..(636): n is a, c, g, or t
aaggatttacttttcttaacaagtgaacaatttgcttctaagcgtcaatgaaaggcaacacctccctctaatggccaaaggaagagagtggcagtaagctggcttttccaatgtgtcacacaatccttcatgccattaagttctccttgttggaaaagaaattaggttgttttgataacttagaaaagttagttttagacaacagtgactttcagctacaaatacaaaatcaaatccatgtatataaggcttctgtaatcgatgtcttagaggaacatctgctcattttctccaagccccagtcctataaatcaaggcaagtcaagtaattaagcttcaactattttggcagctttgcaattaaaatgaacaaagcactatatctatccttccatatactgtatatattatagttctatcttgttacaccaaatctcacatgcagagagactaaaaatatccattttggtttcaggtataattaaaagccaataagggtcttgcatactattctttttcccctcccccaagtgaattctccatcagatttactactccctgactcaattatatttacctggaatatctgaatgcagggatttatcctctcagaaaagaatatgtttacctggggtntaaacatactgtacacgaatatacataactacaatacagcactgctgttttttaacagctccccttacacctcatcagtacctcacaaccg

SEQ ID NO: 432182 - DNA, 1792 bp, Homo Sapiens
  misc_feature (218)..(218): n is a, c, g, or t
  misc_feature (231)..(231): n is a, c, g, or t
tttttttccagggtagactgtctttgaattgtttcttctttttctttgaccacttttcttaatgtgtgaacttgagtatttgcatctttgtagatttcccgaacgacatccagctccttgttcctctgcatgagttgcttttccagttccacaatcttggacatggcttcattctctgtgtcttgcagtttttcagataaatgagaaatgttttcttnccaggttcttccnaccctctccaaggcagcattcttagtttcagcatcttccagtagagctcctacatcaaaaacattgtccaggtaagcctggatctggacttgaagcttgtcactctcagtgtgtttcagcttgtccaagtattcgtccaggcctaatttggtaaattcatactgcaggtgaactctgaaattcatatcttctactgaatggactacaatattaataaactgcatagaagccaccataaaatctatgttattgtcttcattcctgaaatgttccatcaacttcctccaagcgctgtttttctccacaaacctctttaaagttatcaaatgctgataaaatgatttcatgcccgcctctgacaagacaaacggctgccaacagttctaagacaagggcttttgttctgggattcttgttgttcaggcttagtgcaatctcattgacagcgtgtggatgagacatgaccatgttgaaaccatactgataattcatgatggcacgtaaacacatgatacagacatgcacatcatctttcttaactcactaatcttgaatttttcagagtttttctgcttgggcaatgtattatatcgcagtgcagaatgtcttccagaggcgggagaccctgttgcccacaggtgagggcaggttgctccctctgtgcaggtcctcgatggacctactccagggctttgatttgtccaccgagctctccacagtactctccacactttcaaagtcaaaagttaccgcgtactgtgcaaatgagagatattccactagaacatcaagacctttgttttcttcattcagaaattctctgacccatccaatgtggttagttctcaaagaaatttccagttctcttagcacttgtgtagattcttgaacacgccgtctgaaatttcttcctggttaacagctggatcccagatagccctttgagcttttgaaatgtatgtaatggggaggattcttcacctggaatcgttcctgatcacaaatcagttcccattttttctcattatcatactgcggcagtaacctggctttgtcaggaggtaggttcatagcattcagcacgatggcaaatcgctcctccagttcacctggctctggcatcggcagcttcaaaggcacgttgtgcgccctgaaatcggtctgctgcgaatccatgctccctgcgttgcccatgtcggcggcgcgccggggccgggggctgctccgggcccctagcgtgcgcgtcggaaatcagaacagctcccggcggtcggctgccgcccgcaggcgcgacctgcccggctccccgccctccgccgcgcccaggcgggtgtgcggcgcgcaccgctccctagcagcgctccaagccgagccgccccccggcctccctcatgctctccgccgccccagcgcggccccggcctcttttcctcgggaggggtagtcggggcgctgggcgcctatgtgcatggtgctccgctggcacaccgccccctgccagagatcgcggcccccggcgcgtggtccctcctactcggccttctgccgggcccgcggccgc

SEQ ID NO: 432183 - DNA, 754 bp, Homo Sapiens
  misc_feature (574)..(638): n is a, c, g, or t
  misc_feature (640)..(683): n is a, c, g, or t
aacaaagttttattagaacacagccatgctcattcttttacttattgtctgtgactactacaaaggcaacttgggcactcaagccaaaaatattactatctggtcctttaaaaaaagtttgctgaccgctattctatatattgaagcttttctctaggcttattctttattgcacctactacttttgtcccttcattgtgtcttcataaagagatgcaaaataaacattttttttgtataatggataaagtattttaaaattttttgttcaaactttaactcaactttgatagcatgtcctccaagaagtttttttctgagcactacttctaactgcttagaactggcttggttattcctttattctctcttagtactaagtgttctgcatttcatctatcatagaggctattaaactgtgctctaatcattggtttgtctatattctttcctacagtagtttttaaactacaggtcataacccactagtgggttatgaaattaggcaattatcagcatttaaaacaagatgaaataaactagaaaatatcataggctgggcacgatgtctcannnnnnnnnnnnnnnnnnnnnnnnnnnnnnnnnnnnnnnnnnnnnnnnnnnnnnnnnnnnnnnnntnnnnnnnnnnnnnnnnnnnnnnnnnnnnnnnnnnnnnnnnnnnntagctgaacatggtggcacatgcctgtggtacaagctacttggaaggctgaggcacactaattgctttagc

SEQ ID NO: 432184 - DNA, 829 bp, Homo Sapiens
gctgatctcgaactcctaggctcaagcaatcctcccaatatgctgggattacaggcatgagccaccacctggcccaagcaagaaattgacactatatagttatttaaggtagtcaggcagtagaaacattgccagaaggatagaaaggaatttggattatatataaggaaaataacaaatcggtgtttttaagactatcactgacatatattagatccttgtattagtccatccattaatattagttctattcgtggtgctaggtagcttgacaggtatgatatgcataagtcatagctctattcttagtgtcataaagtgtagctaatttataagctctaagtaatcagctttatctaatttgagggcattaaaattactgcctagaactttgagaagagaaaaattcagggataagttgaaaggcactggaactgttcatgtccataccagaccggtaaattataagatccagatgttagtgtctagaattagctgtttagaattcagaggggacatatgttttaactttgtcgtgtctgagaaagacttggtgtactgtgatgtttggggaggaggagggggggataatttttttaatgcacttgtatgtgaagacagtttgtatgacataatacaaaacttttaaacaacttgggctttcctttgcttccctatcagtgggtagagtttttggaatcattgcaaaagagttgttttcagaaaaacataaccatgagatgtgatattctggaaaatatgaattcaaaaaatttgagtgcccaccatgaacaagacacccatgtcaagtgctagggagcatgccatg

SEQ ID NO: 432185 - DNA, 1599 bp, Homo Sapiens
tttaatcagtgaaatatttttcccttcgttgcataccagatacccccggtgttgcacgactatttttattctgctaatttatgacaagtgttaaacagaacaaggaattattccaacaagttatgcaacatgttgcttattttcaaattacagtttaatgtctaggtgccagcccttgatatagctatttttgtaagaacatcctcctggactttgggttagttaaatctaaacttatttaaggattaagtaggataacgtgcattgatttgctaaaagaatcaagtaataattacttagctgattcctgagggtggtatgacttctagctgaactcatcttgatcggtaggattttttaaatccatttttgtaaaactatttccaagaaattttaagccctttcacttcagaaagaaaaaagttgttggggctgagcacttaattttcttgagcaggaaggagtttcttccaaacttcaccatctggatactggtgtttctttacagattcctccttcatttctgttgagtagccgggatccttgggaggcatgtaggaagcccgctggatcatcacgggatacttgaaatgctcatgcaggtggtcaacatactcacacaccctattttcaaggcttgcagaaactgatgtgtagtcaaatataatcaggtgctgcaccagttcacagaggccaactccaccagcatgggggcaaacaggaatttcaaactttttggccatcagcaatactgagaggttctcattgacactgcccagtctgcaactgtcaatctggaggaactgcagggccttcgcctgtaggagtttgcttaaatatcactctattgtggcactggttctcctgtggcaaatgccaattcctaatggggaccagtgccttggaaatggtggcgtgccccagaatgtcatcaggggaggttggctcctcaatccacaatggcttgaacttggccagcttggacatccactccaccgcctcaggcacatcccagcgctggttggcatccatcatcaaagtcttttccggtccaatcatgtctcggatgatttggcatcttcgcatgtcatcctggagatcagcacccacctttactttaaacctggtccagccatccttcagcgcctgggcacagagctgcttcaacgtgtcatctgagtaccccagccaggcgcacgatgtcgtgtaagcagggtatccttgtgccagcatttgcttctctctttcttttttaccaatttgacctttctgcagtatttctagggcatcctcctcagtcaggacatcagtgatgtacctgaaatctatgcaggataccagcgtcctgggatccatgtccacaagtaacttccagacaggctttccctcctgcttggcccacaagtcccacaccgcgtttaggacggccgctgtcgccaggtgcaccacgcccttttctggaccaatcatggcgtccgcgccgtggcccccaagcgacgtggggaagcgcacgtcccggaccgagagccggaagatcctgccgcgcaccatggcccctgcgccccgtggccgcggcccccgtgcggtcaggactccgct

SEQ ID NO: 432186 - DNA, 784 bp, Homo Sapiens
ggtccatcatgtctcggatgatttggcatcttcgcatgtcatcctggagatcagcacccaccttactgtgaaccgtggtccagccatccttcagcgcctgggcacagagctgcttcaacgtgtcatcttgagtacccccagccagggcgcacgatgtcgtgtaagcaggggtatccttgtgccagcatttgcttctctctttcttttttaccaatttgacctttctgcagtatttcctagggcatcctcctcagtcaggacatcagtgatgtacctgaaatctatgcaggataccagcgtcctgggatccatgtccacaagtaacttccagacaggctttccctcctgcttggcccacaagtcccacaccgcgtttaggacggccgctgtcgccaggtgcaccacgcccttttctggaccaatccatctgagctgcccatcacttgtgagctgcctatagaagcctctgaagtcaccaacaatgtccttgaggtccttgttgagcacatggtgggcgagggcattcacagcacagacaacaacttcagtgccttttcccagagtgaaggtaattccacaccccttgattccatcttctgcatcagtttctatgacgacataggcagctgagtagtcagggtccgtgtgcatggcgtccgcgccgtggcccccaagcgacgtggggaagcgcacgtcccggaccgagagccggaagatcctgccgcgcaccatggcccctgcgccccgtggccgcggcccccgtgcggtcaggaccggtcccgct

SEQ ID NO: 432187 - DNA, 739 bp, Homo Sapiens
ttgttagaccactcctactatgctgcgagaagacgacagaagggaaagaaggagatagagggggaaggaggaaacagcgcggcttctgctgaagccagtacaagcctggttatctggcttgacccgcccacacggaggcctccccagcgttttctttttcccgagaagagctccagctcgcaggtccttagaacacggcagagcaggagcatctcgggaaccaacggccagctccttggcgctgtccccagccccacaggcctgctgcggccatccgcaaacgggcatttccttgaacttttgagagtgcctttgaccagctgttcgcagctgggaaactccaacttttgaagtcagagcttggagcggcccccgcaagggcgtggctcaaaccctccccagagctgggagccattgcttatgcaagcccgtttcttttgatgtaaagatggaagtcgttactatattttaataatgcaaatacatcttttaaaataagttaacatttcttaccaccagatggatcaggctttgaatttaatcatgtaaatgtttgtaattttatgtcattttgttaaaatgggacgctttcaattggtttccaagaaagatgatacctctgcattttctggtggaaaaggtgtaatacccttaatgagatcaaagtgttaggggaaaaaaattccaaaagtagttacaagctatatcaatgtcaaagtaaatgcacttcatcaaagct

SEQ ID NO: 432188 - DNA, 254 bp, Homo Sapiens
  misc_feature (85)..(85): n is a, c, g, or t
gtctctgtaatttctttaattattcaaacaatagagcacaaagataacagtttcaagtacattgtgatacacgttttgacaggantagatatgcatttagtcatgagggaggctggcagcaaccaccatgcatacattttgcacaaactcttggctccgtcaaccctgaatgagaagtcggcgcctcgtcctggcggggctgggctgcaccctcttgatgccctgtacctagtgtctctaagcagtggtttcct

SEQ ID NO: 432189 - DNA, 899 bp, Homo Sapiens
  misc_feature (90)..(115): n is a, c, g, or t
  misc_feature (159)..(159): n is a, c, g, or t
  misc_feature (292)..(292): n is a, c, g, or t
  misc_feature (337)..(337): n is a, c, g, or t
  misc_feature (483)..(483): n is a, c, g, or t
gatctatcatctggcctttcttttagggatagtttctgctgattttgttttccctttaaatggccatattttcctgtctctttgtaggcnnnnnnnnnnnnnnnnnnnnnnnnnngctgaacactggacatgttaagtctaataatgtggtaactctangaaattagattcttcctccccttgccctaggtttgctgtttttgttatttttatttattgttcttgttttgattgttgcaggctgtttctgtgcagaggatcaacccaagatggaaatttaaggtctttccangatcttttttgagctgtacctttccctgagcatgcagtcactgtnctaattttctaaattttcttattttccccatagttgtttttgaatttcctagtcttttaatgtctggcttcccaaaaggggaaaaagagaaaaatgaaagaggggggcaattggtgctggccctttaaatactcttggaagatacnttcagctggagggggaggggcctgtaacgactgagggaggtgtgataacaacggcagcgcagcgcacctctttgtctgcacctctgtgatcagaagcagcaatcagggatcctgagcacagatacccactatttggagaaaaggatccttcttgctcaccctgaacccctcaagctgtgtgcgaggtgctccaagaacatgtgcatggctgtctgtggggcatgggtagccgctgctgtgccaagagctgaaaccaaaattaaccccaatttgccatccaagcctcccctgggagttgcaagccttcagtagcttccagagttccaaaatggttacatcagacaggtccttctggtgcaactgtggtctaggtggggacacagcttcctgctctgccattatcccaggatcctccc

SEQ ID NO: 432190 - DNA, 951 bp, Homo Sapiens
agtggtgccgtccccgcctgggtgtggcttttcaaagtggggaggcttttgggtgtaaactttcctgcagccgttaaagtggcacccggtgcaccctccttcttgccgtcgggggagggcatcgccatttcccttgtcacctggcttccccgaagtcccgctgcgcaccttccctggcgagggcagctccccgggcacgcaaccccacagttgagaaggttccctgctcagttccggagaagatggaggcgtggaggtgacagaggagctcaattttcccgagctgaccaaaacttcgccaatggggtcggaggtaaacttggccgtgggagaaagttcctcggagctgtcagaggattcgctgctgacatctgagttcaggctgttggtctctaagttgtaacaaaagctcgggctgatgagagtgtcctctggaggactggaagatatcttcagttcggattcctcctttttctcccgagccagaatgattttggtccacagatcttcctggctgtcaaatttgatttctgaggctgaaacatagcagggctcgctctggaggtaacgttccagctctaggcaggtctgttgccagtactcctccagagacggcagcgccgagaagtagccggtctcgtgcacgatctggagctcctggaagatgctgcacatggggagcacgtccatgtcgggccgggttggacggagcccgcggtcgcgagggcggcgaggcgcgcggtgggagccggagccgaaagtctccccggagcgcaggtgaaagtttcatgcaaactccaggctcgcagagacgcccggccggaccctcccgcagcccgcagcgcgcggagcccacacaatatttgcaaacaccggactgactgcaaacgtaacccctgcaaaacttccctattcaaagctccgctgccagcctccccctccgcccccgcc

SEQ ID NO: 432191 - DNA, 1311 bp, Homo Sapiens
ttttctaaggtgcagacaccccctccccccaaggaaatgattggtggtcatctcatctcatggtatactccttacacacaaaacattcaaactactttttttccatctcttgcagtcttgctaaccacaaggaaaaaaagttggcctcatcatacggtcagtaatagatcctcaacatacaatcaacccaaccattagcattctcagtgtgcatgctcacggcaaaggcttaggcgccgctcggaagggcgggtaccagtggcgagtccagggtcacccacataccatgcaccacgggtgctatgccgcttcttacaggacctttttagccctcaaaagaccttccaaggagaggccctggaggcaactgggtagggtgcagaacggcatgctttggctggaacacgcatccctccttccacggccggctctcagcctggaagccttttagcctacaggatccacctctctgctccctcagaggtgcctcttcatgtgcagggccaggtggtcagacctggaaaaacacctgtcacagtgggagcatttaaaaggcttggccccggtgtgctttcggaagtgcctggttaactcatcacttcttgcaaaacgccactcacacccttcccatgagcatctgtaaggcttttctcctgtgtgcgtccgctggtgtgctttcaagtgggagcttttggtgtaaactttcctgcagccgttaaagtggcaccggtgcaccctcctcctgccgtcgggggaggcatcgccatttcccttgtcacctggcttccccgaagtcccgctgcgcaccttccctggcgagggcagctccccgggcacgcaaccccacagttgagaaggttccctgctcagttccggagaagatggaggcgtggaggtgacagaggagctcaattttcccgagctgaccaaaacttcgccaatggggtcggaggtaaacttggccgtgggagaaagttcctcggagctgtcagaggattcgctgctgacatctgagttcaggctgttggtctctaagttgtaacaaaagctcgggctgatgagagtgtcctctggaggactggaagatatcttcagttcggattcctcctttttctcccgagccagaatgattttggtccacagatcttcctggctgtcaaatttgatttctgaggctgaaacatagcagggctcgctctggaggtaacgttccagctctaggcaggtctgttgccagtactcctccagagacggcagcgccgagaagtagccggtctcgtgcacgatctggagctcctggaagatgctgca

SEQ ID NO: 432192 - DNA, 1052 bp, Homo Sapiens
  misc_feature (49)..(49): n is a, c, g, or t
  misc_feature (72)..(72): n is a, c, g, or t
  misc_feature (74)..(75): n is a, c, g, or t
  misc_feature (81)..(103): n is a, c, g, or t
  misc_feature (458)..(478): n is a, c, g, or t
  misc_feature (495)..(527): n is a, c, g, or t
cagagatgaaatacataaaacgatctgaagttcgtaaataaataacagnaacataaaaccttaccaaccatngnncgcgcnnnnnnnnnnnnnnnnnnnnnnnccacccaccttaaagtgtcaaaagatgtgttgtataaaaataaaccctaacacgtgggaagatcgacccggcggggcacaccaggtccctctcggtgaggacacacagaccctcaatgactcccacagtctttgatggtactttcttttctgtgttatcaattaaggaaaaagggcaacaaaacccaaatgttcaaagcaaatcatagatttcacagccagttcagctcccagctaataaattatatgtgtgtttactgcctgcccaaatgagtggtgaagctgtctagagcgcatcagacttttctgccattcctgatgctccaggcatgctacgctgatttcacagattaggnnnnnnnnnnnnnnnnnnnnnaaacaatgagttggttnnnnnnnnnnnnnnnnnnnnnnnnnnnnnnnnntttcggctgtgcacatactgctcctcctggcctctgcctgtggcacaatgccatgagagccggaggagcggatcgccatgcacagacgcgactcacaagatgcgccggctccccgggctcaccaaggagaaacgggagccagtcccacggagcgacagtcagcaaaaccaccacacagggatgtggaaaactcatgactctacccgccccaacccaccacacacagaacttgcccagaacattctctcaaacacaaaatgagatcgaagctatactacatcacagccaagaagcggctagctgcagcagccaaagatttctctgggtgatgaggtggcctttactgcatgtcaaatgttcacaatttcaagttttgggggtttcaattcaacataggtcaccagaaagtaacaatctgcaactaaggtccttagcacgtatggaacactcaccacaaagaaccctgcatggggttttggtgtaaatgtaactgcagtatgagagcaggtaaggggtggggtatgc

SEQ ID NO: 432193 - DNA, 1089 bp, Homo Sapiens
gtaggaaagaaaggctcaatatgtagggggaggaggggagcgcgaaaatatgtgtggatggagcccgaagaaggggtgctgatggataaaataacaagggcatagagggagcgatgtgcaaaaaagggaggtggaaagaaggtgcagagcgaatatgagttggggacggcaaagtcgtgtggtaggggaagggaggagttagctcaagaggcattttgtttaaaaagcacgaaaaatggggtgtagaaagggtgtgggtaagagtgcgcagcccaagaaagcgggcttaagcattcagcgcaaggagaaaggattttcttgtgggaggaagaagaatggccttttgctgacatgtcgaaaagtttcacaagttggaaagttttgggggggttcaaattcaaccttaggtctcccaggaaaagtacagatgtgcaaagagagatcccttagggagggtatggaacggtcacccacaaagaagggtgcatggggttttggtgtaaatgtaactgcagtatgagagcaggtaaggggtggggtatgcacccttaccccactgtgtctcgcatacgaccccacaccccaaatccttggcttcttcagttagcaagaaagtcacgaaccatagtatcttccgtgatactttaggggaaaagaaatcctaagagagaaaacacagtatttggtgagtcttgaaaagcacacctctgcggttcctactggaaatgtacatgagattttgctgaatggagaccaccgctgagtcacccaggcttccctctcgccttcagaaaggcatcaagccactgtagggtaagaatggatatcccagttcttggagaacaaagcctaaatgctccaaagctgaagtctctgaagagcagaagtggttgttgacactgcaatgctagtaaggtcatagtgatatagccgcagtcggaaggaaaattaactgcagttaagatgcaaaaagcagtgatacttctaagacaagcacatgcacacccattcttgatttgacaacacaatctagtctatttcaaatagccaagaatttaacagctgggaaaaataatggaaaacaggata

SEQ ID NO: 432194 - DNA, 569 bp, Homo Sapiens
tttaagtagtttatcttttattcatacaaataatacatacacaagactgtatattgtttgaagactgaaataattttctagtgtaacaactctgtaacaaaatttaactaaatgtaacatttatgaaaatataaatctctgattgggtaattcttcccaacgatacaaagtttacataaaaacattcaatatgagctatcagttgcaaacaagttaggaaaaatcattcaagtcacttgtatactctattggcttttacatagaacattcacatactacatttaatccatctaggcatttaattcttagaaatgtgtggcatggaggttcaactgataatgacaggaatgagaatgtgttgcctaaagagctcaaaagcatagactcatataatcaactccaggtgatctgtatgtggtttgccttctctgggctaccacctccctggctagtagctaaaccataagtaacatactgaaaaacatctttcactatggacctgggtatttttatctgaatcccctgctgtcgtcttctcgcagcatagtagtagtaggcccaacggatca

SEQ ID NO: 432195 - DNA, 396 bp, Homo Sapiens
  misc_feature (354)..(354): n is a, c, g, or t
  misc_feature (359)..(359): n is a, c, g, or t
ctaagtagtttatcttttattcatacaaataatacatacacaagactgtatattgtttgaagactgaaataattttctagtgtaacaactctgtaacaaaatttaactaaatgtaacatttatgaaaatataaatctctgattgggtaattcttcccaacgatacaaagtttacataaaaacattcaatatgaggctatcagttgcaaacaagttagggaaaaatcattcaagtcacttgtatactctattgggcttttacatagggacattcacatactacatttaatccctctagggcatttaattcttaggaaatgtgtgggcctgggggggttcaactggataatggacnggggntgaggaatggtgttggccccaaaggggctccaaaggc

SEQ ID NO: 432196 - DNA, 1130 bp, Homo Sapiens
  misc_feature (3)..(3): n is a, c, g, or t
  misc_feature (14)..(14): n is a, c, g, or t
  misc_feature (17)..(17): n is a, c, g, or t
  misc_feature (20)..(20): n is a, c, g, or t
  misc_feature (22)..(22): n is a, c, g, or t
  misc_feature (24)..(24): n is a, c, g, or t
  misc_feature (28)..(28): n is a, c, g, or t
  misc_feature (33)..(33): n is a, c, g, or t
  misc_feature (43)..(43): n is a, c, g, or t
  misc_feature (45)..(45): n is a, c, g, or t
  misc_feature (51)..(52): n is a, c, g, or t
  misc_feature (64)..(64): n is a, c, g, or t
  misc_feature (68)..(68): n is a, c, g, or t
  misc_feature (71)..(71): n is a, c, g, or t
  misc_feature (83)..(83): n is a, c, g, or t
  misc_feature (88)..(90): n is a, c, g, or t
  misc_feature (101)..(101): n is a, c, g, or t
atngacttcaatanagngantncntttnctctncgtttaagcngnttccgnntcttgagatccngaanaanacacttaccttnatacnnnttttcactgtnttcctatatctgcaaacttccggtcttcaaatatcaagaactcatggcattttgccagagttatcaactccttcatcacatccagagtaaaatcattcaaaatatctacatgagtcttcagcatgcagatactaggtcctaaagcatctgctagctgcaacagctctctggccagtgaaacatcagcagatagacacagattggtttccttcttttgcataagcctgagaagcttcgatgcaactgggtggatcctgggcagctctgcacgtgcaccgaagctgagttctttggggtgcttcctttatagaaaggggagaagcattatgattcgctgccacaaagacattctcctgaataaacctcttcactctcccaactgtctcagcatcaacttttttctgctgctcgagaatctccagcattttggacaatgtacacactgagtggaggcggatcccgtgcgcctgcaacttgtccttgcctccctgctctctgtccaacagcactatggcatcagtgaccttcaagccctccttctgaagaacctcaacagtttccaaaacactagatccactggtgacaacatcttcaatgattaaacaggtttctcctggattaatagttccttctacaagacgcttagttccataatcctttgtttctttccttctaataagcattggaatttgattggttgaacagataactgtagccaatggcaaagctgtataaggcactccacacacggtgtcaaaactgatgcctgcattttgggcagtttggaataaaatatctgcaacctgactcagaagacgcggtcgagacacgatgccccgcagatcgatgtagatgggggaggaaagcccgctcttcagcacgaagtccccaaacttgaaagcctgcacgtcgtacagacccgtcaccaatggccccaaagctgcacgagcgaccgccattgtcgcgcgctgcctgtttgcttcaaactcccaggcgccccgggcctccgatcccgggaattccggaccc

SEQ ID NO: 432197 - DNA, 652 bp, Homo Sapiens
ccgggaccctttatgtggagcagctgaaggacttcccactctctgtttggactcttggattgtgccacatggacttgtagaacttctacattccgaatctatctgttcttgtctctgccgctgctcctccaggagttgctgactcatgcattgctttatatgtgtcgctggtagagagcatagccgctcactggggttccaattggtatgttacatggggtgcaggataccattggtgggataacagcagctcgatgcttaagctgtggcagatcccagtggatttggtttttaacggcagatgagacgagtattgatcccagtggggtttaacagtgaaggctttgagtccataggaaacattctctgcctctcttgctctccatccacatcctcatcagcgctgcacgtggcactggaatcattgtctgactggggctcgggcctttgggcatttatttgctgagctaccaccaaatcttcatctctaggttccaccttctcactggctctatccaagtctctttctttggtattatcaccttcaactttagatgcatggttttctggcaccctcacttcaacgtccacagagtcagctttggtagcgggtgggggatcacaaacagaaccctaaacagcactgtgctcc

SEQ ID NO: 432198 - DNA, 890 bp, Homo Sapiens
cacaaaccgccgatagtcccagcagtgaaagttccgctcatccacctccaggaaacgggcacagagctccagctctcgggtccagttgggctcaggcaggcggcctagcagccagcatcggtggtgccaggtaccatgagacttggggttcaccccgcaggcagctctccaggaagcccagttctgccttcaccagagcagccaactcttcaggagacttctgagtctccagctgctggagcacctctcgtcggcagttccagagggtggcaaaatcagggttggctcccagaatctggcttgtcagttccagcacggactcatccagctcaccagcctggcgcttctggaatacggcctgggtggctgactggtatagcttcagcttctgctctcgctctagccttttggcctccgcctgctcttctgacgtcttcaccttcaggcgtccgtgcatggtgccggctcagggttcaagacaggggaagggtccagtggtagcccttgaagtctgaggagagaagtgtcaatcacgtagccccgcccctactagctccgcccacagctgtgtccggaagcagcaagcgtgcctgggcagagacccccagagtgtaaagaggtcctgggacaggctttgcacgttccacaagaggtgagcacccggactaggacttccatccgtgtggcccttcctatagcccgattcgcccgggccagagcgcgagccggggcacctgggcgttggggaccactctgctccccaaaggttgccgctacccgcccgtcccacggctcccgggcacccccgccccccgcgggcggacccacctgcgctgggaggaggcgcggggacgcggagctgatcccgaactcccgggcgggaccagcct

SEQ ID NO: 432199 - DNA, 2760 bp, Homo Sapiens
  misc_feature (76)..(133): n is a, c, g, or t
  misc_feature (772)..(840): n is a, c, g, or t
ctctcttggtggtctcccttcgttcttgtctccgctctctggttgtgccgttgctcgtctctgttctccttgtcgnnnnnnnnnnnnnnnnnnnnnnnnnnnnnnnnnnnnnnnnnnnnnnnnnnnnnnnnnntcctgtcgtcgttccttcttcctggttcgtcgtcctgttgtctgttttcggttcttgctcgctccgtcctggtctgggggttggtccgttcgcttctgtttgttgtgtttgttttgtatgtcttctggtccccccgtgtgcttaaatattacttctgtcttgtctgggactactgtgtcccgcttttgtgtcgccggtattgttgtgtctttctccttctgctgtatcttgtgtcttccttctgcttcttgtgtttgttgcctcacttgttttgttctctttcttctcttgtgttttttggtgttgctccctcccgtggttgtcttctagttttttccgtgtggtggtggtgttttgtggtctgctcctctttgttgttggccttcgcccccgctctgtagggcgtggggtcgtggcctccccaagtggtggctgttccctcggtctcctgcgggtgggttgccctctgctcgtggctctgttgtttttttctcctcgctgtcgtgtcgctcgtgctatatatgtggcgctctccctctctgttgggtcccctttctgttactcactacgttgtttcgcgggctttttgtgtggccccctcttggtggatgattttttgctgcgccgcccccctcttcnnnnnnnnnnnnnnnnnnnnnnnnnnnnnnnnnnnnnnnnnnnnnnnnnnnnnnnnnnnnnnnnnnnnnggtagcctgagagggcctctccattctttattcagtcccaataagttaaagggcaagggtagggggcagggcctcttaggtgaggacgctgctaactgaaggcagcagttcagccagttgctccaagatgcccaccgcttggcacagcgggttaccctgcaggttgaggaggaccagcctggggcaggaggcaagaggctggagcactgcaggctgctggaggcggttgttgcacagtagcagctcctgcagccggggtaggttggtgacgccgtccagggactctatggcattatcactggcctgcagcacctcaaggcagcgcagggcagccagtgcaggtggcagggttcggagacgattgtgtgacaagtcaagatgggtgaccaagagcagctgttccagatggcagagcactgtcagatccttgtgagccaggtgcagcacacgcacctcggcatactccatcttgagcacgctattctccagcaagaacttgctgcgcaggtcatccagatacgctgcccgcatggggtccacggccttgagggtctggaagtactgcagggtctccttctcatacagcagggggtccagtgcccgcatcagcaggatgatggtaagcaggcaccatttattctcaggctccagctcctgcagctccttacaggattccagctcagactgcagcactgtggacttctccactgacagctcacacctgaatagctgctcgtctgtcgtggagtcccggcaccagccctcctggcggccttttaaaagcacgcattctttctggacatcgcctgctgtccaaatgacgcgaaatgtatgttggggcaactggtcgttgagggaggcagcaggcaggtcacagagccagacatggctgggccggttcctgccatctggggtcctccactccacaatcaggggagaatcatcaaccatgagcagcaagatctccatcctggagcccactaagaggggccgagagaaggagacagtcagacaggcctcgtcccggctcacatgcaggcagcgcagtgcatcctgggggtcagctcggcctaggagccaacggtgataaaaccaggcactctggtcattggggtcagtgaagaaggcattctgcaccagctccagctctttgagcagcacatcctcagggaggcgcccctgtggtccagaatccggctgggggtgcagctggggcaagagacaggagcggtaatgccaggaagagtagttggagaagtttcgggtgatgaggctgtcagtgaaggctagctcttctgcagggggcacggctgcctgtgtggccacaaaccgccgatagtcccagcagtgaaagttccgctcatccacctccaggaaacgggcacagagctccagctctcgggtccagttgggctcaggcaggcggcctagcagccagcatcggtggtgccaggtaccataagacttggggttcacccgcaggcagctctccaggaagcccagttctgccttcaccagagcagccaactcttcaggagacttctgagtctccagctgctggagcacctctcgtcggcagttccagagggtggcaaaatcagggttggctcccagaatctggcttgtcagttccagcacggactcatccagctcaccagcctggcgcttctggaatacggcctgggtggctgactggtatagcttcagcttctgctctcgctctagccttttggcctccgcctgctcttctgacgtcttcaccttcaggcgtccgtgcatggtgccggctcagggttcaagacaggggaagggtccagtggtagcccttgaagtctgcgctgggaggaggcgcgggggacgcggagctgcggcgcccgccacagagcccaggcgctggctagagcggcgccacgtcccggc

SEQ ID NO: 432200 - DNA, 977 bp, Homo Sapiens
  misc_feature (16)..(16): n is a, c, g, or t
  misc_feature (41)..(41): n is a, c, g, or t
  misc_feature (51)..(51): n is a, c, g, or t
  misc_feature (89)..(89): n is a, c, g, or t
  misc_feature (95)..(95): n is a, c, g, or t
  misc_feature (100)..(100): n is a, c, g, or t
  misc_feature (143)..(143): n is a, c, g, or t
  misc_feature (179)..(179): n is a, c, g, or t
  misc_feature (209)..(209): n is a, c, g, or t
aggagaaatgaggccnttgtttaaggtttgcatgccttgancagtaatttnttttagccaatttgaaagtagtgcaattgtatcaatcnctaaantttgnccaaaagatccaaatagccaatagataatttaaaaggaatagngcttattttcaagaatccaaatgcccttatggaaangaaaattgatgaagaaaacccaaggaatcnaccaaaattattaaaatattagaccaaatttaccaatgctaataattatacttaatgtaaataaagagtttaaacacatcaactatattgaatttaaccccaaaccaaacaaagaaacccatccactatattcaagaaatcccatcagaggccttctttaagtattatgatatagatatattgtaaaaacagaacaaaaagagatgcaattaaaacactaaatcaaataagacaagggtagttatattaataccaaaaagagtagacttaagaagtagaaaaactgctaaggaaaacaagagacattacataatgataaagggtcaatttcccaagaaaagcaatcaatgtaactcactatattaacagattgaaaagaaaaaccacataagtatctcaacagatgtataaatacgtttgaaaaagactaatatatttatataataaaaacccccagcagactacaaataagagaaaattgccttaatctgataaaaggagactcaaaaattcatatagatgacatcgaacttaatgctcttcccttaagttgaggagcaagcaagcatgtttactttttatacttctattcaacatcatgaattctggcaaatacaacaaagcaagaccaataaaatgtatacaaaatggaaaaaatacaatttttcctattcacagacaacataattattcatgtagaaatgttcaaggaatctaccaaaaaaacccccttctgtcgtcttctcgcagcatagtagtagtagaaga

SEQ ID NO: 432201 - DNA, 1233 bp, Homo Sapiens
  misc_feature (664)..(672): n is a, c, g, or t
  misc_feature (900)..(951): n is a, c, g, or t
  misc_feature (1214)..(1214): n is a, c, g, or t
taacctgcgacgccagtgcctgccgcccacggccgcaggagtcgggcttcggtcgcaccagagacagcggactttcctccgatggttgcagcagagggatcatgacggggaaaaagtcctcccgggagaaacggcgcaaacgtagcagtcaggaggcggccgcagcgctcgcggccccggacatcgtacccgcgttggccagcggcagcagtggaagcactagcggctgcgggagcgccgggggctgcgggagcgtcagctgctgtgggaacgccaattttagtggaagtgtcaccggcggtgggagcggcggcagctgttggggcgggagcagcgtggagcgcggcgagcgccggaagcggaggagtaccgactcttccagcgtctcgggctccttgcagcaggaaactaaatatattttgccaactttggaaaaagaattattcttggcagagcacagtgaccttgaagaaggtggactggacctgactgtgtcattgaaaccagttagtttctatatatcagacaaaaaagaaatgcttcagcagtgcttctgtattataggagagaaaaagttacagaagatgcttcctgatgtgttaaagaactgttcaatagaagaaattaaaaaactatgccaggaacagttagagctcctgtctgnnnnnnnnnttttgaagattcttgagggtgacaatggaatggactctgatatggaagaggaagcagatgatggttctaaaatgggatctgatttagtcggcccgcaagacctctgtatagattctgctttatccgggggaagagaatagccaccctgacggtttgggaataaagcccacggcagagggcaaccaacggcagcaccccgaccacaatggcacccgccctccgccaccnnnnnnnnnnnnnnnnnnnnnnnnnnnnnnnnnnnnnnnnnnnnnnnnnnnnatgacagacacacccacacctcgaacccgggccccaccacaccgcccgccaccacaagctattaccagccaccgttggagaccacgcctccctatccacgtgtccgcgcgctgccgcgccaggagtacacccagcaccctgccccacacgggcccacatcccctaccccggcgcacgcgcgcaccacacgacgcgccccaccgccccgctcgactccgatgccccgcccccatggatcgggcacgtcgcagacaactctcacncaccgtccgcaacaccgct

SEQ ID NO: 432202 - DNA, 483 bp, Homo Sapiens
aattttagaaatatgtattttgtggacttttaaagcattatttaaattaccaaggttgacatttttcttgacaaataagctgactagactatttccattcctccaggttctgaagatctcctgtcctagcatggagactctggagatcccgagactacctgaattcttagcaatatccagcacttccttaagtatcaagggctctgtccctcactgtccccattatcccagcagcccactctccagatgccattctcccctgaaccaaggctctggactctcaggacagactaacctgggccattttgctccaggccccacttaaggcataaagcagtcaagccagtaccctctggggtcagaggactcccatctgtctcagctgcagtgtctcacgggaggctcctgtccctgttgcccagggcagctcctggaccccttctgtcgtcttctcgcagcatagtagtagtaggcgaacggata

SEQ ID NO: 432203 - DNA, 455 bp, Homo Sapiens
  misc_feature (108)..(108): n is a, c, g, or t
  misc_feature (172)..(172): n is a, c, g, or t
  misc_feature (251)..(251): n is a, c, g, or t
  misc_feature (435)..(435): n is a, c, g, or t
aattttagaaatatgtattttgtggacttttaaagcattatttaaattaccaaggttgacatttttcttgacaaataagctgactagactatttccattcctccaggntctgaagatctcctgtcctagcatggagactctggagatcccgaggactacctgaattcttagncaatatccagcacttccttaagtatcaagggctctgtccctcactgtccccattatcccaggcaggcccactctccagnatggccattctcccctggaaccaagggctctgggacttcttcagggacaggacttaacctgggggccatttttggctccgggggccccactttaaggggcattaaaggcagttcaaggcccagttaccctttgggggttcaggaggggattttcccattttgttcttcaggctggcagttgttntcacgggggaggggttcccg

SEQ ID NO: 432204 - DNA, 790 bp, Homo Sapiens
  misc_feature (92)..(196): n is a, c, g, or t
tgtttgaaggaagtaggttccattggcatgaaagtagactttaaaattcttgatataacttcaaagccgatctgggttgagtcttttggacnnnnnnnnnnnnnnnnnnnnnnnnnnnnnnnnnnnnnnnnnnnnnnnnnnnnnnnnnnnnnnnnnnnnnnnnnnnnnnnnnnnnnnnnnnnnnnnnnnnnnnnnntgacggagcaagaatcaacattcacagtgtggtaatctgaattggtaggtaaccaggtgttactagcttcagaaaaaccagcatttgaactattgtcccactgcattggtgactttgagcgaagggtattaatattcatagctttcattgagatttgcgggctacaatatttcccattccaatttctttctccatagtaagttataggagttccagggagtgtgaaaagaagcatgttcatcacgttgacatactgattccccaaacgcgaagtcagccgtgaactgtctggtccaccaatcatccagttaggccattttccttctggcatgttttccatccaggatgtgataacctcatacacgctgttcccagaaacagtgtctagcatgctgaggtaattgttgaagggaaaatcagcttcttggataaatggcaatccatagtacatcacggtcctgtcaatactctctgcataggcttcagtccccatgaacctgtatctgccgggctccgtgctgtattggtccatggtctgccggaagctgcggacaatgtcgtgccccttctgtcgtcttctcgcagcatagtagg

SEQ ID NO: 432205 - DNA, 947 bp, Homo Sapiens
tcttcaccggccgtctgggctgcagcaggcctgggcccagagccacaggtggttcaggacaaagaaggctgatacgaccagggccaggggtacagcccagcacccaggacacggtcagcacggggtgacagcccaggtcgtggcacggtgggtcgtcgggcaggagcagcgcgtgggccgacttgttgcagcccaggatgacccgcaggtcctgcgaggcggcctcgctcacgaacactgaggggatggcgatctggcccctcaagtcctcgtagacgtgggtcatgctcacgaggtcgtcggagtggacgttgtgcacgatggccgcctcgaagccggcgcgctgggcgttcagcaccttgaggtcgaaggtgcagtcgtagcagcggatcagcgcgatggagcccagagagcggttgcccagtcgcggggcctcgatgggatggcacgcgttggctggcttgacctccatcaggtagccccgtatgccctcgggggccagggggacgccgaacagcgccggcagatccgcaaagtccaccgagctcgagttgtcttccagcacggcccgtaccaccgcctgcgcgggcacctggagcagcgacaagaccagcaaggctttgactgccacgagggctcggcccggccgtggccaccccatggtcacccgcttcgctgtctgtgtgctgctaggtcccactggaggcggcaggcatgaggcctttgggcatctccggggtctcccagggggcctgtggccagaacgcgagggcagttgagttggaatgaccgcgtggctcagaggcagtgacgcggccactgggaccctgctggctctaggcattaagtgctccggacggcagagcggcatgcgtcgtgtctttgaaggccggtctcaggaggtgctggcgcaggtggcctttctggcatcccgggaattccggacc

SEQ ID NO: 432206 - DNA, 521 bp, Homo Sapiens
gtagagacgacgtctcactatgttgcttcatttaacaaataaggggaggaagggcgggggcagaatggaggacacagactagagttcagcttttacaagtggcaaaggacaatttggattcggcctcccacagcttcatttgtaatgctttctagacatcttccatctgtgttagagacttttctatttcaactctgctttcaagattaaaaagctctttatcttctgacacaatttgcttttcagaggaccctaaaacataactttcaatggcttcaacactgaggcaaaacaagtctctcttgtaatcaagattcttgggcgtgcatctgtacacgtagccaagattgagtgagcaccctgcgcagcacaaagtctcaaggacgcaaccattttccttttcacgtttggatagcttctgttccttatccacagaaacattacaggaaacacagcgaagcaggatgcagttggtgtcctcctggctggccacccagctcagcgagtcgcccagcggccgc

SEQ ID NO: 432207 - DNA, 1085 bp, Homo Sapiens
  misc_feature (497)..(497): n is a, c, g, or t
  misc_feature (590)..(591): n is a, c, g, or t
  misc_feature (599)..(650): n is a, c, g, or t
  misc_feature (673)..(673): n is a, c, g, or t
  misc_feature (737)..(737): n is a, c, g, or t
  misc_feature (860)..(860): n is a, c, g, or t
  misc_feature (881)..(881): n is a, c, g, or t
  misc_feature (904)..(904): n is a, c, g, or t
  misc_feature (911)..(911): n is a, c, g, or t
  misc_feature (925)..(925): n is a, c, g, or t
  misc_feature (954)..(954): n is a, c, g, or t
  misc_feature (1026)..(1026): n is a, c, g, or t
  misc_feature (1040)..(1040): n is a, c, g, or t
  misc_feature (1057)..(1057): n is a, c, g, or t
  misc_feature (1066)..(1066): n is a, c, g, or t
  misc_feature (1071)..(1071): n is a, c, g, or t
  misc_feature (1079)..(1079): n is a, c, g, or t
  misc_feature (1083)..(1083): n is a, c, g, or t
tgcacttccaaaattaacatttttattaaatcaagttaaaaaaaatgttcagtgtagaaaagtcaacaagggttttaacaaaaccaaaatatacctttttatacaatatatgtatatattagcagcaaactacttctgagattctctttcttttatgttcttctagttattttaaagaaagcataaacaatgtatattagtatggaatgtcagcaaatccactcttagtcctttattctgtgatttgggccttctacaaaatactttgtgattctcactaatgaatattaagaacatacccaattttaactaaaaagtagtgaaacagtggttggtagaatctttctcactatatcacggtcacacattatatttgagaataacaaatgagcaccatataaacaggtaattgtgtgtgtgtaaactcaatttttaaggtgtaatagtagccaactagataacttagcactgtgactatcactttttaaaaatttggngatatacaaaattttaaacaaatcagataaacacttcaaccccctattggttgtccatttaaaaaatccttaatagaaattctatatataacnngacaaacnnnnnnnnnnnnnnnnnnnnnnnnnnnnnnnnnnnnnnnnnnnnnnnnnnnntctttaggtttgaataaatttcnaaactgagatgggcgaaacctctcatttatatcttctagaatacaatatcaccaactgaaagtntctaataagagtttcaacttagttaatcagaaatactggctactgaaaattctgaggcaacagagctgttattcagcttagtatattctaggcttacaaatcagttcaaagactgaaattatnaaatgcccatgaaagaaaganatttttctctttgtattttcttntaataanaaaaagaaaatatntttacaaaaagctttcactttttaaaganttaaaattattacagaaatctcattagtcttaaaaaatagtaaatgttatataaatacaattttcttatagntgaattttcaggtngaactggatttaaaaantcctttggnttatncatttagnactnca

SEQ ID NO: 432208 - DNA, 454 bp, Homo Sapiens
aagacttaagttttgtgggcactggaagtcactttgatagatggattgaaactgttcctatttgccctgggacggtttctatctatcaaaggaaggttttcacctgtagaaaagccccctgcctccagccaaatagtcccatgctgactttctatcttcctttctcaaactgtcttaggaaggaccttcagtgcagatcaggtgcagtaatggctttcttgtcccttaattattcaccagacccagaagttgtacgcatttaatgctgtttgtaaccatgcatctgttttcattctttgctgtaccttttgctgcccatcctgttacttttgagtttctttcattgtggttgttcttgggttcttttgtcttgtcagagctcttctataacctcgctctaatggcttaacagttgttctgggtggaaacgtcccctcatttgaatgctcctcta

SEQ ID NO: 432209 - DNA, 496 bp, Homo Sapiens
  misc_feature (146)..(146): n is a, c, g, or t
  misc_feature (324)..(324): n is a, c, g, or t
  misc_feature (433)..(433): n is a, c, g, or t
  misc_feature (475)..(475): n is a, c, g, or t
  misc_feature (486)..(486): n is a, c, g, or t
cctaaaaatgtgtaagttctgtgatttcttggactaaaagatatctatttacatagtgaaaggccaggccttgtaaagatcgtgacagtattcaatcctattcttgtttttttgtttcaatgtgttgctagttatcttatctcagntgtattgtatttatataactgcatatttgattgagatacctaacctatgagacatattaacataatgaacacatgtaagcacacaacccaatttaagcataagaacagtatcaataattttgcagttatctttcactctttttcagtcacacagagacaactatactcttaattttgntgtttagagtcctctattttcttaatagacagattgcacatggttaaaggtctatctttacatcaagagagcctgtggttttggatcttgttcaccccccgcttaatgnctcttttgaagttatgcttaagctttatcccttggtcctttntgggaaatttnggggtttttt

SEQ ID NO: 432210 - DNA, 799 bp, Homo Sapiens
  misc_feature (649)..(649): n is a, c, g, or t
  misc_feature (666)..(666): n is a, c, g, or t
  misc_feature (709)..(709): n is a, c, g, or t
  misc_feature (763)..(763): n is a, c, g, or t
  misc_feature (779)..(779): n is a, c, g, or t
  misc_feature (783)..(783): n is a, c, g, or t
ctgtgtaaagctgcctttgcaagcacttcacatgattcactgaacagagcagacagaaacccctgcccttcttgggggcttccatcctagacaagtgccagcggccccagttgatgccacgggcaggcaatgtgcatagccatggcacgtgccgtccctgtggattcggatgcctcctcccctgctggggtgaggcagccaaccaggggccaactgaaaaaatgctggactctcggtcaaggacagggctgggagagtgccagtctccacaaactgtggatccactagagggttcaggcctggggcatcctctgcaagaggatcccacgagagtccattccccaccacaggcctccgctgctcactgctgtgccttgatcggcctggacgagcccgcccacacctccatcatacccagtgtgaagaggggctggggacccaccactcctgagaacagcatccttgggaagacccagctgtgagtgcacagcaggcacagtccctcaggcccaggtgaggattcagcagcagatgggattccaccccatctgtggcctctccagctgtccacagggccctgcaaaggcaggggaggtgggcaaaaggccaagcccaaacccagccccttccactcttgggggtaccccangaagggaagggcgccanggcccggcttgggttcccaacaagcccccattcaaccctgggnaaggttgaatgggaaaggccccaaaacccccaagcccccttggcccttgggaanggccccttggggttgnaagncctttggccccccaac

SEQ ID NO: 432211 - DNA, 1612 bp, Homo Sapiens
gccaagccgaacggggacaggcgcctatagggcccccaggacgcccccagaccagaccctgcagctcagcgtccggccaaggagcaggccccaaaagagccaggtcctggcaccatctccgagctcccagcaggcctgctgcaggtcagaagggccacatcccatcttgggtccctgacctcattgggcctcacctgaaaacaggcacccaggcagtggccatgaacagccaggccacaagcctcgacaggggtgggccccaggtcacagggagggcggtctttatttctggaagggccccggagcaggaggctgcctctcgtccacccgtccttctatcctcacgacaggtgctatggggccgcagcagcatcaacagcctctctcagctgctgcagcagctctttgggctgtggtgagaacgcgctggtgtccactctctggaagtcggggtgcgcaaccaaggaggccagcacctctgtgatgcgcccaacatcaaaggctgcctgttcgaaacccaacccagcaccgtcctcagcggctgcctccctcaggaccaggagcctcttctcagcgatgaccttgaggaagtggtaaaactcttcaaagttgatgcccgagcaggacctcatgatgacctggcagtggtggtgccagtcgggcatggagtccctccactcgctgacctcctcctgcacggcgcatagctcctgctgcaagaagcgccacatgttggccaggttgaagccattgacccagttgtggttgatggagatggtgtcatccaggttgtgcacctggtggtgccagccactgggcacaaacaccatctcgcccgcttcctgcgtgatctccaagggtgggccagcaagctggttccgtgggtgcaggtgtgtgtcgcagagtgctggggaggtcacgtcgtagggcaggttgccgtggcggtcccgcagggcctcttcctgccctggggggaagaggagccacttcttcctcccacagacattgacagaccagctgaaggagcggaagatgtcagcatggaacggggaccagctgcccgcaggccccgcgtagacaaagcggtagtcatccacatccagtgcatcccagaactcattcagccagtcggacgagaagtacacaggcagggtgaaaacgtcctccaccggaaagtccctgcacaagtgccagtctttgaggtagagacagcccctgggagaggagtagcccgcctgtatgtactctttccagtaggtgatgtagtctctgagagtcatgtgctctttggggttcgagttgtattcctggaccccacagtttgcaactggtacaaccacgtctccgtaggtccgtagcaggtggtcgaagtcgggcctccccgcgggcgtcacccagcgccgccggctgccccagccctgcgtgaaggcgctggaaaacacgcagggcaggttgggcagcaagaagccccgcacaaagtcggcgtaggagaaggcgcccggctccgagacgaaggctacccggcccggagcctggccgacgccggggacatcgacccccaggcctcggaagtggctgtcggcgagggcgcgcgtctcgcggtccatccagc

SEQ ID NO: 432212 - DNA, 1031 bp, Homo Sapiens
acgggggtggtcccaatttcggggccaggaagttccctttccctttggttggacctccttccctgcccggggcgcattagcttcctgttgcaaaggaaggccccccccatttttggcccagtttgaaagccctttgaccccatttgtggttgatggagaagggtttcattccaggttgggccccctggggggtgccagcccatgggcaacaaacaccattttgggccgttttcttgggtgatctccaaggggtggcccagcaagctggttccggtggggtgcaggtgtgtgtcgcagagtgctggggaggtcacgtcgtagggcaggttgccgtggcggtcccgcagggcctcttcctgccctggggggaagaggagccacttcttcctccccacagacattgacagaccagctgaaggagcggaagatgtcagcatggaacggggaccagctgcccgcaggccccgcgtagacaaagcggtagtcatccacatccagtgcatcccagaactcattcagccagtcggacgagaagtacacaggcagggtgaaaacgtcctccaccggaaagtccctgcacaagtgccagtctttgaggtagagacagcccctgggagaggagtagcccgcctgtatgtactctttccagtaggtgatgtagtctctgagagtcatgtgctctttggggttcgagttgtattcctggaccccacagtttgcaactggtacaaccacgtctccgtaggtccgtagcaggtggtcgaagtcgggcctccccgcgggcgtcacccagcgccgccggctgccccagccctgcgtgaaggcgctggaaaacacgcagggcaggttgggcagcaagaagccccgcacaaagtcggcgtaggagaaggcgcccggctccgagacgaaggctacccggcccggagcctggccgacgccggggacctcgacccccaggcctcggaagtggctgtcggcgagggcgcgcgtctcgcggtccatccagctcagcacgggtcgaaggacccccc

SEQ ID NO: 432213 - DNA, 1937 bp, Homo Sapiens
gaagccagcatttccctttatttctggatggaaacggggccctaaaagcagaaatcaatatttttgtttgaaagatgcagtcatgctaatttcacttttggctaaaaccgagacgataaaagaacagttgggtgtttataggatgccctcaaagtgagctggctaagtgagctgggctctaacttcactcacaaatttatagtacagctaagaaggccagtctgtccatgaaagggagccgagacaagacgagggcggcctcttccaggcctgtgccaagtgtccttggggtcccgccatggtccacacttctgcagcatccgcagaacatgtggccgggtcctgcccagcagcagggacagccaagtgggaggcaggcatggtgcacacctggggaggcccctggtgcagaagcagccccacagtagcagccccatccagaggaagaccactccggagggccacaggcctctgcagccctggcactgccgcccagccctccatctcagcgggatgtgcagggtgagacaggaatgccagggacgttctgcccctaggtcagcctcttcctccgcctgttgtgcttgtcgatggttaaggttgccctgttcacaagctgttgcaacgccatccagggcttcgtcttgtctttccagcttactttcggcctccagggccagccccttcatcctcctcaggatctgggttagttcctgggtatctgcctcagaaagggctggcaggcttgtctgcaggtgcagtgctgtgccctcctggtctcctgcgggtggctcacggtgcagggtacggcccatcagcccagatgctgcatgccagactgagcagctcttctctgcgggggaagaggttcttgcgcttctgagcaccaatgcatcttctaacagctccatcttcttgctgaactgcacttctaaaatggggataacctctggcatcttggcagatatcaaacgataggccatgtctggctttccaataaaccgctggcggatgctaatttcgtaaggtgagtggaccttgatgtcgtccacgtcttctctttcaaacctgtgcatgagcaaagaactggagtcatgtatttccaacccagacacaaggacggtgagcctccctggtttaacgtgagactctgttctgtgggaaataacagcaggaatttttatcagtatcccttctttcccaaagggttcacaactggtcatggagacatcttccctgggctttgtttccggtggtgtcttccaaagcttggagctaaagggccaccaagcaggagattccagttctgtcagcaatctgtccgccacctccaggtctgactccatcttgtccaggcctctcatgacgctgtccagctgctggccctggtggtgcaggaccctcgccgtgtcctccaggcgtttctgggatccagccatgagtcccgtcagctcctcgccccgggtccttgggacagatgcgtctgccacggctccaggctgagacagcagcagctccctccagaaatgctcgatgatgctgaagaccacatttcgacttggccgcagggagctgaaccagtgcttggcatggcccttctccaggatggtgatggagctgaagataaaatgtgaagcctccttcttgatctcaactatgctggagagggggaagctgaccagaatctctccagtgctgtcagtcatgaacctgagcgacagcgatgttaaggacagctgtccagtaacccatcgcctcttgggctccaggtagtaggtgcacggccaggtgtggatgcagacatccccgctcatctgttcctgggtctgtgtgcgccaaggtccaggcctcttctgcctctgagggacgccagacgagtcccagagccgaccgcggcgcctcggccgctcggcgcctcgtgccgaattcgccaccca

SEQ ID NO: 432214 - DNA, 873 bp, Homo Sapiens
  misc_feature (789)..(789): n is a, c, g, or t
  misc_feature (855)..(855): n is a, c, g, or t
agcggagggcgccgggcctgcggcggcggaaccggaacgcgcgcccgcggggtaggagacctggagctggagaacccgcccgccagagtcgtagtagtggatggggagtagccgtcccattttcaacacatgtctcattctaaattgacgtttggtgggctggccgaagaaggagaaagacccgcggctccgacctctgacctctaaccccggacgcactttgatttcgccggcttgcgcggaaggctgactccctgggccgcggcctggcgcgggagccgcctgtggggtgtccccggcgcgggagggtgctctggttcaggcccgctgcccaggtatgcacaagtcaaggccttttctgcagaccaagtagccttccctggagagcgcccccagcaccacggaaactacctacatgccccgcggtggtcagcccgccttatcccagccccgagacccaaaacaagaagcatggactgaatttgaggtttctggatggtcgtgtgaaccgaggggacgggtactggactgacaagaaatgagccttgagaggtcaatctggggtgacacccgagtctcctgatggagtttcactatgttgcccaggctgatctggaactcctgacctcaagcaattccacctgcctcaggctcccaaagtactgggaccacaggagggagccaccgtgcccggcctggtcctgtgcattttatagataaggtaactgacaaacctagccacagtcaccccttcgccctaaaggagaactggaatttggaacccagagncttcttcaccaccatctccgttgtttcttggaagcaccctccaggcagggcaggcagcatcacggnggctccccctggggggtg

SEQ ID NO: 432215 - DNA, 1549 bp, Homo Sapiens
  misc_feature (406)..(579): n is a, c, g, or t
  misc_feature (1196)..(1196): n is a, c, g, or t
  misc_feature (1275)..(1275): n is a, c, g, or t
  misc_feature (1291)..(1291): n is a, c, g, or t
  misc_feature (1295)..(1296): n is a, c, g, or t
  misc_feature (1299)..(1299): n is a, c, g, or t
  misc_feature (1308)..(1308): n is a, c, g, or t
  misc_feature (1312)..(1312): n is a, c, g, or t
  misc_feature (1317)..(1319): n is a, c, g, or t
  misc_feature (1331)..(1444): n is a, c, g, or t
  misc_feature (1460)..(1460): n is a, c, g, or t
  misc_feature (1465)..(1465): n is a, c, g, or t
  misc_feature (1509)..(1509): n is a, c, g, or t
  misc_feature (1513)..(1513): n is a, c, g, or t
  misc_feature (1530)..(1530): n is a, c, g, or t
  misc_feature (1539)..(1539): n is a, c, g, or t
  misc_feature (1545)..(1546): n is a, c, g, or t
tcttgcgtttcgcccctctcagtcgatcaattctactgtctgcttccgcgctcttgctgtcttctgctcgactccccggccccgcgcggcggggccgtctcgccctcgtgtctctttttcttccgcctcctttcgtcttctgtctgcccctctacctccttatgtttccgtctcctccgcgtcccctgagcttcctctgctatagttctgtcttgtcccgctcgtggctgccgcctctattatcatcctcagctctctcgtcgtcgtggctctcgccctgtgccgccgttctcttcgtctttcgtgtccctgtcgcttcttcgctcctccctctcctgcttccttctcccgtcctccctgtctcgtttggtccctccctccgccgcgcctggctggctggcgtcgnnnnnnnnnnnnnnnnnnnnnnnnnnnnnnnnnnnnnnnnnnnnnnnnnnnnnnnnnnnnnnnnnnnnnnnnnnnnnnnnnnnnnnnnnnnnnnnnnnnnnnnnnnnnnnnnnnnnnnnnnnnnnnnnnnnnnnnnnnnnnnnnnnnnnnnnnnnnnnnnnnnnnnnnnnnnnngtaaataaaacactttatttgtagagctgggcctcaccggcctcgccttgggcaccctccagcctctggcagggcctgaccctgaccccatcctgggctctgctcatgccagggcagaccctgctcctcaggtgccccctactaccctgggggcgcgctcaggctaccatgcctgggcggagccgcggggctggctccctttaacagaggacgggggctggcgctgggccttccagagccgcctaaggacacgtccttggagcccggctcatgaaatggggcctcacgcaaccttggtgtttggttaaatttgtgccttggctcctgttgcgtttaggcacccaggttcccaagcggtgtggtgtggacctcccctgctgagaaacccgctggcgcgtggaggggcttgcccaggtccctccgacaggagaccctgctccctgggccttggcccctgctagcaccactgccaggcctggctctgagggacgctgcttcttccctgcccacgtctccaaggcctgaaaggcagggttctgtggaacagcatttctcaaaggggcatcctgcagacgttccagccctaggggaggccccgtgatgctggctggcctgcntggagggtgcttccagaaacaacggagatggtggtgaagaaggctctgggttcaaattccagttctcctttagggcganggggtgactgtggctnggtnngtnagtgacctnatcnataannngcacaggaccannnnnnnnnnnnnnnnnnnnnnnnnnnnnnnnnnnnnnnnnnnnnnnnnnnnnnnnnnnnnnnnnnnnnnnnnnnnnnnnnnnnnnnnnnnnnnnnnnnnnnnnnnnnnnnnnnaggagactcgggtgtnacccngattgaccttcaaggctcatttcttgtcagtgcagtacccgtgncccncggtgcacacgaccatncagaaaccncaaatnnagt

SEQ ID NO: 432216 - DNA, 1305 bp, Homo Sapiens
  misc_feature (1127)..(1135): n is a, c, g, or t
cgcgcccgcggggtaggagacctggagctggagaacccgcccgccagagtcgtagtagtggatggggagtagccgtcccattttcaacacatgtctcattctaaattgacgttttggtgggctggccgaagaaggagaaagacccgcggctccgacctctgacctctaaccccggacgcactttgatttcgccggcttgcgcggaaggctgactccctgggccgcggcctggcgcgggagccgcctgtggggtgtccccggcgcgggagggtgctctggttcaggcaggttcccgttgcggcggggttccctcggttgggaggaatgcccctgccgagggtatgctccggctggagggggtgtccctaacggcgggaatacctggactggctggggtgtcccactggggagggtttcccggtggggaggtgtctggcgggggagcggctccggctaagcatgggtgttctgctaggaggatgtgtctggctgggggcggtgtcccaatcgggagggttgccctgatgggggaggttctacagttgtggagatgccaacctggggggcgctccggttggggggtgtgccctctctggttaccccgctctcgctgccactcataggcccgctgcccaggtatgcacaagtcaaggccttttctgcagaccaagtagccttccctggagagcgcccccaggaccacggaaactacctacatgccccgcggtggtcagcccgccttatcccagccgcgagaccccaaacaagaagcatggactgaatttgaggtttctggatggtcgtgtgaaccgaggggacgggtactggactgaccggaaatgccccttggaggtccatttgggtgacaccccaattctcctgatgggagttttcctatggttgccccgcctggatttggaacttcctgacccctcaagaattccccctgcccccgccctcccaaaagtatttggggattccaggccggtaccctccgtgccccccgcgctggacccccggccacttttcacaaaatcccgcaacttcgacaccccctgcggtcgggttcacctctcttccccctaaacggaaacgccgaagatttcaaaccctccgagctccggttnnnnnnnnngctcacggctagtggctcagggcgcgcactctccccgttggcggcgtcccccacaacacccgggcgccgtctcccttggagggtcataaaccacctcccacagtgagccccctcgtgacgaaaatgggggcgctccgccggaggcgtggacgccgcggacgggcctgtgt

SEQ ID NO: 432217 - DNA, 594 bp, Homo Sapiens
  misc_feature (34)..(34): n is a, c, g, or t
  misc_feature (59)..(59): n is a, c, g, or t
  misc_feature (74)..(74): n is a, c, g, or t
  misc_feature (141)..(141): n is a, c, g, or t
cttgaattccaataccaattaaattaaatttttnaaatcggggccccatttggtaatcnccaaaccaaaggggnggggccctggtggtaaataaaagattcccttttttaaattggtccctttaatttccttttctttccngaagcccttgttggtacataaatacggctgccaatgtatcccaaagcaagtcatctggtctttttcatggtctctatagtccaaattgccatctatacgtgctgcttccaacaattttacaaactcttctgtttttccttgcttgtagtattccagcgccaaagcaatccatatgtgcagttgtgtgtgttcctgtttcagaatactgataacttcatctccctccggtaactgatcgaagtcaagttcaatgacctcgtcagtgtcccggaggggaatctcgatggagccccgcgacatgatggggtcaaaaggcgagcaagtgtctcgccccgccgctccgcagccggtagtctccgcttcaggctaatccagaggtgagtgacggctccggctctggtcttgactgccgccccgcggcgccgctggagctctggcttctccttcccccca

SEQ ID NO: 432218 - DNA, 1007 bp, Homo Sapiens
agccaaagaaaacagaagctctttatgccaaatcacaaggacagagaggggaatgtgggggatggacaggagggagggcctgggcaggctgcctgccttttggcaccttgtgcccaggcgagttcccggacccatccaggagctcttagttcgttcagtcaattccttgacatttgatgtgcctggctcagaactgggtgctggggacatctaggtgcataaagccaggttgcattctgacaggagagagtcaagccaaccggccaggacaggcctgctgctttattcacagatttagatgtcgttccatctgctctcgaagtttgaatttctggatctttcctgaaatggtgagggggtagtttgtgacaaacacgatgtacttcggaatcttgaagtgagagatcttccctttgcagaaagcttttatctcctccaccgtggtctcctccccgtccttcagccgaatgcaggcacaaatctcttcccccatccgatcgtccttcactcccaccacctgcacttcctgcaccttcgggtgtgtgtgaaagaagtcctcgaagttctgcggggtagatgttctcaccaccccggatgaatcatatccttagagcggcccacgatcttgcagaagccctgctcattcattgtggcgacatctctccgtgtgaggcataattctgcccacgctttctgccttctgctccacagtgtcctcagggaagtgcgcgaatgtcacgggactgttctctgtggttccataagcaacctggagaccctctggctggacaacaccaacctggagaaggtgagctcctggctgttgctctgccctggttccttcttcccttcctggaggccccaggagccagggccacagctggcaccatcccccgtccccaggttccctgtccctctggctatctccaaggtgagcagctctgccacctcccttcctcaccttgtcacatccctaccctaatccctgtctgctgccagtctcgacc

SEQ ID NO: 432219 - DNA, 723 bp, Homo Sapiens
  misc_feature (43)..(43): n is a, c, g, or t
  misc_feature (103)..(104): n is a, c, g, or t
  misc_feature (366)..(395): n is a, c, g, or t
ggccagcacaattgagagacctccagttagaaatgccaggctngcatttatcccattctcctttattaacttgcgtgacaagtcttccacccaccagatttcnnatcattgtcatcccaggcttgatccagctcattacgtattttctaacttgtcgatgtgcttctgcagcttctcgaaatcatccaaatctcttcacttgcctgatctaatgctttcttttcttcacttgtagttctccaagcagttgttcgcccatcttgtgtgggtgggtattcgcattcttggtcctttgggaaatacaccattaggatacaggtcacatattggaactgagggagggtctgtttgaacttttggtcctcnnnnnnnnnnnnnnnnnnnnnnnnnnnnnncagttgctccatctccatcgccatctccatcttcatcatcttcatctctttctttatcttccaatgctgatctttccaactgtcttgctacttcatccactgaggctcctgattctttatcaggttcctgttcccctgctgcagaaggccctttgctcttcttcttctttcgtctttttttcttggctgcttcctcagccgtagaggcagctccttcttccctgtcgtctggatccaggtcgccattcaggtggctcccggaggccgctacctcctccacacccgaaatgttgcccgagagagcgcgagggaatgagacagagcggcg

SEQ ID NO: 432220 - DNA, 1975 bp, Homo Sapiens
  misc_feature (1565)..(1594): n is a, c, g, or t
ttttcaaatctgaaaatgtctttattttttagaaaatggattccaggaaggttaaaaagcaacaccagagggtataggtgcagaactggatgtagtcattcaaagcattcaagtaagaatatggcaatataaatatccaaaaagtatctcttaggtattcaaaacaaaacgtataagtcattcctaactaatttgagctttatagcattttcctagacaggaaggggaaaaacagttagcatttaaaagtccggaaagctttttcgttggttaattacattagacggtttgcctttgtccaaattccttcttttttaaacatggataaaagtattacatgggtccactgttaaaacagacaacatgtggcaaattaattctggtatcatgttttccaacaaagctcagaaaataaaggtgttgaggtggctttggactaagtttaatagtcatctcctctgctgacaacttctttacatgttggacgcaacaggatggtatgttcaaattgcgctgtatatgatcctttaatgtcacataatggtggatatggatctacaatgcccaagtcacacagattcttcagagccatcaagtatttactttctcccaagcgatccagccatctgcggcagaaggcaagggttccaaagttttcattgatgacatttagcaagtgttttgttcttggaagccttattggcacatgtccaacatcaaaatttttcatgtaatgtgaacattccatatcatcatgaacaacaccttttcctgtactaccaaaggtttcaattgcatatacttctccttcctccattcttgttgcctcccctcctttcacaatcggcactgtttttcccagcatgtaatcctatattgccccaattgaatgtccatttagattacggattggtttcacttgatatgtcttccccatctatttcaacttcataggactccataacttcttggatggcctcaccaacatcacacagacgaacatcaattccagcacactttattccagtgttagtagcatcttttacagcttttaataacgtatcatatttgggattaaaagtgacagtaaaagcacagtcaataatcctaccacttatatgtgttccaaagtctattttacagatgtcatcatactgtaatactgttgtgtcaccggcattgggagtataatgggcagcacaattattgagagaacatccagtaggaaatgccaggcctgcatttaatccattctcttttattaacttgcgtgaacagtcttccaacttttcacagatttctatcattgtcatcccaggcttgatccagctcattacgtattttctaacttgtcgatgtgcttctgcagcttctcgaaaatcattccaaatctcttcacttgcctgatctaatgctttcttttcttcacttgtagttctccaagcagctgttcgcccatcttgtgtgggtgggtattcgcattcttgtcctttgggaaatacaccattaggatacaggtcacatattggaactgagggagggtctgtttgaacttttggtcctcnnnnnnnnnnnnnnnnnnnnnnnnnnnnnncagttgctccatctccatcgccatctccatcttcatcatcttcatctctttctttatcttccaatgctgatctttccaactgtcttgctacttcatccactgaggctcctgattctttatcaggttcctgttcccctgctgcagaaggccctttgctcttcttcttctttcgtctttttttcttggctgcttcctcagccgtagaggcagctccttcttccctgtcgtctggatccaggtcgccattcaggtggctcccggaggccgctacctcctccacacccgccatgttgcccgagagagcgcgagggaatgagacagagcggcgagggccccgatccttctccacccgcctacaccagccacgccggaagctccgct

SEQ ID NO: 432221 - DNA, 993 bp, Homo Sapiens
ggcaaaaaatctgatgtgcttatatttattgtgtcaaaattctactgaaatgacagtaaatattttttaaaaggaatgaatccaaaaccatatatagagcaagaaggaaggcccaagaattttggaaattctgacaaatttctagaaggcagaaagctgggggcatcagagtacagaaagtcacaaaccagacaaggaggggttacttttagtccagacaagtgactccaagctgagtctttagatacagaaactggaactacgttggcagtattcagtttgacattaagggctgtttgtgaacagctggactagtcggcccttcccataccctcagtaaccatcagcaatggtatggaggaggggaatagcagtatctgcaccaacgttaacagacagacaggtgcttttaaaaggaatttgacaatattacgtgcctgaaaatggagtcaggttccaaacatgggagttggcccttggattatgccctcttcattacttgtccagggaagacttcctggagtccttgacctaacctacaagatgaaaagcagccagttaagtaaaacaaaagagaagtcaagtcattccaggcaaaaggcataacttgaccttgagcaaacttgagaaggcaagggaaatattttatagttgtcagaagaaaaagttagtcctagttgtgagagatgctgaggctggtggggcaggcagtaaccagatctagtttgtacttatcctatgggcaaaagagagacagtgaaggatgtagtgcaaagatgaaatggtcaggaccattgttttgcagctgtgtagaggaaggactgggaattaatgccttctgggtattttaatgtggtggtttccaaggtgtggccttggggaacagcattagaacctgggaacgtcatagaaatacaaattactggtttactacagcctactgaaccacagcctctgggtgtagggcccagcgatctgttttaataagtctta

SEQ ID NO: 432222 - DNA, 434 bp, Homo Sapiens
atatgtgcaatcaaatttattaatcagtagaaaaacaacatgtattcaatttaatgttaatccacaaatagctcttggtcagatttatgaaagtctgtgtaagttagaacacaattttacatttttttctctaagcaatatgcaaaagataacaatatttaactacaaatatataaacaattttagtattatactaaggattgtacttgaagaagttacaatgtaatggaaataataacttaccatattacaggtctcaacactatcatgttggcccctattcagagactgtgcagcgtacacaattagtgcagcagcagttcttggtataatatatgacaaccaagtttactggtaagcttgaaaataattcttatgtaaaaattagagattttatgaatttctgatggttcagtaattttttttcagaaatg

SEQ ID NO: 432223 - DNA, 1332 bp, Homo Sapiens
  misc_feature (364)..(471): n is a, c, g, or t
  misc_feature (481)..(544): n is a, c, g, or t
ttggggaagggaacagttcgggggaaagtacaaccttgctgttggctgtggctgcccactgctggcggtttcatctgtttcctgctgccgctggaatcgttggagtaaaagacttctgaaactgtttgaaatagccagataatacagccggccgaggttgagaccctgattctggttcggtttcatgcaccactggtgtggcttccttttcactgcgattgctgtcttgtctagtgaaaacgggttcctcctctttattacagctgttttcactttcttgtttttctaccatgggctctaaataggttctctgggttcaattttctcctctaatttttccctttccttctccagctcacattcnnnnnnnnnnnnnnnnnnnnnnnnnnnnnnnnnnnnnnnnnnnnnnnnnnnnnnnnnnnnnnnnnnnnnnnnnnnnnnnnnnnnnnnnnnnnnnnnnnnnnnnnnnnnctgctccttnnnnnnnnnnnnnnnnnnnnnnnnnnnnnnnnnnnnnnnnnnnnnnnnnnnnnnnnnnnnnnnnctgttcttgttctttttcaagttctttctcacgctcccgttctttttctcgctccctttccctaatttcctctggagatggttgtttttccaggatgccaagcttctcatccaatcgtttcagtttctccgcacaagctgccttcctttgttcttccattcttcgctcttcctcttcacgccgtttacgagcacgttctactgctgcagaaatttctgattgttgtcttcgtctttgcttccatatttcatcttcatcagctacttgctgcttggagggaaaggggcctggtcttccaggtactgcctgtcgatctggaggtggatgctgctgtgcaagcaactttggaggtggtggcagatgtgaagatgttccacgttcctgattaaatgaaggtcctttcccatagggaacttttgctactgatggttgggcaggtatttgggaagatgatttagtgttgaaaacttcatctgtttcttttttgttttcgttgttttcagaggcttttgaaccttgatcctcactgttattctctttaggactgttacttccttgttcatcatcatcactgaaattcagttgctctgtataatctacttccatctgagcacctgcccaaccttcatcagcttctgcatctatgttatcaaatttttcaagctccttcagttctgatgccctaataatggatgggcgttccggctcagaggcccatgaaggccgtgggcctcttcctcgtacgcctttgtttgtttcagattatgacggtgggaatctcatgggcc

SEQ ID NO: 432224 - DNA, 362 bp, Homo Sapiens
tcgactctattaggatccccgctgagatgacagtcggccgaggttgagaccctgattctggttctgtttcatgcaccactggtgtggcttccttttggctgcgattgctgtcttgtctagtgaaaacgggttcctcctctttattacagctgttttcactttcttgtttttctaccatgggctctaaattaggttctctgggttcaattttctcctctaatttttccctttccttctccagctcacattcttttggttgcttttcattctcttgacagtgtcttttgcagagcagacatttttgatgaagtctagcttactaattctttctttcatggatcttggctttagtgtcctatcta

SEQ ID NO: 432225 - DNA, 952 bp, Homo Sapiens
  misc_feature (205)..(214): n is a, c, g, or t
  misc_feature (931)..(931): n is a, c, g, or t
gcctgggtggcgaattcggcacgaggcggctaaggagagcgggcaggcaaggagattccgggccagggtcgcggcggcagtcggcaagcgttcgattctctggcgttggatcgcgagcggtgtctgcttgtcccgccgagggctcccaggacagggcagggatctagggggtttgcgcacctgctttttaatgccccgccccccnnnnnnnnnnaaagtggagggggtgaaagtgagggaggagaatggacagaatactgactggaacgttaattcgagcatttcatatgcgaagagcggaataacagttccgtattcttctttcagtttctccattagattagcttcattttcgaatgctccgttttgcatgcttaattttgaaactagccccgtggtttggcagaatttgactgaattcaggggtgagagtttgatccagtccaagtgtatttgaatttgagcacgcagttcaaccagtgtttacaatggaatttctgaagacttgtgtacttagaagaaatgcatgcactgcggtttgcttctggagaagcaaagttgtccaaaagccttcagttagaaggattagtactacctctcctaggagcactgtcatgcctgcttgggtgatagataaatatgggaagaatgaagtgcttcgattcactcagaacatgatgatgcctatcataccactatccaaatgaagtcattgtcaaagttcacgctggcagtgtaaatcctatagacgttaatatgagaagtggttatggagctacagctttaaatatgaagcgtgatcctttacacgtgaaaatcaaaggagaagaatttcctctgactctgggtcgggatgtctctggcgtggtgatggaatgtgggcttgatgtgaaatacttcaagcctggagatgaggtctgggctgcagttnctcccttggaaacaaggcact

SEQ ID NO: 432226 - DNA, 483 bp, Homo Sapiens
ttttttatttgaaaaacttttattttgcataaaacagacccattccctttgtgggtcagatgttaccacctttaaaaaaatgttttttaactctcctttctgtcccactgaaaaatttattttgaaagggttaagaagagtctatcattgctggtcaaaatcggcctgaggatggccgccagggacagaggcctgaaggcatcatctgggcaggcctggaagcccacggggtgcagcatcctcaagcccaggggcgggagcgcctccggcctgccctccagggaagctgcatgtggacctccacggtattcagcctccagtttagtcagccttgagtctgggctgctcccgcacctggtgttttatgcgtgtgatatatgtgtatccatcctgcttccctgccttcaagggaagacttaactctccgagagaaaacctgcctggagctgcgcacattctcacagcttgagaacgcttgacgca

SEQ ID NO: 432227 - DNA, 481 bp, Homo Sapiens
  misc_feature (440)..(440): n is a, c, g, or t
  misc_feature (462)..(462): n is a, c, g, or t
atttgaaaaacttttattttgcataaaacagacccattccctttgtgggtcagatgttaccacctttaaaaaaatgttttttaactctcctttctgtcccactgaaaaatttattttgaaagggttaagaagagtctatcattgctggtcaaaatcggcctgaggatggccgccaggacagaggcctgaaggcatcatctgggcaggcctgggaagcccacggggtgcagcatcctcaagcccaggggcgtgacgccttccggcctgccctccaggggaaggctgcatgtgggacctccacggtattcagcctccagtttagttcagccttgagtctggggctgctcccgcacctgggtgttttatgcgtgtgatatatgtgtatccatcctggcttccctgcctttaaggggaaggacttaactttccgagagaaaacntgcctgggagttgcggacattnttcacagttgagaacgttt

SEQ ID NO: 432228 - DNA, 903 bp, Homo Sapiens
  misc_feature (778)..(778): n is a, c, g, or t
  misc_feature (859)..(859): n is a, c, g, or t
ataaggtatcgtatgtatgtgctcaaggtacaatggtacactcagcacatctatggtacgtaataaatctttgcgtaataaaactgtcgtacccataatgctcacccaggatcgaggagtcctgttgcaccccatgagatgatggataagatggatttcaacgataaatattcggtctatggtgtctcgtctctcagatttgctttcgattctagaggcaccctctattgttttcccatttcttctaggtttctagttttgtttgactcttttgcttcgatgtctcttcctggcagcagacaatatcattcagcttgtgctcagtttccctataagggtaagaaaagtttccatcaggtagccacttgtttttatactgaaagactaatctgctccaaaatgctcccaagtagaaatgacaggactcaaaatccctttctaaagcccaacagctaactttttctgactaatctctagcttcattgaaactggctaccaagattgcatttcaggctaacaattggcttcttagttaaggcatcacaactgaaaatggttatttcaacaatggatgctgtggatgaaggaataccaacaaacttctaagaactctcatcaaaaactaaagcaatttgctttgccccagtggcaggcagaaggaatttagcccattatctcacaaactaggaaaggattgttgaattctgaactagcagtctgtcacttgtcacagtaactatatgtataagctgtatcattttgatattcagtgactttntttgtagttttagaatatatattctgcaggcatactttaatgtcatcacttgatatgttggcttcctatttggaaaaaatnatatatatttctcccaaagacacacaggacaccacaccacataa

SEQ ID NO: 432229 - DNA, 1199 bp, Homo Sapiens
  misc_feature (988)..(988): n is a, c, g, or t
tgctgcgagaagacgacagaagggggagtcatggcaggaagctggggagggcgggagatcacaccagacaattataaaagaagagctggtcctgaagctcacaaccgtaacagccaccagacaagcttcagtggccggcccttcacatccagacttgcctgagaggacccacctctgagtgtccagtggtcagttgccccaggatggggaccacagccagagcagccttggtcttgacctatttggctgttgcttctgctgcctctgagggaggcttcacggctacaggacagaggcagctgaggccagagcactttcaagaagttggctacgcagctcccccctccccacccctatcccgaagcctccccatggatcaccctgactcctctcagcatggccctccctttgagggacagagtcaagtgcagccccctccctctcaggaggccacccctctccaacaggaaaagctgctacctgcccaactccctgctgaaaaggaagtgggtccccctctccctcaggaagctgtccccctccaaaaagagctgccctctctccagcaccccaatgaacagaaggaaggaacgccagctccatttggggaccagagccatccagaacctgagtcctggaatgcagcccagcactgccaacaggaccggtcccaagggggctggggccaccggctggatggcttcccccctgggcggccttctccagacaatctgaaccaaatctgccttcctaaccgtcagcatgtggtatatggtccctggaacctaccacaagtccagctactcccacctcactcgccagggtgagaccctcaatttcctggagattggatattcccgctgctgccactgccgcagccacacaaaccgcctagagtgtgccaaacttgtgtgggaggaagcaatgagcccgattctgtgaggccgagttctcggtcaagacccgaccccactggtgctgcacgcgncagggggaggctcgggttcttctgcttccaggagggaagctccccagccacacttaccaactcccgggcctgccccagccatcaggctggatatttccctccgggtcttggggctggcttttcccctcctggggggggccacccattggaccaataatcaaggaaccatctggccccccctggagggggcctttcccccttctggtggccc

SEQ ID NO: 432230 - DNA, 1218 bp, Homo Sapiens
tttttacaggtgtaaacaatgctttatgggggtagggtgggtgctggacaggcctccaggtaataaataacaggtactagcaacagcagggccagatggggagttggggacaaatgaccctggtctcaggctttgggagctcttgggatatggttaggggttcagggggacagacgttagccaagacagaggaagcagcagcaggtacgggattcccccttcccccgtggctcagtcttgccccaaagccaggccccaccaggccagggaagggggacaggtggcaacgtagcttctccgggccagggcaggttaggacacggcctctcagagcctgggcctgggccccagcagggctggtcctggagaacaggtgagctggctccacagagctcagcagccacacggctgaggggccacggcctgggcactccgaggctgccgaagctggcggagggacgcatccccgtactgaatgccagagcccatcctctccgggtctagctcgcctgagtcaatcttgttgaggatagtgcgggcacacttgaggaacgcctcctccacgttctcgcctgtgagagcgctggtctccaggaacatcagctcattctcctgggcaaagcgggaggcctccaggaaagtgacctcccgctcagggtccaggtccttcttgttgccacagaggatgaccacgatgttggggctggccagggtgcgggcatccgtcagccaggcagccagtgagttgtatgtctcccggctggtgatgtcgtacaccagcagggctccagccgcccctcggtaataactccgcgtcactgaccgaaaccgctcctggccagccgtgtcccaaatctgtagcttcacagtcttcccacccacgttgaccacccgggatccaaactccacgccgattgtgtggttggagtcctgtttgaacttattctcaatgaactgatgaaggagacatgatttgccagttcctgcactgccaatcaccaggaatttgaagaggaagtcgtaggtctcagccatgactcggtcgcggccgctgagggccgcaatatggcgccgcggccgcgcctgctcctcggctggcagccgctccactccggctacagccccggctccttcctactccccgggcccggcaccgctacttccgcctccgcccgcccccgctctcgacgaattcgagctcggccgatttggcctgat

SEQ ID NO: 432231 - DNA, 1108 bp, Homo Sapiens
tgttgcgcggaagcattgccggttaggttggtttcgacccgtggactgatgttcttaagtactgtggacacaggttttagcatatgtgcaaacgcagggtcgattagagtacaggtgtgcttgagacagcaccgtggtctaggttgctaaagggggaaaatggttcctgttgttcactggatgaagtcccactgaattcgcacagaaacatgtttgcgaacgacttagtttctcgggaacaggcagtcgcgataatgaatcatggctgacatctcccataaggaagtttgtaagggatatttccaaaggtaaatgcccaaggtttcaatagaagttaacacttcctggaagagatcgtttttgttttcttcattaacttctgtgaaggttcacagctttcacttttgcagtgagcatttctgcagcattttgaagatcaacagaattgaggttctgatgtttattcattatagactgttaaaacacggagcagttcctctagacgtatatgaataacttctgttaaaacagtctgaaaatatggcttctttcaaatatagtaacatgtgggagaacttcctgatatcattcaccaactccttgatgtaatccggatcaaaaatagagttggaacttaaggacttgagccccatttcagaagttgtaatatcagtagagagttgacctgatgcccaagcacgttttttctttgtctttttctgtttgtgagcaatcatcctttcatgtaacagtcagaaaaactgaaatccacggcgctccatctcgcgtgccggacgcggacgcccgccccacacctacggccgccgccaccgccgagggctggagctcgctgcccccatcccccacggcctgcggacgcccggccaaatctcagccgcagccgcagccgcagccacagccacaggcaccaccaccactgcagccgccaccgcccctgcagctaccgccacggccgcaccgcccgcccgccagccccgcccctggagcccagcccattggcccgcgctcccgggggcggggccggcgaccgcggcaggtacgggaggcaactagctcgcgcgcctagaacagcgaccgccagtccgct

SEQ ID NO: 432232 - DNA, 324 bp, Homo Sapiens
cttattcaggtccactgtatccagctgccccagctgctccaagaggtcattaataatgctgaggaggctagtaacagagtttttggcttttctggcattgatctcggcttcttgagcagcctgtgaagccatccctgccatcatcatgtcctggtcagcgtcatcttgttttctctttagctctttttctgcttcctgcagttgcttcaacatattgttcacctcattatccagatctgtaacttctgcaaaagttctttcagcttctgccttggtgctggtggcattcttttggacagcgcttgcgatcctaacgcctctgca

SEQ ID NO: 432233 - DNA, 1007 bp, Homo Sapiens
  misc_feature (926)..(962): n is a, c, g, or t
ttaacccgtttttttctccctttggccaaaaggaaagcacctggaccgggggttttgattcctttctttcccatcctgcatcctcatttttcttcttcatcatcctccaaaccaccaattcggccatagaggttgggggtggtgcttccttctaggtccccataccgacgaaaaagttccttcaaataatcacctttgtagattcctggggttctggcttgggcaaaagtagcaactgctgcttcgatactccaatccattttctccacctaaaaggcacatatgaggaaaccagtgcgattgaagccatgagtacaatgaacacctataagttcaggtggatttcttgtcattaaaccgctcacacagacgaataaaggtctcagtattctcagtggtagggcactcaccatgtcctttacactgaagttttatatatttgattccttctttttctatgtcatttcggtcatagaaccttgaagtatttgtcaggtccaccaacaagcccattttaacctttaggctctttaggtaatttgagagcatgttgggatggaaccgattttcttcagcaacttgactatcatatcttggtcctaacattgtcttcagaggtaagaatcttcctgccaccggctggccgcgccggggacagttcagccaccgcggcgggatcttgttgtgagccatgtcttggggctgcgcagagctgccctccctcaccaacgttcaccgcgcctttggagccgcctccccgtggtccggtgcacaccggggtccgagacacccgaatcgcagccgtaatctgaattccaacctctccgatccgggtaacgtcaggggcggcgcgccactttcattcaggatcaactccacagctccccgctctcgacgaattcgagctcggccgatttggcctgatnnnnnnnnnnnnnnnnnnnnnnnnnnnnnnnnnnnnncgccgcccccgggaacctcaggtcccactttaggtagtactttcc

SEQ ID NO: 432234 - DNA, 836 bp, Homo Sapiens
tgggtgatagtttgggttggtgggtgtagggaggtggggttgtttattgtagtaggtattatttatgttggtttttgtttgctgctttgggtcgtttatttactaagagacagcaagaaggggtgttacacatgcagggagcggagcgtctggggctcctctggagtgaggacatttggctgtcagtgtccagcatctgtgaaagcggggatcctccaagccagggctagggtgtgatttattctgcagttgactccacaggctgcaggtggcattggtctggggtagatagtgagcacccatcccaggaggtaatcaaaggcctgtagatgcgagactttatggtgctgtgtggcctcaggagctcaccagaccagaccctctgggcctcaggccactctgaggctgcacccaaggaggaatcagtagggacagagggtcagcaggtcttgttgggtacagccactgaggcagcagtagcgtgcagggttggtggcagctgcacggtggtggcggtgatggtgagaggtctggggcaggggctgcaggccaggtcccagcgtgagattactgtcggccaccagcccatggagcagatgtcgtctctccagccactgtagcaactcacggtcgcctccggccgcaggcctcctggcttcggtggaccagcgggggcccccgcacacgcgcactagcgcgcgtacgaagtggtggccgcacaacttctcacgcatctctggggtgggcgcggggcccaacgcgaacaccagggcagggcccagcagcaccagtgcccaggcgggcagacgggggtccatcccgagaattccggaccg

SEQ ID NO: 432235 - DNA, 331 bp, Homo Sapiens
tgggaatgttgctaaagatgtacatttatttgcttggagttattaagtaaacaatataatgcgaaataagttaaaaaaagaaagtatattccaaaaagtgtccctttctgggcaatatacaaatatgcagactattaagaaagttgactagtctgaggagcttgctagatacatatattcctgagcccacacacaaacttgactaatccaaggagcttgttagatacatattcctgaacccccacactcaaggattcagggattctcattcaggcatccccctagtccccacccacacacacccagccagagtttttttgagaaggagtct

SEQ ID NO: 432236 - DNA, 1275 bp, Homo Sapiens
  misc_feature (50)..(55): n is a, c, g, or t
  misc_feature (57)..(59): n is a, c, g, or t
  misc_feature (61)..(62): n is a, c, g, or t
  misc_feature (64)..(64): n is a, c, g, or t
  misc_feature (66)..(67): n is a, c, g, or t
  misc_feature (70)..(70): n is a, c, g, or t
  misc_feature (72)..(72): n is a, c, g, or t
  misc_feature (74)..(76): n is a, c, g, or t
aagaaatggtttagaaagctcctcgaggggccgaggcggcccgacatgtnnnnnntnnntnntntnnttntntnnngggttgatatacaaagttttatgtgacctgagcccctctggaggcaccagagtccacactctgtactcagaaggtgagggattggctcacgggggcaacatggcccgaaaggtgggagatcgtccatcccctgcgggaaaggaggcatccctaatgcattgcacaggcttgaagggggcacacccccacagttggggaggaggaagcaatgatagctaagaaggagaggggcaccccaaagaatactacagtatagggttagaaccttgaaattgcacctaatagtctagacctgtggacctttagaatcttagaaacttagaacatttgagtcttagaactacagtgcctagaactataagattttagaaatgtggattcttggactcttaaccatggtcctagagaggcagaatgcagcaaagaacctaaaggtgtccaacattagaaattattagaactttggtgtctagttagtcacaactgagtgtgagagtcttataacttagatgcttaggatccggaatcttggaccaatggaatctagagtgccttgaaacagaacagaccgttagaatcttatttaatcatctagaatcttggagcatctgatctagaatcttagacacagagaatctaagatcttagagtaagtcttagaatatccacattttagaaacaccggactttagaaactccatctttagactcttggaacttttgaattgcagattctagagctttcgacccttaggatctaggatcttatacaagagaatctattatcataaagcctcagaaactataattgatcatcattagaatcttagaacttgagaagataacattttgaagccttatgatctagagccttacagccagagaatctagactctcagagccttagaacatcacattttagaatcctaggccttagaaccctccatgtcctagaactatagaatctttagaatctataatcttacattttaaggactctgaactctagaagaataaacatctagactcatagagccttagctcctaaaatcagaatcttagaactttagaacctaaaaccttgaggctttatcaaaaatgttagaaccagaaaatctaaaaccacataatgtcagagctttagaacagtaggtcttaaggttgagtgatccgcgggaattcccggacccggtaccagc

SEQ ID NO: 432237 - DNA, 445 bp, Homo Sapiens
  misc_feature (364)..(364): n is a, c, g, or t
cgttgatatacaaagttttatgtgacctgagcccctctggaggcaccagagtccacactctgtactcagaaggtgagggattggctcacgggggcaacatggcccgaaaggtgggagatcgtccatcccctgcgggaaaggaggcatccctaatgcattgcacaggcttgaagggggcacacccccacagttggggaggaggaagcaatgatagctaagaaggagaggggcaccccaaagaatactacagtatagggttagaaccttgaaaattgcacctaatagtctagaacctgtgggacctttaggaatcttaggaaacttaggaacatttgagttcttaggaactaccagtgcctaggancttttaaggtttttaggaatttgggattcttgggttttttaacccatgggtcctagaagagggcagatttcaagcaaaagg

SEQ ID NO: 432238 - DNA, 1435 bp, Homo Sapiens
  misc_feature (1233)..(1365): n is a, c, g, or t
cgccagggcccagcacgacggtaaaacgccgggcagtgaattgtaatcgacttcgctatagggcgaattggggaccgggcccccgctcgagttttcttgtttttttgagaaagtagtaaggatttttattgtcaaaacgagatcataatagaagacacaaataaattaattgttctcataattttagactccagggcctctctatggaaaggccagcttcttatacagacaaggtactatccaaaacaaaaagcaggtatttgagacagtgttcaagacaacaagtgaacttgtacacagtgaagagaaataaaaaggtggcttccgtatttccctccctcagtaaggttatgtgttgcataaagggatgaggctcattttggtgaaaaatgctttcatacagaaaattttgaattgagtgacctccccgcacaggcgttccaggccctgacctgaacaaggaaatcaaagtaagttaacaccactggcttcacatgaacctcaagactataatctaacggtatctaccatctcctttactttaaaaaagtttaatgtccatttacctataccaaatcagtagacttaattttctctcttaggaagtttttaaccaaattacagctaaattaatctcactttaaagtgcaagaaaggctctgctagagtagtgtttgttctgtggcatagaaagaggagcatgcctcctccggcactggcctaagaggccccacatgaagaactagctgcaagacagtgatccattaggtctgccaaaaagcagggggactcaaggttcagcctagaaagaggggtccctgccaagtctggcttttacctgtacccaggtcccaaacaaaccttgggtcccctaactgataaggctggagcacagcaccagtcatcaacagggccaaagtcgtcttagcgagtcagtgagcacctctaagccatgatttgtcaatgctcacatggatagtggtaaaggaataaagaagcctgggttttggaacagtacaaacattctttacctagtaagcagtgatcaaagttcttacctagggtaaatgatgaaaaaaataggtaatgaggtccccatacacccgtgctgagaatattagtctaactttaaagcagtacaaaatggcttcttccacacaacaagggcaagctttatactaatgtttctcaaaaaccaattacatctccagctctagcctcaatttaataggnnnnnnnnnnnnnnnnnnnnnnnnnnnnnnnnnnnnnnnnnnnnnnnnnnnnnnnnnnnnnnnnnnnnnnnnnnnnnnnnnnnnnnnnnnnnnnnnnnnnnnnnnnnnnnnnnnnnnnnnnnnnnnnnnnnnnagtacgaatacgcgataaatcgagcgcgtgggtcgacgatatcccaaaacattccggaccgtaccagcca

SEQ ID NO: 432239 - DNA, 647 bp, Homo Sapiens
  misc_feature (596)..(596): n is a, c, g, or t
atgactaagccaagaacttccagtttttattttttaaacatcatttaacaagaaaaaacattcaaccaaattaaaaagaactaggttggattaatttacaataaaataatcaacttaaaatatcggcccttccatttagggccaaggaggccaatagttcctgtttaaacagcagaattgcacaattatttttacctatatttgatggcacaaaaaaataaaagtcttacaacttccacggacatcctcccctccctccagagcagagttcatacaattccatcttaggtcagtactcaggcttttaaaaatcatcttacgttttgaaatataatacaactactctggtaacaagaatacttttaaaacaattcttatagaaaacaaataccttagataattgtgtggcacattagaactggctcaaagaaaacagccaagatgaaaaataatgtataagaattatagtcccttgtttatagaaaccatccaaataaaatattttccctaattttccttggttcttataatttattagccgagatggattaccagaggccgaacgcaccttttttgggttctgggttgtaggccgnccacttaggagttctggaccataaatttaaaggccaatatggattatggtc

SEQ ID NO: 432240 - DNA, 1771 bp, Homo Sapiens
  misc_feature (66)..(66): n is a, c, g, or t
  misc_feature (604)..(613): n is a, c, g, or t
tgtttcctttaatcttttggcaggtaaacatagggttaaccttcagtactaagatacccaaaactncgttccgggtaaagcaaaattcctgtgtagtttgccatgatttcccaaaaaaatataaattaagcccttgaagaaatgatgtatgaaatctgctctgtaagtacttggtgaaaacgactgctaacaggcagtaataatgtgtcaacataaaaaaactacttgaatcaattagctactcagaggtccatctttgaaacagcagcttcttctcagagcaaacagtaagcaacagaaaatatacatttgatgaaacattctttgcattagagaaacatgaaaataaatataattcaaggaagtataatgattcttctaatatgtctttctcagacctgtactagtttaccggttcaagaagctctcatcacattttgtcacttgtattttacatattgctattcgggtaattcaaataaaatgcaggtcttgtaaaagaataaaaacattgacaagtatgcatgtgccagggaccaaattagagggttctttggtgcagttagtccaaattctcagatttgaaggataatatgtaccaatnnnnnnnnnntctgctgctagacatttacagcagtgctctgtcttgcttcacattagaaatcgaaaacagctgttctcaacaagccaattttatttttttaatcaggcattgccagaaaattttgtacattaacctggaccagtgatggttctgtaccctctttgctgtgaaacacgacatgagctaaaggcaaagaccggttctcacaaggacaactgcttcaagttaggaaccagaacagtgcatttaaacagtcttcttagatattttcttgcctttcttaaaaaccagcttatttttaatgtagccacgcttccttttggtagtcttctttgacaaatacttctgttttgggaaaatgttggtgactcgaggtttgtgatctaatgtctccctgttatcaggtgcttttactttatatatcctaacaagccagtgttctgatgtaaaggcttcttccaaatgtttgaatttaatgtccttatttccaatctcagcattacgtgttcggtcaaaacctgggggtgtacgaaaatccagctgcatttctccaaatctgtagtatgacattttatacataaggcaattcaacaaagtaggggatcctgctttgtcttacacggaattctcccctgtggggtaaaatagtcactttccccgaatgtctttgggatgttctccttcagctatcctaaccatccagagaaatttgttgatatcatcaccagaatagccaataacccctccaaaaataaccaaaacatattctacatctagagtcctcatgattttataggctgctgtttcattagaagacatagcttttcccaccagtgctatgtggctgttattccaggtgttattatccaccaacgtagttctattagccattccagctatctgatagccataatcccaccaagacattactcgtgcatgttcatctgtattttgccttagccaaaagtaagcttctctaaaatcatctaagatattcctggtgccatcatgattgtatgaggccaggactacacttggactagagtaggcattgcttgtgacccaggtacagtggacagcaaacatcatcaatagcatcagcatcaacatggtgacaatgctttttatattagggcctaatccctcttcagttttttcctgttcccc

SEQ ID NO: 432241 - DNA, 455 bp, Homo Sapiens
  misc_feature (425)..(425): n is a, c, g, or t
  misc_feature (432)..(432): n is a, c, g, or t
tcaaaatttgaattaactttatttcccctacagtcaacaacttctctgcattgaattttaaagcaacaaagtaaaataaaatcccccaaatgacaaggtatcagaaatccagacttcgttacactctatttgtgaaaatgttcagccattttattgttctgtaaaggaaccatcatctgggtcaaaaatgaattctataaatcaaagaatattctacaccttggaaaagaaaatcagcagtaacattctcactgaatattgtaaattacatttttcttcataaaaggtacatactattctgcacttttccaccaaaagcagtggtgtgttatgcttgttatataaaaaaagttatatcctgtggcagggaaaaaccctttctcttttcacttttactaaacaactgggagaaaatgttcaagtcnggtatanagttggcctataagctggaaagt

SEQ ID NO: 432242 - DNA, 1335 bp, Homo Sapiens
  misc_feature (49)..(49): n is a, c, g, or t
ccaagtagctggggctcttccattttgcagataagtcaaataatcaccnctaaaggaggctaaactgttgatgaatgagagactccctgactgctcagatgaccctagccacactgaaagggcacctacaggtcagtttagctacctcctgtctttcccatgcaaagctgataacacagttgtctttggacttgtagacctcttggattccaggtgtgatggagtaaagtgtgggattgttgttcttgctgggatgcaaataactaaatgctttggtggttaattgctaagagtaaatactactttagccatccaagccaccttctgcagcaaaaggcttttgtggagaaccttttatgttcccaaccactttttgaatggtgtgccatttaaaaatccaggccagatcctattataaccaactctcaggatttacagccttcagttgtactagaattttgtttttatccaatactcattaaataagtgggccacttaggaagattcaaaatcttggttattacatgaagtttgttatatttcttgtcaacagtattgaaatgtaatatgtatgtgttcatgtatgaaaatttttactccacacaggtgtttcagtagagtggggcaggaaaagagatctcttcgatttctttcaggcctgaggcttttgtgaaatgcgtcagccccctgtgacagtaggttttgatgctagtgatcttcagatctttctctctggaaatgtgcagagagtgtcagtttcccaagttctgaggtaactcctcgcccagatgtggaatgggagcctaccagctggcatacaagggaatgggtaggaggacctgggtgctgactcttttcgcactggcccctttccatactgctgatacattcccatggctctgaaaaagccttatcctcaacctatttggaaaaacccgccaggcacaacaaggaatgaccccaaaggactactccttttatccttggtatattggattacctcaaaggggataattcacctcactgcttgacgggaaattttgcccgaattttggaaatggaataaaaggccaaacaaaatttttttaaccccctccattttgcccctttggggaaattttaccgaagaccaccccgtgaggccgaaattaacacacataatttttttcagggaggggcgcggacccctttaaagaaaacttcaaaatagacttcgggaacattgtgggggacaaaagaaaaaatgaacccggacctcggaaagccacacccccacattaagtgcggctgcgtgaaattttagacactcgaacaagactttcccttttataaaca

SEQ ID NO: 432243 - DNA, 1106 bp, Homo Sapiens
gggacagaccgccgtgagagaggaggggtgccggccgggattcgcggcccggagctcgggaccggagtcaggaatggagagaagggtaatggttttacctcttattgtggaaacctgttgagatcacagagaatatactgacggcataaaagggcagaaccatagcagggtgcggttgcttcattccagcctcgcagtcacctctgtgccctgctggttgtcttcccagcgctgctgtagttgccttccatggatctataggagagcaagtcctccaggagaagaagtcctcaccagtgaacggagacctctctgaactaaggataccatggccacgtcagccccactacggagcctggaagaggaggtgacctgctccatctgtcttgattacctgcgggaccctgtgaccattgactgtggccacgtcttctgccgcagctgcaccacagacgtccgccccatctcagggagccgccccgtctgcccactctgcaagaagccttttaagaaggagaacatccgacccgtgtggcaactggccagcctggtggagaacattgagcggctgaaggtggacaagggcaggcagccggggagaggtgacccgggagcagcaggatgcaaagttgtgcgagcgacaccgagagaagctgcactactactgtgaggacgacgggaagctgctgtgcgtgatgtgccgggagtcccgggagcacaggccccacacggccgtccttcatggaggaagggcgcccagccccacagggaaaaaatcctgaaccacctgagtaccctaaggagagacagagacaaaattcagggctttccagcaaagggagaagctgatatcctggccgcgctgaaagaaccttcaaggaccaaagggagtaccattgtgggctgagtttgagcaggggtcatccagttcctgaagggaacccggaagaaacacctgcctggaacaactggccaaacttggaaccaggaaccttcacggaaggcaagggaaaaacttccaaaaccccggggcgttccgggaaaccttgccccggttgggcccttgggcatcttcccaaactgggagggccaaggcggcagcaacc

SEQ ID NO: 432244 - DNA, 1600 bp, Homo Sapiens
  misc_feature (65)..(73): n is a, c, g, or t
actgatatttttattgaggtttgtagctcatgactttacatgtgattgtacagagcatttaaggnnnnnnnnnggatgtaaaggttgtacaagggaaatatccaatagcttgaaatctggtaggtgtatatgaaaagaataatgccatgtgtaaatatatgagaatcctaagcgaccaaagccacaatagctatattcttgtttctaaaaagtgactttcttatcaacaaggaataacacaattagttgttagttttaaaaataaactattgttttttagaaagacatattttgaattagatttaatgcttggtgagggggaaaacagtatggaaaaagttccaagttatccatccacttccaatgcatttgcaggaattaaatgaaggcaaatcaacctgactctacaaatcttgattttctagttcacaggcaaaggtcagcattaaaatatacaaaccagtgatactttataaatgaacacattctgattgtctatagttgtttcaagacatatcagcttttattacttagggtgatgaaggaaatctttattctcaaatgagacatgaaaaccaaatttaaatgtttttttctcatttttattgattcaaaatgtcattcaatatgtaaaccagtttgacaacttgaaattcagggcattaaaaaatactccagaggactaggcactaattagcctaagaatgcactctgtcctagtcactgtatcctgagttccaaccccaaagacctctacctactgttaaagcattgaagatactgacttaactttgtcaaacatcttttgagagcaatcaatatatttcattttgaagtcaggatcattttgtctgttttacattcagaagaaacagaggaatttttaaattttaaaaagctattttagttctcggctttaaacatatttccttgccaatgtagcaagaaattttgtagtcttggatcattgagacaaacttaactcctttaagatttaaaatcctctgattttggactaattgtaaatcttttgtaaccttgtctgtagatcaaagagtggagcatcatcatttaaaaattattcaatctgaatggcaatgtttaaattaaatagttagaagtctgctttactttcctcttctttcaaacgctttcctttagtattctagaatgaaaggcgcatttggaatacttttagatgcatttggattatggagtactttgataacccaccatgtacaactgtatgtagaattttatgaattgactataataattaaaggcagagaacttgagagtaatatttggagcagagtggttatttgttcagtctcaatgtaatattcatatatataataataaattattctatagtatgaatattgcttggttatgaattattttgtataatgtacataattctaatataatattaatttcatatgtattagaaagattcataatagagctttaaaaggtacaaagctactaaaagcattaactctgttggtgttcaatagagccagcagattagagagtgacgatgaattgagacaaaatacttatatttaagaaacatttataaaatattgatgttccc

SEQ ID NO: 432245 - DNA, 636 bp, Homo Sapiens
aaaaacagtaatgtcaaataataaccaatattcaatctggtgtgcggtataattgccagcttgaatgttcctaagtgctgcttctagctgtgtaatcaagaaacgtaaagtcaaagcaggaacaatttcctcaccattctggctgttagctgcaacttctctctgcatagtttggaaggaaaaatcttcttgtaagaacttcttaatgtgaggaaccacaccttttggtagagtattaattgcatttaataacttcttcacttctaatagtaggttaacagggacaagatcagtaggtatgtcattttcctgtttgttcagttgaccagatgatttttctagcttattctcagtttcttccttcctctgatcctccacagcaggatgcctcacaaaaaattcatctggtagagaatccatgctgcacaaggtttctttacaaaaatcttattccactgcttgccaactgactttaaatactgccctttaatgcgtgtctagactaggggcaagcgaccatttctcaggtagaggatgacgcacaaacgaaaaactggccatccaacatgcaggacgaggaagcgcacgaaatcagagcgcacagctgagtgaggaatcccccttctcctaaccccc

SEQ ID NO: 432246 - DNA, 1364 bp, Homo Sapiens
atgatgtgggccgcggtgtttgctaccagtaattcttcataatcagagtgtttgcttctactgaagaaaaggttcggtgccatcactgtagaaatgttccacagactcattcgggtttttttgattcattggcaatcactttattgaagaatgtcatgagggcctgagctgcatctctgttggcatcaggcagcgccatgaccatgaggtgtaaggcttgaaactatactttgacgtgaggccctctttccattagactgatgaaggcaggtatatattccacagggaagagagaggtgggtagttctctgaaaaacgctttcaacattactgcagcttctctatggcacattttgtcccatttaaatttatcagcattaaacttggcatcaagttcttcacggtattgtttttgtaataccaggggaactttcactccagggtctttctttcggtcaccgtccaggaggactgtaagtggaactccaaaaatcccattgtctcgtccttttactttctctgttttgttccttttcagttgaattccaaaggcatcaaaaaaggcagtcaattcaatcagagagagatggcggattttcttcatgtcttcagcagacagatctcctgcttcagttaagccaaatctggttttctgaacattaaatttagttaaaacatagtcttctttcttaatctctgatttcttaagtttatttctttttagagcctccgtaaccatttctgaataagacacttcaaatgacagctcttcagcctctggtggaatgttcttttccagaaaatcatcatcacttatcgcattctgaactggctgtccaggctccggtgatccattggaatgaactggtagaactggaatggtctcaagtatagccacagagtcactcctgggaaccgcaaaactcccttctttatcctgggatgcgtcagacagggtagtactgttgagagaagcatcatctggcatggaaccacttgtcttgataactcttggaagctctctttcttccttggtgccatccagctgattagtgtggttgccacaggtatcacgaggaggagattcactgactccaaaaatgtctctgacatccctgatagattgcttatcctttttcctcatggtttgggtataggtatggtatctcttttgcacggcagctgcttgggttcgagtcaatgtggagagcaaggctttgccatcttcctcttcatcacctgagatcagagttgataaacccacatcttgcagccattctgcttcaagttctccttatttctggacatgcttataccatactctcctcctctcctgttctctggcatcgcaagaattccggacc

SEQ ID NO: 432247 - DNA, 424 bp, Homo Sapiens; identical to SEQ ID NO: 325001

SEQ ID NO: 432248 - DNA, 900 bp, Homo Sapiens
  misc_feature (25)..(25): n is a, c, g, or t
  misc_feature (884)..(884): n is a, c, g, or t
aaataatagcaaaaatatcattttncccctctagaatacaaattattgagctgtcaaaacttggcatgaagaatatactattacttaggcttaaatatcaaaagataatggctacttcagtgtcatattgttgaaatagaaacaaaactgcatggttcaagcatcctaatcattagtgccaatgaatgatagtgcaggcaagtgccaggtaaatgcctagtcccacttcattctcctcctgggaagaaaggataagaatagtggctgcagataaggtatggaaatatttaatcaagactgtcttaaacacataagcatatataatgttatcaaggttaccagtgctgccttttgatatatggatgaacataactgtaattaaagacggtaatagtatacaaaatgcagagcttaaaaatgtcattgcataaattctatttttaagatgttgaaatgttagtagtgtttttcttgatttttaacagtgaaataatcaagaaatatatctttaagttaatctgcaaagtcaggctgtgttctgtaaaaggtatttcacagcattttctgtttaactgtaatctgttatcatgggagatctcagtaccagagcagtgaattttttgaaaaatattgactgtctttattcaagtcagccatcttgggtaagagcagttttcatccccccactgcccaaatgtaaatataggatcacctaatttttcttacagaaagatactgttaagagggcatgcacttttcatcgggtgggtcacttgtttcttgtttcaaaggacaaatatttgggataggtacccctacttgctatggggtcagtcacagtgctggacactatttttaacctccttttaaatgggggaggttcntacctgggtttttgga

SEQ ID NO: 432249 - DNA, 562 bp, Homo Sapiens
  misc_feature (52)..(52): n is a, c, g, or t
  misc_feature (74)..(74): n is a, c, g, or t
  misc_feature (256)..(267): n is a, c, g, or t
  misc_feature (450)..(466): n is a, c, g, or t
gttttaaactacaaaggatgttgcatacactgatgaatctgtatctgactanaagtgctcaggggttggaaggngacagaaaacaaaggcaaaatttgcattgcctttccatctgaaatgaaaaactgcacaactattaaccaacatttaataggataatttttaaacagctcatgcgtcaacaagataaatttctttctagacaagagacaagactgaatccaataaaaagtgtcatagctccagttgggagagnnnnnnnnnnnnctacagaatatttatgatagcattacaaacaggatcctacgcaactatgcaaaagaggttgccacattgtatgaacaaatgctttgaattcttgcccttccactcttttcttgtgacttttgtgctgtcagccctagtatcgctgtcaaccacaatactaagctgtaggacaaatcctagggnnnnnnnnnnnnnnnnngcaggcagtggaatacagtgtcataaaaatgtggtggaaaggcagatacagtacacacatacacatttctgttatttggttttgaaaaaaacaaaa

SEQ ID NO: 432250 - DNA, 490 bp, Homo Sapiens
  misc_feature (87)..(87): n is a, c, g, or t
  misc_feature (131)..(131): n is a, c, g, or t
aagcaaaatcctatcaaattgaaaggagtactaagtaacaatcaaatggatcacaactgctgaagatgtcgtgattctaggaaatgnggccattccacctcatattcgacttcttgtttctgcagggcagngctcctagataatatctaagtgtccatcgtctggcacaagcttggaacacatctgagtcagggagggtaggtatcatgatacctacccatttcacagacgatactggctcaaagccaggaggcttgctacagggctcaaagccagaatgagggctacaaacctttttgtttcctaggacaagatttctcctgtaaccccagcagctcaatcatgttctccagaataagaaaggaaaaagggcaaagcccattctctactgagacttcgcattttcccccactgctcagctaaccagatgctcttgagaacacctgatactacatacacagagacaaatccaccctcaccaacaggccta

SEQ ID NO: 432251 - DNA, 1309 bp, Homo Sapiens
aggagaggaggagagaagtagatggggatagttaaggaataggaaagagaaagtggtagataggtgaaatagagggaaggaagatagggtaagtggaaaataggagaggatgaatgttgaagaagataaagaaaagtggaataggggaaagggtatagagaggaagcaacaacacaccctttaagccaagaaaaaaaatacatcaggagggacagtcacaattgagtagactgagaggaggcgtgaggggctggaccagagggccaggagggagcgaggcgtgacggggtgagggcccccctcccagcgcctggagatggggaggagtggaataggctgtgggtagcagctgctgcgagtctccaccccgaccaaagcagctgctcctcctgtgcccaggcccagcccatgctctgtggccatgcacctagcaggcacctagcgggacagtggcgtctgcttcagggacatgagcaccgagcgcaggcgggacacatctttgcactgcttgctgctcttggggttgaagtcacatagctgggccaccttctcccactctgtgcctggggtctcctccttggattccttcacgaaagcctcctcggatgccacgtagccgatgatatcagcatctggctgctggtagaatgctttgtcagcgatccggttgttgatcttgttcttctctactttgttcactctggcgctggttccactcctccaggtccttcttggccttctcccgccattcctgttccgtgaccttagatgcagcatccagctcttgcagccgtttcctctgctcctctcgccacttgcggatgctctcaggctcctgggtcagcctgtcagcctgggcaatggctgcgtagccatcagcaggaccgttggcctcctgaaacacatctccattgactgtggtccccatgtcctcagaaccagccccactcgtggggcccggctgcgcgggggccgcatggctgccggcaggtgccccgaagccctcgtcgttctctatgcctgcaatctcgctctcctgctgggccaggaaggcggccgccgggtcctcctccgccgcctccggggcaccgctctccgacgacgagaagaagccaaagtcatcagccattttccccgcgcctccgccggagcctccgctgcgctcggctctgcccgcgcctgccccgcgctgcgtccggcggccgcgacgctgtcacccgagccgcgtggagccggcgtcggcggggacgggcttggcgcggaccgcacttcctctccgccaccgggcccggctggctgtcactccgct

SEQ ID NO: 432252 - DNA, 1295 bp, Homo Sapiens
  misc_feature (194)..(206): n is a, c, g, or t
  misc_feature (275)..(275): n is a, c, g, or t
  misc_feature (1208)..(1244): n is a, c, g, or t
tggccgtcgtgcgtccctcatcacaccattgctcctgtatactcagaaccacccgcaaccgcgtatacggccgagggcgcaactcaacgcggctccggcgggagccagccccccacactcacccgcccccacgccgccccgcctcgtccgggcccgttcccagggcgcccccgcaccggcgccccaccattgcnnnnnnnnnnnnncccctttcccagccccttggagatgggaaggaggtgaaataggcctgtgggtagcacctgcagcgagtntcccaccccgaccaaaagcagctgctcctcctgtgcccaggcccagcccatgttctgtggccatgcacctagcaggcacctagcgggacagtggcgtctgcttcagggacatgagcaccgagcgcagggcgggacacatctttgcactgcttgctgctcttggggttgaagtcacatagctggggccaccttctcccactctgtgcctggggtctcctccttggattccttcacgaaagcctcctcggatgcccggttgttgatcttgttcttctctacttgttcactctggcgctggttccactcctccaggtccttcttggccttctcccgccattcctgttccgtgaccttagatgcagcatccagctcttgcagccgtttcctctgctcctctcgccacttgcggatgctctcaggctcctgggtcagcctgtcagcctgggcaatggctgcgtagccatcagcaggaccgttggcctcctgaaacacatctccattgactgtggtccccatgtcctcagaaccagccccactcgtggggcccggctgcgcgggggccgcatggctgccggcaggtgccccgaagccctcgtcgttctctatgcctgcaatctcgctctcctgctgggccaggaaggcggccgccgggtcctcctccgccgcctccggggcaccgctctccgacgacgagaagaagccaaagtcatcagccattttccccgcgcctccgccggagcctccgctgcgctcggctctgcccgcgcctgccccgcgctgcgtccggcggccgcgacgctgtcacccgagccgcggggagccggcgtcggcggggacgggcttggcgcggaccgcacttcctctccgccaccgggcccggctggctgtcactccgctctcgacgaattcgagctcggccgatttggcctgatnnnnnnnnnnnnnnnnnnnnnnnnnnnnnnnnnnnnncggccgccaccgcggtgaagctccattcgccctatatgagtctatcttccg

SEQ ID NO: 432253 - DNA, 963 bp, Homo Sapiens
  misc_feature (951)..(951): n is a, c, g, or t
gaagttgcatttttaggccacattgggaaagttgcacaggagtctgatgaacaaacttcgtgaaacatctccgtaccatgccagtactatacagagaaacccagtcaaccattataccataggttgaggtatttagtacctgaaagtcaacccagtgctccctttgcttattatttgtctataaaaatataaaacccggcatctttacaaaacctgaaattattgtcaataaactatataggaataaaattttgtgaaagggaataaaatagaagaaagatgacaaaggtcagctgtcagcaaatattaatgtgaaattttcctaacatgcattaaattataatagtccaagcaacactagttattttaacaatctaaatatagagtgttgctattttaagcaatcttgctatggcataattttattttacatatgtacaaattatgttattgtatatacagatcaaggaactcctccagttctctcatcttgatggcagttactgttcttcaggcagcaagttttactttgacttcttgctcacagcaagggacatagatgggcatttctttccaagttcaatacattcagggaagtctgcctctcagctcattgtttttctcaaggaatgatgagcagtatcaaggatttgcacagataaatagtgtctccagttgaacatatcaagcattggctacacttttgatttctgtgcttctacaagactatatgaccccttcatgttggcttttcttgcaaagtaaattatcattccaatggcaggtattattaaggaggatgcaaaatagagcacgagaagctcaggagaaaaatagtctttgttgttttctcttccttgaacatcaagtgttaaacttcttaattgtgagccaactttgtttttagattcacattcatatactcccgcatccttcaactgggccttcggnaggtataggcga

SEQ ID NO: 432254 - DNA, 467 bp, Homo Sapiens
  misc_feature (137)..(137): n is a, c, g, or t
ccaagttttaactttggacttcctggctccacagccaagggaccatagaggggcatttcctttccccaggttccaaatacattccagggaaagtcctgccctctcagcctcattgtttttcctcaaggaatgcatgnagcagtatccaaggatttgccacagataaatagtgtctcccagttgaacatatcaagcattagctacacttttgatttctgtgcttcctacaagactatatgaccccttcatgttggcttttcttgcaaagtaaattatcattccaatggcaggtattattaaggaggatgcaaaatagagcacgagaagctcaggagaaaaatagtctttgttgttttctcttccttgaacatcaagtgttaaacttcttaattgtgagccaactttgtttttagattcacattcatatactcccgcatccttcaactgggctttcggatggtataggc

SEQ ID NO: 432255 - DNA, 858 bp, Homo Sapiens
catggcccccactgctgctggggtgcttctatcccctccaggaatgttcatttgttttggggccttgggcatccatctcacagggaagtttgacatctcctactcccagagcttcgctcttatatttcttcacaaactgctccatctccttcacctctctgggagacaactcatggcactttgaagggtcctggtcatgtgcagggagctgctttgccagctgcttcttccggtactgtgccccctctgagcctgctactggctgcttttccttgggtagcatctgcatgtactgcctggccaatgcttgattctggacaggaggagcccactcataggtaactgtattgatggagacattcttcttggcagcaactggattcgtcaatatcataacattgcgtttatacatgggaattccatctgactttagttttgcaatcagagtggtatacttggtgtcttcaaaaagttttcccacttttcgatcctcttcattgctcaagaggacatcatgctcttcttggccacacttgcagttacgacatatttttctccagaagtgcagttcgaatccttcacatttttctttgcattttaaacaaggggctccaaatccttgctcgtgacctaagcccatcttcttcactttgttttccaggtccatgttaacgcgtcctatgggtcccctcctcctcctatccgggatcccacggccgggttcagctggcctccggctccgctgcgaacacgggaaacctgcggaactcccgcggcgccgctcaacagccactcgcccggcgccgtcgaacttccgccgcccagtccgccgcagcgggcctgcggcccggacccccc

SEQ ID NO: 432256 - DNA, 1865 bp, Homo Sapiens
  misc_feature (341)..(363): n is a, c, g, or t
  misc_feature (490)..(778): n is a, c, g, or t
ccattttgtctcggcagcggtggccgtagctccatcgcattttatgtttctggcgagaagggaacggagttttcatcaggtagattggtttttgtgcggccgtcctccaccgtttcctccaggacagcacctattcgtggccggaggagtctcagagctgtcagaaagaataagactgattttatgggaaaattaagcagatgctccagtttgagaaacctggatctgcgatctgtttgtggtctctatgaataaagaaaagcaaatagaatcttatcagataagtgcttttataagtctaaatatattctttggaatctctaaagcaaaacttttaaacnnnnnnnnnnnnnnnnnnnnnnnaggtaccagcatcaagatgatttatggtaataagatataaaaccaaggaaaataacctaaagtctgaaaaagaccagaatcgaagtttcctgattcatattttaatgttttgaaatttatactccannnnnnnnnnnnnnnnnnnnnnnnnnnnnnnnnnnnnnnnnnnnnnnnnnnnnnnnnnnnnnnnnnnnnnnnnnnnnnnnnnnnnnnnnnnnnnnnnnnnnnnnnnnnnnnnnnnnnnnnnnnnnnnnnnnnnnnnnnnnnnnnnnnnnnnnnnnnnnnnnnnnnnnnnnnnnnnnnnnnnnnnnnnnnnnnnnnnnnnnnnnnnnnnnnnnnnnnnnnnnnnnnnnnnnnnnnnnnnnnnnnnnnnnnnnnnnnnnnnnnnnnnnnnnnnnnnnnnnnnnnnnnnnnnggaaagagaaaaaatttatacgccaaaaaagatattctgagataacctgtagttaccactaactttgtgacaaaattataaaaatccacagccatctatgaatctgtaggcagacctgaagtttgaacgactggtgaagacatctgattttctttatagccaagttaggataacaaaatgcaaacaagtcattaatatttactatatgcaagatacagaaagatgaaggaaggagtaagaagttatccttcgtggaactattcaaagcaaaaatgcaaaataccagggaaagctttgaagaaccaagatttgagcaggttcttagaatatagattggattggatttgatttcaagaaagatgaacgtgtaaagcagaagtgggaagccaaaaacttttttccaaattagaattaagcattctttcaatgaacatttggaaatcaaggtagaaaaatatccctagggcctagctgaggagtctgtatgttgttgggttttgatagtaaccagtccaagattttgttattagacgtgggtttctgaatagacaggcatttctgaacagacatgacaggatcaaaacaatgtttgagcaaactgcccttcatctactgtggatatgttgggggatgatggaatatagtgaaagataatgggtgctcatacagcagtctagacttaaggtgattcaactactatatattaaactagattatcttttattttttaattttgaaatctggatgctcaagctctgcctgcacaaccacatgaggaagaaggaacaatgacaacaaaaataacactaaatttaaatttaagagtactacttttaggaaatagacaaaccattatttgggtacaactaaaggcaactggcatggactcaaatattttggggaagaaaaagactaaaagttctaaggaagaaaatgcgaaccttgatagtttgaaatagttaaaaagacagtgtagaaactgcttaggcagtttgattatggactattagatgatacttgggtctgataatggtataaggagaataaagtatttagggatccaatatacgcctgcagcgtgtcccca

SEQ ID NO: 432257 - DNA, 336 bp, Homo Sapiens
taactttgataaacgtaaaatttattttaagcaaagactgagtaccttattaccataaatcatcttgatgctggtaccacaaacagatcgcagatccaggtttctcaaactggagcatctgcttaattttcccataaaatcagtcttattctttctgacagctctgagactcctccggccacgactaggtgctgtcctggaggaaacggtggaggacggccgcacaaaaaccaatctacctgatgaaaactccgttcccttctcgccagaaacataaaatgcgatggagctacggccaccgctgccgagacaaaatggcgccgacaagctggtccc

SEQ ID NO: 432258 - DNA, 665 bp, Homo Sapiens
  misc_feature (329)..(329): n is a, c, g, or t
  misc_feature (333)..(435): n is a, c, g, or t
  misc_feature (515)..(571): n is a, c, g, or t
  misc_feature (613)..(622): n is a, c, g, or t
gccgtagctccatcgcattttatgtttctggcgagaagggaacggagttttcatcaggtagattggtttttgtgcggccgtcctccaccgtttcctccaggacagcacctagtcgtggccggagagtctcagagctgtcagaaagaataagactgattttatgggaaaattaagcagatgctccagtttgagaaacctggatctgcgatctgtttgtggtctctatgaataaagaaaagcaaatagaatcttatcaggtaccagcatcaagatgatttatggtaataaggtactcagtctttgcttaaaataaattttacgtttatcanagtnnnnnnnnnnnnnnnnnnnnnnnnnnnnnnnnnnnnnnnnnnnnnnnnnnnnnnnnnnnnnnnnnnnnnnnnnnnnnnnnnnnnnnnnnnnnnnnnnnnnnnngggggggggcccccttaaaatttccccggggggggccaaattttacggtcccccttttttttggaaaaaggggccccctnnnnnnnnnnnnnnnnnnnnnnnnnnnnnnnnnnnnnnnnnnnnnnnnnnnnnnnnnaaaaccgcccccgggggatttttgggaaagaacccttttttnnnnnnnnnnaaaatgggggaaaacccccccccgaaattttaacccctcgggg

SEQ ID NO: 432259 - DNA, 1117 bp, Homo Sapiens
  misc_feature (1075)..(1075): n is a, c, g, or t
taatcacttgtagatggagttcatttttgtggccttcagttgacatctgcagggttgaattccccagggtgatgtatcatcagtagcacagtgctgacaggggtgggacagaaaggcccacaggatttcctctccctagagtctgtcttacctgaccacccatcctcccaccctggcccaacagtcactctaattcagtgtcctctttgggtttgtaaacagccccaaacttctgcatgtacttcttaatgtactccttggttttgtgtttcacattctcattgcactccaggtcctcaggattcttacagtacttcagctccttattcataacaccgtgagtcagcttgcgagccagatgtttaaagtcttcagttgtggtaattcttcccactttgcagtcaggtttccggtaagggttcaggcactggacgatgaactgggacatctcttttctgaatacttctttgcttttctttgctagttcactggaggtgtctgcttctgctgtcttgggctttttcgaggccttcatggggttttcatcatatgttggagttcccaggtccatctcagcttcatgctcaaggctggcatcatctcctgggctttcccaagtaggaggatcccactgagtctgccttgtgatcacatggtagtaataaatcttcccttctggatctcgagctgtcttccagttgggaggtaagacaatggtttttggtttgggaggagaggggggcggcagatccaagagattatttgtcacaaccatttcagatggctgcaagggctgaggctgccctggtgcaactattgtagtcactgctgcggctggctgtaccaccactccttgtggatgagctgtgaaaatctgttgcccctggatatactgaagacttggctgggcataactctgtacaattggtggagttgtctgtgaataaggtgatgtcacaccatagcctgttggacatgtctgtccttgataatatatggttgcttgagactgtgcaggagtcttcggggcaggtgtttgatctctgaagccaacagcatcccttcctcgttcagnttgttgtgttttccttttcagtttgacttttctttggaattc

SEQ ID NO: 432260 - DNA, 1669 bp, Homo Sapiens
  misc_feature (19)..(19): n is a, c, g, or t
  misc_feature (34)..(34): n is a, c, g, or t
  misc_feature (65)..(65): n is a, c, g, or t
  misc_feature (554)..(689): n is a, c, g, or t
  misc_feature (1535)..(1606): n is a, c, g, or t
cctaaaaccccctcctgangggaaaggttatggnaacactaccggcccaaaaacactgaaaagcncccactttatatttaagatcccatgcctgagtgataatagtcactgttgggataggtttttatttggggaaaatggagaggattcctcaaaacagattccatggcttgcatgccagtgacacccctatcaagagccctggaaaggcacccatgaaatcaccctcaactccaagtggtgggccccacctactcatagtcagtgttacactagccagctctaggggctctgacaacataatgagttttgaggtagtatactttaaagaaaaaaagaagagtttattttaaagcaaataactaaactgtattttaacttagcacaattaactgcagcatatttacttcatagccccttaacatgtcacttttaccaacaaagctttttccttcatattctaatcacaaaaatttctcaacaatttataacaatctgtaaatctgaccttgcaataaatagtcataaaacgttatttttattactattattannnnnnnnnnnnnnnnnnnnnnnnnnnnnnnnnnnnnnnnnnnnnnnnnnnnnnnnnnnnnnnnnnnnnnnnnnnnnnnnnnnnnnnnnnnnnnnnnnnnnnnnnnnnnnnnnnnnnnnnnnnnnnnnnnnnnnnncttgaaacattatttttaaagcctaaattccagttggtatggtaccaaaatttagtttaacttcaaaattcacagtactgccgagaaatgggcgggtcctgaggttccagagaagtggggagtgaattcattcctggtggttttattctggcagcatgcatgggagatcacatgagttagagggctgtggcctggtatcaacacttcaagctgttgtacttttacttcaagttgaaacttttaaaatacatctgtcatacagatgtacaaatatatgtagatgcaaacatatatacacactttttgacaaaagaattgtggtaatatacgtgaaccatttttgtaaatagattctatttggttaatagaagtattccttccatcaacctatcgaagtccaaaccaactacgaagataggatgctcatccagaagaacgggaagcattttcttcctcatcttgagcaactgcagcaagttttcccttttcttcagggctgagctgcaacatcgtatttataacaggaagaagtctctctctttcactacctggtttcaagaaaatgaactgcagcaagacgttcttcaagtattccaggttagctgcagacttctctcgctcttgattcctttccaatcttcttatttcacttttgagaagcttaatttgctccataaggactgcattggttgcctctatttcccgaagcaggccgtttaagtgatctgcactttttgtggtggaacggagcttctgaaccaattcttctttggtaaattcagcatgccataatggaggctctttgctctcaggctgtgaggaaggggtgctagtccaaaaggccannnnnnnnnnnnnnnnnnnnnnnnnnnnnnnnnnnnnnnnnnnnnnnnnnnnnnnnnnnnnnnnnnnnnnnncttcaggctttttcttctcttttgctttgctctcaggctgtgaggaaggggagcaagaccaaa

SEQ ID NO: 432261 - DNA, 574 bp, Homo Sapiens
  misc_feature (261)..(269): n is a, c, g, or t
  misc_feature (501)..(501): n is a, c, g, or t
gcagattctataatttttattacaaaaaaaaccctttacatgctatgacattaaatgtcacttataaggtcattgcaagcaaatctttttaaaaaatatacatactgtatatatttacattcaagtttgaataaatatttcgtcaagatatagttcagattctactctttacccattctgtggatttgttcatctagtaactaaacagcgattgtatcatcactcaggcacatagagaggtagaaaccgcttttttaaagnnnnnnnnnctggagtgcaaatgtgaagatcactgaagcagcttagctacatcaaggagaccctaactagctttggtcatctcaaaaagctgaatatatgtagccttgtcctttaaattaaaaccagaaaaactttgggcaggtgctcttctgagcacatcagagtgctgacagaactcagcaactaatggtctgccactctgcaacgcgaattgcacatgactaagtgaggcaaagatangcagcggagctgggctggcagctgggcaccttttccctgataagacacaaatcataaccaaacaagtggctac

SEQ ID NO: 432262 - DNA, 344 bp, Homo Sapiens
  misc_feature (47)..(173): n is a, c, g, or t
cccctgctcccccaagtagctgggattataggcatgtgccaccacannnnnnnnnnnnnnnnnnnnnnnnnnnnnnnnnnnnnnnnnnnnnnnnnnnnnnnnnnnnnnnnnnnnnnnnnnnnnnnnnnnnnnnnnnnnnnnnnnnnnnnnnnnnnnnnnnnnnnnnnnnnnnngattactgcgcccggtccctaggaataaatttaaccaagtgaaagcattgtacactaaaagttataaaacattgctgaatggaattaaggaagacataaataaatagagatatcctgtgttcagcaattggaagacttaatattaagatggcaataccacacaaagcaccc

SEQ ID NO: 432263 - DNA, 870 bp, Homo Sapiens
aaatgtctgtatgtgtttgcaggaggacatgccacatgttcaaagatatatatgaaacattttttaaaagtattcaagactcaggaatgtatgaatgtttattacaaacataaaatgacctgtagttaaaaataattaaagtgtgtaactggattgtgtgtaatacaaaggataaatgcttgaggtgataataactcatttactgtggtgtgattattacatactgtatgcctgtatcaaaataacccatatataccataaatatatacacatactatgtactcacaaaaccttttgaaaaatttcaataagaataaaaatgtaacatgcaaacaatattcttcaatttatttgctgttgaaagccactaaaaaagactagagatgtcattcaattatattaccagatagtacattgttaccatctttaacgtacacccttgagtaaggttggataggtgaaagttggtggcataataaaacacttcattcacggcacaaaaattttaacacaataacaatttttatttcaaaaattaagttcacacattatcttaagagaattttaaaatttactgcattttattgcacttattacataaatatacagttggcaaaacaatttactactaaaattcagattctctctcagtataacgcaaagtattactctgaacacctacttcaggcatcactcagtaagtcaaccactaaaagcctctctgctcagattttcctggtgcatcttttatttctcttctctttcatgtagaagtctatgaataatgcccacctaatggcaaagggagtttctcatatctctggacggcggccaacaatttatccacatggcttttcacataaatggggg

SEQ ID NO: 432264 - DNA, 2246 bp, Homo Sapiens
  misc_feature (1015)..(1029): n is a, c, g, or t
  misc_feature (1219)..(1221): n is a, c, g, or t
tggggttcccctggaatcccactttctaagaggtccaaaaagccagtgttcatgggccattcctttggaaaacagcagaagacccctgcttcctcccaacttgaagcgccgcctggaggatccaagtggatactgaccttcacagaacagagaggcctggcaggttccaggaggcatcccctgccctcagtcctcaaagagctcacagtgcaccgcgggtgtgccttatcagtggggcagagcaagtggccccaggaatgccctttcgccagctgccccttcacgttcccgagtaggctgaggagcatcaacagaggcctcagccagttttgcctttttggctttgatgcttcttcacgttttgacttttttcaatcacagtttcatattcaagttgaggtaatcacagttttttctctaagaggagaggagttgggacagtggggcaagttggtgagagagcatttctgtgaagagaaaccaagaccaccacgtagtacagccccacatggtgagaagacccgctctcacgggcgggctccgacccctctttaaaaactcttgtgcagcagccagactgccaggccagtgcagtcaggaaatggctcaagctcctaaagctagagctttcatttaaaacttcacagcagcccacttagagaaatggcctgtggttcccaccccccaaccccttttctaaggctgctcaagtttgagtttttaaaaagagttcggtagagctaaaggaagctacagtaactcactgcttattaatcaattgcacttaagatctatgttactgattctgaagcgaggcaagcccttgacggaccgcagcctctggccagccagaagtcagggggctcccagacttaggttccacagtggggcccttgtcatcagtggcttttggagctgggactggagcacgtgggtcttttcagaagcccttcttgatgccaaatttctctatacaatggtatctggagttttgttcaatttgggttcaaattgnnnnnnnnnnnnnnnctaatatattttactgacaagcccttgagagctgctttgctacttgcatgcaggcctctgtgtgaccaggcacacagactacatgtgctccatcttgtctctccgctgctccaggggccttgctcaaaaaccccctatattactggaaactgctggttttacctatgtgcttcttcctaaggcatgccannnacaaatatgtgaaattcagaaaacatttacagttcaggcagctgaggcactgaagtcctaagagacatcacctaaatatcagtggctgtgactcccctgtcccccacaccaattatgaaggtcaggcatgggacacacttgtaattcccctctgctttatggtccagcttaaaacgatgccattagaaggaattctaactcaggtattgcaattatttgaaattcccaatcctcaggagccacacaagcccagggccagcaacaacactttggggagcggggggatgagtttcctgaagtttgtggctgaaaagcaggccttccttggcaaggcttgtgggagcgctgggtgctggagactgaccccacaagtgatcagccaccaggcctaagactaaccagctgcaggacgcccccttccacagtgaggtgaagccttcgccagggggcctgagcagcaggcttgctcttgtccctacattaggacacccgaatggtgtgacaggagagctaaagaaccacccacaaggggaaaagctgatgtcaacttaagagccacacacctctggaaagcaacaagcctctccttcagtttagtccagaagggaaatcccctcatttgtgaacacatcattcatctcaacccaagctgctggctctgtggactgggcctgggcaaggctgtgctgctcctcccaggactgggcccacggccagtacggccagctccttcagggaaacgggcctagcaggggaggcaggcactccactggggaagatggctctcgtggagcagcatctgaggcttgaggcctgtcgtggcctcgcctcccagacacggccacagttcaggcagccagggttccttctaagtcccagtagctcctctgtgtaatcctaatgcttctccccaacctcaagagcccaaaggagatcctgttatcagaaacccagagctcctggactgccagttgcacacgtagacgggcaggccccatctgctcatccttgagtattcccccccc

SEQ ID NO: 432265 - DNA, 595 bp, Homo Sapiens
ggggactttgggccatattgttggattttctgatttttctacagatgccagaaagcactcttgtaagtagtaagagtggtcttcaaattccttggagatttgttcatttcatccattgggactccactgagtgaaaggggaaggaagggagggaggccagtgtgtggaattcatttcattttctgggaacaccagctgattttgtcagcaactgaaaagctatcaaacaataacatttcactgcagttgacttgggagggaggcaggcacacctgctctgtgaccatcaaaggatgacaggtcttgaccaaagcagcatcctcggtaaaaaaatgtatgccttgtccctccaagttcaaccctctcaaatattaaaatacaacaagagcctcctttgggggtcagtaagcctgaatctcatcatttatcccagagaaaataaaattatgtctagaaactcattcattattttgccagttccaaattgtccctatcttgccttgctggctctttgagttgccacgtcattagaaaataaggtatcattgtacgtgaatcacctggttttctaggttgttacctataaacatagctg

SEQ ID NO: 432266 - DNA, 438 bp, Homo Sapiens
gaacatgtagaagctgagaagcagggaggtaaagtatgctggccgaatgtgattgtgagtcacagaggcagagccggtgcccagggctccccatctccaaggccaaggttctttccctcacactttcagctgacatgtccaatgctccctgctgccctgcagaaaaggtcgttccccaccttccctgctgctttagctacaacataatcagagagaaatctatcaggaaacaaaatttccaggcattctaatgaatacatagaaatgtggtacttaaaaatgtttttaaatctcaggagacaaaaactaaaatgaaacaagaggggaaattcaacctcttgtgtagaaatgctatggagacctcatctccaagtcaggatgagggtgttgtggaggaagaagctcatactcccaggagtttgaaacaccacattcccc

SEQ ID NO: 432267 - DNA, 439 bp, Homo Sapiens
  misc_feature (87)..(87): n is a, c, g, or t
aaccagtattggggaaagttctgggactggtctaatggctctgagtggaccctgagtcttccccattttcagtcatgatgtgctgcntgagccacatcctccacaataggtttgatcctctgcagaggaagcaagcagataccctaggcatccatcacaccccctaaccctgctgtgttactggcactgggctgtggcctccaatccctttcttcgtctcctttcatcatactttcccttcgtgccacataaatgtagggtggggttgcatcatatgcatgtttggcctgggcaaatccaaacatatattcagtcaaaatctgtgtcgatttctcaaaattaaaaacgctagggttatattttatagataagcatattatatttttccacagtggtgttttatccattatatgtaacactgatcagggaggtctgcaca

SEQ ID NO: 432268 - DNA, 1225 bp, Homo Sapiens
  misc_feature (1001)..(1001): n is a, c, g, or t
  misc_feature (1033)..(1033): n is a, c, g, or t
  misc_feature (1066)..(1172): n is a, c, g, or t
atgaaaatctttaccaaaaaatagtttattgcacaaaatttaaggaattcccaagcacacttacatttgtaaaaaatcaacgtgctttttaaagttacactttgtcagacacggtgacccctttcccaagaacagccacaacttgaggactctcttttgtgaggaaatttttaataaaaacaagtaactcaaaagcactgaattttccagaccctctaacacatttccctccggatcctgtgagagcctgagatcacttatgacgagattcacctggaccttccggtcagtgagctcagaacacctcacaccacagcgtcactcaactcaagtccctcctcacatcagagggctcctcgaagggaggccccaggacggttctctcagatttgctggtccctcccctcctagaatcttcacgtacaacattctgtttttgtttttaaagacctcagggaactagaactcggttgtgggaaccctgcaccaaggagagttgagggccagctccttagcgcagcacagcacggactgtgttctggtgggcagggcccctgctggacccacccgaggagagtccatttcacatcctatcagaaacactgcctgatccatattgcagagagtgggaacgggtgtgagtccgtaagacccgtagcatcaatctcacatataccacggaaaaacacatgaaaaccaagttacgttgtttttggaacgtcagaaaaacaagtagtgacatcgtgaagtgccctagcctgttgtgacacacggtgtggggatgaacacgccgccctagcccgtgacacacggcgtggggatgaacacgccacataatgcactggtgaccctgttttgtaagcagtactcccaacttcactgccttttccgtgaggatattccatcattcccacttctgcccacaagaacaaaataattcaaactttatgcactgaagtaactctggaaggtagaagtgccgggagagtcccttggagatnaaaaaacctcaacaataaaaaaaagcaatttnaaaatccaactgcagccgggggcggtggttcannnnnnnnnnnnnnnnnnnnnnnnnnnnnnnnnnnnnnnnnnnnnnnnnnnnnnnnnnnnnnnnnnnnnnnnnnnnnnnnnnnnnnnnnnnnnnnnnnnnnnnnnnnaaaaattaggctggtgtggtggcgggcacctgtaattccagctactggggaga

SEQ ID NO: 432269 - DNA, 2149 bp, Homo Sapiens
tttttttcagcatagtcatcttagctttattgagtaaggcatcccaatctctgctaagattcttctaaatgaacggctgatttttctgccaaactatgcattggtcaaagagaaatcaccacctggccaccccattctgtccccctacaggacactaagggttcttacagataaagggacgatgcattcatgcctggagaactaatcacacctgatttctctgggatctaaaataatgtcaaatttgattcactttatgtaaagaaaatcttttttttctgcaaaccccttcagaacaatgctgccatccatgcgagatgtgtgtaaggccacctctgtatactaagaatggtgccccagcaggtggaaggacggcacacctgctgagcgtgggcacacgctgcgttctacatctttgagaccaccggtgggttccgggcatcagaatccagccacttaattgggatctgattcacctcggtgggcttgtccatctgtgtccagtgcccacagtcctcaatgtgtcccccttttcaggtggggaatccagtcctccatgtgctgggacatctgaggaacgagcacgaagtcccttctccgccgtgaccatcagggccggaatcaggatcttccgtcccaagcttttgcaagcccacttccagttcctttccatgtttcggtaccagtttagaggacctctgaaaccagacttcttgaactgctgcacatagaactggatttcctcctcagtgaccatcctgctgaggctgggctcttctgggctatttacaaaaagtcctcccgcttcacagactttatgcatggataaaacactctcatcgcttgctctgaagaggcttttgaaagtccgactcaggttctgttccagttcagcctcagccactcctggttcttggaagtagagctggtaatccaatactgggttggctttgatactctccaaggggacatgttgggatttgctggtatgaagggagtattcaaactggccaccgccctcactctctcggggtagaagagagccatgtaccacaccagcatgccaccccagtcatggcccatgaacactgcttgagagaggcccagtttatccaggaaggttaccatctccttacataacacttccatgcatattcttctatttcgggaggagcagatgactctccatagcctttcatgtccatagctaggacccggtaacctgcctgggccagagcagggatctggtacctccaagaataccactctcgggaaatccatggcagaggcacacagcagggccggagcccagctccacaaatgcagacggacctgggctttactgtcacgtacccatggctcatgtcacttgggttgcaaagaggtcggcagaggggcccggggtattgagaaagctggattccggtcactttcttccagttctttcaggggccgtgtcaagtttcctggaccaggatggtgaccattcccaagtcacggggctggcttcagattagcccggatgtcatccatataaacgacctcactggggctggctttcagggtgtccagcagaaaccttgtagatctgaggttcaggtttgaccattcccacctgatacgactctatcaggaagtcaaagtgcatcttcagctcacacatcagctgggccaggccatctctctcagcacggtcgtccagccaggtgttggtgaggatggcagtagtgaatcctttcttcctgagcatgagagctgcctggagcatggggcggttgatctttctggctgaaatcgccttgtcaaagatttcttttatggagaaattcttggggaggcagactttagcggtctcggagcacttcctgcagttttcttccatgagtggtatccactgggaaagtgtgatctctcctttcataagccgggtagtggcaccctctggtccccctttctggaaagcatcattcagaagtcctctgggcagcgccagggcctcctccgtgcggccgaggacgccgaacaccgctggcagcgccagcaccccgtcaaggtcgaagacggccgcgcgcagcgtcatggcggcgggtctgcagcctagcacccggacacgcagctaacctgggagatgcgcgaaggccagggcgca

SEQ ID NO: 432270 - DNA, 1177 bp, Homo Sapiens
cggcccgcactgcctgacataacgcagtgtctccagcatgactgctgtgctgcgaactctaactcatattgtgcctgtttgactatgcggtctggaggccagtcagggtgacgactggccactagctggcgtgataaccggcgatacacatctttggtcctgccagttgcgcacccacacaggtcgccagtcctcccagtcgatgaccgccagcccccgcagactcctgtgtccgaatgtagtgctccacacgtttctgcagcatcttccggtgtgcccgaaggctgacattctgtggctcaccaccatgcacagaccttccggcagaatcgaagcgtggatacaggcctagacggtcgcggtagaagatggtaatattctggttcacaaaaccctcattaggtgaggcctgcacatcaaaggcattcaggtccagtggcaccttgaggcgtgggccacagtcctgtgtgggcacgtcccacgctaccacaaagggccggccagtgaagatgggtggtgctgtgggcttgagctccatggcccatgccaccgccagcaccagggccaatgtaacggtggggcctgggcctgcccgcatgctgggggctgccggaggtgtcacctgcctggcaccagctcaggaactcgcgcggggcgccaccgggaccggcgccagggccaccgccatcccgggcccagcccagcccgctccggccgttcgcccaggcgcggcccggctcagcgcctctgctggctccgcccccaggcacgctggccctttaagactccagtgcggaggtgggcccgggattggacttgcggacggggcgggaaggtgtggtccacctttctcggtgccggtgcctcgtttcgggctcgaagagccccaggtcctctgcagagggacgtggccgcccatttaggaccctaatgcccctctgagccgggctttctatgggagtctcagccacgagcgccagtcagcctgaaatgtttcccctgcagcccgaggccggtggttcagtcctcccagctccgcggcgccgccagccctgtgtgggagtccgtcggcccagtaggtcggtggcctccctccttcctggggtgagcctctccagctaggctacttgcgccagctgctgcccgttgggcagctcgccgaggacttgataaaccc

SEQ ID NO: 432271 - DNA, 1602 bp, Homo Sapiens
aaaggggcccaagggggtttgcccaggaggcccagcaggaacttgttgagggtggggaacccagccccaggcctttcggtgggcaccttccaggtcgccttgctaatggtccccactggcattgtttcaccactccagcccaagtagcactggcagcggaagtgtgtctgcaggtggtcaatgtcggcccaactgagctcccccacaggtcgcagctggggttcaccaggtgcatggccaggcactaggcggaaactgttggtgctgagatgcaggaaggtactggcactggggttgcggcgcacacagcgcccatggccatggcactgggcccggctgcaatattgggtggcccaggacacattgaccacgtaggggaccagcagccgtgtcaggtaatctttgaggtactggcaggtctccgtgcttgtggtgtaccccgcgtcaccccagaggatgacaccagctgcgcccagggccgcactctcgccaatggtagagatgaggtccatctcactaagccccgtgagcctgcggctgtaggtgggtcgtgtgaagacgtagactgggagtgcatggttggcatggtgggtgcgagccacacgaagggcctcctgaacacggaagctcacaaagttgcggccatggcgggaggaagcaagtgtctcgtccaggtagacagacgggaagagggccgtgctctcagcccacagccaggccagctggtcattgcgggccacctcaacatcagggcagcggcctgtgtagctctcccagttctgcacataatcatgattgtagcagtcaggaaagaggtagaagccccagaggtgccggggccgcactgccttgacataacgcagtgtctccagcatgaactgctgtgctgcgaactcaaactcatattgtgcctgtttgactatgcggtctggaggccagtcagggtgacgactggccactagctggcgtgataaccggcgatacacatctttgtcctgccagttgcgcacccacacaggtcgccagtcctcccagtcgatgaccgccagccccgcagactcctgtgtccgaatgtagtgctccacacgtttctgcagcatcttccggtgtgcccaaaggctgacattctgtggcacaccaccatgcacagaccttccggcagaatcgaagcgtggatacaggcctagacggtcgcggtagaagatggtaatattctggttcacaaaaccctcattaggtgaggcctgcacatcaaaggcattcaggtccagtggcaccttgaggcgtgggccacagtcctgtgtgggcacgtcccacgctaccacaaagggccggccagtgaagatgggtggtgctgtgggcttgagctccatggcccatgccaccgccagcaccagggccaatgtaacggtggggcctgggcctgcccgcatgctgggggctgcaggaggtgtcacctgcctggcaccagctcaggaactgtgtgggagtccgtcggcccagtaggtcggtggcctccctccttcctggggtgagcctctccagctaggctacttgcgccagctgctgcccgttgggcagctcgccgaggacttgataaac

SEQ ID NO: 432272 - DNA, 278 bp, Homo Sapiens
tgagccaccatgcccagcctatttggtctttacaacaggtttgtagcatccctgttttatatctgaggaaactgaggctaagagattgagtagtatgcccaggttcacacagttcttaaataagagcagagctgagactgagacctgaatatgtgacttcaagtgtactgtgccttctgtgacaccatgctgctttctgagggtcagggagcttgagctcaggaaaaatcccaagactagtttgctgatcccttttactctgtctcctcctggcctcc

SEQ ID NO: 432273 - DNA, 705 bp, Homo Sapiens
  misc_feature (170)..(178): n is a, c, g, or t
gggggaacaacattgtcttcaaagacattttttctatcaacccaataaaattcaaaatgagaaaaaaagttgcattcactgttacgatttccctctactaccagataaaattccttattcattcattattttatgacatttaaataagttaaactagaaaatgacttttnnnnnnnnncagtattaatccatgctagggatgacacttgcttttagtgacagatgtatgtttcgttgagaaaatgaaggatattgaaaccatgttagaatacctcagataaagtgttcaccacagatgctttgtcagcctttcagactggctgaaatgaatctttcagaaaagaagccaaagaagatatttttaaaaattctgtaggtgacacaactgaagcgagaggttaggtcatttttaatgacctaactaggtaggaccatagagaaattgggggcacttactctgaactattcacagtgcttacaaggcagagatctgaaattgtgaaggacttcaactgctctgtgttgaatgcttttattatgtttggtttatgtagtttgtttcatctcccaacttgagatcagataaagtcatttatattttgtcatattttcttccagctttattgaggtataattgacaaagttatatatatttaaagtatgaataccacatttggggaatgaacctgtccatcacctcacgta

SEQ ID NO: 432274 - DNA, 1003 bp, Homo Sapiens
tggaagcgacactatacggctaggtacgaggcctgggtgttgaatccggcacgaggggccgctttcaaggtgtggattttggctgctttagcctggtctgagtcgaggggtggcacgcgccgcgcgccccaggaatctcgggacagaagggtcccgaagagtcgcgcttgtgtgagagaaatcccagatcctgtgatgggggacaccagtgaggattgcgctcgatccatcgatttggaaggcacgtgatcttggacttgtcaggtctgggtggtcttatctttgcgagtccaaatagtgcggtcatgcgacgcagcatgtcttcagaggctcctgcttccccgctccttctattatctcggagcgtggacttggtggctttcccgtgaaaacggagagagcgagaggagaaggacgatggggaggacaagaagaagtccaaagtctcctcctacaaggactgggaagagagcaaggatgaccagaaggatgctgaggaagagggcggtgaccaggctggccaaaatatccggaaagacagacattatcggtctgctcgggtagagactccatcccatccgggtggtgtgagcgaagagtttgggaacgcagtcggcagagagagcgggagcggcgggaacatggtgtctatgcctcgtccaaagaatgaaatggattggaagaaggagaaatcgcgggatcgagactatgaccgcaagagggacagagatgagcgggatagaagtaggcacagcagcagatcagagcgagatggagggtcagagcgtagcagcagaagaaatgaacccgagagcccacgacatcgacctaaagatgcagccaccccttcaaggtctacctgggaggaagaggacagtggctatggctcctcaaggcgctcacagtgggaatcgccctccccgacgccttcctatcgggattctgagcggagccatcggctgtccactcgagatcgagacaggtctgtgaggggcaagtactc

SEQ ID NO: 432275 - DNA, 939 bp, Homo Sapiens
gggacccccaagtgtttttttcgtcatcggcccactcgttatatttgtaggaggggagttggcagagggcgtgtcatccgagtaccttgcccctcaccagccctgtctcgatctcgagtggacagccgatggctccgctcagaatccccgataggaaggcgtcggggagggcgattcccactgtgagcgccttgaggagccatagccactgtcctcttcctcccaggtagaccttgaaggggtggctgcatctctgtccctcttgcggtcatagtctcgatcccgcgatttctccttcttccaatccttttcttctttggacgaggcatagacaccatgttcccgccgctcccgctctctctgccgactgcgttcccaaaactcttcgctcacaccacccggatgggatggagtctctacccgagcagaccgataatgtctgtctttccggatattttggccagcctggtcaccgccctcttcctcagcatccttctggtcatccttgctctcttcccagtccttgtaggaggagactttggacttcttcttgtcctccccatcgtccttctcctctcgctctctccgtttcagggaagccagcaagtccagtccgagtaatgaagggcggggagcaggagccttgaagacatgctgctcgctggccgcacttttggacttgcaaataagaccaccaacctgacagtccagatcagtgccttccaatcgatggatcgaggcatcctcactggtgtcccccatcacaggatctgggatttctctcaccaagcgcgactcttgggacccttctgtcccggattctggggcgccggcgctgccacccctcgctcagacaggctcaaggagccaaaatccacaccttgaaagcggccctcgtgccgaattcaccacccagcctcgtacctagcctatatttcg

SEQ ID NO: 432276 - DNA, 612 bp, Homo Sapiens
atgcgccaccgcacccagccagcattttttttaaaaccatgtgcatatattacttttataattaaaacagacttttaaaagtttcgtaatgcccctttttgcatactacaaatattctggactccttaaaattgatgtgggctggaagttgctagtcaggaaatggaactaccaggtgtgcctccttcgctggggcccttccggcccagtcggcccctttccctgtaccccgtggagcaagctcagaggcactgctagggggttgggcagtaagatttttgcctttcctcaaaggggcctgggatctgcttcacccaaggctggtgcagagcactcacatggagattggaggttggctcttatagaagaggcagtcagtcaatccttccttcgggaatctgagtcagagaggccagtgcacaccagcctgtgtgacccgaggaggaaggggagggcattccctgtgaggctagcgtcatcacgtccttcccttgttgacctttcccaccctggggacgggaccagcaggatttcctgaggggtcagtgtgtgtccccttaggtgcagccaaggccgtcagctctccctgtgtaagtctgggtgtccataccc

SEQ ID NO: 432277 - DNA, 1407 bp, Homo Sapiens
  misc_feature (132)..(132): n is a, c, g, or t
cttttctcgccagcgggaccagcagggccagggggtccctgagctccagcctctccatctttgccagcaggaccgacagcgcccaggtggtccgggaacaacctcgctctccagccttgccgggcttttccnagcagcacctttaggtccagggaatcctatcacaccagcctgaccacgggcaccaggtgggcctgggggtccggggcgaccatcttgaccggcgggaccaggggggccagttttgccatcaggaccagggctgccagggcttccagtcagacccttggcaccaggcagaccagcttcaccgggacgaccagcttcaccaggagatcctttggggccagcagggccaggagaaccacgttcaccagcgggacccttgggaccagcaacaccatctgcgccagggaaaccacggctaccaggtccaccacgctcgccagggggtccgggcaggccagtgggtccgggttcacctcgagctcctcgctttccttcctctccagcagggccagggggtccttgaacaccaacaggggcagtctctcccttagcaccagtgtctcctttgctgccaggagcaccaggttcaccgctgttacaccttgggaccaggagggccgccggggccctggggtccagaggggcctcgggcaccagggaatccaggagcaccagctataccacggagcaaccattggcacctttagcaaccaggctgtccatcagcaccagggtttccaagcagggccagcagcaccagcagggccagggggtccaggctcaccacgcacaccctggggaccttcagagcctcggggcccttggggaccagcttcacccttagcaccaacagcaccagggaagccaggaggaccagcggggccggtgggaccagggggcccggcagcaccagtagcaccatcatttccacgagcaccagcagggccaggggctccagggcgacctctctcgccaggcaggccacgggggcccatctgaccaggagctccattttcaccagggctgccaggctcacccttaggaccagcaggaccagcatctcccttggcaccatccaaaccactgaaacctctgtgtcccttcattccagggaggccagctgtatccgggcaatcctcgagcatcctgaggcccaggaggcccacgctcaccaggacgaccaggttttccagcttccccatcatctccattctttccagggggacctgggggacctcggggacccatgggacctgaagctccaggctcgccaggctcaccagggggaccttggaagccttggggaccaggtgcaccaggggggccagggagaccacgaggaccagagggtcccatggggccaggcacggaaattcctccggttgatttctcatcccc

SEQ ID NO: 432278 - DNA, 807 bp, Homo Sapiens
tcgggcgttttacttttgcggggcccacgggcaaagaattgttctttccccaggcccctttaaggcccagtttggggggaaaacctttgttaggaaccagccaaagcctggaagaatgccttcctcaccccagggtaacatcttttcccgcatttttgagttgattccctgtttccggaaccatatgttgttcgggggtgccatatcctttctgagttagccaggaggacccaaaagacccctccaatttgtgtgttttttacagggtgctttagatgacgtctcatttgagaagaacccatctggacatcttttgcaaactgtatttcgctctggggttccagcttgcaccactccaaatccaggagggcagctcctatgtttcaagcagaactctatctcaaggtagcgcccttccttgcattcgcacacgcggttgtgggtgcgattgcactcctgcttgacgtactgcagctccttgcacacggggctgcagtatagacactcgtcactggtgtgccagctgtctgtgtagtagtggtcagggcaaggggcgcacacggtcttccactttgctgtacagtgttgttttaggtaggtaccaggaggccatttgtcacacaccagttgatgagaggtttcttcgtcataatgaaggtactttggaggaaacgtttcctgggtggtccacttaatggagatgtccagaaacacgagcgcgcagcacagcaagttgttcattgtggtccccggaaacctcaggggcttggaggcggcggctgggcgaccgctccggtgcgtctcccc

SEQ ID NO: 432279 - DNA, 650 bp, Homo Sapiens
gggaccagtaacaaacactagcttattttattgccttctaattgaattaaacttcagcctttttgtcattgaaagtaagaacaaatataaaaataatattttcctgggatgttttaaatttctacctgaataatggaacctccagatgcaaaataggaaagagtggtgcaactgatattgacaaataattggatagttatttcttgttttgctaaaatatttttttcctgatctgtttaattaactagaaggttccctgtaagaagtaaataagacattactatttcaactgatagtcagtgagaactgaatttaattaagcagcttttgaatttgtagttgaatctttttccagagcccattattactttatgttaatggacactaatacttttagaatactagaaatttcccttgtagaaaagttatgaaatacattattattggcacttgcatagtctattgcatttccaaaccatctactatcataggtctcgtataaagaatggtaacagctatggttaccactggttttaagaatatgtttcgtagataagtgatattattttgaaaatatgagactaggtttaaaagtttaaaacttcaaatcttgaaagagttcggattttctcttagaagacatttgaaaa

SEQ ID NO: 432280 - DNA, 527 bp, Homo Sapiens
  misc_feature (240)..(281): n is a, c, g, or t
agggaacacacatgccaagttctttaattgattttatttttttacataaaaagttcagtaaaaattggataaagtaaagtgattttaagcagtaaatcaatcttatcaacatagcacaaggctggccaaaaccacaaggcagcctgctttggaatatttacatgataacaaattaaaccttgcaggagaacttaaactgtccttacaaagtcttcctgtgatcctagcatgtagaggctnnnnnnnnnnnnnnnnnnnnnnnnnnnnnnnnnnnnnnnnnnttattttcaatatattcacatatacattaaaatataatacagatcatcagggtaaagggttgtgggtggggatgcgcatgggtctgtgcgctgacagcaccggccaggagaagacccaggtttaagagtggagtcaggtctggccagggtcttttctaagcccttgcacctctgatggcttctaaccacatgccaacagctcacactaggtaatcacttgaaaatgagtcattttgggccttcagt

SEQ ID NO: 432281 - DNA, 982 bp, Homo Sapiens
  misc_feature (800)..(821): n is a, c, g, or t
gtttttcacagggtttatggagttaaatgccgtggccgagggccactgactcgggagatggctgttccccttatgcaattaccatctcaaacggttttcttaatggataatagctagggaaaacaagggtcccttcacagggattctgaacaccactactcttggaggaaagtgtgtcgcactaagatttaaactggggagggtttgtttttcccgcctgtccacagtccacctaatttggcttttggctttggtctgcactacaatcaacttagtcttggttcccttttgggctttctggcgttctcttgctgcagcacgtttttgcgatagccgccagagatttcttctagtgataaaaggcgggagctttcaaggtcctgggggttacccaccgggcctcgggccctcttgttcactgcccgcaacccgttgattacgcggtagctttcttgcactacggagtttccctagatagtcacacgccaccctcttttgccgggaaaggctccacgggtgcccctctggtggagtatctcactttagtttcttaccatatccctagaagagatttctttggctcctttccccgtataggccccttctactatgaaatccctgacacgggattcgtcatgccctgttcccaaaccctgaatgtgggcttggctctcagattatgttcctggctaccagaatgctctgattaaccggagccttttggattacagcataaccaaagccccgcaacccagatggttagggaaaaaagggttttcctccgcagctgccgtcagccnnnnnnnnnnnnnnnnnnnnnngaccacagaggtttacaaattagttacaattttttttctttctttctctgtggataagaaaacaaagagacctttccagaatcctctctgcttatgcctccgcttcctgttctgagattcactctatggtacccaacaaatatcagaaaacagctttgagg

SEQ ID NO: 432282 - DNA, 2201 bp, Homo Sapiens
  misc_feature (993)..(993): n is a, c, g, or t
  misc_feature (1006)..(1006): n is a, c, g, or t
  misc_feature (1035)..(1035): n is a, c, g, or t
  misc_feature (1230)..(1231): n is a, c, g, or t
  misc_feature (1302)..(1302): n is a, c, g, or t
  misc_feature (1356)..(1356): n is a, c, g, or t
  misc_feature (1409)..(1409): n is a, c, g, or t
taagatccactatgggagtgaatggaggaggagggatgcacacagacatgcacaaacttgaaggcagagctgatttggaaggggctactgaggaaacactggtggcataagcgcagggtgagaagaaggggaaagaggcttgtctctctctctctatgttttaggtggttgtttttaaaaaatctgcaaaagggtttcagggaacggctggtacttacgttgtctgcgttgctgtggatcctgaaaggtgttctgttggcaccgggcgctgagccaggggcaggcgctggaaacaaaagggagagacaaaaaaataaagtgattcaatgggaatattaattgctgctcttgtggattttacaaaacacataaactgttttctttttctttcttaaaaaaatgtggattggcgcgtgtcccttttgcatggaatatacaagtagtatgggatttacagcccagttacgggactcaggattagctgcgctggcatcttttgggcatattcttccttttaatgaatgagctttcgctgttaatgaggaataatcgtgtggctaatgagctttgaaacattaagagaaaagaggttttttccgttaatcgctctggtgcgactgcatggatggattacaaaagacagcaataggaacgcagtacaaagggggggacctctcctgcagtgggagaagcaccgagatgggtgatgtgtccctgcgtctttccttccttctctctttcgctctctctgccaactgctatgggtttccataactctgcaatcaaagtggatggtcggggaaggattattacacagagtgaaagcctccgctgttaagtgtctccagtgtttaatcatcatacagtagaatggttttatgcatatttcatttgcatatcattaaactgtgttcgtgaggggccattcagaaccaggggaagtaccaagttggggacagagggaagaaaaaaaggtccctatgatgcttatcntcaaacggggacntgtcccatgatctgtcttctacttttgcnaaaatcattatgacttggaaacctttgaagttggatacaaccttggattcttctaatccctgcagagcagtgtattttacaaaacagcagaaatgttcctgcactagacaattaaaggaatataaaccccagtgggctgaaactagtagctctttggggaatgcagtagcagaggcttctacaaataccaacacnnaaaaatatataataaacagcatcatattagaaacaaagaaaacgaagacaagaaatattaacacgtggatnatatttgtttcttttggggggtaatgaactaaagagaatgaagaagccatcggnaatttatcccttcattaatgaacagtcacctttttgtatgtgtttgtttttgncctttctttttgaagagggatgttgttacttttgaagcaattagtcaattattttgtagctctgatcttttccccctgcacccgacaggacagaaaggtggtggttagggaatatgtgagtacttggggagggggggacttggtggggagagaaagaatacagtgagttctttgtagatcttatacatgcacaacatattaattgggggcttttaaagctccctcaatgggctatttcattcctggtaaaacagcagctggttagccactactggtgactcttcaaatattacttcatttttattctgtcgccgttgttgttgtcttgctttgtttttcctcagttaagaatgaaaatgtagtatcaccccctctttagtgagtctcttctccatcttcttcactccaatttccaaactgtaaaacaatgttggcttaatactgagtcctggtgcacagtctaactggcacaacttgatttggaaatgagatgctgctttatatttaaattaccccggctccccccttatcctccaaagctttgtctctgttatgaatatgcagatgaggcctgatgtgattacactgtacaattactcctatccatggtggtgtcaggggctgctagggagacagagagtcagacagcctccaagccaatacagagttttgttttcggtatttttcctatctccttggcactgcggcacatgcagatgtcgctgttgttctttataagccctaatgtatgcaaaagcataacgaagggggatgacacagggatcctctagt

SEQ ID NO: 432283 - DNA, 613 bp, Homo Sapiens
ggccctctctatttattgtaaacatgcattaagccacactggtaattttaacattctgaaaatactagacaagtgcagttatcattatcatgagaattaaccaacataaatattatcaggcctccttaagcagccgatttcatctgctctttagcaatgtatactatgatagcaccaagaattccatcttttcacaaatacctggatcagtaggcactctactgcatccccaaattagaagtagctgtgcttttggcttctgaactgtagacagctctgggggacaggcaccaagttgccgctgctttcctcagcctcagacctagaaaggcctgtctcagtgctcatcttggtataccctgatagctccctacatcaggagcccacaggggagactaatgaagcaaagatcgttcctgaaaacctcctgtactcaaaatgccatgcagtggctctgaatatactcttcttcgtgtattctctcttctcccctccctcccatatccgtgcccttgtttagttccagtttccattagaaatgctatttgggcagcaaattcgcagattggatccatctcaatgctgccatgcaaagaaaacacatctgtctgac

SEQ ID NO: 432284 - DNA, 500 bp, Homo Sapiens
ggaccagcccagaggccatgagccacagaaactcacagcacctggtggccacaccctgaaatgcaccctttgctccaagcagccagcgccctatcaacctggcatttaccaaacatctcaacagcagaccagaactagaaaacacagcttctgtgtagtacacacttatggtctgagacccaactaaggctccctacatccttcaaaactcagactccacaggctgaatgtccagcttcttcctccaagacagaattgccctcagcccacgaattctctctgggactatttacagaatcaaaggggaaacccacggaactgaaaacctctttacacaggtgggttcaagaagaaagccaccaacagaaggcaactcaggagggagaggccgaggctgcagagcccctgggcctatttccaagcagccacccctcccaacaagagcagaggtgcctctcacctcaaccctcagccctttaacttctggctgggccactgat

SEQ ID NO: 432285 - DNA, 785 bp, Homo Sapiens
gaacaggcagaaactctttaatcaggctttttttccaactctaaaacaaaatcccattttttccttaaatttagttcctcaggaacagagaactttgcaatgatgatctcaactctgcatcatctggtgactcctgattctgcaggactaagacatttcccaagagttctgctgcatcagccagtgaggacaagagttcttcagtgcggttcagctcaaggacacctaggcttccccagcagggggcttgcttgcaggtctgacaaaccacagagcgttgagcagatggcctgggactcccagacctggcagagggttttattagggcccgcctggcctgcaccgtttcatccaagtaccctgacccagcactcatcttccctggcattctctgttatccaccagctcctctgcacacctcagcgtctacttccacgaacttctaaacatccaaaggtacaatggccaggggtgcggcaggagagtcgggggcagggcagccttcaaatccaactattgaatccacacgatggaaagaagagaaagatggggaaattctccagagatcatgagatgcatccaggcagtgttctcatgtgagaggatagggaggccaaaactaaaattgctatcagcccccgccgctgtctggtacgcgaggaaactttccgaggactttacaagcatagttgcaaatgctagtaggtctgggactcttcaactttctctcctcgtgccgatttcgccacccagccctcgctaccttacgccgtagagttactgcc

SEQ ID NO: 432286 - DNA, 1234 bp, Homo Sapiens
gtgaggagagagaacgtttacggttattcattcctaaattcatgggggaggagatttgctgcatattctgttcaagttaccaggtgagaccagcagacctggtgagtttcggggattgccatacccgttccctgcactggtgcctgcaccagacgtgaggtctccacccatcagaccacctgtgttacctgcacttggaggtcgatgtgttacaccaggagacatactattcctctgcagagaagggtgagccagtggcaataggttggggtttcccagtgagctgacagggttgctgtacaccaaactgttgtggctggacactgggatggagactggcatctcgaagttgggaggtggaacagcacacaatctttgcctgctgatcattagatcaatatcttcgttaattttcctgtacttgtcctcagactcagggctgtgacctacggaatcgtccgcatcggggtctgggctgtcacagccattaaggcccttctttctcaacgtctccacgatgtctgagtttgtccggctctcatgcggctcgttgtactccgtgtacttgagaagcactttgtccatgtcggtgctggcatactggaacagcttgttggtgctgttgaagatgatcagcgcaatctcacagtcacacagcacgctcagctcataagccttcttcatcaacccaaatttcctctttgtaaatgtcacctgtctgttacgttcatccataatcctcgtaatctgaatcttttttctccccatagtccccgtttttcttctctctctcgtccctgaaattatgtattttttccttccttttctttctctttcctgtttcctccaaacaaatctccttcttcagcacttgcacagctcagttcccaaattcctgcattcgttcatgaaggaagacccgatcagattagtccttgggatattttcctttcttaagagagagagagagaggaacagaatataacaacaataatctttacttcgtccagcgttgaagtgcttctccacctgattcaaacatgcagccacggcgacccacacagaaccttcaaagtcaatccaatagcagcccgaagatgtctgggtgtacgcgtgtgctcaagtgtctgtgactgcgagcagagcgagcagagagctggagacgatgtgtgcgtgtgtgcgcgcgatgggagcccgctctcgacgaattcgagctcggccgatttggcctgat

SEQ ID NO: 432287 - DNA, 865 bp, Homo Sapiens
  misc_feature (73)..(76): n is a, c, g, or t
ccacacacggcacatataatgcatatcgaccccccttccccattaaggtatagcacacacacacactgcaagnnnnaatctttaactagtaagtaataatctgatcatgttgcccatccttcagaaagtcgcatgcgcttgactgagggactttccctttcgtccggcgaaggtctggtgagtccaatgggggagtggaattcgttccggtgatcctctcggtcgctcccgtcgtacgaactgctacagctgctcaagctgtcaacaggagatctccccgcctcgtggcgcgtgtgttgtgggtatctcgaaggggtggtggtacggtctctaggaggagaaacaggttctgacttgatgttgaggctttgagtagaaggcagggagagatttgaactctgagataaatgagtgctagtgcaagctcccaactgactgagggcagatggtggcatgttatgtaggtgttgctgttgccagccagttactgaaccaaggtgaagagcgctggcggtgttaaacccagacagagatgacaggtctgcactactcagagagtactcggtaccatatgttgttgaaatggctgatggatatcctcccattccttgtcctggtaaagtaggagttgctacggaaaccactgggggaagccaatgactgagccgactgggagttatttatcctttgattcttttaaaataaataaaaagacattactgatgaatttttttaaaagttaaaaatattagatttcagtattagttttccacataaagagataacttggtacaaatctcatgaaattaatcatttaacatgtgtctctatgaactctgccaaccctatcatttacaatccttca

SEQ ID NO: 432288 - DNA, 686 bp, Homo Sapiens
caggcagcgggggcaggggtgagctgggagagcattcacgctcgcgcacagaggggctgttgcgcatccaggcgcggcagattgggtacagtggcgtgttctcgctgaactgggccaagtccacgctccggtcgaacagcttgatcacatatgtgtctgggaaggtggggatgggaggtgtgtgagcatccttgcataggcccttggctccttaccgaccctctagggccactgtctactcactggatcgctgcggccctccctcagccagcccatcatccatctccctcctcttcttcctccgctggtgggggaagcgggcagatggccttttgccagtggctgcgatggagcagtccttattgtgggtgtctgagggtgttttcccagcttcctcatccagacgctccctgtccatgtgactcttctccagcagacactgcaagacagcatccagttggttccgggctttggccatctccagctctgatttctccactttcaccttcacagggaacatggtttgggtccgggatctggctagctgggtcagaggcgccccaaagggcctagggtcacaagtcaaggcgggagaaggcggggacagttcaaagatgagcttcgtgggccacgggtcctccgcctttggttgtgtccagcctggaccgtggccaccacccttctgt

SEQ ID NO: 432289 - DNA, 1050 bp, Homo Sapiens
  misc_feature (197)..(201): n is a, c, g, or t
  misc_feature (203)..(219): n is a, c, g, or t
  misc_feature (221)..(221): n is a, c, g, or t
  misc_feature (224)..(224): n is a, c, g, or t
  misc_feature (226)..(226): n is a, c, g, or t
gaaagtaaaggttccttcacccaagatttccccaagttagccagttttcccagtccaggaggttgtaaaaagggcgggccagtggcctaggctttaattcggacctcattatagggggcccctttgtacaaagaaagctgggtacggcgtaagcttggggccccttggagggattactctagaagcggccggccctnnnnngnnnnnnnnnnnnnnnnntnttntnaggagctgggggatgtttactggtgtggggggacctgggaacatcactgtcgttcgtacatctctcgtaggatcttcatgctttctgagtaacgaagctggttccgatgagaggcctccttccacctctggcggatgcgtttccagcgctgcatgttgcgatagatgagtgtggagggtgagggctcgggctcagagggctcatcgtcaggggtgccctgcatctcaggctgcagtggagatgggatgcgggatctgcaggcatctccgggtggccccgggggtgtgggtggcggcagcttgtacacatcacgactcttgctgttggttacctctgagccctcctcatcctcaggcagcgggggcaggggtgagctgggagagcattcacgctcgcgcacagaggggctgttgcgcatccaggcgcggcagattgggtacagtggcgtgttctcgctgaactgggccaagtccacgctccggtcgaacagcttgatcacatatgtgttggatcgctgcggccctccctcagccagcccatcatccatctccctcctcttcttcctccgctggtgggggaagcgggcagatggccttttgccagtggctgcgatggagcagtccttattgtgggtgtctgagggtgttttcccagcttcctcatccagacgctccctgtccatgtgactcttctccagcagacactgcaagacagcatccagttggttccgggctttggccatctccagctctgatttctccactttcaccttcacagggaacatggttgggtccgggatctggctagctgatcccaggaattcc

SEQ ID NO: 432290 - DNA, 1155 bp, Homo Sapiens
aaaaattactgtactttcttaattcctgtgtgctttgcaataggaataatagggactttgttttcttagaaaagataacatgtaagagtataacacaaataagataatttataatatacatgtacttcaacaggcagccttggttcatgccaacatcttggttttgaagttaaaattggaagtccaatacctagaacttaacagttgggagagacaatatttattttaggaaaaaacagagcaaatcaaactcttaggagcccttgaatctgaaaatcatctatttgctataatacacataagataatcttaaattgtagtatgaattaagataacattgaccaaataatttttttctttactacacaaaatataacctagtgaaatttacctgtgccacctattctgaaaattttatccataatttagtgttctggttttatcttcactaacaaaatgtttacccccaaaagcagcagtcacttatagtaattctggtaccaacatcaaaggaagaaattggcttaaaaatggtgcaaaagccattttggattttagtacgacacatcacagaaaagaatatgaatacaaatttgtaatataaacactccaaagagtctgtcagtacccaaagtatttttattgctatattagcaatgggttttttggatattttttaagggccacataaaaatagattcaaggaacaaattaaattgaagtcctagatttaaatgtttggtttaaagaattttctacaacaaatttcatgtttatgtatgaaaagttatataaccttatatgaaaatgtcatggaagtattttctacactatactaaatgtgttccccaagagggaaaaaattaaaatatctaaaatatattagattaagattacaagaccatcatagatcttttgaacatgcatctgtttacagaattaacagtatacaaaatttttatttcattatggaccataaagaaatgagttggtgacaactatcttttacacacataccaaggacatgcttgtggctaaagtgagttgataatgttgtgcaaaggaaataggttcatttatccctcatcaaatcatccacgggtttaccgacgcgtggtcgacgatatcccggaactccggaccggtaccagcctt

SEQ ID NO: 432291 - DNA, 1177 bp, Homo Sapiens
  misc_feature (1)..(1): n is a, c, g, or t
  misc_feature (4)..(4): n is a, c, g, or t
  misc_feature (10)..(10): n is a, c, g, or t
  misc_feature (12)..(12): n is a, c, g, or t
  misc_feature (30)..(31): n is a, c, g, or t
  misc_feature (34)..(34): n is a, c, g, or t
  misc_feature (39)..(39): n is a, c, g, or t
  misc_feature (44)..(44): n is a, c, g, or t
  misc_feature (48)..(48): n is a, c, g, or t
  misc_feature (52)..(52): n is a, c, g, or t
  misc_feature (56)..(56): n is a, c, g, or t
  misc_feature (60)..(267): n is a, c, g, or t
  misc_feature (540)..(549): n is a, c, g, or t
naangaattngntttttcccagggtggggnnagngcatntttcngtcnccanaccnccgnnnnnnnnnnnnnnnnnnnnnnnnnnnnnnnnnnnnnnnnnnnnnnnnnnnnnnnnnnnnnnnnnnnnnnnnnnnnnnnnnnnnnnnnnnnnnnnnnnnnnnnnnnnnnnnnnnnnnnnnnnnnnnnnnnnnnnnnnnnnnnnnnnnnnnnnnnnnnnnnnnnnnnnnnnnnnnnnnnnnnnnnnnnnnnnnnnnnnnnnnnnnnnnntgacatagtaattctttaaaccatccttcctcaatgtgaagctcctggtgtattttcaccagcttctctcctccctcctcaaatcctggctcagtttagaataactactcccttctatcctgtctcctctcatcctttgctttcttttgagaaagaactctgaacgttttctttttctgagatctctccagctactcttcactttttctcccctgttcttggtctcctctcctgtttctttccaaccctctccatcttccccaccctgtacannnnnnnnnnaactcccactcctcttccccacatctattccactctcacactgctcctccttggtgtaataatattccttgtcaatgataatcttctcttccacggtgtgggacagcagctcaaaggagttcatcacctcgatatttcggccctcctgcttgccaatcagagccccaatcacttggacaggccgcctgtcctgggagcgcgtgcgggtccagtggtcttctatgttgagcctgacaagggtctggagatcggtgggaacactccctgtcattggggaggcgatgactttggggactactggtgcatctggctccatgtcgctgcttggtgtgggaccgctgcttgggggagttgatcacctggatatttgggccctggtgtctatgcccatcagagcctcaatcacctgcacaggccgcccctcctgggagcgcatgcggatccagtggtctgagatgttgagaatgacaaggggatggagagcgacggaaacactcccagtcactccgcaggccatcacgctggggattactgctgcatccacctccatcccgctgcttcctccggtcccgttggtagctgcagccgccaccgccgccgccgccattttccccgcgcccgccagcct

SEQ ID NO: 432292 - DNA, 1360 bp, Homo Sapiens
aagtagtcaattatcatgtttataaggttgggtgggctaggtaagatgatgtagagggtgacattaaagtgtagaacagagaccacttaggtggaagcaggcagccttggactttgctaaagaccagtccatgtgactgacatggggtcacttcaaatggtagtgcctccctcactgaagagcatcagaagggcttctgagcaaggccagaatgagcctcgatgaacatccaagttgaccaaccagtgtggtgcctaacagaggacagagccaccagcaggggtgctcaggggctgctccccttttattaatgacagcggtttctctcaaggaagtgtagtgccctcccctttgggatagttgcctgacccctgtccatcagcccttcaagtaccctcatcagaaaaagagcccgcgcattctcctgccgatgccttgtcggtcgtagaggacattgaacttgttcacaaactggttcatggtgttgcacgttttggtgatggtgccgaggtaggccatgagccccacgtcgttgcattgatcataaaaatctgtcttgaacttgtctgtgctgagcaccgggagacagtgacacagagcataggcctcccgcaggatctcatgattaaaggggacctctcccgcttcagaggccttgacgtactccaagatgagcttgacgcggctgtgcagcatcttgatggcgctgtgctgtgctatcaggtgttcagccacagtggagttctctccactgcctgttgctgtcattcgggctacgtggtctacaccaatgcgttccgcttcctctgtggccagagtgtaggtcagctcagcaaacagcattgtggcctctccattgattatatcaatgacagactcaaaaacgctgacaggaagatctgtgtgcttggtcatagggttcaacttcagaaagagggggctctcgatgatctcacacacctgcttatggacgtggatgtccgaggggtcaggtggcccccctgtggtataccaacccagaaactccagctccttgaacacctgtttaaactgctcctccttggtgtaataatattccttgtcaatgataatcttctcttccacggtgtgggacagcagctcaaaggagttcatcacctcgatatttcggccctcctgcttgccaatcagagccccaatcacctgcacaggccgcccctcctgggagcgcatgcggatccagtggtctgagatgttgagaatgacaaggggatggagagcgacggaaacactcccagtcactccgcaggccatcacgctggggactactgctgcatccacctccatcccgctgcttcctccggtcccgttcgtagctgca

SEQ ID NO: 432293 - DNA, 806 bp, Homo Sapiens
gcccgtttattaatggacagcggtttctctcaagggaagtgtagtgccccttccccctttgcgaataagttgccctgacccctggtccatcagcccgttcaagtaccgctcatcagaaaaaagagcccgcgcattctcctggccgatgccttgtcggtcgtagaggacattgaacttgttcacaaactggttcatggtgttgcacgttttggtgatggtgccgaggtaggccatgatccccccgtcgttgcattgatcataaaagtctgtcttgaacttgtctgtgcttagcaccgggagacattgacacatagcataggcctccctgatgaatgtcatgattaaaggggacctttcccgcttcagaggccttgacgtactccaagatgagcttgtcgcggctgtgtatcattttgttggcgctttgctttgctattaggtgttcagccacagtggagttctctccactgcctgttgctgtcattcgggctacgtggtctacaccaatgcgttccgcttcctctgtggccagagtgtaggtcagctcagcaaacagcattgtggcatctgtgtgcttggtcatagggttcaacttcagaaagagggggctctcgatgatctcacacacctgcacaggccgcccctcctgggagcgcatgcggatccagtggtctgagatgttgagaatgacaaggggatggagagcgacggaaacactcccagtcactccgcaggccatcacgctggggactactgctgcatccacctccatcccgctgcttcctccggtcccgttcgtagctgca

SEQ ID NO: 432294 - DNA, 521 bp, Homo Sapiens
gtttatacaggtgttcaaggagctggagtttctgggttggtataccacagggggccaacctgacccctcggacatccacgtccataagcaggtgtgtgagatcatcgagagccccctctttctgaagttgaaccctatgaccaagcacacagatgtgagtaatactccatgcctactctgtcatgattgtcgctatacctttgtactgtgtgacactcctctattggggtatgccagatgccacttaccaagctgtgactctggcttagtcatttaatggtccagactgtgataggaggttatccctacttcattgttttcttgggaagatgagaggaaatgtgtataggcagttagcccaaatgttggcatatagtgttcaggtttctccgtctccttcacagcttcctgtcagcgtttttgagtctgtcattgatataatcaatggagaggccacaatgctgtttgctgagctgacctacactctgttcacagaggaacggaacgcattgatgtagacc

SEQ ID NO: 432295 - DNA, 638 bp, Homo Sapiens
ctgtgctgagcaccgggagacagtgacacagagcatagccctcccgcaggatctcatgattaaaggggacctctcccgcttcagaggccttgacgtactccaagatgagcttgacgcggctgtgcagcatcttgatggcgctgtgctgtgctatcaggtgttcagccacagtggagttctctccactgcctgttgctgtcattcgggctacgtggtctacaccaatgcgttccgcttcctctgtggccagagtgtaggtcagctcagcaaacagcattgtggcctctccattgattatatcaatgacagactcaaaaacgctgacaggaagatctgtgtgcttggtcatagggttcaacttcagaaagagggggctctcgatgatctcacacacctgcttatggacgtggatgtccgaggggtcaggtggcccccctgtggtataccaacccagaaactccagctccttgaacacctgtttaaactgctcctccttggtgtaataatattccttgaatgaggtcagcatccacccaactggcacggtaagaaataggacacttattttctcacagctcctctctctgtaagcatgctacagagagagtctccgtcgaactgggatcctctagatcacg

SEQ ID NO: 432296 - DNA, 727 bp, Homo Sapiens
  misc_feature (490)..(491): n is a, c, g, or t
  misc_feature (496)..(496): n is a, c, g, or t
  misc_feature (501)..(503): n is a, c, g, or t
  misc_feature (507)..(507): n is a, c, g, or t
  misc_feature (523)..(523): n is a, c, g, or t
  misc_feature (527)..(528): n is a, c, g, or t
  misc_feature (534)..(534): n is a, c, g, or t
  misc_feature (545)..(545): n is a, c, g, or t
  misc_feature (551)..(551): n is a, c, g, or t
  misc_feature (561)..(561): n is a, c, g, or t
  misc_feature (566)..(566): n is a, c, g, or t
  misc_feature (575)..(575): n is a, c, g, or t
  misc_feature (591)..(591): n is a, c, g, or t
  misc_feature (602)..(604): n is a, c, g, or t
  misc_feature (609)..(609): n is a, c, g, or t
  misc_feature (611)..(611): n is a, c, g, or t
  misc_feature (617)..(619): n is a, c, g, or t
  misc_feature (621)..(622): n is a, c, g, or t
  misc_feature (631)..(631): n is a, c, g, or t
  misc_feature (636)..(638): n is a, c, g, or t
  misc_feature (640)..(640): n is a, c, g, or t
  misc_feature (642)..(642): n is a, c, g, or t
  misc_feature (644)..(645): n is a, c, g, or t
  misc_feature (647)..(648): n is a, c, g, or t
  misc_feature (651)..(651): n is a, c, g, or t
  misc_feature (655)..(655): n is a, c, g, or t
  misc_feature (667)..(668): n is a, c, g, or t
  misc_feature (679)..(679): n is a, c, g, or t
  misc_feature (686)..(686): n is a, c, g, or t
  misc_feature (695)..(695): n is a, c, g, or t
  misc_feature (699)..(699): n is a, c, g, or t
  misc_feature (701)..(701): n is a, c, g, or t
  misc_feature (703)..(703): n is a, c, g, or t
  misc_feature (705)..(705): n is a, c, g, or t
  misc_feature (709)..(709): n is a, c, g, or t
  misc_feature (712)..(712): n is a, c, g, or t
  misc_feature (717)..(717): n is a, c, g, or t
  misc_feature (719)..(720): n is a, c, g, or t
  misc_feature (727)..(727): n is a, c, g, or t
tgagctaccgcgcctgtctggacactgctaatattatttgtactcagccattttttcctttttattgtaaattaaagtgctacattttatgtagaccttacattaatgcatatcaaatattgagttcttgttttaaaaatactttcaaatattaaaaattttacttacatttaagagttcagaaaaaaacttagggtaacaatgtgctatagtcagtctcatgtgactaataaaaaagcacttacatgaatttttcaacaattaattctgcaactctcacaaaatacactggtactgcaatcaaaagaagacatgaacagcataaatctaataaaggattacctcaagagggaactatttcaaggtgatgtaaaaaagaagagctatttcttctaaaggggcattcctaattcttttataaggacaaaatgtaacaaatttatcttgtgcttaatgtaattattttaataggatgttaaacagtttatcnnaaaantgtgnnnttanaaattgtgttttgaanctgnnaatctntgactcaatgntggggnatacatgcanaacangccagtttnttactagccttccctncttcaaaagcnnntgggntntaaatnnngnnatatttccntgacnnncncncnncnnccnatgnactccctttttnntgaatttaaantcattgnactattctnctgncncncnatcnctnaaatncnngcatttn

SEQ ID NO: 432297 - DNA, 886 bp, Homo Sapiens
aagtgcagaaatatcttcaacttttaatatcatcagaaaatatcttcaactttaacccccaggacaagaagtcagttgcgaagtgcacaaaagaaacacactgtggctctcccatcccccagcagtatggagcaaagacatagaaaatcagcagtgactagacagaatatgtggcaatgcttagggcaatctgttacccaacactgaacatctttaaattccattctggggagtctaagatgtgtttgatatcagacataaaaatttacgtgataagtaggagtcacttcaagttctaggttcataggtaccaaagtgtgtagcaaagaaaaagaacttttatttcttcagtagtttctaatgcagacaaatgtgacaaggcagggagctgagctgaccccaagccgaagggtcccgactcctctcgggagcctggaggagtcccggtagcgaatagatcagatgcctcatcctcgttcaccccaaaaggctgagaccctggtgtgtcctcctcgaggaccctccctgtttctgggtgctagaggccgttgctgtttctgtgacagagggatggctttgggagctccacagtacctgaccgaggtttgttgaggaacttcggggcacgacgcaatagccgctgggcctccttgaaggtttcgttcaactctttcttccactgcacaaactctggatcactctcacattgcaagacaaattgtttccctccttttattctgaacaaaatgcattttttgtctttaatttgagtttcttccacagagagaatctgttccattgtcagtaaattttgccgggactctccctctcctctccattcaagtctattggaaagaggcctcgtgccgaattcgccacccaggcc

SEQ ID NO: 432298 - DNA, 1835 bp, Homo Sapiens
  misc_feature (1060)..(1098): n is a, c, g, or t
  misc_feature (1408)..(1484): n is a, c, g, or t
  misc_feature (1493)..(1552): n is a, c, g, or t
  misc_feature (1569)..(1578): n is a, c, g, or t
gaaagtgtaaaccttttatttcactctttcaaattttgttccataatgttcacattagtgtagcagtacatttgttgacacatattttcattgttcaatacatataattatggacacatgctcaacaaatatttttgtaaggaaatagcatcaggtttggagaccatgatctagataactgagtcaacatttcgctcctcatgcattcatagctatcaagccgtctttcctttttcccccttacctaccatatcctgacttctactcctagtttctccaagaggacaaaacatattaagatgcggtgggtcagaatgtgcaggtggtaatgtgacacccagctaatgagtctgagaggcatgggtatctcctcagctttcaagattacagcctgagctacacagaaataaactgtgcccacttaacttgcttgtgaacctgatatggaagcaatgatatcccattccactaggtggcagcaaaactctacccacaaggtgcccaagtggttcactggtattattagtgcttacttgttcagccccacttaattagcagaaagacagtggctaacaggatacttaaattacataatgcctccaacagtggagaacagacactgccattttgctttctacaggctggcctttccttaggcctacctgaattttacatgtattgtgaatgatcttctcagacatccacaggccaaatggcaaaaagaaccttctgatatacctaagcctggagtcaacaatcaaaagtcctagtaaagttatatagatcctgtatcagattcaggtaaaaccctgggcatgccatggataaagaaagacttctgaaagttttcattaggatggtagaataatgaatgtcttacaaatttattattataatacatagaattttgaaatagtatttcccagaagcagtagtacttaaccagttcagcaggcagtctatatacattttttacctttgcattttccaaattcagtaggttattgttagcctccctaaaaccaaacaattttggctagaggtgttaacccaatctctnnnnnnnnnnnnnnnnnnnnnnnnnnnnnnnnnnnnnnntctctctgctattgacttataattattccctccgcttaggtcattaattttaaaaagtaaatagggtaaaacatttcaagataataaactaggctacattaattaatttcttacctaaattatgcattacattaaaatctatgtcacttgaccttaagaaaagaaatgacactaccctctttacagttaaaaaaaatttcagtttccagggacttgagagtatacctaatctgaatgagtcagaaactgttctcagaggccagcatgacgctcatgcctgtaatcccagaactttgggaggctgcaaaannnnnnnnnnnnnnnnnnnnnnnnnnnnnnnnnnnnnnnnnnnnnnnnnnnnnnnnnnnnnnnnnnnnnnnnnnnnnagccagagnnnnnnnnnnnnnnnnnnnnnnnnnnnnnnnnnnnnnnnnnnnnnnnnnnnnnnnnnnnnagaccctgtctgggggnnnnnnnnnntgttctcagaaaaataagcatacaaatgagagatagaaatgaatagagagatatggtatctcttaaattagaaaatcagcacatatgcattctaaatgagacaagcatataaaagatgtcattgtagaggaggcaaacttaagctgaaaagtttcttcccaaacatactctactcttgtacatcgactgtaggatatttaagacctcacacaatattacatcacaacatcgtttattatgtgaattttttacaatac

SEQ ID NO: 432299 - DNA, 733 bp, Homo Sapiens
  misc_feature (42)..(42): n is a, c, g, or t
  misc_feature (94)..(94): n is a, c, g, or t
  misc_feature (113)..(113): n is a, c, g, or t
  misc_feature (162)..(163): n is a, c, g, or t
ttgcgcacattgtgggctgtgatctctagtgtgcccaggtcnatgcccagtagctcagcaatccgctcccgcccgtagatgtccccatgtttgnccaggaccttgcgcttganaaacttgtcccagtagttgctagggaaagacggcgtgttgagcaccagnnggtcccactgccccttcacgtcatcgtcctcaggctgctccgtgatgtacaggccatcaaactccagcttccgggccagctccttctcccgcttaaagattaccaggggcaccttgagacaattatagccaatgatgcagagaaaggccaccagtgtatgcaggaggctcagacaccgcagggcgggttccatgtagcctgtgctttcctccaggaagtagtacaccatgttctcatcctcatcgccctatgcctcctctccggcccccaagccccagccagagctgccaccagagcctgcacctgacacatccccagcagctgagccttccatgtcgtcctcccctggtggagagtctgagaccaggaacttcaccctctgcacctccagttctccccagaattcgcctccagcttcctccttctttggagggggtgagggaggtgcttgcttcttggggggctctggtgtgggctcgggaacttcttccttctccccattctcggcatcggctttctccggctccagctctggttccggctcgggctctggctctggcgggagctcct

SEQ ID NO: 432300 - DNA, 1305 bp, Homo Sapiens
gagcaatgactcataaattctttattttggctaacactgattgcattcattactaccattttatttattacagctcagaggagagtcatttactagacattcggttgttattaaacactaaaaattaggcagagactggaggggataaggataagagaacaggataaggagagcagaaagacgctcaggagagtagaaagacactcaggagagaacaagagatcctgcccattcttattatgaggatgaactggctacaggacatgagtagcccaatcagatctaacttaaataccagcctctccaaaaaagttttccaataaagatcccctaacaattatttactggacaaaaaaggttgatatttctagaagagatgatctcgttgacacaaaagacccaacttaggacccaacttaatacatagatagcaccatgacagagctgggatccattaagacatgactgtagacaataccatctctaggaacacactgtcactcacacatggatgtgttgttttatggcctaaagatgttgtagacggttctcacataaatttcatcagggggaggcttcttcttgctgccaggttcaaggaatctcttaattgtagggatattacttagtttcactgtgtattcctggaggaaaggaaatgcagacaggatattaggaattttctcttctagagctaaaatggtttggagtaaaatcacatctgcaaggctcagctgattaccaacaagaaagctttgtccgtgaccccttaaaatcttttcaaacacaggaaagtatctaattatagccttctgggccatgttaaccacttccttttgctgatcatctggttttaagaaaggatgcatgataagcagttccagcagatccagtgtcccctccacgtacatgtcaatcagggttctctccttgaggttcttgccaaagagattgtgcttgtctgctatgtagtggagaatgcttcgggtctgtaccaacttcatcccgtcaatttcaaccatgggcacttgttggaacagcaggtggttaccatcctgcaacttgtacaactgttcttttgtttccagaaattcttcatcaaactcgactccggcggcagctaaaacccatctcacggactccatccggcctcttccgttgggatagtggagcttgggccttgctgccatgatagcttttcaggctttctggagtccactcggaggcctggagccgcacaaagcgccaggtcagcggtcccggctccgctctcgacgaattcgagctcggccgatttggcctgat

SEQ ID NO: 432301 - DNA, 320 bp, Homo Sapiens
cttctaatacatagttttatttacctggaggaaaggaaacttcagacaggatattaggaattttctcttctagagctaaaatggtttggagtaaaatcacatctgccaaggctcagctgattaccaacaagaaagctttgtccgtgaccccttaaaatctgtagggaaatggtgtgcatcagttacaatattccacatggagagactgatgaggctattgaatcagtgcagtatctgagaagaggtgaaactatgaccttgtcatttcatgctttcataaataacatcaattaagagaacgcaccctatatctgacagag

SEQ ID NO: 432302 - DNA, 1642 bp, Homo Sapiens
aataaacaacagagtttgttttgtgagataagtatcttagtaaacccaatttccagtcttagtctgtatttccaatatttctaattcctgagccacgtcaaagatgccttgccaaatttctccccatttctctacggggctagcaaaaatcttcagctttatccctcaacccctgccaaaggaacttgattacatggtgtctcaccaaatgagcaggcttaggaatttagatgagatgtgtaagattcacttacaggcagtagctgcttctagcatttgcaagatcctacacttttaccttctttaagggtgtacattttgatgttgaacatcagttttcatgtagacttaggactcatgtgcagtaaatataaataagtgtagcatcagaagcagtaggaatggccgtatacaaccatcctgttaaacatttaaatttagctctgatagtgtgttaagacctgaatatctttcctagtaaaaataggatgtgttgaaatatttatatgtactttgatctctccacatcacttataacttatgtgttttatttctccaagtgcggtgttcctgaatgttatgtatgcttttttttctgtaccacaggcattatctatacctggggccagattttctgcactttgaaatgttgcctttgcctaatgtaggttgactttctgaattgtggagaggcacttttccaagccaatcttatttgtcactttttgttttaatatcttgctctctgacaggaaagaaacaattcacttaccagcctccttaccccatcctccaccatttccttaatgttccatggtattttcaacggaatacactttgaaaggtaaaaacaattcaaaagtatcgattatcataaattcacaaaatatttttgcaaccagaacacaaaagcaggctagtcagctaaggtaaatttcattttcaaacgagagggaaacatgggaagtaaaagattaggatgtgaaaggttgtcctaaacagaccaaggagactgttccctaatttattctcttggctggttctctcattgaattatcagaccccaagaggagatattggaacaggctcccttcatgccaagggtctttctaagttaatactgtgagcattgagcccccattaaaactcttttttacttcagaaagaattttacaggttaaagggaaagaaatggtgggaaactctccccgtaatgcttagccaactttaaagtgtacccttcaatatccccattggcaactgcagctgagatcttagagaggaaatataaccggtgtgagatctagcaatgcattttgaatcttcactccctaccaggctcttcctatttttaatctcttcacctcagaactagacatatggagagctttaaaggcaagctggaaggcacattgtatcaattctaccttgtgctatacgtaggagagatccaaaatttggatgcttctggagactcttagacatcttttcattgttgtccatttttaaagttgatgattgctggaaacattcacacgcttaaaagcaatggtgtgagttattaatgggtaaactaagaagtgttataggcaatgacttgaaatggtttttaaattgtattggattgttaaggaattgttgg

SEQ ID NO: 432303 - DNA, 832 bp, Homo Sapiens
ggtccagaaacaaggccagcattgcggctccccagctcagcagcatccctggcgcagctggcccaggagctctgtgcaggttccgcccgatgacctagccccagttgcactcacgtccgagaaccgggctggctgggggtcctctttgatggagctttccttttctccaagtcttgccgaatttcctgaggaaaagcattgatgttctcccggacacaagggaggcagaaatctcttggagtagaataaactgcattccgggcccacaacacaccagcctgctgcacaaactgcagcacgagccgaggaccaggaatctgtccttgtcggaggtgaagggatccttcatgacatagctttcctccaggaggaccatcgactgggtgttggggggcttctgtcccacatagctgtacggagctgtcaagggtacaagagttcacactcaaacactcccagaggacggcactctacatgggacgccatctgatcccgcttctcttctgcacgccggggcgtcctaggcccctgccgaggctcctgggggcggcgcctgtgaacagggacggctgagagggtccggggatgctggtggtccccgcagagcctccgcctgccctctctcgccccagcgctgcccgaggtcaggggggacagtcccgtgaggcccacaccccgcttctcggtcccgtccccaaagctgagagcggctgcgccgactcctggcgcttggaacccagcaggccacgccggcgcggaactacagtcccggccgagcgggaggcaccctgaggcagcgcagggaagggccacagcacgctcgccccagtca

SEQ ID NO: 432304 - DNA, 886 bp, Homo Sapiens
tttccccctctggaccttcccaggctggtccagaaggagctgctgttcagtgattttccttacagagagaaccattggtcagcccacctaccagtgcaccattgccccgacacagtgtgccatctccccccacacgcacctgcacgcagcctcttaggagctgccctgctgaaggaggtcatccctctcagtcacatctgagcagcactcactcaggcctgggccctgaggggcatgtggggggacctggccgggttcctgctgtgtcttgtctggcatctgcctttggactaccctcttgctacagctccctgggcctgtggctgctccaagctggactccagctcccctgggctgcagtgctgctcccagtggtccagaaacaaggccaggcatggcggctcccagctcagcagcatccctggcgcaggctggcccaggagctctgtgcagggtgccgcccgatgacctagccccagttgcactcacgtccgagaaccgggctggctgggggtcctctttgatggagctttccttttctccaagtcttgccgaatttcctgaggaaaagcattgatgttctcccggacacaagggaggcagaatctcttggagtagaataaactgcattccgggcccacacacaccagcctgctgcacaaactgcagcacgagccgaggaccaggaatctgtccttgtcggaggtgaagggatccttcatgacatagctttcctccaggaggaccatcgactgggtgttggggggcttctgtcccacatagctgtacggagctgtcaaggtacagagttcacactcaaacactcccagaggacggcactctacatgggacgccatcgccgccctcgtcccacggctccgcgtcc

SEQ ID NO: 432305 - DNA, 697 bp, Homo Sapiens
acgagacactgtgcccaggcccaaattctgtacttctcccagctattgtgaagcctccgacatggtctgttctgattctgtcacctttctcttccttctcaagccccagtaggggccttgcctctccagcgtaccctgcttttggagatcttgcctccatgtttccattattgatggagggaccggggcaggactttgctttccaatgtcactattatgtcagcaggctagccctgaaccccacacagtaagaccccttatgtgagggttttacacctccttgatcttattcctctttccaggtgagcaccacacactgacctagctaggctcagggtaaggtagctcttgctcattttggccaggtatttaattacgtgacattcacagtgtgcctttctacttatctttttatccttttcagttcaagaaacgtggctataccaacttgccacagtgcccatcccactttgtagaagactttgatatctgactcacagagaaactcctgccaggagtttatattgtgtgcagctgattcaggcagtaacttccactcagcgagggggtccatttacaaaaattacttctctttccttttatgcccagtatggttcttacaaatcaaccagacctatctttcaccagccacgacttggttcttttaaagcacagtatttctgcttcttctagtcgg

SEQ ID NO: 432306 - DNA, 396 bp, Homo Sapiens
tgaaccaccacgcccagcagaaacatcctttttaaggtaaatggcatgttgccctatatatacttcttatcactaaaaaggaagcacagtgtttattgagcctcttggggtttcggagtccacaaataccacaatagaggatattgctccaacgtgttaataaagtcctttttaaatccctgttcagttaacctacctagcctctgccaaaactagatgggttgcagaatgaatgcaaagactccgggtttcaagtggaatccagaacatataatatctctacagcagatataggctgtggccaaacctgctctgcccattgcgtcagatgatccagcagaattcaaagctgctagaggcatgcatcgtgggcattttaggcctctgtgcctgtct

SEQ ID NO: 432307 - DNA, 1636 bp, Homo Sapiens
tgtcataaaaatgtgaaaacattttattctatgtacaataatgtacacaaatttaaacaggtcaccaaagagaccagaagtaattaaagaggtatatttacagtagcacatcacagtaaacggaaaaccattcacagattcaacattgatactgtttttgtgcttggttacacactgaaggtgaaggatattactccattttggatgaactgaattttaaacaaatacctcaatcattaataaatgctattttcatcagtcagtatcatcattaaattcttcagctgctgcgcctgtgtgctgaatcactccatttctttctctttgaacatcatcatcacaatctgtactgtcatcttcgttcaattccctgtcagattcagcagcagcttctcttacagcttcctctggagtttcattgggtggaataaatccattgttgttagatacatttgaattatccttgatatcatcttcgatgtatactttctgatggcacattggacaagtatcttgaatgtacagccatttccgaagcaaagtgcatggaaataatgattacacggtgtaatacgagcagatgttgtaaactcatgatagcagattgcacatacatcatttatttcttgtaagcggctcccttttatttcaggaagtgaattaattttcttcacagcagtcctacgattcataaatgtcttccagccatttttggcttgtaagtagatgttaaaatatgcatgtaggcacatcataaaagcccgaattttacttcccgactcaaacatcatagtgtaagccccatttccaaacattacaactccaaatataaattcaataatactgcctgttgaacgaacgtagtagacataatcgtcaagcttttcccagaggacattatagtagccatcaatcatgaataacgtataaacagtgagagaaacaattacttttaagcacagttccacacaaaatgctgtaactgcaaacaaccatgtatttagtgcatagtgatgccaaagaacataactgagtaagacaggaagaataaacaggcaagcagagacaaacagcacaggaaaatgtctacgaaaagatgacacatgagaggcactgagagacattaatacagggtctgtcattccatggataaaatgcaggactgcagttaataaaaggcacatgtttctacttaagcgaataagtctctcttctggtcttagcccacttaacccagtctgaagagccaaaataaaaaataaaacaggtgcaacaaagccaagacgcctgtcatcttcctcagttgatccaataaaggccaatattccaagccccaaataatgggctactgaggaaattacagcactcatgcccagtacagttagtgtagaatcgcacccactaattataagattgcaaatgaggtcccaaaaatcatcccaagaaataagaaggaatcagtttcatttgccatccttaagatgtacattaacactgtagcctgagctgtaactcttgttagccaaaagactcgtagtatgtctgggaaacgaatcctcttccatgtgtcctccatcaataactgtaatccataaattcgatacatgtgcctcaccaaaagataaacatatcgtgt

SEQ ID NO: 432308 - DNA, 1025 bp, Homo Sapiens
  misc_feature (30)..(30): n is a, c, g, or t
  misc_feature (37)..(37): n is a, c, g, or t
  misc_feature (50)..(50): n is a, c, g, or t
  misc_feature (95)..(95): n is a, c, g, or t
  misc_feature (137)..(137): n is a, c, g, or t
  misc_feature (143)..(144): n is a, c, g, or t
gcaaatttcccatggatttcaatccaggtncaatccnccaaagtcccttngctttttataaatttttaaaatgtgggattttaatatattttagnaaattaagtacaaatggcagcaaatatgacctatatatggcnaagtanncctggtgatttcccaatttataaatctgagagctgtttcccatacctgaagcctaacagccattctgatccaaatccaatctttctgtcattgtcagctacttattaaaataataagatttcatttctacttggaaacaaaatctttaacctgagtttccagtattcaaaatattgctatttagatgtcggatgcttaacatttcatgccaaagtctcacgtgaatgatctgacataagatagaacatactactcagcaacaaaaaaaatgcacaactgacacacagggatcaatctcaaaaatctgcagagaggaagaaggcaaagtacatactacagtattctatttacatgaattctacaatggatagatctaatcggtaaccaaaagcaaatctgtggctgcctagggctaggggtagaggaattgattgggaaagggggtatgagaattttgggggcaatgaaaatatttgtatcttgatcgtgatagtggctgcacagaggtatgaatctgtcaaaacccaataaaatacacacttaaaaagggtgcaataaatctaagtaaatagtacctcaattcagttgatttacaaaacacaacatgacagtatattttaaattaaatgaaacattaagaccttattttttaaaaaaattaatgttatggataaagctaaagttccctctgaccaccctcccaatcctgatttgcacccctaatctctcatctatacctcctactcgctgttagaactttggtatggattcctctgaacctttaaaaatagatttacgtacattatatagccatagagaatgcatagtattgttttgtacatatatataatttgtatataatccgcgggaattccggaccc

SEQ ID NO: 432309 - DNA, 1644 bp, Homo Sapiens
tccaaagaagtgccttcatttatttacagggcttaggaaaggaaaaaagctctacaaaagggaaatttcaaaatagggcttcagcaggggcccaggtggagtgagtagttttgataaggtccaggtgggactcacttccaggtggtgaggaccgctctccccgagtctctcgatcggcctgctctgggccccagagactgaccctgacggcttctcagctcccggtcagccccgtcaccctgggccaattcttcatcatacagaatctcgtaattgccgaggacttccttaggtggcgacttgttccatttgcagtctgggatttcaccattcgggacggcgatgttgagggtgtcattaatcaggttgtacttgaggattcggtcattggcagtgctggacgtgagagacggggacgcattcacctcgatcagccagggcttcagcttgtcgtcgatgatgatgtcgtagccatagcattcaaagcagtgcttgtcattgttcatcaccggcgccacagccttcagggactgcacgatgatccagtggatctcatcgaacagcttgctggtcacctccttgccgcgggtgctctccaggtagagccgcaggttactcactgtccacttgcccccatggatgtggttgtagtcctccccgtgtttctggatggcgacgttggtgagatgaacgaacatgttgtccagctcactggtactcggggtgtatttcactgtgcagaaccggcaaaacccaagcttgtacatgtaacagcgcagtggacggtacgtggacaccagaacgtacaagcgcaggtcgaacttcctcccgccaattagtaacgggttgttaatatagagagagatcacgtaggcttccttattagattgagacacaaacgaagatgtcttgctgtcccgggaccactttttgatctgtgagagcttgttgataaggaagatgccctttccctgggccttgccacaaggcttcatgatccaggtgctggacgggctcttccggaactcctctacaaacaggttgtagtcagcgggcagcatataggtgactggaacaaagtccagatagaggtattttccattttcatctttttctgccagaggactcccttctttctccagctccttcctgtatcttttgatgttcttcaccatcaggtccttccgggtcagttcatagtggtttggaaaatggttgactatttggtcatctgagagccgatatccagcttcaacgctgaacacatttcggatggtttgcacactcatccagtaaaaattccagtcctcgttttctgtcacttggacccatcctctcttttcaaagttattgatcagcactgacttctcgatatcagtgacccattttactttccctgccataatccataggcactgacagagcaccactggcaacgcccacgctcacctcggtctcgctgacgtcactgacgccggcccctccttcttccctgtgggctcagagcgccgagggactcggaggagcgccctgcagggatgcctcgagccgcgccctcgccccgcctccagcccctctccggcgctcgcaggaggacgcagccgactgccaggcgcaccggcccgccccgccccgcgctgcact

SEQ ID NO: 432310 - DNA, 857 bp, Homo Sapiens
  misc_feature (50)..(51): n is a, c, g, or t
  misc_feature (70)..(71): n is a, c, g, or t
tagaaaaagcttcttcggaggggccgaagggcggcccggaccaagggttnntgtggatgtgggggggttnngggggtttttaagtttggaaagtcaccgctttatttcattctcctgggaggttctggaggggttccttgggcagccggaccctgggtcctggggaaggagggcatggtgggggtgggcactagttgtaggggtggaaaggcaccacattggtgcccctgcatgtcgtggatgcagcgcacggactgtacctgagggtgacgggccccaaagtcgctgctgtccttgtagtctcccttctccagcaggtactgcagcccacggtagccagggtactagtagccaacccacatgccactccgcacccacacagatgacaccttctcctggtagccatgggcgtggaagctgggtacatcgtcatctatgatttccatcttcttcccggtgaagttggggttttcatagaggatgatcttgtgctcttggctgtccactttgatgggcctcaggctgctgagtctgtcctctggctgctggtccaccagtcccagtgggcgtactcgcccttctcaaacacaaactgctcgcccttgcagttggcctgttcatagctcacccagcgtgtagaaaaaaatgccccggagaagctgagctgcacgcagctcccgcctaagcagtcagggccatagacgtgagctgttttctccccaggacggggctccaagtggtccccaagccgccgcggtgccccctgaggcgggtcctgaaggaaccggccccgctttccttcttctcattctggtaacacccagcctcgtacctagcctatgttttgctgcccctaa

SEQ ID NO: 432311 - DNA, 526 bp, Homo Sapiens
  misc_feature (202)..(319): n is a, c, g, or t
atctatgatttccatcttcttcccggtgaagttggggttttcatagaggatgatcttgtgctcttggctgtccactttgatgggcctcaggctgctgagtctgtcctctggctgctggtccaccagtcccagtgggcgtactcgcccttctcaaacacaaactgctcgcccttgcagttggcctgttcatagctcacccagnnnnnnnnnnnnnnnnnnnnnnnnnnnnnnnnnnnnnnnnnnnnnnnnnnnnnnnnnnnnnnnnnnnnnnnnnnnnnnnnnnnnnnnnnnnnnnnnnnnnnnnnnnnnnnnnnnnnnnccgtgtagaaaaaaatgccccggagaagctgagctgcacgcagctcccgcctaagcagtcagggccatagacgtgagctgttttctccccaggacggggctccaagtggtccccaagccgccgcggtgccccctgaggcgggtcctgaaggaaccggccccgctttccttcttctcattctggactccacgccacgcacgccccgct

SEQ ID NO: 432312 - DNA, 997 bp, Homo Sapiens
gccggggacggggcaggggcggggcgcgagcgggagaccagagagccggagccggatcccgatcccgagtccgagccgccgccgccatgagctgccccgtgcccgcctgctgcgcgctgctgctagtcctggggctctgccgggcgcgtccccggaacgcactgctgctcctcgcggatgacggaggctttgagagtggcgcgtacaacaacagcgccatcgccaccccgcacctggacgccttggcccgccgcagcctcctctttcgcaatgccttcacctcggtcagcagctgctctcccagccgcgccagcctcctcactggcctgccccagcatcagaatgggatgtacgggctgcaccaggacgtgcaccacttcaactccttcgacaaggtgcggagcctgccgctgctgctcagccaagctggtgtgcgcacaggcatcatcgggaagaagcacgtggggccggagaccgtgtacccgtttgactttgcgtacacggaggagaatggctccgtcctccaggtggggcggaacatcactagaattaagctgctcgtccggaaattcctgcagactcaggatgaccggcctttcttcctctacgtcgccttccacgacccccaccgctgtgggcactcccagccccagtacggaaccttctgtgagaagtttggcaacggagagagcggcatgggtcgtatcccagactggaccccccaggcctacgacccactgggacgtgctggtgccttacttcgtccccaacacccccggcagcccgagccgacctggccgctcagtacaccaccgtcggccgcatggaccaagggagttggaactgggtgctccagggagctgcggtgacgccgggtgtccctgaacgacacactggttgatcttcacgtcccgaacacgggaatcccccttccccagcgggcagggaccaaccctgtaactgggccggggccactggcttgaaaccctttaattgg

SEQ ID NO: 432313 - DNA, 1561 bp, Homo Sapiens
  misc_feature (29)..(29): n is a, c, g, or t
  misc_feature (31)..(31): n is a, c, g, or t
  misc_feature (33)..(33): n is a, c, g, or t
  misc_feature (71)..(71): n is a, c, g, or t
  misc_feature (73)..(74): n is a, c, g, or t
  misc_feature (77)..(77): n is a, c, g, or t
  misc_feature (100)..(100): n is a, c, g, or t
  misc_feature (103)..(133): n is a, c, g, or t
  misc_feature (189)..(189): n is a, c, g, or t
  misc_feature (196)..(196): n is a, c, g, or t
  misc_feature (219)..(219): n is a, c, g, or t
  misc_feature (299)..(299): n is a, c, g, or t
  misc_feature (343)..(343): n is a, c, g, or t
  misc_feature (487)..(487): n is a, c, g, or t
  misc_feature (537)..(537): n is a, c, g, or t
  misc_feature (570)..(570): n is a, c, g, or t
  misc_feature (1377)..(1377): n is a, c, g, or t
ttttgtataagtcaactctggaaaaagcntntntcctccagccagtctcactgaatgcagccccacaagcnannccngcccccgccgccgcgcctctccnccnnnnnnnnnnnnnnnnnnnnnnnnnnnnnnnctttatatgtccaaaggtccgccccaacctaagggaagagaaaacagccctgagtntcctggnggcaattcccaagtcaatgtgcnccctctttacaaggaaataggggcagagagagcaagtcccagcctcaaagaaagagggattcacggatagtgaatatgcngccacatctttctaacgaggcctgcccacccttacaaaggaacnacatccttaacccacaggtagttttcagcgtggcagtggcccacactgtttcttgcggcagagggccctgggctcctcctggagactctcccaccagcggtagtgggccagggcacggttggcctctgccatcttgtgcaagtnatgcttcctcttgatcacggggccctggttatggaaagcctccagcagcntgtgtgaaagcctctccggcatcagtgtccgcnggtgctttttatcccggcactcagtgatcatccacttcatggctaggaaagcggcgacgccggtcgggtaggggtacagggacctggtagaaacggcctcccttgaggatgggtaccagcccaatcataggctcacagtttttcagtgcttgatggaagatggtgtaggggttgcgttcgatggttgcctgttcctctgcagaagcggcatggtacttctcaaactgcttccttttcacagcttccagagtctgaatcatgagggatctggccagtactttgtttcctcctatcatcatcatgttggtgaatttactgatgactgggtcttcaaacacagaacttgttttccctgctggagcagctttgatgagctgagtcttcttgagctcccgaacatatttctcctcctcagttagctcctccactggcttgcgataatattccttgtcaatcaagggatccttgaattcaggactatagcggctccatctcacctgagttagcctgggagggggggaaaggaggaggcaggcaaaagctgactccacaagcgagtaggtttgacttaacaataggcatgactgccaacgcgccgacgagggagagcggcgcggagaccgcgagctaaacctgagccacaacaattcaggcccttgtcccaagtaggaggacattccccaagcaggcgggtaaagtctcctcctggtcaagtgctaacggtaaggatgggcttggcgcctacacacccatcccaattcacaggcgatcccagatctgagctctttagctgaaccgcactttcantccgcgttagaaccctagatcagccagactccttaggcgagaggtagtcactaaacttcggattggcgcagggtcacgcagctaacttagaagcttgaatccagatactccggcccccagggcaatgctctctctaggggcccacgcggcctgcctgtggcccccttccttcctcgcagatccc

SEQ ID NO: 432314 - DNA, 2167 bp, Homo Sapiens
ggctggaccggtccggattcccgggatcgcccgtcagagctaccggggctggctagtcatgggggagcccagtagagaggagtataaaatccagtcctttgatgcagagacccagcagctgctgaagacagcactcaaagatccgggtgctgtggacttggagaaagtggccaatgtgattgtggaccattctctgcaggactgtgtgttcagcaaggaagcaggacgcatgtgctacgccatcattcaggcagagagtaaacaagcaggccagagtgtcttccgacgtggactcctcaaccggctgcagcaggagtaccaggctcgggagcagctgcgagcacgctccctgcagggctgggtctgctatgtcacctttatctgcaacatctttgactacctgagggtgaacaacatgcccatgatggccctggtgaaccctgtctatgactgcctcttccggctggcccagccagacagtttgagcaaggaggaggaggtgggtggccccagccctggcacaagcacagaaggctgcaggatggacagtccagctcagccgtgtgtcagcccactgctcacggaggtggactgtttggtgctgcagctgcaccgggttggggagcagctggagaaaatgaatgggcagcgcatggatgagctctttgtgctggatccgggatggcttcctgctcccaactggcctcagctccctggcccagctgctgctgctggagatcattgagttccgggcgggcggctggaagacaacgccagctgcccacaagtattactacagcgaagtctccgactaggccctccagatcaggggcttcctcaccagcaactggcctttcttctacccacctctaaagctggcagtggagtctctgcctcacccaaagacttttcccttccagactttgagtgtcttcccttctagactttcccatctcctggtgagatgtttcccacttatgccgtggtcctgccctgagcccctttccccaccacaacccaccacggccaggcagagaagggcaactcccaagagccactgcactgtgtaaccattagtgcaactactaccttggtgcctcagtttacccatctgtaaaatgggtaagcatagccactggtgggatattttgggatgtcaaggggtggaggcagagcacaagtcacaccagaaactgctttttatacattttgtataaggacaactctggaaacaagcctatttcctccagccagtttcactgaatgctgcaccacatgctacaccagttcagcgtgagaattttctaataaatcttttctgatactaaaactgcttcctttatatgtccaaaggtccgccccaacctaagggaagagaaaacagccctgagtttcctggaggaaattcccaagtcaatgtgctccctctttacaaggaaataggggcagagagagcaagttccagcctcaaagaaagaaggattaacggatagtgaatatgctgctacatctttcttacgaggcctgcccacccttacaaaggaactacatccttaacccacaggtagttttcagcgtggcagtagctcacactgtttcttgcggcagagggccctgggctcctcctggagactctaccaccagcggtagtgggccagggcacggttggcctctgccatcttgtgcaagtcatgcttcctcttgatcacggggccctggttatggaaagcctccagcagcttgtgtgacagcttctccggcatcagtgtccgctggtgctttttatcccggcactcagtgatcatccacttcatggctaggaagcggcgacgccggtcgggtaggggtacagggacctggtagaaacggcctcccttgaggatgggtaccagcccaatcataggctcacagtttttcagtgcttgatggaagatggtgtaggggttgcgttcgatggttgcctgttcctctgcagaagcggcatggtacttctcaaactgcttccttttcacagcttccagagtctgaatcatgagggatctggccagtactttgtttcctcctatcatcatcatgttggtgaatttaccgcacacccaggcctcgctaccttatgacctggtatgtttactgtcgtcttaaattaaatcgctggggggtggcagcg

SEQ ID NO: 432315 - DNA, 1039 bp, Homo Sapiens
ctaaggtagcgaggcctgggtggcgaattcggcacgaggccagcccagtcaagagctaccggggctggctagtcatgggggagcccagtagagaggagtataaaatccagtcctttgatgcagagacccagcagctgctgaagacagcactcaaagatccgggtgctgtggacttggagaaagtggccaatgtgattgtggaccattctctgcaggactgtgtgttcagcaaggaagcaggacgcatgtgctacgccatcattcaggcagagagtaaacaagcaggccagagtgtcttccgacgtggactcctcaaccggctgcagcaggagtaccaggctcgggagcagctgcgagcacgctccctgcagggctgggtctgctatgtcacctttatctgcaacatctttgactacctgagggtgaacaacatgcccatgatggccctggtgaaccctgtctatgactgcctcttccggctggcccagccagacagtttgagcaaggaggaggaggtggactgtttggtgctgcagctgcaccgggttggggagcagctggagaaaatgaatgggcagcgcatggatgagctctttgtgctgatccgggatggcttcctgctcccaactggcctcagctccctggcccagctgctgctgctggagatcattgagttccgggcggccggctggaagacaacgccagctgcccacaagtattactacagcgaagtctccgactaggcctccagatcagggcttcctcaccagcactggcctttcttctacccacctctaaagctggcagtggagtctctgcctcacccaaagacttttcccttccagactttgagtgtcttcccttctagactttcccatctcctggttgagatgtttcccacttatgccgtggtcctgccctgagccccttttcccccccacaaccaccacgggccaggcagagaaagggcaactcccaagaagccactgcactggggtaaccatttatggcaactactacccttgggggcctcagttac

SEQ ID NO: 432316 - DNA, 397 bp, Homo Sapiens
catataaatatgttttattgcagagaagttataattatttacatgctgcaacacgtcacaacataaatttaccaaatatttcatggtgggatgctgtaggtttcagataatagttttaggagaaccacagattaagtgaagacacttacagctttattgactctacgactctcggttgctaaatgctagaagtcaaaaggcagtgttttttcagtcctacctgtcataacttgcatgcagaaacctaggaagcaaatacaagagaactgtcgagtttcaaatccatattgccaccaaagtttacaatgggttgagttatacttcatgttgtaaagcatttaattcttgcataaaatatacaattctattaagattggtataaatctacttatttata

SEQ ID NO: 432317 - DNA, 1704 bp, Homo Sapiens
ggtccggaattcccgggatccgggaggggcgttccgggcgcggggggaacggccgagggctggagaccctaaaggcgcctcctacggccagaggggagcctccggcgggagccacctctccggggcgcatcatcctgccccccagtaagaggaaggctccagaatggagctcaggaattaggagtctcgagtgcgtagggccgggttactgccactcgggagccgatccgaccagcctgtcccagggagaagctggcacgggtctggggagttcaggctgctcccggcaggggcggcggacagggcgcctgcgtccccacccacgcaggccggccccatccgggggatgcagcggcgggtgttgagaccgaaggactcggcgaaagccagaaagagagggttggggagaggggctcggagacctgctggggacagagtcgcaccgcttggagttcccagcctggccctcacccggcatcttcctgggccagcaacgtcaggccggtttatttaagcaactgtaacgtccgcccgcacacaccctgccccagtctactcctgcctcctgctgggactggagggtgggcgctttcctgcttcagcttctcgctcttgtgtaatcccacaagcgagggatttctaaactgagcagcaggtgcctggctgatgcccagtccccaccagaagccaagcctggtgggccttcagccaaccaccgcacgccacggaccgcccaggagtccctgtcccgagcgcgccgtcagccccgtccagggcctgcaggacggaacccgccctgcgctccacacctgaggccgctcccttcgcctcttctcctcaggtgctgtccttattcccagcccagtcaagagctaccggggctggctagtcatgggggagcccagtagagaggagtataaaatccagtcctttgatgcagagacccagcagctgctgaagacagcactcaaagccccgtctcttgaatgcacagttgcctgctttgagacagaagatggagaatattccgtttgccagaggagctatagtaattgctctcgcctgatgccttcccgctgtaacacgcagtacagagatccgggtgctgtggacttggagaaagtggccaatgtgattgtggaccattctctgcaggactgtgtgttcagcaaggaagcaggacgcatgtgctacgccatcattcaggcagagagtaaacaagcaggccagagtgtcttccgacgtggactcctcaaccggctgcagcaggagtaccaggctcgggagcagctgcgagcacgctccctgcagggctgggtctgctatgtcacctttatctgcaacatctttgactacctgagggtgaacaacatgcccatgatggccctggtgaaccctgtctatgactgcctcttccggctggcccagccagacagtttgagcaaggaggaggaggtggactgtttgggtgctgcagctgcaccgggttggggagcagctggccgacacctgcatgggcagcgcatggactgcgctctttggtggtgatccgcggatggcttcctgctcccaactggcctcagctccctggcccagctgctgctgctggagatcattgagttccgggccggcgggtggaagaaaacgccagttggccaacagtatactaacaggaagtctccgataagcctccaaatcaaggga

SEQ ID NO: 432318 - DNA, 1378 bp, Homo Sapiens
gcgcggtccagccgccgattgtcgcgggggggaaaggctcggaccgcccacgggggtcccccccagtgggggccggagggaagatattcgggaagaaaacgtgtttcgggaggcaaaaggactacggccgtgtgagattcgcaagggggtccccccccgccctagggggaggagaaaacagcccgggattttcctgggggaaattcccaaagtcaatgtgctccctcttttacaaggaaataggggcagagagagcaagtcccagcctcaaagaaagaaggattaccggatagtgaatatgctgctacatctttcttacgaggcctgcccacccttacaaaggaactacatccttaacccacaggtagttttcagcgtggcagtagctcacactgtttcttgcggcagagggccctgggctcctcctggagactctaccaccagcggtagtgggccagggcacggttggcctctgccatcttgtgcaagtcatgcttcctcttgatcacggggccctggttatggaaagcctccagcagcttgtgtgacagcttctccggcatcagtgtccgctggtgctttttatcccggcactcagtgatcatccacttcatggctaggaagcggcgacgccggtcgggtaggggtacagggacctggtagaaacggcctcccttgaggatgggtaccagcccaatcataggctcacagtttttcagtgcttgatggaagatggtgtaggggttgcgttcgatggttgcctgttcctctgcagaagcggcatggtacttctcaaactgcttccttttcacagcttccagagtctgaatcatgagggatctggccagtactttgtttcctcctatcatcatcatgttggtgaatttactgatgactgggtcttcaaacacagaacttgttttccctgctggagcagctttgatgagctgagtcttcttgagctcccgaacatatttctcctcctcagttagctcctccactggcttgcgataatattccttgtcaatcaagggatccttgaattcaggactatagcggctccatctcacctgagttagccctggaagctgcaagacagcccgccgcacgcccaacgccaggcccgaccatcctcgggcaaccttcactgcgggggcaaccatcttggctggccacgaggaccccacaaggactgccctcggcgcgcctgagcgagtgacgggaaacgggtgaaaaagactcctcagggtcctaaatctgcgtttctctccactgatctggacgttagagtttttcactccggggtccaaagggaagcgccaaaaggaaacccttgccctccctgtatccgtcgcagtctggcgcggccctcggtcga

SEQ ID NO: 432319 - DNA, 820 bp, Homo Sapiens
acagttagttttcagcgtgccattaggctcacacggtttctgcgcagagggcctggctccttcctgagactctaccaccagctgtagtggccagggcacggttgccctctgccatcttgtgcaagtcatgcttcctcttgatcacggggccctggttatggaaagcctccagcagcttgtgtgacagcttctccggcatcaagtgtccgctggtgcttgtttatcccggcactcagtgatcatccacttcatggctaggaagcggcgacgcacggtcgggtaggggtacagggaacctggtagaaacggcctcccttgaggatgggtaccagcccgatcataggctcacagctttttcagtgcttgatggaagatggtgtaggggttgcgttcgatggttgcctgttcctctgcagaagcggcatggtacttctcaaactgcttccttttcacagcttccagagtctgaatcatgagggatctggccagtactttgtttcctcctatcatcatcatgttggtgaatttactgatgactgggtcttcaaacacagaacttgttttccctgctggagcagcgtttgatgagctgagtcttcattgagctcccgaacatatttctcctcctcagttagctcctccactggcttgcgataatattccttgtcaatcaagggatccttgaattcaggactatagcggctccatctcacctgagttagcctggaagctgcaagacagcccgccgcacgcccaacgccaggcccgaccatcctcgggcaaccttcactgcggcctcgtgccgattcaccacccggga

SEQ ID NO: 432320 - DNA, 966 bp, Homo Sapiens
  misc_feature (147)..(148): n is a, c, g, or t
  misc_feature (155)..(155): n is a, c, g, or t
  misc_feature (164)..(166): n is a, c, g, or t
  misc_feature (169)..(169): n is a, c, g, or t
  misc_feature (860)..(896): n is a, c, g, or t
ttggggagaattccaagccctagttcatggcccgggttttcctagggaaccagctaggcccatgttcccctttcctactggggcccggccgccaaaaggaatgggtctagaaagttctcgaagggccgagggcggcccaacatgttnnttttttntttcttttnnnttntttggtcggggcgtgtctatttattgttgctgccaccctggaggagccccagtttcttctgtagctttcttttctgggggatcttcctggctctgcccctccattcccagcctctcactccccatcttgcacttttgctagggttggaggcgctttcctggtagcccctcagagactcagtcagcgggaataagtcctaggggtggggggtgtggcaagccggcctggatcctgtcctgggtcctccttcctccgcagtcccgtctctattgctgggtgtagtgtccatggtctggcctcatctccagctctgtctcagcgccgtgcccctcgcttcttcctctctgaattctgcagcttggtcaccagtttcctctcgtgcccgccagggctggggcggttggtgttggcagcagcttctctcttggtgcgacctttccggcctccacctccgaggtaggaatgggccaggctatagaggtcagattcatccaggctggagtcctcgtcctccgggcctggggctgctggggggcgctggttgctggtgggaaggtggccatcgtgcctggcttgtcttccctgcctctcttcttctcctaacgctttgtctgtctctgctttcctggccccgggcctctccacaccccccgctctcgacgaattcgagctcggccgatttggcctgatnnnnnnnnnnnnnnnnnnnnnnnnnnnnnnnnnnnnncgccgccaccgcgttaactccagtcgccctatagtgagtgtatcatcggggggtggtggtggtggggtga

SEQ ID NO: 432321 - DNA, 545 bp, Homo Sapiens
  misc_feature (526)..(526): n is a, c, g, or t
atgtaggttctccaaaatacgggatttctgttagttcattgtaattcattttcacttcctgtaatgtttgtgattccaagctgatgttccagttagacaaccgattatgactgaaatccaggatagcggtgtcggggggcagcaagcccgacagcgccctccagctcggtgcgggcaatttcctgcgactgcagtccaggagaggaatgcggcaggagcagggcgcggggcagagacctgctccggcggcgggcaacaggaggagagcggtctgggcaatgaagagtaaccgagaaagcactctagatcgacaccccagcaactgctcctccgggacgcctaggggcgccggcgccattttccccctcgacctggacgtggcctagaagagctgcctgctagaaaaggaggatcggcggagaagctcagcagagatgctcggtggctgcactgtctcccgaagccccggctgaaggctgtaccatctaaaggcatgctaggagcagacgcagcgcgacagcggggncgacggcctgggacacacg

SEQ ID NO: 432322 - DNA, 948 bp, Homo Sapiens
  misc_feature (369)..(369): n is a, c, g, or t
ccggaagttgactgggcttggaatccggatccccgactatgaacctggcaggcaaagcctgaaaggttgaaaatgcccacgtggataacaggtgagctgcacttcctgcccattttgtcaaacaagattgtaggaggaaatcccccctttaactggttctggccttcctccagagacaggggttagtgcccggtgtggaccggagggaggttcagcgcctttcgcaggcggaacccagcagttggaggaagagaacaatctcttgcggctgaaagtggacatcttattagacatggtgaggcaggtgatggggaagagaggcctagcttctccttttggggaggctccacctcgagtcacttaatccancagatatctcctcaatgccagtttggccaggtacgttgctttgcatccaaagccacacgcaagaaacaagacacagttcctgccctcacagtgtagaggcaggtggaccgaccgtaagcataattacataaggacccagttggagtctgcacaggatctgcacagcacacgagggagaagttatttctgtcaagtcgggagagcttcccagaggaagggatatctgagctgaatgtggaaggataatggcaggaatggaggttagatgaaggcattccaggaagaggggtagagccggctcatggcttggaagtgtctcataccaagtaggcattaatcagtgcccagtacagaccacgctgaggggctcacactgcattagtgttggtttcttgtggctgttaaaaatccagcaacccactgggcctagaggagccctatacccgctgaacagaatgagctgcggtggcgccccagaacctctcacaggcctctcagctgctgctaatgcccgccgaagccccgacgccccccattctgtcgtctttcttcgcagcatagtagtagtagcggccctat

SEQ ID NO: 432323 - DNA, 1113 bp, Homo Sapiens
  misc_feature (564)..(564): n is a, c, g, or t
gattatttaacatcgtttaataaaaaagtagtagtgcaaacaggaaagtagcataaaaatatagtgttgttgtggaaggctggtgcttgctgctgagaagctgaagccagaggaggccaggtgtgaggaaggaggattctttaaaggcaagaagagagaggcctgcctttaagagccaagagagccgctcatccatgaccccaacacagagctctgtagaactgctgtcacacgccaaacaccaacataagggggtgagagaatgaactccagccgcttctcccaacacaacccaacagagctattctgggacatgtgtgtttgcgagcttgtgtgtggagagcaccaaaaagctcatcagcagccccaggcctctgtgcggtctggttttcagactggcacccgcaggcagtgcatctgaagcaccttctagttactatccccatctggaatcttggttttctccattccatgtcaccttctattgccaacccaagggtgccagtgcctgtgggtctcattatatgatactctcttccaggactgaatccgctagtctggccnaaaacaaagcactcagccacatcctactccccaataaatgtctctggggtcttcattttctcttccggctgatcctcagttcatccagttccttctccattaagtgggattcggcagtggactctgaaagcatgtctaataagatgtccactttcagccgcaagagattgttctcttcctccaactgctggttccgcctgcgaaggcgctgaacctccctccggtccacaccgccactaacccctgtctctgctatccactggccattttcaaacttcaggctttgccctgccaggttcatagtcggggatccgtattccaagcccagctccacctcccgggttgatcgatccaaagaatgcaggttggagagagatgccgacttccgaggaggtgtcttcttcggactgaacgtattcccaaagaaaggcatctttggcctgatgaaagcaaagccagtgctcccttctcctgacgcgtcccagaagccggggtccaagcgctccccgaacccccagcaaggactctgtagcccagagttaccttgac

SEQ ID NO: 432324 - DNA, 683 bp, Homo Sapiens
ggaatctggttttctcattccatgtcactttctatgccaaccaaggttgcaattgcctgtgggtctcattatatgatactctcttccaggactgaatccgctagtctggccaaaaaaaagcactcagccacatcctactccccaataaatgtctctggggtcttcattttctcttccggctgatcctcagttcatccagttccttctccattaagtgggattcagcagtggactctgaaagcatgtctaataagatgtccactttcagccgcaagagattgttctcttcctccaactgctggttccgcctgcgaaggcgctgaaccttcctccggtccacaccgccactaacccctgtctctgctatccactggccattttcaaacttcaggctttgccctgccaggttcatagtcggggatccgtattccaagcccagctccacctcccgggttgatcgatccaaagaatgcaggttggagagagatgccgacttccgaggaggtgtcttcttcggactgaacgtattcccaaagaaaggcatctttggcctgatgaaagcaaagccagtgctcccttctcctgacgcgtcccagaagccggggtccaagcgctccccgaacccccagcaaggactctgtagcccagagttaccttgacccacccgcctcctgccgcctccc

SEQ ID NO: 432325 - DNA, 697 bp, Homo Sapiens
aataatttgagaaaaaaggttacttgttattcagcttttcataatatctatgctgagtattttcacgtatcttccaagtactcagctttttcgtatttcaaataaggtcagaccttttatacttttgaccaaatagttattttctatgttggacacttagttatttaccaaggcctccgatttgtgatgcagtgtttgtagtccttgtaaacaatatatacagactatacaagaattaattttattgggctttcaaaaaccatatttgcattccagaaccaaatcttaaatgagaccaaagtccaggttagcacaggtttttatttttcctacagctacattgagatatagttcacataaatgacttggagttttatgttcatgaaaaaattagggattatgttaagagtactattttttccattttagttaagtagtactacactcattgtttaaatgtaacttgctgtgtctgaggtataaatatagtctgtgggagtgagaggcaaaccagtcctacccaatttgatttgaatattttaaattatggaactgctaaatagatatttctataaatagataactttcttatttatgtagcttcttttggaagtaactttataaatcttcataattcagaagactactatatgtgagaggcgtgatatctggatggaagtcggcccggatgatctcc

SEQ ID NO: 432326 - DNA, 946 bp, Homo Sapiens
  misc_feature (209)..(230): n is a, c, g, or t
gtttccccgtttctttcgccaaaatctttatccacctttccgaatttttaaatgtactcatcattcggataagtattacacaaatcggtgtttttctgtcctgctgtattctaaaaaagtcttggatgcactttcttttgcttggagaacctttgttattaaatgtctgcgaaacttcttaaatttcatcaaccacatcttctgcctcnnnnnnnnnnnnnnnnnnnnnnggcttcgagtgctttcaaagtacgatttgatgcaggtttaggaatctgtataatagctgcttggattttggccattatttcattttgtcgtcttctgtttaagtattgcttttcgatatcaaacatctttgctcttccttgagtttttgaaatctttcaagtttctcaaaatgcaaatgggcaagatcttctttcacgtgtttatatttttcttgaaacctgtatgtaatccgcatcagattgaaatcagtttgacgtggtatcatgtgtctaagtctctcttgaaaagtatcacttttcatgttttgaagtcttaaatttgtcagacgttgcatggtttgcatctccactccagtcagtccacttttcttctttttctgaagagcaatgtacaattgatataacagctttgttgccaccccaggcttttctgtgatgatgccatgggccacattctgatcaactgcacacccagaaggtgaagtgttggctccaagcgagaaaaattattaagtttggcacttgaaaccctgctgtccaaaattctgaaaaatcatcctgaagttcaaacttgtgtagaacttctccaagtagatagccactggaaaatgcctttgcaaatgacttgggactcacggtccgggacaccttcaactccttgttgagccactggcacaggatctccgacatggttcagccggtgcctcagaccgcag

SEQ ID NO: 432327 - DNA, 1070 bp, Homo Sapiens
caggatgcagatgaagtgaagaagctctggagctgcagatggagagtcaccgggaggcccatcaccggcagctggcccggctccgggacgagatcaacgagaagcagaagaccattgatgagctcaaagacctaaatcagaagctccagttagagctagagaagcttcaggctgactacgagaagctgaagagcgaagaacacgagaagagcaccaagctgcaggagctgacatttctgtacgagcgacatgagcagtccaagcaggacctcaagggtctggaggagacagttgcccgggaactccagaccctccacaaccttcgcaagctgttcgttcaagacgtcacgactcgagtcaagaaaagtgcagaaatggagcccgaagacagtggggggattcactcccaaaagcagaagatttcctttcttgagaacaacctggaacagcttacaaaggttcacaaacagctggtacgtgacaatgcagatctgcgttgtgagcttcctaaattggaaaaacgacttagggctacggctgagagagttaaggccctggagggtgcactgaaggaggccaaggagggcgccatgaaggacaagcgccggtaccagcaggaggtggaccgcatcaaggaggccgttcgctacaagagctcgggcaaacggggccattctgcccagattgccaaacccgtccggcctggccactacccagcatcctcacccaccaacccctatggcacccggagccctgagtgcatcagttacaccaacagcctcttccagaactaccagaatctctacctgcaggccacacccagctccacctcagatatgtactttgcaaactcctgtaccagcagtgggagccacatcttctggcggccccttggcttcctaccagaaggccaacatggacaatggaaatgccacagatatcaatgacaataggagtgacctgccgtgtggctatgaggctgaggaccaggccaagcttttccctctccaccaagagacagcagccagctaatctcccacacccacggctgcatacctgcactttcagtt

SEQ ID NO: 432328 - DNA, 877 bp, Homo Sapiens
cgggcagtacggatgtgtgtgtatgaagggtcacaaccctctagctcccatttttccttttgtcatctctgtgacctctactcagtgactaacaccactcagtgtgagacgagtagatgagaaagaagaaacattcaccctcctccctattgccccaaataaggaaggtagactatgctttgaaattgctaaatacatcagtagatacttgagaataagacagaagagagacatagcagcagcttttgatatatagatacagagtacaaagagatacagagtaagtaagagaagacatcaaacatagtacagtccaacaacaggggttggggagggagttagtatcagagaccacaggtttgcagcatgctgagaagaggcctcagtccctcttagaaactgaaagtgcaggtatgcagccgtgggtgtgggagattagctggctgctgtctcttggtggagagggaaaagcttggcctggtcctcagcctcatagccacacggcaggtcactcctattgtcattgatatctgtggcatttccattgtccatgttggccttctggtaggaagccaaggggccgccagaagatgtggctccactgctggtacaggagtttgcaaagtacatatctgaggtggagctgggtgtggcctgcaggtagagattctggtagttctggaagaggctgttggtgtaactgatgcactcagggctccgggtgccataggggttggtgggtgaggatgctgggtagtggccaggccggacgggtttggcaatctgggcagaatggccccgtttgcccgagctcttgtagcgaacgcctccttgatgcggtccacatccgtactgacccggtaccgagctgactacc

SEQ ID NO: 432329 - DNA, 1424 bp, Homo Sapiens
  misc_feature (144)..(199): n is a, c, g, or t
  misc_feature (1010)..(1010): n is a, c, g, or t
  misc_feature (1381)..(1381): n is a, c, g, or t
tattcattctgaatttttcaccttggtaataatctttaaaacaaacagatcaggttatcactgttacactcatgccgattcgtcaaaatatccattctaaattgttgcctcttagaaagtttttctataagaaggcatttgttnnnnnnnnnnnnnnnnnnnnnnnnnnnnnnnnnnnnnnnnnnnnnnnnnnnnnnnnttgatatttttgtggcttgcattctaataaagtgccagcctctacctaacaatataagcactgaaaatggcaaaaatgatgtgctatagtctcaatgccagtgctaaatgccactgttttttataaaagcaatacagaaataattttagtacatgacaaaataaaatgtaatagagttaaaaaataaagttatattttcacttgattacaaagtactgaatgataaaggcaatcaaaatggaaaagaaagcaaacagcacaaggatgacggcagcacactgctcgtcactcagtgcccgtcgggtccttgtgctttccacagtgtctctgttggtgctggctggtggttcagtcctctgagagatgaagagcactgtggtgctgtagggacctacgaggtcctggtgtcccagagagtcttggcactggcgaatggcacatacacggaagcgatattcacagttcagctgaaggctggaataccggaaggaagagtcgggacccttgtaaatctgtttgaattctgaatcttttcccaacataacttgaagactgtaaataactggatcacctttcattggctgtaaacactcccatgtaatttcacaaatgtgatcatttactttctctattttgggggctttcaaggcagctgggacagattttggagtagtgaaaatatattcttgggagaggggaccttccccagcttcattacaagcttgaatacagaatttataggatgttgactcattaagtctttgtactttgtatgtatgacatggtcctctgtatagggatacaaacctanaatgaaagtaactattagataaaccttatactaccttatgataccttattaaagtgttttacaaactagtataaaaacacagttatgaacattatttaggagtgataagttaccccaaaagtttgatgccaggaactctatgtcacttaaaataaatctgtttttcatcagattaagaaaaataggatatttggtaaatttcccaatttgacatgatttaccaaaagtctgttactaaatttcatgtccgaccataactgtttcttctcaggcttccggtttagctttgtttctgaatactgttttgttaatgtacattttaaaagatgctcagaacatcacaattttcattacgaattatttctaactanagtcatattgctcgtgccgaattcctgcagcccggggatcgca

SEQ ID NO: 432330 - DNA, 750 bp, Homo Sapiens
  misc_feature (608)..(644): n is a, c, g, or t
aaagagacaggcaggcattatgcacaagggaccaggtttctagtgacatctactcagtgatgtttcccctgatatccctgttactgtgcagagttgaccatagttgtaatagctgttatttgtagaactcgatatagagttgcatggcttgggcacactacttatgctgctaaggctcagtttcctcacagacagagccaggataataatagtacttgtctcatttagttctttgagaggttaaatgacataattcatgaaaagtgctttatttactcagtgctcattgcttagtaaatagcttgtaaatattacttattgttattattgagcataacaactttaaccacagtaaactgtgacaattggcaaatggaaacaacctcatgtcctccaatagggattggtcaaattcattatggtaactttagatgatagaaggattatgcagccattacataatctgttacagaggaataaatatcgacctctgaatatgctctagatctgctaagctaaaaagtaggctacaaacggtttgcttattgaatagactagaaaatcatatatgaaattgttactggtggttgcctttggaatgcaggagnnnnnnnnnnnnnnnnnnnnnnnnnnnnnnnnnnnnntgctttcttcactgttttccatagagtgttatttcatagagcatattagagtgggtgatgttatatgcaagaaatgtatggcccttgtcactcagtgcaccacgct

SEQ ID NO: 432331 - DNA, 795 bp, Homo Sapiens
  misc_feature (19)..(19): n is a, c, g, or t
ccataaccagggccataangtaggataataaagtagggttttatataattctttaaaatttttacttatataatactttctagtttttccacccatccagctgaaagtttttgaaacaaatatttgaaaacccaggtatccacacatagcacttttattcctgactagttttgcacacttgaaaattgtttacttattttacaactgttttactgatgctatctttattgtttttgccgtattctgacatgtcaaatctatgccttgaattatatcatctcttttcctgtgggtttcatttgttaaattcattggattttaataatataaaagtatagctaattgttcagttttaactatttttaattatcttcttaacaaataagaagttgctttaaacattaaccaattttctatatttagctatacagagtaattgaacttaacatgtttttgtcaacaccaattacattttcagcttttaaaaatggtagcttttgtgaaatagaatcagtgaccagtatagcacttagatcccttctaactcatataatttttctcagccaatccattcacaagcttggcattgacatgtgctgctagtttataaactggcattgacgaaaatcatttgaatctcttctggctgagataatttgccaatgcaaaatacagttgtcattaatcctgcacattagaaattattagaaacatattactttttaactttaaatctcaaagagattttgagttattgaattcttaaggctttcttagcttgaactgatactatgg

SEQ ID NO: 432332 - DNA, 917 bp, Homo Sapiens
  misc_feature (20)..(20): n is a, c, g, or t
  misc_feature (28)..(28): n is a, c, g, or t
  misc_feature (71)..(71): n is a, c, g, or t
  misc_feature (121)..(121): n is a, c, g, or t
  misc_feature (130)..(130): n is a, c, g, or t
ccagaaaacgggtccagttnccccactncccttggccaggaagggacctccctcctaaggcctaagcaccngtttcccggctagaaatacacaaagaacactccccctgggaatttaaaanttatttatnttttgttagaaggtgggattacatgaagaataagatgaagtcttacctcacctctgcaaaatgaagactgcctatagtaattggcagagaacatgaaaatggccaaggaggtaaagagatttttttgtcctttagcctaagaagtcagcttcctcgagcctccacaacctgggatgggggaggggcaggtgaattggagtctccgaattacttatacatattggttcctaaatgttcgtaattatgcttcctaaactgtttttgttcctacggcaagagaaccaagagtggaaagacagatatgaatcagttcacaaataagattggttatcagaccaataagatcagttctgatcaactggtcctggctggttggagtgttgcaaagatctgtgaggctgcatccacattctcagcaagagtatacagtgatgcattggttgtatctgctcagcttgcagggagcgcagagcacatgctacatatatgtcatcacaggcctcacctgaattgaacaatagctagtagtacccaagaagcagaaagctgctgcagaaggaagaaaacataatcttgttatagtgcaggaacatcctacaggaaatgaggattagaaagcactacttccagatcctgtattagaaacacaaaattgctcatttgctcgactggatgggggtagaaaggaaggaataaaaaataaaaggtgaaagtggaaagaaggtgtcaaacaacccacaccaggacttcttccttggatgtatgaaaaaccaggaagcatggttct

SEQ ID NO: 432333 - DNA, 701 bp, Homo Sapiens
tgttggtgctgagcctttgttaaaccagggagaaggggagcagaaaggaaacgttgttactgatgagtaccacagactcatcttaaaaaaaactctcattatggtgatcatagaattgaccatccaaactgggacactcttgagagtaaatggagggcattattaataattatcttgtaatgaacttaaatctggactgttccaggcaaaccagacttatcttgcaatatgagaatgctgacacaatgcaggaaagccagtttcccttttgttgatctacttgaccaagcaaaggggctgaaaaactgaataaggaaacaactttataagagaaacagtggtcttcaatcttttaaagacatgaaatcctatatggcattctgtctcagtgagtcagttaacaaatacgtatgtgcaacccttctgctagtagtgcacataagtgattatccctgccaggtatcgagttggaatatccagttatttcatgtcacacatcggcacgtatgatggtggtttggtcagatggataatacagcagacacacttagaacactcactgcactggtggctgttcattttgaggaactccaaagtcaattcaaggaaataaggaatgacctggaacaggccttagaaacaattgatttattccaatagttaccactggctggctcccactctaggtgataggcatctta

SEQ ID NO: 432334 - DNA, 1461 bp, Homo Sapiens
  misc_feature (1305)..(1322): n is a, c, g, or t
ggcgaactgtaggaaccagaatgggagaaacgtttcttgcagtttgggcactcgtaaggtttttcaccactgtgaattcgcaggtgttctttcagatggtgttaatatttgaaggccttgccacactctgtgcatttgaacttgcgattacctgctccttgggttagcatttggtgctgatctgtccctggcttgtgtgtcaccatatgccgctcgagctgggtgcggtaggcaaacgtgtagctacagagagggcaggaaaagttctcttcattcttctcgtggcggtacttgatgtgctccttcagtgatgtcaagcgcttgtagccccggtcgcagtaggggcaggtcagcagttgggcaaaagcatctggagttccaggtggcaggtcattttcttcttgcccattggcctctggcgtgccaaggcgagacagctcctcaggggcttctgggtaaataatggctgtgtcactgcgctgaaggtactcctcgatgctgactgcatgaccatcgcgttcctccagttttcttttggcaaagtattcctcaaaatctgatgtgcaatttgcatttttcactgtaccattgttaattgcgttctggatcgtggcttctggccccatagtgtcatagtcttccttcatttcttctggaccatctacagaggcttgtagaatctcgttgttgtgccaggggtgttccactccaccttcccttatttcatcttcttcttcctttcttggcaacagagcttggctcacgtgtggggaggactcatggttgggcacactagctggactcgtctcctggtccagagggttggcaataccgtcatcctcagcaatatgaagcttgtcttcctcatctgtttcagaacctgtgtccactacattgtcatagttcaccacgtttttcctcctgggattggcttgtttgcgcctcttgcaccgggggccatccgccatgatcggctgcttcattgataagagcggatcagatggcagttcgcatggactcggcgccctgcttcggcagcacgcaggctcgatctgcgaagtcttgtttgtagttttggccagaaatggtgagaagaaaaagcatgaagaagccgcgaagtgtgggggagaaaaaggtggaagcgaagaaacagctcccggagcaaactgtacaaaaacctcgccaagagtgtcgggaggcaggaccgttattcctgcagagcaggttagaactgatctctttcggccactccaggaaacacaaacctggggacggactgacgtgttacgcctcttctaatgacannnnnnnnnnnnnnnnnnctgtaggagagagacgagagaccctgaaacacgcgccacctatctttgtggggagggataattgaagcgccctgagcgtgagcatcatgtgaaaacgtgatcgccaagtttctctctgggaaaggatctgggatagatt

SEQ ID NO: 432335 - DNA, 1033 bp, Homo Sapiens
cagttcaactttgctgagacagtgacttttgcaaccatactaacacctactgacttgcagagaacgctgagaaagacagtgtgctttgcaatggttaagtccacagctcctgagattgcctcgcaagtcatcttgggcatgaagcagagcggtgcatcagaaaaacatgacgattctgctgagaggtggctttaggaacaaaatagatggctctcctcccttaaagtcttttctccccaccctcaacatttcacgagaacatcagttcataaatactaccatctgtttctatcaccaccctcctggagaaagaaagttaaggttttacaaccacatgtgctcaagagtaaatatcatcaggaaagctctgtactaacaggcaggttattaagactcccaagaaatcctcataagcttttcaatctgaggaaaatcctgagaaggtaattagtaagcaccacctagcgatgtggtgctggttttgttagttgtcagtttttccccttctttgttttctcacccctcttaacttccactgagaaattaaagtggaaataagttcaaagaatcctaagcctgatagagctaggtgtctcttcattttatatttcatatggatgaagctattctagttgataatttggtataattaaaataactgaaaaggtaggtataaggaaaatttctcagcctttaaaaatccattacattttgataaataaaacttgcatattcattctgtagtttgtataataaaaaatgtactgcattttccaattttttttaacatatagcttggttaagaatcatgcatatccttgtctctccgaaggataaactgagctggcccttgggcaactacttaagaatttagtgttggaactgatagcagcaaatgtcagcttttcaaagatcccaccctaatccagttctaaggttaggtcaggaaggaaaaaataattccatctttcaaatacacatgaaacaaagtcttttccaaccaacggttgagtcataaacacagtctgtgccc

SEQ ID NO: 432336 - DNA, 653 bp, Homo Sapiens
ggaacatcttttcatgtttcttggccatttgcatttcctattatgaattgcttttgcccattttcctttttttaattatgaaagtctaatgactaccttctcattgtataaaaaacacagttctttgaatagagagacccttttctccaatgctaccaatcacattccacttaccacagtttaacatacatcctctagtcacctttccgtacgaatatacatacacataaaaacactttttacataaataggatctcatattctgtagctttttaaaattttggtctcaaaaaaagataacaggtctttaaatttctttaatggttgaatatgattaaatactatgaaaatgccattatttattcccttaattttttttcctctcgctattacattgccaaagtaaacatcctattcagatgtctttgtgcatgtgtgtgaatatttctttagtctggagtccagtaaggtggatttttggatcaaagggtttgttctctgtccaccttcagtcttcccaaaggccttcataactgtattttcaccaagtgtatggagaatgttcatttccccatataaccatacctacacttgatagtttttatctgttgggcgaaaaagaaccttttcttattttgcatttccctgattat

SEQ ID NO: 432337 - DNA, 516 bp, Homo Sapiens
ttccacaggtaaatggatcattgatttttttttaatcaacgtgaatgaagaatgtttgtttatatatcactataaaatccagttgacctggacagtattatatgtacatatctattctaattaaatttaacaatcaaaggattggattacttttttcccccttgtaaagaggttcgagaatgtggtcaattgtatagatagcgtgttaaagccaaaacccagctctgagggccttacccattacttggatatttgctacgatccatctccctttgtgagtcaaatgttaagagaagaaacttgtatttgcagctagaggttactgtcacatcatagatttaacatttaccatcttcaaagtacaaatcttacatgtccttcaaaaggaggtcttaatacagttcctagttccttacttctgttttaaactttgggtaccaaaccaaaaagaagaaaaaagaaaggaaaagatcttctttgaagaaaagtatgtctctggatccctggaaacatatg

SEQ ID NO: 432338 - DNA, 2945 bp, Homo Sapiens
tacccatggaaacaccacctttctctgtggccctcattgtcagagggcagagttcccgagggatgtgtcctctgggactgtgtggtccttaaagtaaaggtatccctaaaatggtcagaacatgcaatttcctttcaaaggcagttcagtgcattggctcaaggagggtgcaagcccaggatgaagtggagtcctggggagggccgcactcctgaagccaccaagcagagcgaggagctccggggggtcttctctgtcttccatcctgcgtctcagttctcccggacccttgtcctacttcacaagacagaggcattcctttccaaaccttccatttgaatgtcgctctaacatgagccgcccacgagatggactggagagaaccttgtgtgaagacccggacgggttcctgacaccactgcacggcacctgccatgggtgacctgtgcatccgctcagagcctcagcttcttctcgtggacagaggggatcctaagggttcccgcttatccccagcatccagcccagagcctggcacgcttcgagaagttggtgtttatggaggaaatgaatgaacacccacctcacagtcaggaggaagattccaaaaaatcgtgcatgggagtcagtgtccgctccgggaaggtgcccagtgaatgctgaagggtgaggcggcagggagggctgcagggggtaagtcaactgcctctagggctgagcaccacgcctggtacacagcagaggctcagcaaatggcaggtgaatcagatgaggacacaggcacacagaagacaaaccccactccgctcctctcgggaaaccgcaccagacctgggacctgggatgtttcaagacattcagaagacctaggagaggagcttgcatctgcaaattctcagcatgaattcaccatccaaaaaacaacggtgaggtcatcagctctgagacagggcgaattgccccatttataaccaaaagaacccctggctggctcgtttgagactcatcatctgtccctggagccctgatctgggaccagtgaggcatgggggagaagcagctcccatcagctccggtccctgcaacaggacacactggagtgaaaaattaacccggacgcataaaaagtcctattgatgtggtcaagaccgcagaccgagacaggaagggacgtgaatgaaagaaccctgaactgtaagactccacagtcatgtccattttatgagtgtcgcgacggtgaacgctgtcctctgcctcttgttatctatctctcttaaacagacaattactgccaaacacaattctggcctaggaaagctggggcagggagggggcccaaacttcctgtgtccacacactgccacctctgcagctgtcctcatcagtgctgtgactttcttcccctccttgcattgcggtcgtgaaggtcatgtcggggatgacttgcatgaggctgggtggcaggggccgggatctgcacatacctagtgcatgtcagagtttaccttgtcctggaagatgtacaggttgttggtggcggcaatggcaatgatgttctcagccgggtgccaggccgtgtgcaggatcttcttggtgaagtccaagctgtccacactgatgtcatcacgccggcgcttgccccccacgcacacgcgccgtggcttgagcacagcccggggcttgctgctttccctcgaggcctccagggtcacgtcccgcttggtgttccgatcgaacatgcggaagaagttgttgtaggccccggtcatgatgacgctgtcgctcccgttccaggcacattcaaacttgtcgaaaatgcagtcgttctcgtacagggaacagagcttgctccgaaggtagtcatggacctggtaggtctctatgggtcttgcctccatgttcaggtcccagaccttgactgtaaggtagtcccgggtgagcatgtagcggccgctgtggctgaacttcacgtcggacacggaggagatgatttccgagaagaatgagcggttactggggtcctcaggctcttcaaagagcttggaatgcttgtcacacagggcagctgcccgcatgtcgcagagccgcagggagcccttgctgctgctgtagacgaagaggttgcagtggtgcggatggaactcagatgctgtgatcacctccgtaaggtcctccatgttggccggcttgatgtccacgatgttgaagctcctgtcggtgatggccaggtgccagaggttgatgcgcaggtcatccgccgacatgtaggtctcgcagtcactgttgacggagatggagttgatgtggtaggtgtggccattggcaaagatcctccgagggctcacctccaccatcagatccatgggcttcagcactggcacctgcagtgacgtcaccgtggacaggtccttaagtttcccctcttcatccttcaggttgtatccttcgggccttttatctcgttcggtaatcttccataatttgatagttttatcgttggtggacaggagtgagtgggcggcgttctgctgtgggagccacttgatcttgttgatcttctcctctatctccaggctcttgagatagtcaaactccggctcgtggctctggaaagtgctgtacacgtcgtattcgccctggctgtggggcgcatttttactctctggttcccgctggaagatgacgacccggccgcccttgtcacctgtggccagcagctctcccgtgtggttgaactcaacggtagagatgatgtcagcttcagtcacatagctgtggtcccgcaggaagctgtggttaattttccgcgtgtccgtgtcctcgcccattgaaggccgtgcccggtgctctgggcatgccccgccgccacacaccgatgcaatccgcagaggtcgcgccgggcgcgcgggccatgccgccgcagcctagcaggggcgcgggccgcc

SEQ ID NO: 432339 - DNA, 543 bp, Homo Sapiens
  misc_feature (516)..(516): n is a, c, g, or t
cgtggggcttaaccctccgggagccattaggatccctctgtccacgagaagaagctgaggctctgagcggatgcacaagtcacccatggcaggtgcgtgcagtggtgtcaggaacccgtccgggtcttcacacaaggttctctccagtccatctcgtgggcggctcatgttagagcgacattcaaatggaaggtttggaaaggaatgcctctgtcttgtgaagtaggacaagggtccgggagaactgagacgcaggatggaagacagagaagaccccccggagctcctcgctcttgttggtggcttcaggagtgcggccctccccaggactccacttcatcctggggcttgcaccctccttgagccaatgcacttgaactgcctttgaaaggaaattgcatgttctgaccattttaggatacctttacttttaaggaccacacagtcccagagggcacatccctcgggaactcttgcccctcttgacattgagggccacagagaaggtggtgtttncctgggtaggtgttcctgttctgggtg

SEQ ID NO: 432340 - DNA, 713 bp, Homo Sapiens
  misc_feature (15)..(15): n is a, c, g, or t
gcggtggtgcagagnctgcggcaaagggccctcgccgttggggttcacttctcatcacccagaagcagggagaagggcctgcggctgcaggcttgggctgccacaccggcctccagacagcacacagcagaagtaaaatagaaagaagaccttttttgaaatgacctgtgttagtcacctctctcaggatgcgtgaggcggacacgttgaggccacctcagctgatggaagtttccgctgacatcatctctaccgttgagttcaaccacacgggagagctgctggccacaggtgacaagggcggccgggtcgtcatcttccagcgggaaccagagagtaaaaatttcgccccacagccagggcgaatacgacgtgtacagcactttccagagccacgagccggagtttgactatctcaagagcctggagatagaggagaagatcaacaagatcaagtggctcccacagcagaacgccgcccactcactcctgtccaccaacgataaaactatcaaattatggaagattaccgaacgagataaaaggcccgaaggatacaacctgaaggatgaagaggggaaacttaaggacctgtccacggtgacgtcactgcaggtgccagtgctgaagcccatggatctgatggtggaggtgagccctcggaggatctttgccaatggccacacctaccacatcaactccatctccgtcaa

SEQ ID NO: 432341 - DNA, 748 bp, Homo Sapiens
ttttttttaatgtctctccagtcattctttattcaggaaaagcacacaatcgtaaacaacggagagtgaagacagtaacaactggtttgatattgaatttttaaaatcttgattcaaatggaattttcataatctaccacttaaaatttatttttaattagaagaaaactatgtaactgtgaagagaagcacatttcagcctctcagtcagccccatcgtgcctctgcttcacatccaggaagaagcgagtcctcggggcagccacgcaaatgcaaggacagagagtccagagaataccacttggcctccaggtgcatgccttccaagtctactctgcagacgcaaatgtcatgtgggtttttgccaaaatctcaatggaaacatttctatttgctttaatttatttttaaagtcaaacaccacagttcaggatgtggaagaaatatgaagtcagtggatgaaggtcttgcttctaccagcttatgatcccactggccatccaggaagcacaggacacatatcagcatctgaacagcagggagcattcttcctcctgtgttggcaactcgaagctggaggtgcctttatatgaacatttttcatcatcatctagtccagaaatccctccttttatagacatacattctgtaaatcttaggtaaatatggattgtcttgtttttaaatacaatttctaaagagccctctgtagtaatttcttattttatctatttagagcaggcttcac

SEQ ID NO: 432342 - DNA, 736 bp, Homo Sapiens
tagaggatccgtactcacagttcacctgaacaacaatttattaatcaaaaaatgagacctggttctggaatgttatccatcagagtcatcccagatggaccaactagagcactccagataacagatttctgccaccggaaaagcagccgttcatatgaagtggatgaacttcctgtcaccgaacaagagctgcagaaattaaagaatccagatacagagcaggaattggaagtgcttgtgaggttagaaggtggaattgggttgtccttaattaataaagtcccagaagaactggtctttgcaagtcttacaggaatcaatgtgcactatacacagctggcaaccagtcacatgcttgaactcagcatacaggatgtacaggtggacaatcagctcattggtaccacgcagcccttcatgctctatgtgactcccctgagcaatgagaatgaggtcatcgagaccggcccagctgtgcaagtcaacgcagtgaagttccccagtaagagtgcactgaccaacatctacaagcatctgatgatcacagctcagagattcacagtgcaaattgaggagaaactgctcctcaagctgctaagtttctttggctacgatcaagcagaatcagaggtggaaaaatatgatgaaacctccatgcaaagacagctgagcaaggtggaacaccaattcgatactactttgaaaatctcaaaatcagcattcctcagatcaagct

SEQ ID NO: 432343 - DNA, 796 bp, Homo Sapiens
  misc_feature (330)..(661): n is a, c, g, or t
gtgctttgtattgaaagtaaagttaggtagctaaggggactactcaaccctgagaacacgaccgagaaaaactgcaaggcatatgatgtttgtcgaagtatcacatgactattttcaagcttatagagaaacttgcaaaaaagtacaaagatggctatttttaaatttcatacatattaagataaggatggactctttcactgagtattatcaggacacaatcgacggatgtaatctatttgaattataccataggccctattctatattggccaaaggaaaagtagataggtactgtgaaaacgagactctgaattctttctataacannnnnnnnnnnnnnnnnnnnnnnnnnnnnnnnnnnnnnnnnnnnnnnnnnnnnnnnnnnnnnnnnnnnnnnnnnnnnnnnnnnnnnnnnnnnnnnnnnnnnnnnnnnnnnnnnnnnnnnnnnnnnnnnnnnnnnnnnnnnnnnnnnnnnnnnnnnnnnnnnnnnnnnnnnnnnnnnnnnnnnnnnnnnnnnnnnnnnnnnnnnnnnnnnnnnnnnnnnnnnnnnnnnnnnnnnnnnnnnnnnnnnnnnnnnnnnnnnnnnnnnnnnnnnnnnnnnnnnnnnnnnnnnnnnnnnnnnnnnnnnnnnnnnnnnnnnnnnnnnnnnnnnnnnnnncagttgtcgtgtctctcaggctctaaacaatttccagcccaaaccacagcaccatcctgatgaaaagggccagatattaagacagctgttaggcagttaatctgtaattaaaaggctgtggcaacttcagttcca

SEQ ID NO: 432344 - DNA, 694 bp, Homo Sapiens
  misc_feature (172)..(217): n is a, c, g, or t
  misc_feature (413)..(450): n is a, c, g, or t
tctcatatcatcatgaaaattttgtgggctatcaagatgacaatctattccaggatgaaatgacagtagatgccaggccacataaaaataaatgttttaatttacttagagctgtattcaagttgtttgataccagacagaaagctgacagtctgttctttgtaaactgccnnnnnnnnnnnnnnnnnnnnnnnnnnnnnnnnnnnnnnnnnnnnnnactaagccccttctgacacctaggctgataaagataagagtagtgcgcagtacaaatgtcagctctgaagaggaggaagtaaatcttcaatgttagggcagatcttccctatccgtgatccagtcttaatttgagcatgagagcaaaattttagtcatctacacaagaaagcaaaagcaagggaatagttgttggnnnnnnnnnnnnnnnnnnnnnnnnnnnnnnnnnnnnnnaggcaagaagtgttgccggtagggtatgtgtgctttctttgccttcctatttcctttcaaagaaatctcttgtaaattacaaaactgtgaattgggttgccaaaaactgttgcccttcgttagatgcttcaaacagtgtaaatcctatactgcaccctgtccacctctgctccctcctccctcccctagagtaggacctcatccgaccatgaattccattcgccgctataaagagcctttcaaa

SEQ ID NO: 432345 - DNA, 2006 bp, Homo Sapiens
  misc_feature (1754)..(1754): n is a, c, g, or t
  misc_feature (1798)..(1798): n is a, c, g, or t
  misc_feature (1833)..(1833): n is a, c, g, or t
tctctcacatatacacacacactctttctctctcacgttactttcactgtcactttctctctactggataacaggccaaaagtactggcactcatctttcactttcttccagctattcttcctacacatctctcactctcaggtaagttaaacatacaccacttccaaagccccagtctgccacagcacaaagaaaagccatgtctccacaggcagagcatgtacagctgagataagtcctctggggcctcacctttccctttcctctaaggaagagaatttcatctgccccatgagatcgagccctcaggggcttgggcactcacagatcaacatgttctaaggtagtgcaggggtcagcatcctaaaggcagcaccttggcaagatcccacatgtattttcttctcgaatccctaaaagtttccttgactgttgctccttactcacacacacacataaggcaggcacagaagggcagtgtttacagctggaagggcaaatgccccttgttcacagaccagttagacttgtcaaggtcacacagtccttggccgacttgaactagaacccaggtgtctctcctgcgtccaaggtcaacactcctcctcccacaccgctgccacctcctggtgagtaaatgtgtaagtctgtgaagggtcagggatgtgtttcaccatggaaccatttccataacagaaaccacaggctgccaggctcactgactgcagctttgcaccatgcacagccctgcttagagcagccacagcgcaggaagaagtgagtgtgtgggcaagtgtgtgagcacgagaagggatgtgcacacattcagaaaaaggaagtcttagaagaaacaattcgatctgctaatgctgtttgggattttgctatggagattaagtaacatacagacatgttctctgtttcctacccctggtgcaaaacaaagcccagaattctcatcagcccacagaatggccgagtctatctatctccactcaatttttataaacagagaacattaacatgataataccaacatgtatttggtcaaagtctaaacacctttttgataaaatacattttatgttaatgtccattccatttccaaacatacataaatttagattttaagcttcaacgtataaaatttcagtttaccttccaatggagcaagctagtgaagcttcctcatttcacttgcagaagtcattcttgcggcttactgcattaaagtggaggttacgaaacctgggcgacacctgtgtaatatacagctcacaatcacctttgctcatgaatggagccaatcagaacacaggcagggctgcaaagggcagtatatgctcaccccaatggatgaaacactaagttgtgttttactaataggctacttggaaggaaattcattttacttgaaattaacctttagtatgacttttcaagaaaagaacacaaagtgggtactgaagcacagatggaaatcactgtcctattattttacccgatgacttaaaactggagtacgctgttttatcacgagcagccgaactcctcacagcaccaatcaattaaacagaaaatgtcgagacaatcaggtttacaccgacatgcctggaagatatacaagactcccataagttctgtggcctctgctgctactgcttgtttttaattcaaaactttcacaacctaacaggcacatgtgtgactgtttaaacgtacccaccccagatgctaggtttaatctagtgtngtaaaggaggcattccgcatcctaggttaactaaaaccagggangcagaagggtccaggaataattccatgttagcatnacaaaggatgtccccagtaagtaattgttggctaaacgataacagcagtatttccagttattacagaagttgtttctgtgagttgtctgagtatcttgattattaaaacgttccctgttaaccaagctaacccacgattaaaagattcctaccttcgtgtccctttacaaata

SEQ ID NO: 432346 - DNA, 2281 bp, Homo Sapiens
  misc_feature (72)..(122): n is a, c, g, or t
  misc_feature (1758)..(1758): n is a, c, g, or t
  misc_feature (1771)..(1771): n is a, c, g, or t
  misc_feature (1985)..(2020): n is a, c, g, or t
agaaagtgaaagatgagtgccagtacttttggcctgttatccagtagagagaaagtgacagtgaaagtaacnnnnnnnnnnnnnnnnnnnnnnnnnnnnnnnnnnnnnnnnnnnnnnnnnnnaggaatgcttgattgcttgttgttcactgggccagctctgaaatccaaaatcatgccttgataacattacaaaaccgtgatcctgggtttgagtgaatcctagagacattgttcttatggccgcctggtttccgcagcctgatcaccatatcgagcagacgtcaaggaatcagagtgaagtacggagccagggagggaggtgaggccccgtgtagtgcctgtcaccactgtggattcacctgcactcaggtgtccactcctgtctcccaggcccaaagcagcacatggtgcaatggaaaagtctcttatgtagggatcctccttgtgtcctggtgccagaattagatttccagtgtacttcaacgaaaacttctctcctttatagttgctgtcatctttcatgtataaacagaaaccgtctctagcacaatatatttctgaatattgtttctgtttcataagagcacaatgtacatggacctaggggagctgtggtcccaagtgtcattggaatttatattttaggaataggctttgcatgttaaaattcacaagttgggaaactggtatgaacagatctgatttcttacagagaggcatgaaggaataggcaggacttaacttggggtgggaggagatgaataagggagaatgggagagttggggtctgacagttaccacctgagccccaggaaaactgttttcattttcacggctgtctcactgggggcctgctttcctcaaaggaactgactgtatgttgagaggcaatgccttgtgttggcatggctttgccactttaaaagtgccccccagccaaggagaccaacaggaaccctgctcatctggtagggctctttccttcagtaaaaccagctgccagcctgagaagcctgtctttcccaaatgcaggcagatctgagaggggctccaggcacccggcaggtaaatcacaaagcaaacttgggtgtccttggcagcggggaggaagcaggagtgccccctcaggccagagggcagggccaacctcctcactgtgcttcaaggttgtagaaagagcacaattaatgcttaagcgatcacagacccctctcccctgcagtgggtgttagctccaaagagatgccattgctgatcacccagtcttcggagaagcctaaaatttctttgaattaaaaactgatcctttttcataaagacccagtcacttctcccagtttagtgataacaggtatgacacaagaagctgaagtcttttagattttatagagagtaattctgaaacctgccagaatgctggtagcctgtggtgtccatggcaatgggtgtccatggtaaaatatctatagcttctgctcactgggcaaatataaaagacaacatattatttaacataatatgttgtcttttatatttttatttaaatctggattacgaaaatatagtacccatgagcatttcatgttagaaaccccatttaaagcactataaggctgaataggcacaagcgattaaaagtagatgccaggccacataaaaataaatgttttaatttacttagagctgtattcaagttgtttgataccagacagaaagctgacagtctgttctttgtaaactgcctttccctgttttnctgttttgttttntttctcaagtttcattttttactaagccccttctgacacctaggcagataaagataagagtagtgcgcagtacaaatgtcagctctgaagaggaggaagtaaatcttcaatgctagggcagatcttcactatccgtgatccagtcttaatttgagcatgagagcaaaatttagtcatctacacaagaagcaaaagcaaggaatagttgttgggnnnnnnnnnnnnnnnnnnnnnnnnnnnnnnnnnnnnaggcaagaagtgttgccggtagggtatgtgtgctttctttgccttcctatttcctttcaaagaaatctcttgtaaattacaaaactgtgaattgggttgccaaaaactgttgcccttcgttagatgcttcaaacagtgtaaatcctatactgcaccctgtccacctctgctccctcctccctcccctgagagtgaggacctcatccgaccatgtaattaccattcgcttgctattaaagagcctttcaaactcaaaaaaaa

SEQ ID NO: 432347 - DNA, 834 bp, Homo Sapiens
  misc_feature (304)..(316): n is a, c, g, or t
  misc_feature (528)..(573): n is a, c, g, or t
gtattgtagttttgattttggtgttttgtatgtgtgtgtttttagactttgaaaggctcttttaatagcaagcgaatggtaaaattacatggtcggatgaggtccttcactctcaggtgagtgaggagggaacagaaggtggacagggtcaagtataggatttacactgtttgaagcatctaacgaagggcaacagttttggcaaccccaattcacagttttgtaatttacaagagatttctttgaaaggaaataggaaggccaagaaagcacacataccctaccggcaacacttttgtgcctnnnnnnnnnnnnnccacaacctaatccaaaacccaacaactattccttgcttttgcttcttgtgtagatgactaaattttgctctcatgctcaaattaagactggatcacggatagtgaagatctgccctagcattgaagatttacttcctcctcttcagagctgacatttgtactgcgcactactcttatctttatctgcctaggtgtcagaaggggcttagtnnnnnnnnnnnnnnnnnnnnnnnnnnnnnnnnnnnnnnnnnnnnnnggcagtttacaaagaacagactgtcagctttctgtctggtatcaaacaacttgaatacagctctaagtaaattaaaacatttatttttatgtggcctggcatctacttttaatcgcttgtgcctattcagccttatagtgctttaaatggggtttctaacatgaaatgctcatgggtactatattttcgtaatccagatttaaataaaaatataaaagacaacatattatgttaaataatatgttgtcttttatattgccc

SEQ ID NO: 432348 - DNA, 447 bp, Homo Sapiens
  misc_feature (195)..(235): n is a, c, g, or t
  misc_feature (366)..(366): n is a, c, g, or t
cgaaaatatagtacccatgagcatttcatgttagaaaccccatttaaagcactataaggctgaataggcacaagcgattaaaagtagatgccaggccacataaaaataaatgttttaatttacttagagctgtattcaagttgtttgataccagacagaaagctgacagtctgttctttgtaaactgcctttccnnnnnnnnnnnnnnnnnnnnnnnnnnnnnnnnnnnnnnnnnactaagccccttctgacacctagggcagataaagataagagtagtgcgcagtacaaatgtcagctctgaagagggagggaagtaaatctttcaatgctaggggcaggatctttcacttatccgtggatccngtctttaattttgaggcatggggaggcaaaattttggttcatcttacacaaggaaggccaaaagccaggggattggttgtt

SEQ ID NO: 432349 - DNA, 546 bp, Homo Sapiens
  misc_feature (434)..(485): n is a, c, g, or t
tatatataataggtaaaaagaaatcatatacataataatactttattaaaattaaaagcagaggaaactttatctgacccaagtatctttttatagctttatgaaattgttaaaaaccaacatacaaaataatgataaaatttattaactatagtagtttaatataatagctaaagggacactgatattaaacaccatataattctattttacattaggatgcaaggttttaaattccttttttcttattttatcaaaagtgaaggaaaatccttaatagattacattttggttgttcaagaaagtctgttataattttatccttgccaaaacatttgacacaaagtcaaatacctaagggagtaaatgatgccgaagcggatttaattcactagaatacacaaaattaacaatacaagtagtcatttttatannnnnnnnnnnnnnnnnnnnnnnnnnnnnnnnnnnnnnnnnnnnnnnnnnnngtctatggtagactagtgatcactgtccttggaaacttaactactagaacataatgtaagg

SEQ ID NO: 432350 - DNA, 580 bp, Homo Sapiens
atcacctttctttcgacaaactttgcacctagcattttctgcggacatatcccacttgatacaggcatcaagcatcccaagcagcacgtgcatcctggagaaagtctgagcttcccggattgctgtcttccatttctccagtgcagatgcaagctttgcttcctctaccattttcttctcttcatccacttcctcagtttttgctgaatcttcactttggagttttcttctcttttgcttgggagccatgaagccttggagaaatttctttatgacactggcctgaagggcaatcacacactcaccaaaatccttcaatttctctaatgaaatgacccgggcttcaaattctgatgtttcttccacatatccaagtcctcctttttgtaaccttgttgcaacttcaatgagatcactacgaaggaagtttaaaagctcctggttgccatcacaagattttagacccaaatttggcttccgtgctagatgaatagagtgaataatgtcctggtacctcttctctagtctctctttaagttgactttctcttattccctgagggtgaagacagtttagcaac

SEQ ID NO: 432351 - DNA, 564 bp, Homo Sapiens
tgagccactacgcccggcctgttatatgcatttctatcagtttgctcactttcaggtttcagcaaagcaatatagtgttttgtatatggatggtacagttactaatctcaaaggaaattctcacaatttcattattttagtatgccagttaaattggcaaagaggtttgctctagttacagttgttcaagggagagaatacagtcatgggttcttagtttctgtttctggatgggccagtaaagccccttcctcatccctcttttctgcttatcactagagacagaaactaaaaaccatggcttcaggctgctgaaagcctaaaacaaaacaaaacagaacaacaacaaaataaggcaggttggacaagcttgctttaagtgatgtcctgatgacaataagggactcagttttttcagcattttgtgttttgattaacctgtaacaaagttttggaaagcatcattgcaaatagttgatctaagaaaatagcccagagcattggtttgggagcccagtctcgagttcagtggcctgggattggaaatttcagccctgcaaaccg

SEQ ID NO: 432352 - DNA, 804 bp, Homo Sapiens
  misc_feature (290)..(298): n is a, c, g, or t
  misc_feature (722)..(722): n is a, c, g, or t
actacctgggggagtcaacactgggatggtctgtggggtgggagggcctacggagtgggtccgtagaaggtcccacctccctcattcctccttggcccctctccctagcttctcctggttagctccttctgctcctgaccccacctccttggctcttggcgcccctattgtctctggctacctccttgtcccaccacctccaggctgcatcccaccttccctcttggctactgtaattgtaaatagcgacctttggaaaacgttagcggtgtaacagtccaggaaactgnnnnnnnnngttgttgttgtattgatatgaaatgagattctatttttgtcaaagtatattgtaataataatgactcaaacggcccgtactgtacagacgagattcttctgctgttgttcttgctcccctcccctcctctgagtccgcccctccctgctgcctcctcagtggggcagtgggcaaggggcccaggggcagccgaagcacggggtcctgagacctcaggcaggattggagatcaaaccagagggggcaggcccccagcctgctctctaggatcaccccccgccctaaggggcctggcctggggtgacgtggccaggcagactgtctgccccactccttcacacaagcccagctcctctgcccaaggggtgcggcgcccccttggggtttcctcccagttggagagtagagttaagacaaggcccanttttgtgttagccgaccgtctttgcccacctctatgacccagcctcttgcagtattcccatacttgatgcagggaaggaacc

SEQ ID NO: 432353 - DNA, 1149 bp, Homo Sapiens
  misc_feature (38)..(39): n is a, c, g, or t
  misc_feature (997)..(997): n is a, c, g, or t
  misc_feature (999)..(999): n is a, c, g, or t
  misc_feature (1001)..(1001): n is a, c, g, or t
  misc_feature (1005)..(1005): n is a, c, g, or t
  misc_feature (1011)..(1011): n is a, c, g, or t
  misc_feature (1021)..(1021): n is a, c, g, or t
  misc_feature (1031)..(1031): n is a, c, g, or t
  misc_feature (1034)..(1035): n is a, c, g, or t
  misc_feature (1038)..(1038): n is a, c, g, or t
  misc_feature (1046)..(1048): n is a, c, g, or t
  misc_feature (1054)..(1054): n is a, c, g, or t
  misc_feature (1056)..(1056): n is a, c, g, or t
  misc_feature (1064)..(1064): n is a, c, g, or t
  misc_feature (1075)..(1076): n is a, c, g, or t
  misc_feature (1094)..(1094): n is a, c, g, or t
  misc_feature (1097)..(1097): n is a, c, g, or t
  misc_feature (1099)..(1099): n is a, c, g, or t
  misc_feature (1103)..(1103): n is a, c, g, or t
  misc_feature (1106)..(1106): n is a, c, g, or t
  misc_feature (1109)..(1109): n is a, c, g, or t
  misc_feature (1111)..(1111): n is a, c, g, or t
  misc_feature (1115)..(1115): n is a, c, g, or t
  misc_feature (1121)..(1121): n is a, c, g, or t
  misc_feature (1128)..(1129): n is a, c, g, or t
  misc_feature (1133)..(1133): n is a, c, g, or t
cctcccccgggaagggcaatgccggccgcgagaccaanngggaggaggggcagtgctgggcgggtaaaactacgcacaagcgaaggaatctgggcccccagcctctcgccgcccgctctccagaggcagtctgcaccttgcctccttcgctcgagccccagcccccagactcgggcaatacccacaagcaagatggcggcaacggcggcaccccctactgcttagcaccctgacttgccattggccagagcccggagtgaagcagccgcggattcgtcaagagcggtgcgggggtgggggtggagctgcagcagcctggagccaggagtgggcaacgcggtgtgagcagcggcccgaggctcccggagcatcgcgctgggagaagacttcgccgctcggggccgcagcctgttgggcaaggcgagcatcatggcctcggattgcgagccagctctgaaccaggcagagggccgaaaccccaccctggagcgctacctgggagccctccgtgaggccaagaatgacagcgagcagtttgcagccctgctgctagtgaccaaggcagtcaaagcaggtgacatagatgccaaaactcggcggcggatcttcgatgctgtcggcttcaccttccccaatcgtctcctgaccaccaaggaggcgccggatggctgccctgaccatgttctgcgggctttgggtgtggccctgctggcctgcttctgcagtgaccctgaactggccgcccatccccaagtcctgaacaagattcccattcttagcaccttcctcacagcccggggggacccggacgatgctgcccgccgctccatgattgatgacacctaccagtgcctgacggctgtagcaggcacacccagagggcctcggcacctcattgctggtggcaccgtgtctgccctatgccaggcattcctggggcacgggtatggctttgaccaggccctggcactcctggtggggctgctggctgctgccnananacantgctgnaaggaggcgnacccgacctnctnnccntgttgcgnnncctcantnagcctttncacaaacctcnncctccaaccaactttcanctntnccanctnctncncctntttttnctccgcnnaaanccccccctccatccta

SEQ ID NO: 432354 - DNA, 939 bp, Homo Sapiens
aggtatgccttgcatagggcagacacggtgccaccagcaatgaagtgccgaggccctctgggtgtgcctgctacagccgtccaggcactggtaggtgtcatcaatcatggagcggcgggcagcatcgtgccggtcccccccgggctgtgaggaaggtggctaagaatgggaatcttgttcaggacttggggatgggcggccagttcagggtcactgcagaagcaggccagcagggccacacccaaagcccgcagaacatggtcagggcagccatccggcgcctccttggtggtcaggagacgattggggaaggtgaagccgacagcatcgaagatccgccgccgagttttggcatctatgtcacctgctttgactgccttggtcactagcagcagggctgcaaactgctcgctgtcattcttggcctcacggagggctcccaggtagcgctccagggtggggtttcggccctctgcctggttcagagctggctcgcaatccgaggccatgatgctcgccttgcccaactgtcccgccgcagccaggtcacaacacgacattgatgaagtcacgacagggcggcgatgagatcacacttcacgatggcgcggtgatgtcacggagagatcacgtcaaaatcacgacatgggagacagcccccaaagatgacagggcaaattaataataaacaagatatatattgaaaagggctgtgacaaaatggagtctcgacagggcacgatggtgtcgcgatatggcgcgatggagtcgcgatagggtccccggggtgtgtcggcatcgatcagcgccggctcggagaggccccggctgggatgcaggggagggcccgaagggggctgagctcaccaggctgcggccccgagcggcgaagtcttctcccagcgcgatgctccgggagcctcgggccgctgctccgct

SEQ ID NO: 432355 - DNA, 855 bp, Homo Sapiens
caggttacgtttttgggtcaaatagggcactctggcagagctcaactttatgcatctcacctttggtaatcctcactgagtccccttaacacgtccacaggtcggtctccgcctccttgcagcactgtgtctcggcacagccaccagccctcaccaggagtccagggcctggtcaaagccatagccgtgccccaggtatgtcctggtatagggcagacacggtgccaccagcaatgaggttccgaggccctctgggtgtgcctgctacagccgtcaggcactggtaggtgtcatcaatcatggagcgtcgtgcagcatcgtccgggtccccccgggctgtgaggaaggtgctaagaatgggaatcttgttcaggacttggggtatggtcggccaagttcagggtcactgcagaagcatggccagcagggccacacccaaagcccgcagaacatggtcagggcagccatccggcgcctccttggtgttcaggagacgattggggaaggtgaagccgacagcatcgaagatccgccgccgagttttggcatctatgtcaccgtgctttgactgtccttggtcactagcagcagggctgcaaactgctcgctgtcattcttggcctcacggagggctcccaggtagcgctccagggctggggtttcggccctctgcctggttcagagctggctcgcaatcctgaggccatgaatgctcgctcttgccacaactgtcccgccgcagccaggtcacaacacgacattgatgaagtcacgacagggcggcgatgagatcacacaggctgcggccccgagcggcgaagtcttctcccagcgcgatgctccggtagccccgct

SEQ ID NO: 432356 - DNA, 4051 bp, Homo Sapiens
  misc_feature (3965)..(4001): n is a, c, g, or t
tttttttcaagtatatttactctttattgcattccttcatttgcattaaacaatattttttcaatacagttttggacaaaacacaaagacattaagctcatttaacaagagacataagttaacacaatgtgtgctgctttcatgaggaggaaagaggcaagatcttagaggaatccaggatactggccaccaggaatcacaggatctcacaatacaatccacttctttaaaagccacaaaataagctagggaagaaaacccaaaacaaagaagatatgacatccaagtctccaccaaaagtatacaaatggcaagatttggagatgatctgctttctcacatgaggacaaataacagaggagccacacccaagtgccactgtggccacaagcctcatgggtggcgtgtgaggtaagcaccttaggatggcttctaattgcttgtccttgcattttaagcagcagttgggagagagaggcacactccataagtctcatcaccaaatatgacctaattaaattcctgctaagtcagtcagttgtaagacaaatcaccctcaaaaggactcaacgggtgcttccttttggaagaagtgtgtggagggtaaaggaaatgtgttcaatgtattggaatggacaataaaggactgagggagagggctagaaaatgattgatttttctggagaatagtgttttagacactagatagtacagatcatttaaaataaaggataaattctaagtaagtcattaagctaaggaaaaagcagtgatactagtaagccttaatattatactaaggaattgacccacttggagttggacactaattagtgctgagaggtttgtaaattactttaataactcctttctgtttgggggtgtatgctttttccatacctatctttcacatgtttttaacaacatcttctaagtggtaataatgagcatatctcttaccacagagcaaattagttatacttaaggggaagtcacaaccaacacggtagtcatctgactttctattaagaaagatcttctgactgcaacttgaaaacatctctgacaatgattgagaacagcattttagagattcaatgccttgtttcttcaggcaaagagaataccagtcttgtgggagacctttaaccaaatacccagtgacttttagtgttagctcaggacagctgtcagaggatctctggcccacacctcgatttactaagccagatttgcatgtagaaagtctgccttctaatcggccaactgttgtcatgcaacattcatgacactgactgagagttttcaagggtgatggtgctagtagagaggttgaaacgtgtagtgtccacaagtactggatggttcccacccagagggactgagcaagaaggaatcactttagcctgcatgggaaggtaagcgcagcattctaaaccaaattgacaccttccacgagacactaagctatctcagtatgcataaggaagggagttttattgcactaatcatgcagagcgagcacatgttgaaggtagagaacgttccacttagtccagtatcttgagtaagacagtgaagatcctaggccatcttcaccttggtcacttcccttggtcactgtgtgtttcaaatagttcattttcaatcaaaatcaagggggctagctccttcttctcttaagaggggccagaattttctcacacggtattcaggatccatctgtagggacatctcgatcagcattagtaacttcttgattcctatccagaccttcttccctttgacttgctgtgcaattgtggtgcgttccttatccttgaagttgcccaaaagctccaaagcttccaacagctgctctcctgtggcaatgttgggcacgtggatggtggtgctgaaagcgttaagcatttccatctcctgaaggacatctttgcggctagtggtcccaatgataagaagcttgcggccctgaggaggtgcctttttcagtaaaacgagaagagcctgtaatacaagatttgaaaatcgagggccaatagggacgtaatcaagcaatctctcaatgtcatccacaaccacacaactgagctgggatttgtacgcatcatcaaagatcttcttcatggcctgacatttggctgtttcagaaaagccaatcattttatcaggagaacagatcttgatgaacgggaagttggattcctctgcaatttttgcagctaaagcagtcttcccactgtgaggagggccttccagaagcacgctgaccaatggtgtgcggtcactgttcttagtctgctgcaccagcagctccccatcatctagaactcgagtaactgggtcaccccatttgatgataccgttcataatgtaacttgcataatcttcttggtttgtgccaaaggctggtttgatatcattctccaaagaagcaaggaagtctcctctcgtcacttgcaggctttctgctttctccatgtccacttccactttagtactggcctttatgtgtctattcatagcagtggactgggctgctcgcaccagaccctccaattgagcaccactgaaattcttggtctccacggccagttctttaatgtctacatcagcagagagtaactgatgccctctcattcttgctgtgtggatgtgaagaatctgtagtcggcctttctcatctggcaacgcctatctccattttaacttccagtcttccaggtctaagaagagcctcatctaccacgatatggtctacttggtcattccaatgacctaggatgttgtttagctgctccatgccatcaatttatggaccgcaactggttgacaacagtgtcatgaactcccgtgctaccagccatgctccctctctgcattgcagatggcaatcaatttcatcaaagatgatgatgtgcaaaccactgttagcaccaagcctcctttgctcctcttcagcatcagcaaaaagtttgcgaatgttagcctctgattctcccacatatttgttaaggatttctggcccattgaccactttgggctctcttgcattcaacatcttgccaatctgtcgagccaagagagtcttaccacaacctgggggtccatataacaggatgcctttaacatgtttacaacccatctgctccacaatctctggaggaaatactcgggaagcaaatgctcgtcggaaaatatctgaaaattccttgtctagacctcctattcccattttttcaaagttccagtcaggattgataattgattggcgattttccttggttttagctttgccaataagattaagtgacgaattttctgctttttcaaatgcaacttgactgtttccaacaaccagtcctacttcaatcttctgccttttccctgtcgcaggctctcccttcaggatgctaggatccatggcttcaatgtccttcaccagtaagccaaaaagcttttcattgaagctaaagacaagctgttgtcccactgagaaggcctggttgttgaattgctgaataaattctgctgccatcttgtcggtgtcataagggttggagtcaatgctttttttctgcaggaaatcaatctcgatggtcattgtgccaatacactgtttggctttgtcaaatgtatataaggagacttctatttcttgcccaatagaaagcccagcccattttctctgaggtaaactgaatgcaatgctccctggaaccaccgatggatgtgtcttcagtgtaaatgtgtacctgtgattgggagaggtcctcacaatcacatgctggccagactggaaatccttttcattcacaactgcacaattggttaaagataattcatctgtaggacatcttgccgcttgcatgctccggcccgccatcttcgcggacacgtccggctcggcggctgcagctctgcccgctctcgacgaattcgagctcggccgatttggcctgatnnnnnnnnnnnnnnnnnnnnnnnnnnnnnnnnnnnnncgccgccaccgcggtagagctccaattcccctatagtgatgacagtgtca

SEQ ID NO: 432357 - DNA, 483 bp, Homo Sapiens
  misc_feature (199)..(199): n is a, c, g, or t
  misc_feature (455)..(455): n is a, c, g, or t
  misc_feature (471)..(471): n is a, c, g, or t
ttttttttcaagtatatttactctttattgcattccttcatttgcattaaacaatattttttcaatacagttttggacaaaacacaaagacattaagctcatttaacaagagacataagttaacacaatgtgtgctgctttcatgaggaggaaagaggcaagatcttagaggaatccaggatactgggccaccagggantcacaggatctcacaatacaatccacttctttaaaagccacaaaataagctagggaagaaaacccaaaacaaagaagatatgacatccaagtctccaccaaaagtttacaattgggcaagatttgggagatgatctgctttcttcacatgagggacaaattaacagagggagccacacccaagtgccactgtgggcccacaagccttctggggtgggcgttttgagggtaaggcaccttagggttgggctttctanttgctttgtccttgcntttttaaggcag

SEQ ID NO: 432358 - DNA, 621 bp, Homo Sapiens
actgtggtgctctgcaatgtacttcccgtgggagaagacctcctcggctgtggaccaggtgtaggcgcacactgccgacagccccacgttgttcagctgtggggtgaagagtgcatagaacacaggcaccttcagtgcccggggacctgagcacgaagacatcccgcagcacattgaagaccaagccgctgtctggccgggagcagatgagtcgggctttcaggaaggaggtccatttcttctgcaaggtcctcaggccgccctggtcccccttgcacactcttgctatccgtgggatcagcaccctgaacacaaactcatactccacagacacctccgtgaagaagaagtagaccctgtcatcctcgccgtcggggctgtctgggctttttcggatcacgtcagcaaacacgaaactaggctcgttcggccaagggattgcatattctgtcctcagaggactgtgggaagaatttcgggagatgatgggttcacttcccaaaaaaattatacgacgtccccgaataaagttctccatcaaccatgacggatgtgtagctgtgtgctgggtcaaagggacatcttcctttgccatcttcatttttccccagaaacttaaag

SEQ ID NO: 432359 - DNA, 391 bp, Homo Sapiens
ctctgcaaaggggcaattattcctggataaggcaagataattgtggtcacaagagaagcagccaaatgcagatctgttgagctaacagggggagtgtctcagtcagtctttcccagctttgcaatcagctcatcacagatttttgtcagttcttcaatttcttggttcttctgctgcagggccctttccagggactccaccttcatctgctctttgcggagtccagcatggagagctgcactctcagcctttgcttttgttcgaacctgagcaatctcttcattggctttgtccagtttctcttctgcgtggattttcagggcctggtatcgctgctcctcttgtttaactctggctaagtaatcctgagcacatttcttcaaggcttctt

SEQ ID NO: 432360 - DNA, 1578 bp, Homo Sapiens
  misc_feature (483)..(508): n is a, c, g, or t
  misc_feature (1106)..(1162): n is a, c, g, or t
  misc_feature (1191)..(1199): n is a, c, g, or t
ttttttatgggatttcttgaaatggctattaaatctctttattgaagaaaaaatagatgacatacatgctttatgcagaagtgacatttgggggtcctgacacaccgggattgttcaacagtcctatattgctgacaagattgtcaagggtcagttaaaataattaaaaacggatgacaaagcaactatccctttacctgcttccttcttgtctagcacccagtctttcacatttttcttctgtgggaatttataacttattcaccaagtaaattccatatcacttgtttctagggccatatttgcaggacatgtgccccaacatagcttttctattctgggcatatttctaaaaagcgtatcaaattctaggctgaaaaccaaccagatgatttagaatatgggcaagttaggatatgcacttactgaattccaagatgcatggtgaaatggtgagatcagaaaggggccctgcatttgatnnnnnnnnnnnnnnnnnnnnnnnnnnagcatgaaagaaactagtatatacaatggatgtcagttgacccaatagattgctaatgtattaaaaacaatttagggtgttgcaatgtgatatgttctaaccccacaggttatccttttgacagctgaccttaaacttataaaatgtaagcagagtaaaagaaaacagaaagaaaatagttactcaaatgtgcaactgcacaaatatacccccctcccgctattaagataacaaaacttctgctattaccataatattatatatattagaaagctatacacaagcatgttaatttcacagatttttttaaaagattcttaatattttatataattagaaatacacatttcaaaaacaaaacttctacaaagagaaaacagttatcttggttagcaaagcatggagttcttcatggcttagggtagtgctttctatacaaaaagtcctttttggttttttacaggactgtttaaaatattagcgaatctatcaaggggaaaaaaacacattttggcttaagtaaactacaaaaagccacaaatgctttgcaaactctgtcttaccttttatatgaaaataagcaaaatgtaatgtacannnnnnnnnnnnnnnnnnnnnnnnnnnnnnnnnnnnnnnnnnnnnnnnnnnnnnnnnttaaatatgttagccctccaactccacannnnnnnnnaataggtatggtcctcttttaatggtctctgatcctttttaatgagtgccatacgccaatgatatgcctgcaggtttgtgagcattcttgggatgtcaggtgacctggtgtgttcctaacatttaccaatggccacccattaccgggtctgtccaagcatctatacatttttctatatgttgcataacagctgctctctctttcagtaaagatctgccgcttttggcaaatgtttccttttgtctatttacatgtaaataacgttgaacctgcaacatgacactatctattgtaacatacattttgcaaaggagcacaacagtgaaaagaagttagccttaaaatctattttgtacaagtgttctgttgtacaactcaa

SEQ ID NO: 432361 - DNA, 388 bp, Homo Sapiens
atgggatttcttgaaatggctattaaatctctttattgaagaaaaaatagatgacatacatgctttatgcagaagtgacatttgggggtcctgacacaccgggattgttcaacagtcctatattgctgacaagattgtcaagggtcagttaaaataattaaaaacggatgacaaagcaactatccctttacctgcttccttcttgtctaggcacccagtctttcacatttttcttctgtgggaatttataacttattcaccaagtaaattccatatcacttgtttctaggggccatatttggcagggacatgtgccccaacataggcttttctattctggggcatattttctaaaaaggcgtatccaaatttctagggctggaaaacc

SEQ ID NO: 432362 - DNA, 658 bp, Homo Sapiens
cggacgcgtgggtgctaaatgaacaaacccagtatgcaagttattcttgcaccacatgctcaaatcttcttggaggtgcattaactcttttaggtaactagagcagtacttggtgaactagatcaggaggtcagtaaactttctgtggaagggccagagagtaaatattttaggctttgcagcccatacggtctctgtcacagctagtcaaccctgccattttaccacaaaagcagcaatagacattatgtaaacaaatgagcacagttatgttccaataaaactttatttacaaaaacagatgacatcccagatgcagaccatgggcaaccaaccattgcactggctaaatcattatttatggagaaatcctctttgtgtctctactctagatgcctaaaagagtttatatacttctaaaagctcctaacttatatccaaagaattgctttctgattcgtgtagtctctcccacagattcataaacttttatgacttatattgtttccaggtgggcatggtttatttcccagtttaacagttcagaataggggcatttattttatcatattttagggtgggttaggagtatcctttctggagactgagaaaggggtgtatttaattccatcaggtccagtacagtactaggagtcat

SEQ ID NO: 432363 - DNA, 1207 bp, Homo Sapiens
tagcttacattaataaaaacagaaatttatttcttacagttctggaggatggggagtccaagatgaagatgccagtagattctggtctctggtgtctggtgaaggcccaccttcttgttcgtagatggtgccttcttatgtgtccttacatggtgtaattggtgaacaagctctctggggcctcttttacaagggcctgcctcttgacccaatcacttcccaaaggccccacctccgaagaccatcgccttcagggttaggatttcaacatatgaatttgtgggggatataaacattcagatcatagcagataaaaagctaaattcaattgcctgtttatatatcataatacatttagcaataaacaaagttaataaactctatcaagtgtattttaaagcattcaaactatccaaattacaaacatatctcaataatttataccacaacctgaagaaattatctttgtaaataaattatgattacttctcaaacaattcataagaatagtaatatgtataatggcaataaaaattaaccacaatatcgtataaaattgtaaactgaactgtcttattgatgctgataacaattaaaggatggtgtcctaatattttttaacaacttgatagtctctaaaattaactggttttaccagtgcttacaccatgcccaaaaatttgctaggctgctactttaaacatttacttaatatgattcttgcgtcaaattcaattaaattttataagtatcagttgagcacctaactatgtgcaaacgtctgtgctaggtactatgcagagtacagggatgagcagagttctagccctactttcaaaagtttacaaacgctacactcacatccaacaaatacatatgggctatatgctaattagtactttaaacattactaatttttacatttttacaccttgcattagattatctgtccttaactggtatgtaacatggatatcttaagggaaaaaaccctatggcattaaaatgtaagaatactgtgatacttcaattaacctagtttgaaagtctagttaaaagtcttctttctttcaacataaatactaaaaatacatacataccctgcaactaaataacttcatgttagtgaattggcacaataacactttaaaagttttataaagaaaggatctcactatctatttaacttcctctttacaaaggtaat

SEQ ID NO: 432364 - DNA, 946 bp, Homo Sapiens
  misc_feature (135)..(147): n is a, c, g, or t
  misc_feature (891)..(891): n is a, c, g, or t
gtgaaagagttgattatttcaacagtattggttaagtcacaacgacgaagtgctgagaaggttatgggtaccaggaagaaacaaacagaagtcttaagattagaatgagaaccaaagagaatttaaccctgccannnnnnnnnnnnnaacaccaagatcctaagtaattccaaatgccttagatatcaatgaaagctacacaccattgagatgggcaaaattctttctctacaaagggagtaatcaagtaaatacctgttctctttcaatggactgttgcctattgagcattgtggatgatgtgttttcagatttccaggtgaagttctgaccctacctgtttggccaaagacgtaaattgagaggaaaggccttggtcttcctgatcaaccagcatttaacgaacagtggcttaatgcagatcactcaagaggcagcatagcaatgtaaaaggaatataagtaggtgttggatgcctttttcctagaccaggaatggggaatacataacacctgtgccaccgctcttttaaggaggcattatgaatgagtgcagcattcctgtcctctgtgccaggatttggtcttagaatccatgtcagattggtgcttccagacatctattcccagtccatcagagtgaaatgaaggctatttgccatccctgccttagacagaggagtgaaagaattaagtgggtagacaccaaccaaaatgactttgaaagcagtgagctgattgagctccagttctgtggttaccagaaatactgagtgtctgtcatgtgcaagacaatgctaagaacagaatacagacataaataagtcacgggcccatgaccttgaagagcttacggccttataaagaggttcactgttaattgtcttcaccnggggcgtccttctcaaagatgcccacttttgtctggcacattggggctcggtggt

SEQ ID NO: 432365 - DNA, 1207 bp, Homo Sapiens
ggccgcgcggcaggaactggcgctgaagaccctggggacagatggcctttttctcttttcctccttggacactgacggggatatgtacatcagccctgaggagttcaaacccattgctgagaagctaacagggtcaactcccgcggccagctacgaggaggaggagttgccccctgaccctagcgaggagacgctcaccatagaagcccgattccagcctctgctcccggagaccatgaccaagagcaaagatggcttcctaggggtctcccgcctcgccctgtccggcctccgaaactggacagccgccgcctcaccaagtgcagtgtttgccacccgccacttccagcccttccttcccccgccaggccaggagctgggtgagccctggtggatcatccccagtgagctgagcatgttcactggctacctgtccaacaaccgcttctatccaccgccgcccaagggcaaggaggtcatcatccaccggctcctgagcatgttccaccctcggccctttgtgaagacccgctttgcccctcagggagctgtggcctgcctgactgccatcagcgacttctactacactgtgatgttccggatccatgccgagttccagctcagtgagccgcccgacttccccttttggttctcccctgctcagttcaccggccacatcatcctctccaaagacgccacccacgtccgcgacttccggctcttcgtgcccaaccacaggtctctgaatgtggacatggagtggctttacggggccagtgaaagcagcaacatggaggtggacatcggctacataccccagatggagctggaggccacgggcccctctgtgccctccgtgatcctggatgaggatggcagcatgatcgacagccacctgccctcaggggagcccctgcagtttgtgtttgaggagatcaagtggcagcaggagctgagctgggaggaggctgcccggcgcctggaggtggccatgtaccccttcaagaaggtctcctacttgccgttcactgaggccttcgaccgagccaaggctgagaacaagctggtgcactcaatcctgctgtggggggccctggatgaccagtcctgctgaggttcagggcggactctccgggagactgtcctggaaagttcgccatcctcaccctgctcaacgagagctttcatcagcacctggtcccctggt

SEQ ID NO: 432366 - DNA, 1379 bp, Homo Sapiens
  misc_feature (15)..(15): n is a, c, g, or t
  misc_feature (23)..(23): n is a, c, g, or t
  misc_feature (35)..(35): n is a, c, g, or t
  misc_feature (55)..(55): n is a, c, g, or t
  misc_feature (72)..(72): n is a, c, g, or t
  misc_feature (90)..(90): n is a, c, g, or t
  misc_feature (111)..(111): n is a, c, g, or t
  misc_feature (346)..(375): n is a, c, g, or t
  misc_feature (1135)..(1135): n is a, c, g, or t
aaagcacaaacgggnaacaacangggccaacaacnaaaaaacctcggggcacccnttggcaaaacctttggnagcaaaagcgggagcaanaggccccacactttttacttnataatcctaatttcccctaaaggtttccctccctcatgaccaccatgccccccattttcagttcacatgattaagataagtctattcaattaatatttaatttaaaaaccaaacaaaaagttaggagtaggtggcaaaagaaacaaaatatattttaaatatatatatatgtttgtgtgtgtgcgcaactatgtaaagaaaataattcccatagttacagtttaaagaaagtttnnnnnnnnnnnnnnnnnnnnnnnnnnnnnnacaaaataggcagctattgtgggtaaaatattcagtaaaatctgactcctaagaatacatttgaagttttaggctatgaattggactcctttccattgccatgatggttactacgtcaccactgtaacgtctgatttatctgtatttatatctaggaaattttctcaatcttctgtgtaaaaggcgaacttccttagcacctgaacatggcctcaattcacgaaatgtgatgatcatttacatatgaacaacttttgtaagacacgatagtgttgctcaagtagattaaaaacattgaaacgttgttattcctagcaaatgtcctgggaaaaaagaaccgtcaaatactaaaaggctttaagaatgttgaggaaaaaatgaaatcccttatgaaagtcaactcagacatgaatttttaaattaaaaaatgtccttatttatctataatgaaacaattgctttgatgatagaagttgattgagaaaaggacttgagagtaatacactggccaaaccatgctattagactgaagcgtgcacagttgctcaaagtctactaaatcactgattaaaaccactttttcatttttactgaaatttgaaaagaatgtatataaagcttttccaaaaatctcttaaagttactttcccttaaacattaaggaattttaccacaatttctgcgtctccccacattcttaatagctggtcaggccattccatcttcagttctgaaaaatggccactaaccaatagtgacnttaaataatacacacgatgtaacttgaaggagacactacatgtgaaaaagaagctgcagaccatgatgtgtgggatacaattcaacatgaaatcagtactcaagaaagactccagaggaaagggcaaagagatgccaaagaaaatggaattgtggaaaagagaaacagagaaacatgagttttcatagcttttcttttgccggaacccagatgtaagaaccagattgttcttctatgatctgtt

SEQ ID NO: 432367 - DNA, 505 bp, Homo Sapiens
attttttgtaaagagaaatttattgtactgtaaagacaacctctactggtcatgatgatttttctttttatgttggtttactttgttaattacacaaggtatacatacatatattttacttaaaaatgcaagcaaacagatgtatatggagcaatcctaactcctttcttaaaccccagttttattcacctccacaaatataactatcattaacaatttggtctatatgtctcaatatttttttagttcacatatatgtatatacacacagtttgttttatgtgaattggactgtatgtattgatctacaatttattttttatatataacggtatgtcttaagagaaatttctatatcagaatgtatagaattgttccttgtgtagtatttgatggtgcagcattccttgtgtggacatgcagtgattttatagtattctattgggtagatatacagtcttgaggaaggagcagactgccatctttggtgtttctcaggcttcac

SEQ ID NO: 432368 - DNA, 2781 bp, Homo Sapiens
caacatctaaatagacttttatttttattttacttgtttggacagaaaagaaaattcatcagctttcattagagtctccttaagtgttggaaacacattaaactcagaaatagtggaccttgtagaaaagcatcacaaattaaaaatatatttctccatgtggtaaaagtgctttcaatcccattaaagggcacagcaagggtgtttggaaacacgatctgaaatttggcctgcaatccgtggcatcgattccaaccacagggcgggggagtcaccatgatctagagcacaggagccacgtggggcccggagcatgcggacagcaacactcgcaataactgagtgaggacgaggcccatagcctgagtagaatagattctgtatttgtaaaaaatgaggtggttacatcaactgggttgaagggggactgggtaatcccagaaattccttgtttctggtctgtggggatggtcagatctgcccaccactctggcaccgaggcttccctggagacgcataaacctgggttgggaaagtgcccagatctgcctgggggacacacgagcctcgctgccagtgccgggcacgcagcctctccagtcctgccgtcagcaaccgcctccggccctcatgtcaaatcacacctgaccagagttgtcaccacagtcctgttttggggtttttccaaggccagccctgttgttctgaggggccactctgagcaggcaaacactgccagggtcactcactacacacagaggaaagacaatgagcaaatggccatcgtagagaattcggttgtgtgtttcagcaatgctacttatttttcaagacaagtaattctgccaatgatgacatctgcgacaaagcttagggcccgcgggctccccatgcgcctcgtggagagcaaccacgtctgttcggaagccagtggcccttcccggccctgccacaggccagaacacagaactgtgatcatgcaaagagccgtgactgaggccggggtcagcgtcgggggtggagaggaggggacatctgccttttacattagatctgaagcaacagtaagaaaataacctgaagatatatttaaaaataaaaaatagcatcatccttcactccaagtttttggcatttccctctctcccctgcccaccagctaagcagagggaatgagcaggaatgcctcgtttttcagaatgggcacccactccccatttcaccactgtacacccaggatgtgtgtcttcttctaagagaccggttcaaaggtgctggcatgaggcaaatgctggaaaaccctccggcctcccctgacacctgagccattgtaaccatgcagggcgtctttgcttccttcaagtcttgaacttgaaccacgtcccagattgctgtagatctttaggaagcaggcatctctcttagagcgtgctccagctcattctaccacgggggccttccttcacagtcaccagtccacgctgcctcgcaagctccacggatgtcatgagagaatctgcccttgagaacgtgggtgtaagtgctcatcacaccggcggcactgtttctcgagggaggacatgctcttcttggaatgcaaatgaggacagcaaccgtcctctgaccaggtccatcctgtccctccagaggccctgtgcatccctcccaggcagcaagccacacaccaggccgtgtccgggtctctgatgggcaagttggaacggcaggctctcctcctcctcttgcccctcccttgaccgagtcctgcgcccccagcatcagtgggtcggagaggcatcctccaagcccagcagctctctgacgagtctctctccaaactgcgcccggctgtacctcttcacgtggtaggcgtctgacattttgtacaggatgtaggcattgttgatggcgatgctgatggcgaaccagaacacctgctgccaggtcttgtttggtttatgagaaatgaaatacttgctgtatttgtcatcgtatctgcagatgtagctcaggtgagcggcaaacgcctccacggccaaggggcatgggatctccccactcttccttttgatgatgactccctgctgcaccggggagtaggcgttggtcaggaagcggaagtgtcctttgttgtaccagcagatcaaggacatgttccccttcatcttgatttggtactggccccgggccgggggtgtggctgggttggtcagcatggacagtgggaggccggtgcagtcactcttccgcgcgcggagcaagccgcagcagtaaatcccttgcttctcaaactcttcaaacagcgtcaggctggtgatgctgggccccgtgaaaatgatgtagttcttgcctgccgcgttccggcacaggctcctggccaccatgctgtggagctggggcttattcttcagcgcatccaggccatctgggcccccaccttccttcaggtggacataaatctggatgatgaagccagtggaagaacattgtctgacccagaggctgaatttccgctttttcctctttcgcagctcccgctctgtgcacgtggcaatgaatacaggatcctcatcgatcaggggttcatgtagcacctgggtttgggaaggcctgaaggcagagtcgaagctgttctgcagggagtcgaggaagggctggaccttgtagagcccgtgcgtggtctggctggagcggaaggccacgacgtggaagtacttgacggatcttctcgaagcgggcctggctcatgacgagggcgaggctgcgtttgctgtagaagcc

SEQ ID NO: 432369 - DNA, 447 bp, Homo Sapiens
  misc_feature (398)..(398): n is a, c, g, or t
  misc_feature (407)..(407): n is a, c, g, or t
caacatctaaatagacttttatttttattttacttgtttggacagaaaagaaaattcatcagctttcattagagtctccttaagtgttggaaacacattaaactcagaaatagtggaccttgtagaaaagcatcacaaattaaaaatatatttctccatgtggtaaaagtgctttcaatcccattaaagggcacagcaagggtgtttggaaacacgatctgaaatttgggcctgcaatccgtgggcatcgattccaaccacagggcgggggagtcaccatgatctaggaggcacagggagccacgtggggcccgggagcatgcgggacagcaacacttcggcaataactgaggtgagggacgagggcccataggcctggaggtagggattaggattcntgtattttngttaaaaaattgaggtgggttacatcactggggttgaagg

SEQ ID NO: 432370 - DNA, 1227 bp, Homo Sapiens
  misc_feature (906)..(906): n is a, c, g, or t
tattgacacctgtgataacaaggaaatgactcttaagggcagtttgttgtcctgggggaaaaaatcataagtgttataaagaaatattattgtgcaaaggaggaatgtaatatttaaggttcatttacaacgggcatttggcgtcgacagaaaaagtctttctatgtatacattcaacattttgcagcatatttacattcaagttacatttccaaattctatgccaaatacagtctaactcaccatcaacaatccctcagatattactaaaatcctgtttatttggtaggagtgcaatattatcttattaggaaataattttatgttcctactaagtcaactgcatttttactactttaacaaaattcactgacatttttatcccagttgaagtcaagcctcttttagacaaagtcaatactaactcaaatgttgccagttataaaattatataataatcttttcctccctccttagagacagtattacaactttcaatgaaaggacaccagctatgataaattattttcttttacaagagttaggatgtattacagatacaagttccagaattttaacttgttttcaaaagatggctgaagcacttttccctttcagttgttaccgaattcctcagcgaaatacaacacattcagaaatctacatagcagttttctgaaaacttttctccattgtccccacacatttctcaaatcagagtgcttactcactagcaactggagaatctcttgcttagtttttctaaattatactagagtagctatcctaatttcctgacatcttcccatttcattttttaaattatgattttattaaaatcaacataaattacaaaggttccatctttgctacggttcttttaaaaatttatccttaacttactgnaagggtcaagaacccccacagggcctgtcctagaacaggcaaacaaaatgtcaagattagaaaattcctcatgcctcccaaaagactcccaggcaaatcaaatctactcaattcttccttatttatctcaagttcaattttaagtctaagaagataattaatgacaaaataacagagattgatgaatttcatttagttgagctcttttttcctaattttcctcaggttgtaacttcgccttcagtacatgatgactggcagttggtagtaggttgctgagatgacaccacttctaagtcagattcacgaacaaaaaccact

SEQ ID NO: 432371 - DNA, 947 bp, Homo Sapiens
  misc_feature (72)..(72): n is a, c, g, or t
  misc_feature (202)..(202): n is a, c, g, or t
  misc_feature (810)..(810): n is a, c, g, or t
cacagcccttgtcccacaggttttgcagccaatcaggagaaagaaattaggcacctgtaaagtattactgantcatagatagttcaccagtggtttgggcagttggcaaattaatttagggacatctgttctgaaacagcattgaaataggactgactgctttgctttctggttgtggcagccagagccaaaggcagatgantgaggggctatgaggaggctactgtggctggaacagtatgaaagcaacctcagctcccacgcctggctgtaaaggggataataactgggtgctgcttcccagcctctttcatctgagaagttcaaagcacctcacccctattaacaccccacagagtaggtaggaagtaccaatagagcaagccagggaaaactgaggccaggaggcacagcctggggctagctgtgaatcacctgtgggggcctagagcccaggaatcctgacgcccaggctactggacaaatcctttatcagggcattagggtgggtgctatgcttttgaaagcagtaccaacggctgtggtcgtgggttttgatgcttgccactcacagaggccccagctctcaccataacaaaccaaatgggggctggaaggcatcctttacaactttatggtctcgtatgcaagcaccctcagcattctctgcacccatggagtggagatgggtgggagtaatccaaggcctttattttcaggccatggtttgacagcaagggtattttcttccccaataaacgtagcttctgtctaccttccactggcagcaaaatgattttctgttctctngcatatactgaggggatctgcacagtgcagaaaggaagatgtccgagaatccaagtgagggctggttcagtgttaaatgtctagggtagaagaaaaaccatcctccattatggctggcatgtggcagtcatccttaa

SEQ ID NO: 432372 - DNA, 875 bp, Homo Sapiens
gtatggatccttgcaatagcacatgtaatgttggatactcaatgatcactttgtgcctcaaattgtctaggagacttttataaggatctagttcataatatcttactaaattttgctgcatatattcaatcttcattaaaatctgaaccccagtctgagagcgaatgtaggctttcaacctttgacgaattacaggatcagacttttcaggatcaatgtaaggttttaggatttcattaatagttttatcatctggtactcttttttctatgtactcagcttgactttgaggaaactggagcttcacatgccaacaaaactgttgttttttcttatcaaaaaaggttgaattctccttcctcttggtgaatccattgggtagaagttttaagttaataccttgcctccgggcacgatttttcataaagtacatatatttattgcttattggtctcttcaaaaaagcatctctagaaatatggtccgctgttcttgccacatcttccaaaaatcgataatcacttaggagattcatttcagtaaactgttgtattgaaatgtatgcagttttatctcgaactccattacatgtcagttctgctttgtgtttctttacacagggcaaactgcaggaatatcgcatacaacgtggacatctgtactttgcttcttctgtaccacaagtctcacaccttgacatggccagtttccgcttgcagcccaccgggtgatttatcggaggctcttctttcacctttgtatcatccacgatttctttcttcaggaaatccttctcttcttttacacactctccatgcatcaattcctcttttatgcattgaccaacaaacttctcctcctgttttatctccaag

SEQ ID NO: 432373 - DNA, 997 bp, Homo Sapiens
  misc_feature (378)..(426): n is a, c, g, or t
  misc_feature (940)..(940): n is a, c, g, or t
  misc_feature (962)..(962): n is a, c, g, or t
  misc_feature (981)..(981): n is a, c, g, or t
tgttattggtacttttgaaatatttgtatgcatttgttacctttaaacatttggaagaagcacaaaaaaatagatttagttaacccagggaaacatcaatttttttagtagttccaattttatatcacagttttattttcttatgaaatcaaaaaatgcattgatactcattaatgcaaattcattatttaacatcaatatcagagtaatcttcaaggtctgaaatgagaaacatactgactttttaaaattttaacagtgtacttcttaggctttcattaccagctctgaagaactttttggaataattccatattccatagtgtgtggtttatgagttgtgggtttcatcactaacccagtaaccataagaaaagnnnnnnnnnnnnnnnnnnnnnnnnnnnnnnnnnnnnnnnnnnnnnnnnnttcgtaggccagtagcaatgttgtgttcacagtctaatttccaaaagaccatcaataaaaaagagagcatgtttaaattgaaatggaacttagagaacttgagcttacttacgtacttcaatgccaccggtaacttaggttttaccaccaaatgctgttaacattaaatcattttgaaaatcttggatgaaaggtgctatgtaaatggaaatacaaaggattcttactaacatacaaaaataatgcacaacagaaatatctaaaaccttttccgtagactttgaaacatctctctctgtcataactccctgggattcaagtagcacattggtaataggtatcagagcagtctagagacaattgcatgtcaaaaaatgtacattcatttttagggtgggataaaagtaaacataggaaattatgttatgggctaaatacagttagtggggtaacttaggtttattattttggctagccatcttattttgcaccacttggggccacttccccgggnccatttgcttggaaaggctggnattttatgggggttggtgntgttggccccctgtgg

SEQ ID NO: 432374 - DNA, 1499 bp, Homo Sapiens
ttaaaaagagtaaagaagtcggccagcagctccaagatgatttgatgaaggtcctaaacgagctctactcgcatcagtgctcagagcaaactaaaggaggcggagaagcaggaggagaagcaaattggtaaatcggtaaagcaggaggaccggcagaccccacgctcccctgactccacggccaacgttcgcattgaggagaaacatgtccggaggagctcagtgaagaagattgagaagatgaaggagaagcgtcaagccaagtacacggagaataagctgaaggccatcaaagcccggaatgagtacttgctggctttggaggcaaccaatgcatctgtcttcaagtactacatccatgacctatctgaccttattgatcagtgttgtgacttaggctaccatgcaagtctgaaccgggctctacgcaccttcctctctgctgagttaaacctggaacagtcgaagcatgagggtctggatgccatcgagaatgcagtagaaaacctggatgccaccagtgacaagcagcgcctcatggagatgtacaacaacgtcttctgcccccctatgaagtttgagtttcagccccacatgggggatatggcttcccagctctgtgcccagcagcctgtccagagtgagctggtacagagatgccaacaactgcagtctcgcttatccactctacagattgaaaacgaagaggtaaagaagacaatggaggccaccctgcaaaccatccaggacattgtgactgtcgaggactttgatgtgtctgactgcttccagtacagcaactccatggagtccgtcaagtccacggtctctgaaaccttcatgagcaagcccagcattgctaagaggagagccaaccagcaagagacagagcagttttatttcacaaaaatgaaagagtacctggagggcaggaacctcatcaccaagttacaagccaagcatgaccttctgcagaaaaccctgggagaaagtcagcggacagattgcagtctagccaggcgcagctcaactgtgaggaaacaggactccagccaggcaattcctctggtggtggaaagctgtatccggtttatcagcagacacggactacagcatgaaggaattttccgggtgtcaggttcccaggtggaagtgaatgacatcaaaaatgcctttgagagaggagaggaccccctggctggggaccagaacgaccatgacatggattccatagctggtgtcctgaagctttacttccgggggctggaacaccctctcttccccaaggacatctttcatgacctgatggcctgcgtcacaatggacaacctgcaggagagagctctgcacatccggaaagtcctcctagtccttgcccaaaaccactctgattatcatgagatacctctttggccttcctcaatcattttatcacagttcagtgaagagaacttgatggacccctacaacctctgcatctgcttcggggcctccttatt

SEQ ID NO: 432375 - DNA, 999 bp, Homo Sapiens
  misc_feature (48)..(56): n is a, c, g, or t
  misc_feature (149)..(171): n is a, c, g, or t
aaaaaacaaaaatataggggtgttttttaggaaaaattgggagggggnnnnnnnnnaaggactaaaaagggggaaagttccccctttcaagaattcccctggtcccgaggaaggaaactttttcagggaaaagccttctaagttagttnnnnnnnnnnnnnnnnnnnnnnnttttcctagttgatacctggggagcatccgtttctctttggtcggatcccttgttagacatatacaactgtttaatgtttgcacctgttaagtgtagggatggtctctgagtatgcccacattcgtatctaagatattcaatgcctgtccttcagacacttaacaaggactctgagttccaaatctcccttgagtgctgcagtgcatgctgacgctctttaaaagccatagcactcccttactgtgaaataaaactgctctgtctcttgctggttggctctcctcttagcaatgctgggcttgctcatgaaggtttcagagaccgtggacttgacggactccatggagttgctgtactggaagcagtcagacacatcaaagtcctcgacagtcacaatgtcctggatggtttgcagggtggcctccattgtcttctttacctcttcgttttcaatctttagagtggataagcgagactgcagttgttggcatctctgtaccagctcactctggacaggctgctgggcacagagctgggaagcctaacaaaagaaagcaacaccaggtcagaaagaggatacagtccctttggcagttccagagttcccattactggcaatgaaactacccatattcaaggtataaggctcgtggtttctatgttgaagcaaaacccaaagccaacttgtgtgagcctcttccaggaccaaacagtacatgaaaggaatgggtagggggatctgtttggagcctggcaggggtaggtctatgtagggtctgcagctccatggaaggctgaggaggctggagaagagtgcctgaggcagc

SEQ ID NO: 432376 - DNA, 914 bp, Homo Sapiens
  misc_feature (142)..(142): n is a, c, g, or t
  misc_feature (166)..(221): n is a, c, g, or t
  misc_feature (343)..(343): n is a, c, g, or t
  misc_feature (842)..(874): n is a, c, g, or t
aatcctggtacagggtggcataacaaaacagccatgtttacattttaaatatttacgataacttaaacatacagacacacatcatggtctttggcagaaaatgttcacagcacaaaaaatactttaaaagaaataccaaatnttaatccaaaatatattaagttgnnnnnnnnnnnnnnnnnnnnnnnnnnnnnnnnnnnnnnnnnnnnnnnnnnnnnnnngtaaacaatgcacatgaaccaaatgtatttttcagctttaaacaggggtaggggaattttttaaaacaaaattgccattgtccagcaaactgcaaatgtttaaaaaggaaaccttgaggaanccatggaaataaaaccacacataccaaacctaaaaacgataaaggaagcaaaacaaagaatcaaggagaactaaaaacggtaaagacaaaactgctaaaacccaccaatagctcctggggcctgaagtgagggactctttaagaccagaagtcaaagtcactgctgctagcaggctgccatgtgggtgtttcaccccaattccaaagcatctggtcctgctttagggcgctgggcatgggtagcttgaggagccagcctcctgggcactgttttgtgatgggggctccattcagaggactatttgactcttgtagctcattaactagttttcaactgctttgctcctcctcccaaaccctccaggtgggaatgaagacacttatgctaacaagacatctccagtttctcagagagaactggtaccgggtagggccaccgaagcccacctgggggcatgccgctctcgacgaattcgagctcggccgatttggcctgatnnnnnnnnnnnnnnnnnnnnnnnnnnnnnnnnnatgcgccgccaccgcgatagcgcgatccctatagatatcc

SEQ ID NO: 432377 - DNA, 2159 bp, Homo Sapiens
  misc_feature (203)..(258): n is a, c, g, or t
  misc_feature (2123)..(2123): n is a, c, g, or t
  misc_feature (2129)..(2129): n is a, c, g, or t
  misc_feature (2131)..(2131): n is a, c, g, or t
aattaaaatactgttatacccagtggaatgcggcagcaatcctggtacagggtggcataacaaaacagccatgtttacattttaaatatttacgataacttaaacatacagacacacatcatggtctttggcagaaaatgttcacagcacaaaaaatactttaaaagaaataccaaatattaatccaaaatatattaagttgnnnnnnnnnnnnnnnnnnnnnnnnnnnnnnnnnnnnnnnnnnnnnnnnnnnnnnnngtaaacaatgcacatgaaccaaatgtatttttcagctttaaacaggggtaggggaattttttaaaaaaaattgcaattgtccagcaaatgcaaatgtttaaaaaggaaacttgaggaaccatggaaataaaacaacacataccaaacctaaaaacgataaaggaagaaaacaaagaatcaaggagaactaaaaacggtaaagacaaaactgctaaaacccaccaatagctcctggggctgaagtgagggactctttaagaccagaagtcaaagtcactgctgctagcaggctgccatgtgggtgtttcaccccaattccaaagcatctggtcctgctttagggcgctgggcatgggtagcttgaggagccagcctcctgggcactgttttgtgatgggggctccattcagaggactatttgactcttgtagctcattaactagttttcaactgctttgctcctctcccaaaccctccaggtgggaatgaagacacttatgctaacaagacatctccagtttctcagagagaactggtaccgggtagggccaccgaaagcccacctgggggcatggcagatgtctgttcacggtggctcatttcatctggctcagggtttatgaccaaactgacaggatgttccagggacaggagctgtggagccacttcaagaggctggtggtgggggtcccgtgggcatttatagggctcaagatagaggaaaaggcagccgagatcctgggaatcgagcagctttaacatccacgggccaggaacttgaggaggaggcataactgggaggccagtcagaagtttcagaaactgacagtaggaagaggggagcacagcccatggagacacatcggaacctgcaggcctcagtcttctgttccacaagaaagggaattatatacaaactgcgcactgtctcccagtccacttaaatggcccctcacccacagcaagtgagaaggtgaggctgtgtcttctccaagactaacacccttaatagtccccaaaaaattcaagtcttagtatcccaagaaggcagtgaggaactgaagagcagatgacgttggctggaaccaaacttagccagagaacaatatggctgacttgattagtgaaccagtccacctggtgtccacgggcagccgtccttggaaattagttccccaaaccaacacagccactccctccctgcctgactgacaactggcagggcagagggagctcagctcctttctgagctgtcagttgctaccccagtagcaggccttgggcaagaagtcaaggctgaatcctcattctccataaggcccggaggaatgtgggctaagaagcagagtcttctgggggtgccggtgctctcacagctctcctctcccctggggtcctcctcctgagctcctgggaccagatggtcaatgggaatgagtgtctggctggggaaagggacggagcagcggttgacggggctgctgaaatggctgagagtggcacagggcagaggaggggagagaatggctcagagtcctgaagcaccacctccttcagatcagtatctccaccatgtctgacaagtcctggactctggatgtagctacagagtccagagaggctgctctctggctactgctgcaccccagaaggctgtcaggctccggtggcaggcaggtggaggtgctgtctggggggccgtcagtctgggtgctcccatctctgctcccgtgtttggcatgggcagcagggggagctgtgaccactggctcctctgtgggtgctctgtctgctgtagtcagccgagcaggggcgtctgctgtttgtcgctcactagaagagagcccttgccagccctgggtctnctgtgncncagccgcgaaaacagatggcaccgatcc

SEQ ID NO: 432378 - DNA, 957 bp, Homo Sapiens
gctttagtttgccttttattttaccaaaaataacaacaataaagtcttccctctgtttcataaaaataaattttccaaccctccccctatcccagaaatcagcccttgccacagcctagaatccatcatgcaagtcacagcactctgggaaaagctcctactaccctcgctccacagcctctggcaaagctgccaggccactctggaggcggcagaggcagaagtcccaggcccagctggctgggcccaagagctccatctgtttccccaaagtacaggcagcttctaggccattgagtggggcatgatattggatgcttggctcaggaaacaaccccagccaacccaaggggcagtgggacatgttggcctcaggttagaaattattgctcaaagcagaaacagttgtgtcctagagagggtctgttaaaccctctttccatgtgtatctctatgtagcaattgatgggccctgcggtcaggatccctggtttctccagctccatgaatgcctccctgtgaggccctggacagtttctccctcttcttctcctggcttcagtttccccgtatgtacattgagacagtaagactggatgattctcaggttccctctggctttccattctggcatcccagagtggaggctctgggagggcagaaccctgttcctgcctcagtttccccacctgtggggtcttgcgtatcggagctgggctctgggaggtacctgagttaatgagagtgctgcgtgaactatccccagtctaccctggtagcatagctgttgcctgtggacgatccaactgggctggcaatgtggtcgggtatggcctgggcaggacgcggtctctttcggactggacgattctccatgcctggcagagtccattcccccacttcatcccgtgtgccgggatggacacagccccaccttccccttcgtgtcccagcacg

SEQ ID NO: 432379 - DNA, 475 bp, Homo Sapiens
  misc_feature (187)..(243): n is a, c, g, or t
atattggagtactgctctggtgtttgttaaccattcatgcccccagagagggaccaaagttggtgaggtggggagggtgcaaataagagctgggaggtcccctctctggcgctgcttcatctgaccactgcgcctatccctgcccttggctgccctgggtccaggaggagagagacaggcagacagnnnnnnnnnnnnnnnnnnnnnnnnnnnnnnnnnnnnnnnnnnnnnnnnnnnnnnnnngagacgggcagctccatctccccaccctcggcactcctaagtccaatagtgcaaacaaagggcggggcaccaaggaaggccagagcctccccgcacactgcctctctcctccccatcacggggccccaagaggttgaggaggctggggctgagtgtgatgctctcctgcccctttctccagcccccaacatctgtgggcttttacaagctcagctgactagttctagatcgc

SEQ ID NO: 432380 - DNA, 1208 bp, Homo Sapiens
gctggtacggtccggaagttctgggatatcgtcgacccacgcgtcgcgcagccgccaggaaggccaaggtgctgcatggtggtcgacggagccgcacgccgactgggccaagtgctttcggggcaaaaaagtccttggagattatgatatcaaggtggaacaggcagaattttcagagctcaacctggtggcccatgcagatggcacctatgctgtggatatgcaggttctccggaatggcacaaaggttgtccggtccttccggccagacttcgtgctcatccggcagcatgcatttggcatggcggagaatgaggacttccgccacctgatcattggtatgcagtatgcaggcctccccagcatcaactcactggaatccatatacaacttctgtgacaagccatgggtgtttgcccagactggtcgactatctataagacactgggaggagaaaagttccctctcattgaaacagacatactaccccaaccacaaagagatgctgacactgcccacgttccctgtggtggtgaagattggccacgctcactcaggcatgggcaaggtcaaagtggaaaaccactacgacttccaggacattgccagcgtggtggctctcacccagacctatgccactgcagagcctttcattgactccaagtatgacatccgggtccagaagattggcaacaactacaaggcttacatgaggacatcgatctcagggaactggaagacgaacactggctctgcgatgctggagcagattgccatgtcagacaggtacaaactgtgggtggacacctgctctgagatgtttggcggcctggacatctgtgctgtcaaagctgtacatggcaaagatgggaaagactacatttttgaggtcatggactgtagcatgccactgattggggaacatcaggtggaggacaggcaactcatcaccgaactagtcatcagcaagatgaaccagctgctgtccaggactcctgccctgtctcctcagagacccctaacaacccagcagccacagagcggaacacttaaggatccggactcaagcaagaccccacctcagcggccaccccctcaagggggccctgggcaaccccaaggaatgcagcccccatgcaaggtgctgcctccacgccgggctcccccctggaacatcactggccaccttcctccttcttcctcctctt

SEQ ID NO: 432381 - DNA, 1700 bp, Homo Sapiens
  misc_feature (93)..(167): n is a, c, g, or t
acaattgagaaaggtaatggaattttagctcactctctttcccttccccaactaatgcgtatcatatccttggaaataggaattgtacacttnnnnnnnnnnnnnnnnnnnnnnnnnnnnnnnnnnnnnnnnnnnnnnnnnnnnnnnnnnnnnnnnnnnnnnnnnnntttcatctgtttcagaagttatctaagataagctgtaacatttgcttttcttttgcagtttgcccagctggtcgctatctataagacactgggaggagaaaagttccctctcattgaacagacatactaccccaaccacaaagagatggtaagtggctcagtggggacattagtctttctgctgttttcattttgcacttagccacctggttattgtggggctctgaaaagggcctcagcatctcaaccccaaagactccactggggttgaactatagagcttatgcggctggaataactagattttagctgacagcctcttgtcaaattctggagatagaatagggaaaaacaggagtaagggcagtttaatcaagctgagagaataacaaacttctggaccaacaatcagatctcactgcttttgagtcccagccctggctctgccacttgtcattgaacaagctgcatttcctcactgtgtgcagtttccaataagacggtcaagtgggcatatttatccctgcacaggatattctaatatggtacagacacaatttaagtgagattcattaagtaatagcttctgggaaagtgtgaagcatctactagatgtaaggcattgctcctactattattaatcccctgactctcccattcccctggcgcttccacaactgtgataaggctgggttaacactgtgccttctctgaggccatcctagtaagtcagaaggagcagagagatgggacggttggttggtaaggaggctattgccaatgtttttcccgtgcagggacctggagctcaaactcccttcttcttccctgtccccacaccctctgccccaggctggtgtgatcaattggtgatcgtgcttaacccaccaatggagactccctgcgaagcattccaagtggaacagagattatgtttgtgcccgcctccccacttccttggccaaaaggggtctccatttacaccatttctgcaaatcaagagccttctgacacattgtgcatggccctgctcaccagcagaccacatatcaaaaaacaaccttgggcattgaaaagaaccatctctgtcatctttgccagagcttccccagggagaagctctgaaactctaagctcttgtccttaataaatcctagaggccaatatcaggacttttcctttcagggcaagccaggaagccttgcagaggctgaggagccctgagggtcctttggttggggaatctcagggagcccaaggcacaatggtgagagtactcagctgaagggtacagggggctctctggggatcaaaactggctttttcctgctgtagcatctagcagggctggctgctggaaaaaaactgccttaattgccaggtatattccctacctaccgtgctttcccctcaagggcctttgtgttatttctctccggtgctctatcctgaaatttgccctcaagagaggaccacctctctgtggtgtaaaaagccaacaaagggggatttcagctctgtaagaaaaaggct

SEQ ID NO: 432382 - DNA, 1171 bp, Homo Sapiens
gggagaaacaaagttggtcacaaatcacattagctttgcccgaagtttttccccacactcttctttagcatgctattatggggaaagtgaccactcctgggagcgggggtggtcggggcggtttggtggcggggaagcggctgtaacttctacgtgaccatggtacctgttgaaaacaccgagggccccagtctgctgaaccagaaggggacagccgtggagacggagggcagcggcagccggcatcctccctgggcgagaggctgcggcatgtttaccttcctgtcatctgtcactgctgctgtcagtggcctcctggtgggttatgaacttgggatcatctctggggctcttcttcagatcaaaaccttattagccctgagctgccatgagcaggaaatggttgtgagctccctcgtcattggagccctccttgcctcactcaccggaggggtcctgatagacagatatggaagaaggacagcaatcatcttgtcatcctgcctgcttggactcggaagcttagtcttgatcctcagtttatcctacacggttcttatagtgggacgcattgccataggggtctccatctccctctcttccattgccacttgtgttttcatcgcagagattgctcctcaacacaagaagaggccttcttgtgtcactgaatgagctgatgattgtcatcggcattctttctgcctatatttcaaattacgcatttgccaatgttttccatggctggaagtacatgtttggtcttgtgattcccttgggagttttgcaagcaattgcaatgtattttcttcctccaagccctcggtttctggtgatgaaaggacaagagggagctgctagcaaggttcttggaaggttaagagcactctcagatacaactgaggaactcactgtgatcaaatcctccctgaaagatgaatatcagtacagtttttgggatctgtttccgttcaaaagacaacatgcggacccgaataattgataggactacactagtatttttttgtacaaatcactggccacccaacatattgttctatgcatcaactgttttgaagtcagttggatttcaaagcaatgaggcagctagcctccgcctccactggggttggagtcgtcaaggtcattaacaccatccctggcaatcttc

SEQ ID NO: 432383 - DNA, 1028 bp, Homo Sapiens
tatttctttgaaagctgaaattatacttctcacagtttgctaccaaaaaaaggcttaaactaaaccttgacatccacagtagcatcaggaatagaaatgtgtattttggctacagtttgcatacagtgaacacataaaatctatattgaaaactgagagaaatatgaatgtcgaggggcttggaattctaaatggaagattttagaaggaactttgctctctactgtcactatataaaaccaattatgttatgttattagatattaactctatttaagcttttcttttactaagaaattcgttatgccaaatgtattccaagagccatctccttatgatgtatttgaaccatttagagaaattcacttcattgtaccccatgacctgaggtaaagaaaataattttcaaattgcagacttccttgaaaggctcaagactgtagcatggtgatgtctagattcatactttactgtaaggacagtttcggtagttaagtggaattaaaggtctagagtgatttgtattggatggtaactaaggtctatacatctactcttttaattcttatttccttcaggaagatccttttccacaggaagctatcaaagaaaagtaaactagacaccaagtaatatcactctcataatatgctttccagctagaggggagaaaacaccaggaaagaggaaccctgggtcataaaatgacggacctgttaggaaaatgctgttgtgtgacaattggagagcctgcccaaggactgtgcaacctatctgttcctctccaccagtgtatcccaagtagtctggtatgatctgtggttccttagaatattgaggatctctttaaaacatgaaatttctgatctcaccccatattactaaagcaaaatttccaggggtagggcctgggactccagaaccattaataaaacaaaacaaaacaaagcaaaatattgatgatcaggcagatttgaaaacagtgacattgcttgatctctgaatggatggatgcccttgggtggtca

SEQ ID NO: 432384 - DNA, 1126 bp, Homo Sapiens
gaatccaacattggctgaagaattcgtcttctggcattgatgaaccagttgttgacttggagtagtgtcaaatttgtctgagcagcaatctgttttttctcatcctctgttgggtagggatgcccgatgtgctggaagagccaggaccgcatcacgttcgtggcatgctttggcaggacgcccctcttgttcttagatgaaccatcatcttgatgcaagatgctgagatcttggtttaactgtaactgaagctgggagttctggatcctaagttgtcccaggcgacaaatgtctggtgtggaccacttggccttggggagtgacgaccgtgacaggctgatacactgtgccacctgccaccgtcgccatggctacgtttccctgctgcagcgcggacgccggcaccacaaattccctgagggctgatggtgcctgtgatggcactttgaatctgctgggactgcactggtgagtacgggcttccaggctctccactcaacagagtttcactgttcatttttgttttcagacaagcaatgtatcgactgcagaaatctttgcagagttcgttaaccttttccagctcaagaagatgaatgcgcaaaacctggattgcttttaccattaaattatcggtttctggatcttcacaaaagaaaggtttcccttccttctcttgctttcttacaaaattttcgatgtctacatcaaaactggcagaagttgtgccttcagagccctgtgtagattgttcacatttttcaaacaacaaagctaataatggaaatagtggatgcctataaatggcctgcttgtccacatccatcggggtctgagactccacagggggagggctcactccttctgcatcgggttcagagcagtttggatcttgttctgtctttaactctgttactacttgcatctgttgcccatcttgatagctgtctatacttaatgtctgtgtagccatcatggttcatcagagttttataagacatcaaatcatcttgggtgaaaagcgaatggtgtctgggtgccaatcttcatcacactgacaagcggctgcagcaatcgggacccgcagtgccggcgcccgcgtccaccgtcacgccgacgctgggcc

SEQ ID NO: 432385 - DNA, 1083 bp, Homo Sapiens
  misc_feature (524)..(524): n is a, c, g, or t
  misc_feature (536)..(537): n is a, c, g, or t
  misc_feature (551)..(552): n is a, c, g, or t
  misc_feature (565)..(565): n is a, c, g, or t
  misc_feature (567)..(568): n is a, c, g, or t
tcacatttcaaaaagaacataaaactttattaagaacatcttatactgtcatcagatacagccaaagaagaacgggtaaacaaacagggaaagttcatcttcccatgtgctattgccacctcagaacagactcctgtgtggatggctggaacaacagttggcaacaaatgctctgtataaataattcattaagtaacacaatgtttcctttctatacagagaagaactgggcttacattttaagttttgatatagtgcaacaactatgaaacaagactacatccttaggagctatttcttaatagaatacaaagcagtttagtagctttatgttatttcagataatgtaatttttttaatgaaaaattcagaaaggacattctaactttcccaattagttaatttgtactgttgagttttttctctctaaagatttctcagaatcagttcagtaactatactttagaaagatgagttgctcatctacagtgataactgacaacttagttttgtgattttgcaanatcaagatgccnntgggtcatccccanncttttgggctgantnntctgaaagatttcttatagaaaaaccctgattcagagtgcatgtgataggagatcccaaaatatctgcatctggacagggaggttggctattgagcacagctgattctcagattcctggttcccctctatggtccttttacttactgtagtgatggaaggagagaaggagcgcccgagaatctgttcagattgtgactccagacagctctctgcactgtatgtggagaaaagagtgatggcatccattcaaaccatagcagccctacggcaccatgcttttctcttgaggggtcagaccaaactgcactcaaagatgcatgatctgcctcaggtgcacagtggagaaaacgctcatgatttacaatttggtattataatacccccaactaatcccatttcttgagaaaatgaagtcttccttttaggaagaatgtttgctgctaaggcttaccatgttaattatcacacggctgaaaagatgacttctaaatcagactgtattgtctgtgttcag

SEQ ID NO: 432386 - DNA, 989 bp, Homo Sapiens
tgacaagtgataatacgctattttcataaataaactgctaatatccagtatttgtcaaaaggaggcaactgttgtctctcacaatctaatatatccactttccaatggtgtctgtaaatagtaacaaattccgaaccataagttatagaaattagtcacaagagtgcaaaaagtccctggagaaaagtagtccacctaacaattaccaatataaggaaacactttacaaagtttccattactatgaagatgatttcctctttgttcaaattttgcacaaatgaagaatttttctttactgcaggaaacaaactgtaagtaacagtgcatttttaggcataaataagtatttatgtctgattccagtatggtcaggttaatacataaatactttagaaacacagaagttcacattagtgaaaaaatccaagtttctcacgtaaccattcttcagttaggtcttcggtatttcttatttcaaataccttggttagttcagctgtctggactagcttattcttacttccagcatacatcatctgttgttcaggcttacatccaacaggactggagaaaataaagcacagaggatatgaaactcttccatcatcatgttgatatttataactatacacaatgaagcgaggttgtcgttcaggtagttcatctttaagttcatctggtgaaatgccctcaagctcctcatccagtaccaccaggcgtttatccttgtcaatcttcattataatagcagcgttgttcgtttctttgcgaaaacgaaactttctcagcttttccactaaatcttcggcaacatcacaaacaaccaaagactcactcattttccttccggccgtcagcggcctgtcgcctacactcgggcgcctttaagaatggcacggcggccgcctcccttcctgccccggcgcctggctccagtcgcccccacctcgctctcgacgaattcgagctcggccgatttggcctgat

SEQ ID NO: 432387 - DNA, 943 bp, Homo Sapiens
cactcactgctgctgggacacaggtggccacaggagcttgattctctcccacccttctaagaagagagtcgtaaaaacagaagaaaatccacaaagagacacgcacccacatggaaaaaaataaatgtatcttcccatattaaaaaagcaattccatctacgcgccagtaaccacccaggccccgagcacaggggcaggaagcaaagctgccccagggagagggggtgcagacatcgaggcagccacccgggacagcaggatgcctctggcccagcagagccacactgaaggaggtctaagtccaacaccacgttgtccatctccacctgcgacgactccgggaggaaatgacggggacagacccgatgaggaaggatgttcacggtcaccttcacacttcccactactatgagggcatttgtctttttcctgaaaatatcaccttctctgaggatttcctgtatttattaagttacaagttggcaggcacagcttgagcaacatagaaaagtaatcttcttgagttatacaatcatttaaattccaaagcactcacaaaattgagcaaacaaagccactatttgcatatttgggaaaggaaacatattgctaatggaagccacaggactggtcaaaaataaatgttttgtattaagtagtaaaataaatggagaattctaccccaaagcctccacctcagtgaagacctgcgggttattgcagctgcaagggaagctacagcacagtcgtctcagaataaacagcagcctggaaagcagatgtattcgcaggtatcgagggctcctccgaccccaaatagcctctgctctccaggacagttgagagctactcacaaggaaggggtgcacagtagggccaccctctcgagttccataaaagggagaggtggctgggtgggtcacctcttcctttctgagacag

SEQ ID NO: 432388 - DNA, 1003 bp, Homo Sapiens
  misc_feature (12)..(12): n is a, c, g, or t
  misc_feature (14)..(14): n is a, c, g, or t
  misc_feature (27)..(28): n is a, c, g, or t
  misc_feature (30)..(30): n is a, c, g, or t
  misc_feature (32)..(32): n is a, c, g, or t
  misc_feature (37)..(38): n is a, c, g, or t
  misc_feature (53)..(53): n is a, c, g, or t
  misc_feature (67)..(67): n is a, c, g, or t
  misc_feature (73)..(73): n is a, c, g, or t
  misc_feature (95)..(95): n is a, c, g, or t
  misc_feature (190)..(190): n is a, c, g, or t
  misc_feature (195)..(217): n is a, c, g, or t
  misc_feature (257)..(257): n is a, c, g, or t
  misc_feature (523)..(531): n is a, c, g, or t
tagattatgaananaaggattttattnnananttaannttatcgaactacttnggtctatataggcnaatganggcaataaaattgtaacgctcnaaataaggccagacataagtagctagagaaatgaaatttatttgttgaaatcaatttgtggggtactttcatacatttaaatttactcagttttnaaatnnnnnnnnnnnnnnnnnnnnnnntttctgtgaggagtgtttctcctagtgatgggcattcttnttttttgttttaaatacaaattttgctctggtacaaaagttgcaaagcacacactccagcaaattaagtaattatttgtgatttaagataatgcaaatgagtggccgagaaactgggctgttatcatatatcagacacttatatatatatttttgtggccaaatcatgaatttaaaagaaaaatgaactccatgaaaagacttattacttgttgatcatctttatggtgattctgtaatatcccaatttttgcattattttttctnnnnnnnnntccatagcatatttaagaattcacaaaatggagtcataaacagtgtagtcactgtaatttccttcattctgatacccttattctcttcttccacaaatagcaaattcttctttgggatgcatgcagagaggaaaagtatctaccaaatgtggatgttaggtagccataaaaaatcaagtagctagcaataatttgggaaataaacaaatcatttcagcctaaaaaaggctcagaagatggcttgaaaagcaaaatacatctaacttataactttaggttgccaattcttcaggctgtgaattaaaccaggccaatttgcccctctcagttctcctgctttggggccacttcttgaaataactttcagaatagtaaaaggaggtaaaacattcatgaatttcgaaaataattagcagctaaaagaaaataaaactgttgggagaagaagtttaaataaattctaagaagtgat

SEQ ID NO: 432389 - DNA, 550 bp, Homo Sapiens
  misc_feature (398)..(414): n is a, c, g, or t
ttatcacacatagggaacagtttttgattaccttttatactaccattttttagagtcagaaagtgtactaaatctctgtgaattgtcttctttttttaaaaaattatcagtttatcactcaactttcttaagttaagaaaatggcaaaaaaaccctagtcaacaggaatataaactgcctaaaaatttttcagtttattaagtaaaagaccggggtacttattatcagcttttccatgaaagtagattgttactctaaatattggttgcagagataaatatctgtgcatgtgtatccctgggtgagcatatatacatgtgtctttgagtaagtgtgtgcatacatgtacctagtacaatccctggcacatattaaatgctcaatcaccaatatgaagnnnnnnnnnnnnnnnnnatttaaaaactgagtaaatttaaatgtatgaaagtaccccacaaattgatttcaacaaataaatttcatttctctagctactatgtctggcctattgagcgttacaatttatgccttcattgcctaaatgaaggta

SEQ ID NO: 432390 - DNA, 5235 bp, Homo Sapiens
aaattcgaaatccacatttattgatgagagatatatacacaaaagttaaaacacttagtgaaatattggattcacaggttatttccagtatataaagaatatccagttattttacacgtgaaatgttacagtaatcagtccacattgtaagaaagcttagaaagctaaaggcgaaaacaaaagacctcaactacccaaaatgtgcttcatcaacaaggcattttctagtagcatatatgagaaacaattcaaaaattagttgaagattttatctttttgcattcattagtctttaaacactatgtgctatagatgctctgtgctacgtgacttcagaccaatggggattgtgaatgtgaggaatacaattagttttatcttttgttctggacatacaagaattttcaaagagaatcctgcataaagcccagttttatttcaggaagtattccatcctaaatttgaaaggagttgaagaagccacattttcaaggaaaaattagcctgtccaccatatctcctcatatgaagcagccactgcaaattaatgtgcttcatgccccctgatgatattgtaggctttacccttcttgggaaaagagtagggcactcagggttccctatagcacatggctagttcttctctgtccttggggaggagaaaggggttacaggaactatagacctcacagcattgtatttagcgataattatacagaatgtgtgttttaggaggcaactgtaaacttgcattagttaatcccatcttcaatcattcaaaacatgcacacagaacatattaggtagagaacgtcatactccctcatatatgtgggacctgtgttcatcagttgcccctctacaaccgcataagctgtacactcactattcctgtgcttctagtgctctaagttttttacagagaactctgaagtttatagccagaactgtgctttcgtagggtttcacctgcagatgcatttgcagttagttagtcagcaatgttttttcctgtaccctgactcaaaaatccaagggagacaaggctcctcagaacctttaagtcatgagcatcatgatgagtatttggcaaccagagaggctgacctttctctaaagacatgatgctaatatgcacagagtcagactaactttttgttcctctgagcccaatccaccaagcaaaggaggactgtagatggatgttctcattctaaacctacctaagtctaggtaatcaaaagttccacagttgcattcaccatgtattaaacagacatgagatgacctttcactaagaaccaggacacacacccagcccatccctgctctgaattgtgtatttacaaaggtgctggacacacacagactttcaaacaatcatcagtacaaaggattcacagataaattcttcactcatatatattcccaagccacactgagaaagaggagaaatgattcacgactagttatctaagaaggaaaaagaaatgtttgcaaaacaccgatcaacatgtctactgcatttagatgaatagccaaaaataacatatacatttaaattacaatacatctatacaccatttcactgaaattacacctagatacctacattatagctacacaaagtgcataggcactgttcttcatgcgtgaaccaagtgtcagtgtgtatacacaagagcttcatgctttgacagctagctgtacttgaaaatagatacaattattgccagtcgagggtacatctaatctgtttgtttaatgaagagcaggttcaaatacataccaatacactttctatgtaactgactactttttaaaccacggtaaaaatactactcctaccaccatctcagaaagtatttggtggaaggaagacacctcgtctctgcagtggctatcgttttacctttcggggaagttatatagtctgttattcacctgaggacagaaactacctgggctgcttttaaacaatttcagtatgattctaagcccccactcccagcccccagtgatacagtattgcctcatagttggttctaaaaattttttgtaaactttctttaaaaatatgtgctcaattcacataacaatgtgacatttaccactaatttgcttggcaagaattaactgcaacaaatctgtcctgatttcatctctagcactcatcctcagtactctgctactcaaagttttcctaagccaatttccacataaacctttaggaatgtatgaaacattctgatctaggaataatcctactattaataccttgtctttgatagtcttagagaaaagcaaaatgagaatgctcagctggaaaaacaaggcctggtgtcagacagtttacacaatcagcaccattccttgagttagaaagatgaattatttagatgtatatcctcaccagctaagggatttaagcaattccttgttcttaatggttcattttgtttattgcatcactaaagactgggttcttaaatttgtcaaatgtgactatatagtcaagaaacaattggtagctctaaattgctgaagaaacttcttgtgctctaattagttataattctacatgtgtggttacatagaaaatactgtaagaaaatatgtctgcaaaattacagatactaaatagattaattcagtctacactgagttctttataatttctgaagaatagttacaaacctataacattattaaaggctaaattaatattaaacatataacatccaggtctataaatacattttctaatgctctttataaataatagcaaacaagctaggggatttgtttaaaaaaatgtaagactgggctggaggaatttgtggatttagggtgcaatactgatcagagggcaatatattgtccctggtaacacagactcttaccaggaagccaaaatatatctgctggcaacaagatcaagttagattcacagtttgccagctctttcctcaagctgtagaaaacaaatagaaaaacaatatacaaaatcctcaaaaaagtagtttttttatatacaaatctctatagtgaccagataatctgatctgtgttgtgcaacatggagatgcaatgctgaggttttccaggagaaagagaaagggagggagttaaggtgatttgtagaaaaatctagatgccaaaggatgactttctataagggaagtaactcttatggagtattaaaccaccagacagccaactttctgatcatttatctcagggaattcgctccatgggtccatgggggagaaacctcagagatgtgctggaccaacttccttggctagtgtgtgtatttgccccctagcaaaggcaacaggctgtttccaggcaggcaaaatggttgccatgagaagaaacagtgccccagaaggagtgaggctccgactgcaacatctccatctccagtgaggatgatgacaaggctaacagtcagttgtcaggtttcaacactcacccaaggattgggggtgtctccagagaaactgaggacctgttgctacccattctctaggtcaacttctgactctacaaagcagtgaggtctgttccaatagctggttttattctcagcacaaaagggccctgtgtaaaaaccagaaggattttgtaaaatatcaaaatgaatatttggccctggaggttggaaagtgaagcaaggctggacatagaaaaaaactgatcagtagttattcaggatattatttaggataaatgaaataggaacttaggggcatctcttacttttctacaggttcttatctgggtcaatgaagaaattgtgtttatcttgctgcccttgcatcaggttttttgcactaatggaaaaaagccggccgaaaaacaaaacccaatcctttcagtcctagctttacatcttgcccttgcaaacctgaagagctgaagtcttctctgacgggcaaggagttcacaggacaacaaataccaacacttctctatttagcagaagtttggacaaacagcagaggtgtccaccatgggccattgcagcagtgccagaaagtgcaagaggttgtttaaagatcatggctggtgacatggaccttgtagaccatgcattgtatcccatccaccctacaaactaatcaggccttgaagagggcaatgatagtcagaaaattccattcttgtaagttagagcatctcttcctgcaatgtgatacccatgataaaaacaacccaagaggaaaatgtgaaaatgaatttgcgggcttacttgtgaatgggtgtgcatgtctacatactggcggagaagaaaagatatttacaaacagttgccgtgattgtgcaagtgttgcaccaaatttcaaaagagtgatcaaggttattcaccaaaggctctcaaattcccatactgggtgggcaattagaattgttggagaaaattgtgtgttttgggtattcagagagggctctgttgctacagcagcaatgatgcaacagcttgagtgaggctgtaggttcatccagtcctctcatgttgactctggaaacatttttccgtgagccaaatcactacttctattaggaaggtgagtttaagtcaagggaacttttattaaaaaacttttattggtgtctcaaaatatcaaactgtgaatgaacatggccaactttgaagcttgttgtaaaacatcaaatgaatagaggcttgaatttaatttctcccaaaggagatgagaaaaatctaaattgattattcattattgtgggctacttcaacttaaaatgtaaataggtcacattttatagtaggaagcctcttaagaaggaaacaaagcagagatcataatacattgggctcatagggctggaaggggattttagtcatttaatccaaccccttcacttttcatatgggagaaaatgaggcttggacacaaaatgacttatgtaagtcatacagctaaaaatgggcagagtctaaatcaaatgttccctctaccaaaccatgttgtttcttatcatctctatgtcattgcctgaattagctgtgttatgctacaaagttggatactatttaatcaagattgctctgttatctatgtttaaaaccaagcctctacactaacttgtgtgatggcttactaagctggctgtttagcaaagcagcaacaaataagtggaatgataggataaggaagaggtggagtagaaaatttggttttcttttagggaaaatcataagaaaat

SEQ ID NO: 432391 - DNA, 450 bp, Homo Sapiens
  misc_feature (265)..(359): n is a, c, g, or t
aaaactcagcttcttcagagagataaaattgggggaggagtccagggccacataccaagctttgggacatggtgcctcatgctctctgggattgcagaccatccaggtctgtcttcgcccctgttagtgcacatatatccactcacatgtcttccctcaggctatcgggcagggggacttccgcagggggttttatggataggcttcaagagggtctgtgagcccccagaaattgtgtgtgagactgagtatgtgttcttttttnnnnnnnnnnnnnnnnnnnnnnnnnnnnnnnnnnnnnnnnnnnnnnnnnnnnnnnnnnnnnnnnnnnnnnnnnnnnnnnnnnnnnnnnnnnnnnngatagtaaatttgagtttgaccttaatccatctgaagcagtcatatctggaagatattaagggggggaggatatagatcatgttagagata

SEQ ID NO: 432392 - DNA, 281 bp, Homo Sapiens
  misc_feature (96)..(187): n is a, c, g, or t
tatctctaacattaccagggggtttatggataggcttcaagagggtctgtgagcccccagaaattgtgtgtgagactgagtatgtgttcttttttnnnnnnnnnnnnnnnnnnnnnnnnnnnnnnnnnnnnnnnnnnnnnnnnnnnnnnnnnnnnnnnnnnnnnnnnnnnnnnnnnnnnnnnnnnnnagggatagtaaatttgagtttgaccttaatccatctgaagcagtcatatctggaagatattaagggagggaggatatagataatgttagagata

SEQ ID NO: 432393 - DNA, 530 bp, Homo Sapiens
ggtacacaaattcagaagtctttattttgaaaaaaattcttccaacagtatttcacaatgaacaagaacttaaccaaatttatctatcatactaaagtatttcagaaatgaatattgaaaacagcctgtaagttttcatccaatatttaaaaccacctcctgaactaaaattggtcttcaaaaatcatggcgtattaacattttccaaacatgccctgctgactagaaggtcctgttattctttcttttgaacttcccagtaagtttccttgttccctattcctagggtttaaagtggcaaaggtactttttatgagctattaggacaagtattcttcattgaaaataaacttttgcagaaaacaaatcctgtgcttgactaacagcaaagacatgttaagaaatttctgagctccaaaccatgaggaatcagaatcacaactttcagagtaataactcacattttttctaaagcataggaagctaattttgtataatgaacaaatgtggttgtgccaaaataggttttg

SEQ ID NO: 432394 - DNA, 1049 bp, Homo Sapiens
  misc_feature (492)..(513): n is a, c, g, or t
  misc_feature (649)..(770): n is a, c, g, or t
  misc_feature (805)..(901): n is a, c, g, or t
  misc_feature (914)..(941): n is a, c, g, or t
ttagctcatcagctattgttagtgttagtgtattttatgtgtggtccaagacaattcttcttccaatgtggcccagggaagccaaaagattggacacccctgtctagggcaaggattccaaaagtatgttctgtataaaacttgcatagagattccaggaacacttgttcaaatgcaaattcctggtccagatctcaaagatcagtctctgcacgtttggacatttttaacaagcaaccctcatgatttttatgatccttaagtttgacaattctagggccttggtcttcaaaatgacacatgcatacccttgagaacacaccaacattttcccatgggggtaaggatacatgcatagctctatggaaaccaacttaaagatgtccaatttccatatgtgttgtcctaaaatatgtgctctgatgaggcctcttcagatctaccatttctctttacctcccttttcacaacagccatactccctatcctccnnnnnnnnnnnnnnnnnnnnnncaggctgccttcaaccatccagtatatcaaggcgtattgccttggtgtaagcagctccagaggcactaaacaaaaggatcaaaaaaaatctaaatgactcctaagacgcaaagagggtagggggcagtagctcagnnnnnnnnnnnnnnnnnnnnnnnnnnnnnnnnnnnnnnnnnnnnnnnnnnnnnnnnnnnnnnnnnnnnnnnnnnnnnnnnnnnnnnnnnnnnnnnnnnnnnnnnnnnnnnnnnnnnnnnnnncatggtggtggcacgcgcctatagacccagctacnnnnnnnnnnnnnnnnnnnnnnnnnnnnnnnnnnnnnnnnnnnnnnnnnnnnnnnnnnnnnnnnnnnnnnnnnnnnnnnnnnnnnnnnnnnnnnnnnagaccctgtctcnnnnnnnnnnnnnnnnnnnnnnnnnnnntgatgcttctgaaggctgtgccagagaagtatgtttgtgtgtttatctgaattaaaaccaagacatgttctgacggaagttaagtctgatttggctaattaaattaag

SEQ ID NO: 432395 - DNA, 847 bp, Homo Sapiens
  misc_feature (540)..(560): n is a, c, g, or t
cagcaacaaaattcaagaacatgggcatgaggtagggtttggcactcaaagctagcataaaggaacagtcatgaaatgacattttgacatgcagactttgagcaaaactagggcataaacactgatccatgggagattctgccagccctctgctctggtttaagaagcatttctcttgatggttaccaggaataagcaagactcagctctgtagttgcagatgagtgcagtaggaggtcaagtgctctggagagtcccctggtttcccaaagcccctcttagccccacctgaacctgaagtttgagtaaaaatgagctggatgacgagtgaagattagaaaggagggccagggtgagagtgtatatagtgtggtttggcaataaaggaagaggtataggcagacatgagtcaagagaaaacatagtagtttatagcggggtgtccaatcttttggcttccctgggccacattggaagaagaattgccttaggccacacataaaatacactaacactaatgatagctgatgagctaagggnnnnnnnnnnnnnnnnnnnnntctctttatgttttaagaaagtttacgaatttatattgggccgtgggttggtcaagcttgttctaaagctttgtttacctaggaccatgtggagaaactggagtttagatttggaattgccattttctgtacttagccctaattattgtaccctttgggtctcccccaacccctttttaaaaaataaggtcctttccttctgctttataattagaggaggagttaatttctgaaaagcagttatttttattgggtttattgatcccgagaattccggaccggtcaca

SEQ ID NO: 432396 - DNA, 763 bp, Homo Sapiens
cactatgaatgcaggaacactatatttattaggtcaataattcatttttagcaatacaagtacagaatatatcacaatgctggttacaaacatacttagtatggtttaatagttacaaataacggtgggcactacaagttggtgagaatgatatgaaaggtcatcctgacacaatgaagaaccgtcttcaaaaatctatttaatgaccttagatatttctatagaaattattgtggcactattagtggggattttcacgtaaagattgttagtgttttgtttttaactgttccattaagaactttttattttgagcctattaaactaaaatcccctgttgcttaataaagtataaaaatagtactgacctggtaatatttaataaaacgtagcattcattcacatcataaaagtagaactgaaaagttttagttaccatggcaaaatatcttcccataaaaggaatatacagaaatgagtaatgttacacaaacggtacctgcaatggttatttagtgatccaacacttaactgtgcaccacaaaccaagttttctagatatctatatataggatatatttttaatcttaaattttactcttgaaaaacatgtgcacttcaacaaactcactaaggccactcatgctatagatacctaggattgcaattaaagaatagtattatgcaataaatcctaaagcacactccttctgattatcaacagggtaaaaccagttttctgcctaaaacattcctgctcgtg

SEQ ID NO: 432397 - DNA, 1193 bp, Homo Sapiens
gaaagttcttcctattggttccagtaggtgcgacgagaatgcctgtccatgcaccattggcagacttgatttagtttccaaagtgtgcagggctggggcattcataggcacagctggagcagctggctgagattcaaaagcctgccaggctaaaggatttcctttgggttcactgatactgtttaatggattacaggtaaagtctttaatctgctgtctctgagttataaatcagctcattctgctcctggagtctctgccctagctcttctatccttttcttatagaaaaacattgcttgcatttagatcatctatcattgaggttcgaagtttctctatatgtgacaggagccgacccttctctttcttgtgttcttgatgaatagcttgaactcgagctgtccatttgctttcctgactatcaagaagctgcatgacattatggaaatcctggggatatggagaacggtcttctttaaactcgtgtgcatcttttaatgtgcctatgttggacttgatctgcatattggacttctggatttctgacagttgatattctaatgctgaattcttcgaagttaattctttaaattccttcataaacatctccttgactttttccatttcatcaactagtttctccttttcttcttctttccacctgtcaaataacttcaaaaagtcttcctcttttgttttctgcatttcatattccttggagaatctgactgcactggcatggtgtgcagcctctagctcagacctggtgagctgcagctcttccttcaatacgacgatctcactccggagcttctcaatctgtgcatttttctgatactctgttgcaacagaaaatcgtgttaaaacaccatctcttaccaaatgtacctggaaacttatggggtacagtcctgttgataacacgaaggaaactgtcctcttacttgggatacgattacttgtttcatgccacatgagccaatttttgctctttagtttatttggagcccagtgtattttggggcactgaattattttttagcagattctttcagccgctgtgttgaggttggattatcctacatagatacatgagagccctcttcagggagcaataatggtaacaaggaataatacagggtgctttgaccagtggcactctgggcttttcttagaggtgcctgtctcaat

SEQ ID NO: 432398 - DNA, 2365 bp, Homo Sapiens
  misc_feature (1157)..(1172): n is a, c, g, or t
tggcatttccagtaatagtttattgatttccaaatgcacaggggcaccaagtccgaacatcctgggatagcagtaaatctctcttacaaaataatttacagtatgaaaatgatatactgaaacattaacccaaacgtgtaattcccttgaaagattcagtgttcccttgtttaatgtaaagggtggaaggggaagattcctaaggagggaatgtgactgtgcacaggaaaataggcagaggacaatggattcattggttctccccattcatgcagtgtggcctgtcactgtagaaagactggtcaggtttaaccctcattaagtattaatctgctgtcccctcaaagtcatatcaagcccagtatgggctccgtggctttttttgcaccaatgtatccataagtgtctccacttattttcatttttctgctctggccctcgttctgctgtttctggtatgttctcagttccaaattatactatcttatcttaccaggcaggcctccagaatcaagaactgcctgagtcttatggtttctggaatgggacagggtagggggcttcataagcactgctggataaaggcaataataatgagactgaagtctcccatatgggccttctttttctcttagagctgggctggactcaatccataatgagatttttttaaacataaaaatctgatgtgatcagcacacagtaaacatgcagttaattttcttattgagaagcatgtattgcacagccattatatgaatgtggaatttcaggaatggcaagagaatattttctacttggggagagaggacttcctagaccctgccacaactacaaggtcatgaattctgcatttgtgcccttaggtctaactggagtagttagactctcaggtcaccaaaatggctgggcatccaagtttcccatcttattagacatcctggaggagggctggagtgcaatttccttcagggctgtcactttgactcagtgccttaggagctaatgacctttgctagggaattgctcttcctgtaagcaagtacctaagccccaactatatggtgacacttgtaattagggctgacagaaatctttgaagtagtacgcaagataatgaaggggctgctttgagttttccttagctctcaaatatnnnnnnnnnnnnnnnngacatgtatgtatgtatatacatatacacacatatcacacttgtcctttatatataggtacacactcccccgacacacacactaaaaccaggaatcagtaagagagtccagattcactggactttgaattgccacatcctcacagagtacactggcggctaagtttactaaaatatgaagatttccttttctacaggagtgaagctgcagacattttcaaataaagttgagtagagagcagaacacccttcacttttactactgctgcaaagttctatatctttgaaggccaagaaacaccttatttatggaagatggcatgaaaaaggaaatgttctcctaactcctgggggtgggctcaagtcagcaatgtgtacttaaagcatctgctaaaggggagaaataaggctacctcaatgccatttctgagccctaactataactgtgaaatgtcattttgaagaagattcataaattgggatggtcagcacacagtgggaaaacctgaagtctttttatccttctgtttttaggtggaccatggtgtgtggtacaaagtgcctgtccacagaattagggggagctgcgttcaagatttggcttgagtatttcctagctgtataacttgaagcaaatgactcttccactccccatctgttttattatctaagagacagctcagggcctggctcatagttgttccttaatacaagttatttcccttcttgggctgtcagagccgagactccaagcacttcttgggactgtcctggatttaatgatatcaaatcaaagtccctctcagcatccagaaattcaacatttgaaagatagccagaaattgctatgagtatccgactgattctggaaacattcattacctgcctcccttggtgacttctctttaggggtttcagcaaaccctgccacctgcacccaggcaagacccaattctgagctctctaacttttactgacctggcaggagggaagcctcatcatgctggggcttaaggccaagcagcatgctccagctctaggggaaggtagtgccactgcaggaagcatcctagttcttacattgataaatgctgccggcaggaacttagaagcctgggcaaaagctgctgcactgtgtttaatgcttccctggttaaagttttatcaggtacttgaagacagcaggagtctata

SEQ ID NO: 432399 - DNA, 504 bp, Homo Sapiens
  misc_feature (193)..(208): n is a, c, g, or t
  misc_feature (406)..(406): n is a, c, g, or t
  misc_feature (461)..(461): n is a, c, g, or t
  misc_feature (474)..(474): n is a, c, g, or t
  misc_feature (487)..(487): n is a, c, g, or t
agaaaaggaaatcttcatattttagtaaacttagccgccagtgtactctgtgaggatgtggcaattcaaagtccagtgaatctggactctcttactgattcctggttttagtgtgtgtgtcgggggagtgtgtacctatatataaaggacaagtgtgatatgtgtgtatatgtatatacatacatacatgtcnnnnnnnnnnnnnnnnatatttgagagctaaggaaaactcaaagcagccccttcattatcttgcgtactacttcaaagatttctgtcagccctaattacaagtgtcaccatatagttgggggcttagggtactttgcttacagggaaggagccatttccctaggcaaaggtcattaggcttcctagggcacttgagtccaagtgacagccctgnagggaattggcactccagccctcctccgggggtgtcttattaggttgggggaacntggggtgccccgnccttttggggggncccggggggtttaactt

SEQ ID NO: 432400 - DNA, 760 bp, Homo Sapiens
ctgtcgccgtcacttgcgcgtttggcattatccattgtcaccgcggaggaacgagcgctcgagatatcatcagtgcccgcaaatctccgcgccaaggcgctgagctactcctttccgaggtgcgcctctggtcctccgtccctggtgcccagcagcggcgaggcggcatctccgctcccgccgccgtgtccaccgagccctgggatcagggtggcagttctcaacgatgggcaggagggacctcggcggcgacccctaaaacaataccatgccccgggatccccgctgctgccgcgccagcgtcttccctttccacctccctgaccctgtcggattcggatgagcccattgcaaggagaagacgcagccgtcaggtaaaaggggctgcgttgccaggtgaagtttccagtaaccggccgagctgctgctacgctggcaccacgctgtctcttcgggggattttctcttcgaaagagctgggggtggtcatcttaagtggggtgctctaggcttggtctttcacctggagagaaaataggcagcttagctctctctcgactttggggacatctgtctgctggtcgaatccacctcctctacggagcatcatgactgagttctgggtcaaaacgcaaattttcttgcctggtagatgcatcgatgctaaattggggttctcagtgcccctaaccttgtcagagttcagtctcctacttccctagattgaatctcttaactttcaccagtaacaaccctctcc

SEQ ID NO: 432401 - DNA, 1236 bp, Homo Sapiens
ccggtggtgagcggggatggcggttgtagcggcggctgccggctggctactcaggctcagggcggcaggggctgaggggcactggcgtcggcttcctggcgcggggctggcgcggggctttttgcaccccgccgcgactgtcgaggatgcggcccagaggcggcaggtggctcattttactttccagccagatccggagccccgggagtacgggcaaactcagaaaatgaatcttttccatgtctgtaacgaagtgccgttggataactcattggccgaaagatcctactgcagtaatatttggtgaagatgttgcctttggtggagtctttagatgcactgttggcttgcgagacaaatatggaaaagatagagtttttaataccccattgtgtgaacaaggaatgttggatttggaatcggaattgcggtcactggagctactgccattgcggaaattcagtttgcagattatattttccctgcatttgatcagattgttaatgaagctgccaagtatcgctatcgctctggggatctttttaactgtggaagcctcactatccggtccccttggggctgtgttggtcatggggctctctatcattctcagagtcctgaagcattttttgcccattgcccaggaatcaaggtggttatacccagaagccctttccaggccaaaggacttcttttgtcatgcatagaggataaaaatccttgtatattttttgaacctaaaatactttacagggcagcagcggaagaagtccctatagaaccatacaacatcccactgtcccaggccgaagtcatacaggaagggagtgatgttactctagttgcctggggcactcaggttcatgtgatccgagaggtagcttccatggcaaaagaaaagcttggagtgtcttgtgaagtcattgatctgaggactataataccttgggatgtggacacaatttgtaagtctgtgatcaaaacagggcgactgctaatcagtcacgaggctcccttgacaggcggctttgcatcggaaatcagctctacagttcaggaggaatgtttcttgaacctagaggctcctatatcaagagtatgtgggtatgacacaccatttccttacatttttgaaccattctacatcccagacaaatggaagtgttatgatgcccttcggtgatcctattgacccttatgggaggtattcctcttgaggctactatgtgcccctgc

SEQ ID NO: 432402 - DNA, 1171 bp, Homo Sapiens
  misc_feature (72)..(104): n is a, c, g, or t
  misc_feature (157)..(175): n is a, c, g, or t
  misc_feature (205)..(209): n is a, c, g, or t
  misc_feature (211)..(213): n is a, c, g, or t
  misc_feature (215)..(216): n is a, c, g, or t
  misc_feature (219)..(220): n is a, c, g, or t
  misc_feature (222)..(224): n is a, c, g, or t
  misc_feature (226)..(227): n is a, c, g, or t
  misc_feature (229)..(240): n is a, c, g, or t
  misc_feature (490)..(510): n is a, c, g, or t
aattcccaagccccttttttcaaggcccccaggttttttctatggaaaaacaggtttatgggccctgttttnnnnnnnnnnnnnnnnnnnnnnnnnnnnnnnnnaaaacaaatggtgtaaaaaaatttttttggaggggcgggggccggcccacaannnnnnnnnnnnnnnnnnngttgttgtttgttccgggggttgtgtttannnnngnnntnntgnngnnntnngnnnnnnnnnnnnttccaaagacaatttgattttactttattgaatactatcacacacataatatttacagatgtaattaaacagaatttataagattaccatgtggaatatttttcaaagttaatctgaaactcttaatgaaaatcatcaatacatgtgtgttacaatacaataatagaatgtagaacttttcagccaatatcatgatggttcatttaataaaaactctcttttcaaaaagaggtaagtcggaggaaatatnnnnnnnnnnnnnnnnnnnnnatttccatatctagtcataatcttccagcttttctatatggtcaatagttgatcatttttcgaagggcatcataacacttccatttgtctgggatgtagaatggttcaaaaatgtgaggaaatggtgtgtcataaccacatactcttgatataggagcctctaggttcaagaaacattcctcctgaactgtagagctgatttccgatgcaaagccgcctgtcaagggagcctcgtgactgattagcagtcgccctgttttgatcacagacttacaaattgtgtccacatcccaaggtattatagtcctcagatcaatgacttcacaagacactccaagcttttcttttgccatggaagctacctctcggatcacatgaacctgagtgccccaggcaactagagtaacatcactcccttcctgtatgacttcggcctgggacagtgggatgttgtatggttctatagggacttcttccgctgctgccctgtaaagtattttaggttcaaaaaatatacaaggatttttatcctctatgcatgacaaaagaagtcctttggcctggaaagggcttctgggtataaccaccttgattcctgggcaatgggcaaaaaatgcttcaggactctgagaatgatagagaatcccgggaattccggacc

SEQ ID NO: 432403 - DNA, 1930 bp, Homo Sapiens
  misc_feature (44)..(44): n is a, c, g, or t
  misc_feature (59)..(59): n is a, c, g, or t
  misc_feature (755)..(755): n is a, c, g, or t
  misc_feature (1862)..(1862): n is a, c, g, or t
tgcaaacatgcaattgaagaaactggatagatacactcataaancccccacccctcccnaccccacccctgctcccattgtgtgtgtgaaattctcagtctgtggcatgtttgacctgtggcaggactcgctgctgccaggtgagtcaccgcctgtcctgcagtggagcatgcacagctcgcagcctctttgcacgatttcatccattttaaatgcttgaccctcttgcttggagttctttttgcctcagaacctctccttcaggagcacttctagctgacttctgcacaagctagtgaggacctgccagaattgttgcctgagcgtgccaggctgcagggcaggcagtaaaaggcccccacataccctgcagttttctctgtccaggatagcaggtaaaaaggaatccccagagcagacgcaatggtaggagcctgcacaggatgtgtgtgtatggacattctgaaggtttgctgtaggatatctgtctgtctgtcattttcccttcctaccccaaccctgagccagaggcatctgacagccctttcccagagggcaccacgcaagggcagagctgggcggcatccacagccagagaggcagaggcaagagcagagccaggctgtgcccgagggaccccagctcttgactgcacctgtttcatgcctctcctctgtggctaggaggctcaaaggactgtgagccaggagatctgggctggagctagggggtcaatggatgctcaggaagagctnggcctttggcacttgtggtgagaacagttgacagtggtcatctggaactgttcatataaacagtggcttcaagctaagtttcttgtgaagtttctcaatagcaaatcttacagaaggtcctgtgtgaccctctctgcatctgtccccaggacctatgctccctgctcacccccttctccaaagcccaagcgtcccgctgctcatcagcttttttaccattgagccaggagtgcggcaggcagtacctgcctgacccttcaaggcctgaccttcgtccagagtgctctggtttgcaccatgcatttctcaggggtccgcatttctcatgcttttctataagatctacacaccccttcagagagggctcctcgctcacctctggtagctatggatgggacaggaagctgccaacctttgtgttggacttaacacccttgcctttctgggacttggcctcaccccacccatggaatacctgcctcatcccaaagatcaggtatgggctgaatgcagccatctgagcaagggctgagggaagccatcatctaacacctctggccacccaggaccaggtctgtgtggggatgtgccttggagaccaaggcaatagtcctttccactacaggccaggggatgggacaagaagtagggaacaggcagggaaatgttaggaggtcagcctccagcaggcctagtctcaggctctaaagtactgacttttcagcaaatttcctttctggccaagccctctgagtttgaaattctgacatctgccactcctcatcccccactgtacccacaggatacatcatcgcccctctgtgaaggtggctggagcaggcctctggtccatggactgtccttcctggcccttgcatggatgcagttgtgactctggggacaatgcagccagaagctgagggaccagcacttggtgccttggaaagtagagagcaacagacacatctccaaatgggcaaggagtctctagcatgcagcccaggccttctccataccccctctcccagcatcatgagcaagggcattgcctcctctctctgctcacttcagggcccagtgcactcacttacagtgacagccctcccntacattctttggcagagcatgtggtctgagggccaacatgaagaacagcaatgttggcactatgcctg

SEQ ID NO: 432404 - DNA, 757 bp, Homo Sapiens
  misc_feature (253)..(270): n is a, c, g, or t
acagagcatttttccattttaataagattaacagacctactcaaggtaattttattctgtttatttaaataaggataagactacttaaaagactttttacatacaaaaatgtacaaggttaaacttttctgtactgaattacaaaacctgcacaagcatgtaataaaagagcacacttaaaaacattctgaccattatttagcctctaaaaattactgaagttcaacagtagtaaatagaggaagctcttacnnnnnnnnnnnnnnnnnngatttaatctactggcagttttacttaatgtaagtatttaaaaggtcacattgctattgaatgagtctctagatcaattttagaattgtctctcaaaacttaagtcaaccaaaatattatttcaaatagtaattccaattctgaagaattttaataccagcaaatatattatggcctcatagtagtaactgaaccaactttccaaagtgcctggtagctgtccagatgaattaggctgctttggaaaactgtactgtctctacagccattgagaagccattcagtgccctggtagggacctgagactttccagaattcacacagcagtctatgatccctcaaatgtaagaggacagggggtcagcctatcttcacctctcagtgaatgtggagggccaagcaatatgacttgcaaacctaagctagaagcttgggatctacagtaaggaggaaggagaattaaagtagagaaagaaaatgtataagg

SEQ ID NO: 432405 - DNA, 490 bp, Homo Sapiens
gtttaaagaaatatattcaaaatcatttgtgaataaacttgatcatccatctcaatattgtttgacatataaaataattataagtgtaaaaaattacaatttagtgccaacagtagtgagcatgaaatgaaactattcaaaagagattatggcctgtgcatattaaaaaattcaaaacagtgaatgcagactggaggagtaacttttgacaaataagatgaatatgcttcattattaaactcaatataaaaggcaaatcatcagaatatttttaaatgttgtttgaaaaatgttttcccaaggaaagtttattatttgctgctgtttcaagaaaattacttttactaaatttttttgtgtgaatttaaacagctaaatagggatcagtaactttatctctatccttaatgaacatttgttttattggtggctggaaatatttctattgtatttctgtgtatatttttaataaaattattttttggcctct

SEQ ID NO: 432406 - DNA, 971 bp, Homo Sapiens
ggctggtacggccggaattccgggatatcgtcgacccacgcgttcggacccacgcgtccggtcaaacaatattgagatggatgatcaagtttattcacaaatgattttgtgaatatatttctttaaacaaactgtttctcaagaatttccattttccttcaaaaaaaatttacacaataccatatagctcacacatacagtgcagagcaagaatgtacatattcttaagtactcacgtatgagaagagagtgaaatgggacaaaatatcagtaccagtataacaaaagttagtaatttagaaaggaggaacatgaagtaatatttttattccactttttcttctgcctttgtttttatgaagaactctggtttgtagatacaacgataggccaagagctgaggaagaactccatatgctatgtttaatgctaaaaaaaggatttttgcttcttcagggactctgtagacataaagcagttctagcatgaagagatgcaccaatgtgagaaaactgagcctgttgcatttaaaaaaacatttatgtttgtaagcatgaaacgtgttccagtgtggatgcatgatgagtctctgaatggttcattcaggctacgtttcttgtgccctcaaaaccagtctcacctgcaggcaaaataccttcaaacaatccagagtctttaatgtcagagtctttcattaaatttagtccttgattaaatttagggccattcttgatatgactgttcaaaaaagtagatattatttagtgtagttttatcatgccagttgtgttttttaaccatcaagtgccccttaccgaacattagtggctcaatctaatagaaaaatctgaataaatctcaaatttttctctgatttgcgttctggagatcctacattcagactcagttgtggttcacaattgtgttccataaaatgaagaagcgcgattttaaaacaatttttagctaaa

SEQ ID NO: 432407 - DNA, 748 bp, Homo Sapiens
ggggcctaggtactgatagatttcatttgtgatggagcacttgggcatgagcaaactaactgaatacctctttgtctgctgcacacatattatggtctatatcatcaaaaagcaaagcaaatgatctgcacccaaactgagaaacctggtccaatttacgtttcaatgtggatacttccttggggttagaaaaagtgatatccaatccaggtgagatcgcatagatgaactctatctcatattctcgtgcagcagagatgagagtcataagttgctcagcttcctccactgaatacatctctcgccaaaacatcctatgtttgtagtcatcttttggggcatacaagtatgtatttaattcccatttctggagccttctaaagagttcttttctctgttccataacccaaggtcttccataaaatccttccaccacaccgcagaggaaccgccgagcccctcctgcagccccggccaccgccgctccccccagccccggcggggttgtcttctccgggtgccggagctgccggcggctccagcgatgcccccgcagaggcggcagggttggagctgagctcgctctcccgctcctccaacgtcgcttgactctccttctgcaccatcctcctgcccccggccgctgccacctctgcgggtcctcctcgacctctgtccgttggggcaccggcccggagccctggagagggcttcagctccaagtgtgcgcccctccggctccttcccc

SEQ ID NO: 432408 - DNA, 506 bp, Homo Sapiens
atctttcctgtgtcttttatttttcctctgagcatatcagttattgctttttaaaaagtttttcttttgctaactgtattgtgaatgtttcaatttcttctgagttattattcctgattttcccattttcctttgtcttacattaaaggaatatctcaaattccctgggatacttagcaatctatatgttaaagtgaggctttaaaagtagagagtgaggtttgtgttactaagtagagtttacttgttcacaggtcttagaaataattgggtagagacctgtaatgttttcacacaagcttctaaatgtccatatctagaaattaattctatatccctcattcccatatacacacctcttccttgaaataggtatctattatgctcctgccttgagagcctaaatcttggaatatagcatcctgggtaaagaaggagttgatggcttctctacttggtatctagatttttcatcaattatcttgttttcatgtcccaagcgtccg

SEQ ID NO: 432409 - DNA, 2401 bp, Homo Sapiens
  misc_feature (110)..(110): n is a, c, g, or t
  misc_feature (136)..(137): n is a, c, g, or t
  misc_feature (157)..(168): n is a, c, g, or t
  misc_feature (198)..(198): n is a, c, g, or t
  misc_feature (231)..(231): n is a, c, g, or t
  misc_feature (242)..(242): n is a, c, g, or t
  misc_feature (265)..(265): n is a, c, g, or t
  misc_feature (267)..(275): n is a, c, g, or t
  misc_feature (409)..(409): n is a, c, g, or t
  misc_feature (452)..(452): n is a, c, g, or t
  misc_feature (479)..(479): n is a, c, g, or t
  misc_feature (494)..(503): n is a, c, g, or t
  misc_feature (517)..(517): n is a, c, g, or t
  misc_feature (563)..(563): n is a, c, g, or t
  misc_feature (586)..(586): n is a, c, g, or t
  misc_feature (649)..(649): n is a, c, g, or t
  misc_feature (670)..(670): n is a, c, g, or t
  misc_feature (991)..(1010): n is a, c, g, or t
  misc_feature (1041)..(1116): n is a, c, g, or t
  misc_feature (1139)..(1248): n is a, c, g, or t
  misc_feature (1376)..(1391): n is a, c, g, or t
  misc_feature (1479)..(1496): n is a, c, g, or t
  misc_feature (2352)..(2352): n is a, c, g, or t
  misc_feature (2384)..(2384): n is a, c, g, or t
tcgaatcagggtctatggcggtaagccggtggaaaaatgggttacgaggttgggggcggaagcaaatgtaccggccggtgcgcgtgggtggtatcgatttagcgccgtanagatgacggccgcgtatgaagtcggnngtgatccatattgggcggcnnnnnnnnnnnntggtatgaggagagagtacaaaagacagtncacgcgggagcaggtcggcaattacattaccgngcggaaatcgncggggtaggggcggggcaggagncnnnnnnnnncttcgccgttatgcgggttctgggtagtagtatcgacgcactagtgtcggtagtgttggaggtcctcaattatagaacatatatgaggaaggagagggcgggtgggagagtattaagtagtagatgaaaagggnatgtgatgagagtcgtgggcccggctggagggcggggagacanaaatagtacaagcgtaagcgggagggnggaggtggcgagacnnnnnnnnnngagcataaggaggncgggcggatagggcggaacaaaagatatatcatacagcgagcgtgngtgcggtgtgggtgacggatatnaacacgtttaataataatgtgagcgggttgtgtgagggcataacgcgcgcggtgagtgggganaggcagacagtagactacaangagagagcggtgaatggaacggagcagatataatagaaaaagagatggcgggagcgacgtggaagagtcagacagcggatcacacaggtctgtagatatcggcgtgcgtgagccgaatagacagcgcagatacatgctagtgagagacagggtgggcaggagtggtgtgaatagagagaagagaggggggcgcgtatgttaatagcacgctatcgtgacatgtgtggaagagtgtgagggtcggcaagaggataatgtgtatcgagcgtatgtggaatagagagggggcggagattaggggcgggggtatacatagtggtnnnnnnnnnnnnnnnnnnnntaattgagtggtggatagatgagggggggcnnnnnnnnnnnnnnnnnnnnnnnnnnnnnnnnnnnnnnnnnnnnnnnnnnnnnnnnnnnnnnnnnnnnnnnnnnnnctcgagaacaacggagatgaacnnnnnnnnnnnnnnnnnnnnnnnnnnnnnnnnnnnnnnnnnnnnnnnnnnnnnnnnnnnnnnnnnnnnnnnnnnnnnnnnnnnnnnnnnnnnnnnnnnnnnnnnnnnnnncagcgaatcggagggggcctacatcacgactctttcccgatcctagggggatgagcggttgacgatatgggaagagcgcggggtgagacaaaggaagggggaagaggggggcggtaagagcaagacannnnnnnnnnnnnnnnaggtaaagacgaggcagggatggagtgtggggaggctagcttcaaaatgtggaataatgtgggtgggtatataaaaaaaatataaaannnnnnnnnnnnnnnnnntggttctttcactaattatttttaataaaacaaaagatcaaaaatcagcatcaggagatgacacaatacagttgagactatggaaagcaactatttccaagctgggcatcataaaatacatcatcaagaactgtgaacagatttgctaaacaaaggaaagcctcatccctttaaccctccacagccgacatcgggagtctcttggggtagaacatgaagtgaaaaagaagtggatggccagaatgctgtacattgtcccccagtgacctgccacagagactatttttaaagacgcatttatctcagcaggagtgacggcatttaagaagtagcccggtactcaggctagacaatcctgcaaaagtctgcagagcttggctgcaccctttacaaagacctgagtgatggatgagatgggaattgcccttgattggctaggtggctggtttaaagagccataaagataatgcagaagtgagatcttggaaaccaaatggagttagcccccaaattattgcagccaccccagcactccaatgttaatccaattttaaatttacaagatccatcttaactagaaatgcaggctctaactgtcctgcaagttttttaagtggtagctgctcaatgaattgtattatcccattaaagaataatgttttagatgtggtaatcccagactcacacaattctcttttatgaacctagccactgtattcatatggaaagtaaattacagctatattacatcgagcctttcattattgacagagcaataaatgttagtactcctataaaacactgagagaaagattatgcacagtggttatatatttggaggatcagggtgtccagncagaggcaatatgtctctctcctgtacagaanaaagggaggggtgtaaa

SEQ ID NO: 432410 - DNA, 269 bp, Homo Sapiens
cttacagttatttttattatttagttttaatgaactaacacaacgtaggagggaacgctgggttggggtttacttgttacatgacctcaggatgatgtactacaaacttcacagataggcacacctctttcactaattatttttaataaaacaaaagatcaaaaatcagcatcaggggatgacacaatacagttgagactatggaaagcaactatttccaagctgggcatcataaaatacatcatcaagaactgtgaacagatttgcta

SEQ ID NO: 432411 - DNA, 1930 bp, Homo Sapiens
tttccagggaaggattggacccccccaaatttcccgtttttgagagatttttattgggaaaaaggcccaaatttattttccccaaaagctttggggccctttcatttaaaaaatttccctttcattccaaaggaaaccttgtggaaccaggattttggtttaaaaccaaaagggaaaaagcccttcattccccttttaaacccttcccaacaagccggaacatccggggagttcttctttggggttaggaaccatggaagtgaaaaaggaaagtggatgggccaggaattgttgtactttgttcccccaggtggccctgcccacagagaactattttttaaaggacggcatttttctcagcaggagtgacggcatttaaagaagtaagcccggtattcaggttagacaatcctgcaaaagtctgcagagcttggctgccaccctttacaaagacttgagtggtggatgagatgggaattgcccttgattggctaggtggctggtttaaagagccataaagataatgcagaagtgagatcttggaaaccaaatggagttagcccccaaattattgcagccaccccagcacgtccaatgttaatccaattttaaatttacaagatccatcttaactagaaatgcaggctctaactgtcctgcaagttttttaagtggtagctgctcaatgaattgtattatcccattaaagaataatgttttagatgtggtaatcccagactcacacaattctcttttatgaacctagccactgtattcatatggaaagtaaattacagctatattacatcgagcctttcattattgacagagcaataaatgttagtactcctataaaacactgagagaaagattaatacacagtggtatatatatttggaggaatcagggtgtccagtcagagtcaatatgtcttctctccctgtacagaaaaaaagggaggggtgtaaataaaaaggtgagggttgacagaaggagagtaaacattttaaccattaaaactgatctcaaatcgacggtggaaaggtgtcataagatttacccctaccaacccgttaattgaggaaaattacagaaagatgtcccgaagctatcataggacctaagcatttctccaatactgagaaaacactcgatatagccattattattctgttttaaatttttggagatctctgccagggaaaatgtggcacttgcccattgagagcactgcaaatcaactcaaacaactagttcttgcaggctgatgttcatccggcctgggcaggtgcaagttcacctccgctggcagttgtgcgtagctcactgtcccctccattgtcagacagttctgatgtttttcctcttccatgcagtcaagacttcagtctattgctgaccttcatcagagaggtttgtcctaagctcctcccccaacccacacccctgtttatgttcaaagctggacttcaggaaacagttctcttaagcactgaagaaaaacatatttggcatccactacactccctaactcccactccaatggactctgtttcaaaagctctggacacatagcatagatttctcatgagacctgaccatcctaacaaatatggattgcatttgcattttaccactagaacaaacaaaaagtatttacatttggaagaactgtggctacacttccccatccttccctcagtccccatgttgtttgattcttgcctgcaaagagtaccagaggccactgaacacatctcacattgtttttgggtagtggcaaagtaaaatgccagcactgaagatggtgagcttgagtttcacaagtcatctgtgtaagggagagaagtaactactcactacacctgcacaaagaaaagtgcctggattaagcggactgcacaatgtgagtttgttaattcatcctccc

SEQ ID NO: 432412 - DNA, 681 bp, Homo Sapiens
gactctaggatccccgaacagagctatggaagcaactatttccaactgggcatcataaaatacatcatcaagaactgtgaacagatttgctaaacaaaggaaagcctcatccctttaaccctccacagccgacatcgggagtctcttggggtagaacatgaagtgaaaaagaagtggatggccagaatgctgtacattgtcccccagtgacctgccacagagactatttttaaagacgcatttatctcagcaggagtgacggcatttaagaagtagcccggtactcaggctagacaatcctgcaaaagtctgcagagcttggctgcaccctttacaaagacctgagtgatggatgagatgggaattgcccttgattggctaggtggctggtttaaagagccataaagataatgcagaagtgagatcttggaaaccaaatggagttagcccccaaattattgcagccaccccagcactccaatgttaatccaattttaaatttacaagatccatcttaactagaaatgcaggctctaactgtcctgcaagttttttaagtggtagctgctcaatgaattgtattatcccattaaagaataatgttttagatgtggtaatcccagactcacacattctcttttatgaacctagcctctgtataacggtggcgagctcgattga

SEQ ID NO: 432413 - DNA, 1546 bp, Homo Sapiens
  misc_feature (1314)..(1344): n is a, c, g, or t
  misc_feature (1357)..(1369): n is a, c, g, or t
tttttctattttaaatcatgtttattatttaagtttttatcacagtggagattaacttatgtttaatcatccaatcagtgcctactgtcaacttaatcaaattccaaaaaagtaaaatcaactcattcatacactctaagtcctcttactatcccaccattcattgcctgtgtcttttttcccttttaacggcaacatcgtaataagattgtgaaaaggtataactaataagtttctatgtatgtataataccatttcttcaagtattcagagagcagtacatttgtctgcattgtacattagaaaactacttgtgacattatttctaagtgcaggagagcagctcctggtgggagagtaatgaagttgtttgtcatagtgtatgccaaggatttacagcactctagaattttcacaactcttccatgttagtgaatgacattaggtaaatgttgtatttgcctactctcagctatcagatgtgggatttcaaactagaaacaaataaagcatacactcaaccaacaagggtagtgcaagtgctaagtaaacagaatgacatggaataaattcatagttgccaactagtgaatgcttcagcagggagaccctgattttatgatgtctgtgacttgcatccctgttctcaaatgaatactgtcactgctccatgtcagctacaatgaccggaaaaggctgctggggtgagggctgagtgaatgaggaagatgacaggaactcattttcacaaacaagtggttcaatttatctgtcacatctgtatatagtgtaaagtctgatttgttaacaagatctcaaccctctccagaaaaagcaggtaccaatatggaaaactgcaaatgttccatttaaaagaattaaatgttggcacctatgtaatatagattgtatggcccagacaataaaagggatcagaagatggttttttaaaagttaaactttggaaatgtaacacctgaacattcaaaaattacattatagaaaagccatcagttacataaacattcaacaatacaatggtgctgtttaaaaatgccctagaagcaataatcttcagtactttgaataaagtcagaatttcattgctttgtcttaattatgcatttaacatattgttactcattaaaatgaaatagaaaaaactataaaattcttccagaggaaaattattggtagtgggaaaacaaaagtaaaacgtgaaaaccaatgtatacatttacttaattacatgtttttcccccagaagtggccatactctatcagaaaagagaaacaatacaaacaacaacaacnnnnnnnnnnnnnnnnnnnnnnnnnnnnnnnctgtgccatttcnnnnnnnnnnnnncttcctctgcatccagttttggggggaagtgttctttcatggtagtgttctgagttcacacacattaaatgctagaaaagaaacatctggatcctgactatccttttactttattcttgagtgtgttgtaccctcaacaaatgtaacaagcagccagtaaaaattctcttaattagg

SEQ ID NO: 432414 - DNA, 892 bp, Homo Sapiens
tgggtgctgccatagcatcttggtttgctacttcttaggctggtcacgacacacacacacatacagagaagtacacaggctgtaccgggctggctgttgcaaatgtacatgaattacacgggttgaagttgtttggcagctagttaacatatgccacccaatgacgggacacaatctggtcacacgctgcctctcctgcctgttgctgttctttacaaaggtccgtgtgtcgggctggcaaagtggcatcctgctggcatctctgtggtggccccggaatggtggagtgcccaggtcagcatctactctgggtcccattctcaactgctctggccttgacattagagcttccggttccctgctggctcttttgcacactggatccatgccagtccaggccccctccaggcacacacctgaggcagactgagtagcacaatggacgctgttctgatgtgaactgtgcccagacacaggatggggggaagcgggagatgtgaccattacaccaccacacaagctcgattttttacagatgggtcctctgggactgttatcttggtggtgcccgagagacacggtggccatgtggagcccttcagggcacagttgctgggagaggacagacggtaggggacctgtgcccatgtgcctagctctgagagcagagctatgaaggtggatggggtaacgtgtccgacatggtgctagaattgttgagaagttacgactacacacagtttggggaggcatgccccttttccaaggtaaattcacacggggtggtttaaattactgcttgaaaacaaatggtacactatcttttattgtaggggaggaccccttccttggtgtgttgggaatataaatgtgaaaaaagacttcttgggtt

SEQ ID NO: 432415 - DNA, 2152 bp, Homo Sapiens
  misc_feature (131)..(142): n is a, c, g, or t
gtgtatcataagtaggacaaaactggttataaataaaccacaatatgatgtccacgatgaaaaaatgcacaaaaaagacttttttaaaacgtcgaaacatcagagtggtctctagttggaggaataattgnnnnnnnnnnnnaagacaaacttcttcatactttttgtacttttaaaatgatttactatgtacatggattacttccataatcaagaaaaaaagtaaaaacttttaaaatgctgtgaacgtggtttccatttttattttctctgatgggtgactgcacatcagcatcttgagttatgctaactacttaggctggtcacgacacacacacacatacagagaagtcacacaggctgtaccgggctggctgttgcaaatgtacatgaattacacgggttgaagttgtttggcagctagttaacatatgccacccaatgacgggacacaatctggtcacacgctgcctctcctgcctgttgctgttctttacaaaggtccgtgtgtcgggctggcaaagtggcatcctgctggcatctctgtggtggccccggaatggtggagtgcccaggtcagcatctactctgggtcccattctcaactgctctggccttgacatcagagcttccggttccctgctggctcttctgcacactggatccatgccagtccaggccccctccaggcacacacctgaggcagactgagagcacaatggacgctgtcctgatgtgaactgtgcccagacacaggatggggggaagcgggagatgtgaccacgacaccacacacaagctcgatctttacagatgggccctctgggactgctatatgggtggtgcccgagagacacgggggccatgtggagccctccagggcacagttgctgggagaggacagacgggaggggacctgtgcccatgtgcctagctctgagagcagagctaggagggtggatggggaacgtgtccgacatggtgctagattgttgagaagtcacgactacacacagctggggagcatgcccctctcccagttcattcacacggtgggttagatacagctagagagaagtggagatatgcttttttgagggaggacctttcctggtgtttggataaacagtgagacagactcctgggttcggcatgctctggggaggaccatgcgacggtgagagactccctactgctacactctgtacagggtggccaggcccgcctgccgtgcccatggcctctggtgacagtcacgggcttgccttcaaccccttctgccttggagagctcttgggccccggtgaaatgggggctataaagacaagagggtgggggggggtccccatggcccagggcaccccacgtgggggctacatgatgttgcactgggtggccccgcaacaatccttgatcagtgccagccccgtcttggccaccgtgggcttgctaggtgggggctctgctttcttctctgcccgggagctggctggagatttggttactttgtctagaggttttaacttgattctcaggaaatcagccatttccttgtcttcttcttgctcccttaaccgctcgacctccgcatcgtccaccaggaagtctctcttctgcaccagtttgtggatcttctggattagctcatcctctctctgcttctgcagtttggttttttctttttctgggatggcgaccaagttctgcagctcctgcttcaagtccatgatgtccttgcagagctggatgtcatccatcatgaacctgagctcagactcccggcggaccaagacttcccggagacgctgaatttttgccatctccagctcaatctcctctggcatcatggttgtctccgccatggagatgatgtccagctgatttctccccagtctctccgttttccaagccgtctcctccaccgccccatagcgcctcagaggcttctcggcttccagatgggtggacaaagattgctttaattccatcgctgatccccgtggccaggtcgacgggtctccctttactccattcccgttgcgggctgcagggagggaggtggctccagccagcagcgttttaacgggccgggcgcccgtgacgctgctccctctcctccgccgccgcatcccgggaattccggaccggtacc

SEQ ID NO: 432416 - DNA, 912 bp, Homo Sapiens
  misc_feature (246)..(254): n is a, c, g, or t
gccctggggggttttgggataaaaccaggtgaggaacagactttcctgggtttcgggcatgcttctgggggaggaaccatgcgacgggtgagagactcccctactgctacactctgtacagggtggccaggccccgcctgccgtgcccatggcctctggtgacagtcacgggcttgccttcaaccccttctgccttggagagctcttgggccccggtgaaatgggggctataaagacaagagggtnnnnnnnnntccccatggcccagggcaccccacgtgggggctacatgatgttgcactgggtggccccgcaacaatccttgatcagtgccagccccgtcttggccaccgtgggcttgctaggtgggggctctgctttcttctctgcccgggagctggctggagatttggttactttgtctagaggttttaacttgattctcaggaaatcagccatttccttgtcttcttcttgctcccttaaccgctcgacctccgcatcgtccaccaggaagtctctcttctgcaccagtttgtggatcttctggattagctcatcctctctctgcttctgcagtttggttttttctttttctgggatggcgaccaagttctgcagctcctgcttcaagtccatgatgtccttgcagagctggatgtcatccatcatgaacctgagctcagactcccggcggaccaagacttcccggagacgctgaatttttgccatctccagctcaatctcctctggcatcatggttgtctccgccatggagatgatgtccagctgatttctccccagtctctccgttttccaagccgtctcctccaccgccccatagcgcctcagaggcttctcggcttccagatgggggacaaagatgatcccgagaatccggaccggtccagc

SEQ ID NO: 432417 - DNA, 567 bp, Homo Sapiens
  misc_feature (540)..(540): n is a, c, g, or t
  misc_feature (555)..(555): n is a, c, g, or t
ttttttttgtacttttaaaatgatttactatgtacatggattacttccataatcaagaaaaaaagtaaaaacttttaaaatgctgtgaacgtggtttccatttttattttctctgatgggtgactgcacatcagcatcttgagttatgctaactacttaggctggtcacgacacacacacacatacagagaagtcacacaggctgtaccgggctggctgttgcaaatgtacatgaattacacgggttgaagttgtttgggcagctagttaacatatgccacccaatgacgggacacaatctggtcacacgctgcctctcctgcctgttgctgttctttacaaaggtccgtgtgtcgggctgggcaaagtgggcatcctgctgggcatctctgtgggtgggccccgggaatgggtgggagtgcccaggggtcagcatcttactctgggggtccccatttcttcaacttgcttctgggcctttggacattcagaggctttccggtttccctgctgggctttttctggcacattgggatcccntgccagtccaggggncccttccagggt

SEQ ID NO: 432418 - DNA, 1626 bp, Homo Sapiens
gagcgcacctacgtggacgaggtcaacagcgagctggtcaacatctacaccttcaaccatactgtgacccgcaacaggacagagggcgtgcgtgtgtctgtgaacgtcctgaacaagcagaagggggcgccgttgctgtttgtggtccgccagaaggaggctgtggtgtccttccaggtttcagcgcaagtacctctaccaaaaagtggaacgaaccctgtgtcagccccccaccaagaatgagtcggagattcagttcttctacgtggatgtgtccaccctgtcaccagtcaacaccacataccagctccgggtcagccgcatggacgattttgtgctcaggactggggagcagttcagcttcaataccacagcagcacagccccagtacttcaagtatgagttccctgaaggcgtggactcggtaattgtcaaggtgacctccaacaaggccttcccctgctcagtcatctccattcaggatgtgctgtgtcctgtctatgacctggacaacaacgtagccttcatcggcatgtaccagacgatgaccaagaaggcggccatcaccgtacagcgcaaagacttccccagcaacagcttttatgtggtggtggtggtgaagaccgaagaccaagcctgcgggggctccctgcctttctaccccttcgcagaagatgaaccggtcgatcaagggcaccgccagaaaactctgttagtgctggtgtctcaagcagtcacgtctgaggcatacgtcagtgggaatgctcttttgcctgggtatatttcttctccttttacctgctgaccgtcctcctggcctgctgggagaactggaggcagaagaagaagaccctgctggtggccattgaccgagcctgcccagaaagcggtcaccctcgagtcctggctgattcttttcctggcagttccccttatgagggttacaactatggctcctttgagaatgtttctggatctaccgatggtctggttgacagcgctggcactggggacttctcttacggttaccagggccgctcctttgaacctgtaggtactcggccccgagtggactccatgagctctgtggaggaggatgactacgacacattgaccgacatcgattccgacaagaatgtcattcgcaccaagcaatacctctatgtggctgacctggcacggaaggacaagcgtgttctgcggaaaaagtaccagatctacttctggaacattgccaccattgctgtcttctatgcccttcctgtggtgcagctggtgatcacctaccagacggtggtgaatgtcacagggaatcaggacatctgctactacaacttcctctgcgcccacccactgggcaatctcagcgccttcaacaacatcctcagcaacctggggtacatcctgctggggctgcttttcctgctcatcatcctgcaacgggagatcaaccacaaccgggccctgctgcgcaatgacctctgtgccctggaatgtgggatccccaaacactttgggcttttctacgccatgggcacagccctgatgatggaggggctgctcagtgcttgctatcatgtgtgccccaactataccaatttccagtttgacacatcgttcatgtac

SEQ ID NO: 432419 - DNA, 514 bp, Homo Sapiens
ccccaaacctccaaatcccctgccagatggtgggaaggaatgagtaagaaccggaggggcctacagaagatggccacaatccatcctatattgaaatcctatagatatggatatagtaggatagtgtccccagaaagaaaagacgtgaacccctaatggaattagataataattaacatggatgggggcatatgtacattgtcattaagaaaataatcacagataataggacacttggatgtagctcttgctgtgcactatgttataagtcaagttgtgtcttcagggtgtttattgtgaggctcaatttttgcccaaatgaaacttacgttttgttgtgtgtggcagaggatgttgttgggaatgatgatgaggagagaagcagaggaaagggaagggtcaaggtagcaggagcagaccccatttttggacacaccaatgaatgattatcctacacgtggtagaaccctgcccaccccgcccccaaccccactcattcaagctggaaataaaa

SEQ ID NO: 432420 - DNA, 700 bp, Homo Sapiens
ctgtacatctgtgattattttcttaatagacaatgtacatatgcccccatccatgttaattattatctaattccattagggttcacgtcttatctttctgggacactatcctactatatccatatctatagatttcaatatagatgattgtgccatcttctgtagcccctccgctctactcattccttccaccatctgcagagatttgaagtttggggctatgcatgaaacccaacactaaattttgcaagtcaagtgaccaaaaaagggggaggcattttgaagatagaacctctattttaaaaagagaagttcaactcataaacgtgattgataggtggctgatttatttaggttttgtcaagctatctatcaaagtaatggtacagttacccatctactcaaatatctgatttatctcaccatccaattatctacccacctgtcttcctctctagcaatctatttactgtttatcaatctatcaatgtaattgtctaacactcctttctattctctccctactactcactatcaattcatccccacatgaatctctaaccatattgtatctctcccactgtattcatttatacaccatcaggcaggacattgggcatctttcaaaattatctttccaacttctgtggaaaggccaacggtcttcacagggtttaacaaaatacaaaaggcaataccc

SEQ ID NO: 432421 - DNA, 3645 bp, Homo Sapiens
ctggaagagcactccggagcggctgcccgatgctggagtccgtgcggcagcatcagcaaggtggctgagtggccgggctgctggtgggcgccggggagcctggagcgatggctgcacgctcccgccgcggggacagaggctgccatggcagattctcctcattattcgcttctgcgtgtaactgcacctatgctctgctctacaagcccattgaccgggtcactcggagcaccctagtcctacacgacctgctgaagcacacacctgtggaccaccccgactacccgctgctgcaggatgccctccgcatctcccagaacttcctgtccagcatcaacgaggacatcgacccccgccggactgcagtgacaacgcccaagggggagacgcgacagctggtgaaggacggcttccttggtggaagtgtcagagagctcccggaagctgcggcacgtcttcctctttacagatgtcctactgtgtgccaagctgaagaagacctctgcagggaagcaccagcagtatgactgtaagtggtacatccccctggccgacttggtggtttccatcccccgaggaatctgaggccagcccccaggtgcaccccttcccagaccatgagctggaggacatgaagatgaagatctctgccctcaagagtgaaatccagaaggagaaagccaacaaaggccagagccgggccatcgagcgcctgaagaagaagatgtttgagaatgagttcctgctgctgctcaactcccccacaatcccgttcaggatccacaatcggaatggaaagagttacctgttcctactggcctcggactacgagaggtcatagtggagagaagcaattcagaaactacagaagaaggatctccaggcctttgtcctgagctcagtggagctccaggtgctcacaggatcctgtttcaagcttaggactgtacacaacattcctgtcaccagcaataaagacgacgatgagtctccaggactctatggcttccttcatgtcatcgtccactctgccaagggatttaagcaatcagccagcctgtactgtaccctggaggtggattccttcggctattttgtcagcaaagccaaaaccagggtgttccgggacacagcggagcccaagtgggatgaggagtttgagatcgagctggagggctcccagtccctgaggatcctgtgctatgagaagtgctatgacaagaccaaggtcaacaaggacaacaatgagatcgtggacaagatcatgggcaaaggacagatccagctggacccacaaaccgtggagaccaagaactggcacacggacgtgattgagatgaacgggatcaaagtggaattttccatgaaattcaccagccgagatatgagcctgaagaggaccccgtccaaaaagcagaccggcgtcttcggtgtgaagatcagcgtggtgacgaagcgggagcgctccaaggtgccctacatcgtccggcagtgtgtggaggaggtggagaagaggggtatcgaggaggttggcatctacaggatatcgggcgtggccacggacatccaggcgctcaaggccgtcttcgatgccaataacaaggacatcctgctgatgctgagtgacatggacatcaacgccatcgccgggacgctcaagctgtacttccgggaactgcccgagccgctcctcacggaccgactctacccagccttcatggagggcatcgccctgtcagaccctgctgccaaggaaaactgcatgatgcacctgctccgctccctgcccgaccccaacctcatcaccttcctcttcctgctggaacacttgaaaagggttgccgagaaggagcccatcaacaaaatgtcacttcacaacctggctaccgtgtttggacccacgttcctgagaccctcagaagtggagagcaaagcactcctcacctcggctgcggacatctggtcccatgacgtcatggcgcaggtccaggtcctcctctactacctgcagcacccccccatttccttcgcagaactcaagcggaacacactgtacttctccaccgacgtgtagcccgaggcagggtggctgcgggcgggtggtggacccagcccctccagcctggggtccaactcagacttgaaagactgcaatagaaaactcccaaacccagcactccagactcgagggaagccagcttccaagaactggaatgcgtacgtcttttgtgccaccttgtacaaagccggctgcccagccccagcctcaccaccgcatcccacctcctgccctccatacctctagttgtgtctgatgctccgtgctgttcgggaattgttttatgtacacttgtcaggcagaaaaggtagtgaccggcccggcgtgggcacacagacagcccgctttgttctttcatttcctccagcactttctttccgcctgagtccagcccaaggccttttattttgcgctgtgtaactgctgccagcttctctcttggccctgctcccagatggcggtctcctggcagcctcccctcagtcttcctccacccgctcttccttcccagcctgcctgcatgcatgtgcacccttggtcttcgctccatcgccttgaaagctctgaagaggccctgggttgccgcggcagcagtggtctgtttgatgctgccgtttgccgctgccggcccctcctcagactccgcctttgggagcacacctgctttgccttgctgcctgtgcaaatgttggacaagcagacacactcacactcgtccccagcttagcacagagctggagcgcccatttctggaattttccgtttgggaatctccacttctggggtttacctgttcggcctcctgcctatcagtgaggcatctctgactgtttcttctactgcttttcagttcccttccctgctgttctatttcctttgagtgtaaagactcacaggtgacctgctatcgagatagccagagggtcaggagagaatgggggaggaggcggtcaggctgctgaggaaacaccacaggctgaacgggggaggaatgcacatgccacgctgggtgtcccgggtcgcggggaggcagctcagctcttaggagcaagttgtgggggcttttcaagaggggccaggcttcctggagggtgactgatgtggccgaagcaggtgtccaggcaggtaggctgcagccaggagctccctggcaccgcaggacctcgtggtactcttgccttagattttacacacactccacagccaagcactgccacggtcctccaggacctgggaagcaaaggcacaggcccacggtggccagccattgtggtgccgccccagcttctggatacagccttttgggtaaacactgggaactccagaagttgtggggagagtggggaatcagacagccgcctctaggggctgggttctgctggggcctccttgttggtgctgtaggcacccgccagggagcagggccccgacttgcagacgcattgcccggtactaggtaggagtgaggtgtgttcccaccgtacacttcccacacgagctggggctgccaggctcgggccatcagcctacggagagcagaattgcagctccagggcgctcgaacttattagccacgttacagctcc

SEQ ID NO: 432422 - DNA, 1712 bp, Homo Sapiens
  misc_feature (1023)..(1061): n is a, c, g, or t
tgagttttgtgcaaatgatggggctttgcattttttattaacattttcctctcacgtggtttacatcaatttataataatctacataagttgaaacagaacatagacaaaaaaatatatccttaccaacttattaaagtcagatattcatgaagggtcccatcctacctgtgtatcagcagaaactggcagccatcagccattgcccagcaagaacaggcagacctggcgtttcttagcctgactcctgctgggcacagcccaccctgctgggcacagtgactggaggttccaggctgcacagtccctggctcctgactcctgccgggcgcagtgactggaggtttcgggctgcatggtccccggctcacaggagaccctgctgggtgtttccttggtgcagtttagtccaggtctggcacctgaccctccccactctgggggtgggatttataaatatgagcctttgcatttctcagcctttgcagccttcccatagcctgttctcacgttgcctcagcgagcttggggctgtggggctccctgaggctgagacgtgaaggtgcccagtctgggccgtgactcactctgccccttcctgtccatcactttggaagcaagcaggagccttctgtgccacacaccgacactcggatgccaggcagggaccttaggaagggccaggcactgcatctttagactcaagttcaccgcctttcccagggagcaagggctccttgctaagctgctcacaggcagccgatggtcagtacttccttcctcttgggcatgtctttcctccgtgcacagagtatttactgttctgcccaaggccacaggagtaaacaggctcaaaaagggcctctcaaccgcgcacgcgctgcagcgttagggccggcaaacccttctttaagactcagccctgagcacaagcaatgggaactgagctccccagccctgagggcccggaaacgacgctctgccacacagaagagccggggagctgtaactggctataagtcgnnnnnnnnnnnnnnnnnnnnnnnnnnnnnnnnnnnnnnncgaggctggcagccgcagctcgtgtgggaagtgtacggtgggaacacacctcactccttcctagtaccgggcaatgcgtctgcaagtcgggtccctgctccctggcgggtgcctacagcaccaacaaggaggccccagcagaacccagcccctagaggcggctgtctgattccccactctccccacaacttctggagttcccagtgtttacccaaaaggctgtatccagaagctggggcggcaccacaatggctggccaccgtgggcctgtgcctttgcttcccaggtcctggaggaccgtggcagtgcttggctgtggagtgtgtgtaaaatctaaggcaagagtaccacgaggtcctgcggtgccagggagctcctggctgcagcctacctgcctggacacctgcttcggccacatcagtcaccctccaggaagcctggcccctcttgaaaagcccccacaacttgctcctaagagctgagctgcctccccgcgacccgggacacccagcgtggcatgtgcattcctcccccgttcagcctgtggtgtttcctcagcagcctgaccgcctcctcccccattctctcctgaccctctggctatctcgatagcaggtcacctggagcctcgtgcggaattcgccacccagc

SEQ ID NO: 432423 - DNA, 1122 bp, Homo Sapiens
  misc_feature (614)..(652): n is a, c, g, or t
ggtccggaattttcgggatgtcaggagagaatgggggaggaggcggtcaggctgctgaggaaacaccacaggctgaacgggggaggaatgcacatgccacgctgggtgtcccgggtcgcggggaggcagctcagctcttaggagcaagttgtgggggcttttcaagaggggccaggcttcctggagggtgactgatgtggccgaagcaggtgtccaggcaggtaggctgcagccaggcagctccctggcaccgcaggacctcgtggtactcttgccttagattttacacacactccacagccaagcactgccacggtcctccaggacctgggaagcaaaggcacaggcccacggtggccagccattgtggtgccgccccagcttctggatacagccttttgggtaaacactgggaactccagaagttgtggggagagtggggaatcagacagccgcctctaggggctgggttctgctggggcctccttgttggtgctgtaggcacccgccagggagcagggacccgacttgcagacgcattgcccggtactaggaaggagtgaggtgtgttcccaccgtacacttcccacacgagctgcggctgccagcctcgnnnnnnnnnnnnnnnnnnnnnnnnnnnnnnnnnnnnnnncgacttatagccagttacagctccccggctcttctgtgtggcagagcgtcgtttccgggccctcagggctggggagctcagttcccattgcttgtgctcagggctgagtcttaaagaaggtttgcccgcccctaaccctgcaccgcgtgcccccgtgaaaagccccttttttgagcctgtttacctcctggggccctggggcaaaacaggaaaatactcctgtggccccggaggaaagacatgccccaagaaggaaagcagttacttgaccctccggcctgccttgtcaaccccccttaataagggaaccccttgcctcccttgggaaaagcgcgcgggacacttggactcctagaaaattcattggcccggggaccctttttaaaggtacccttgccttggcattcccaaaagcgccccggtgcgggcgacaatccccagggctccctacccgctattttcaagcgcca

SEQ ID NO: 432424 - DNA, 523 bp, Homo Sapiens
  misc_feature (364)..(364): n is a, c, g, or t
  misc_feature (419)..(419): n is a, c, g, or t
  misc_feature (425)..(425): n is a, c, g, or t
  misc_feature (442)..(442): n is a, c, g, or t
  misc_feature (456)..(456): n is a, c, g, or t
taactatccaaagaaaggctataaccagaggtgaagaacctggaaagccatgctagagtttggaattgattctgtggcaaaaaggagtgattactcctgagaagtagaaggaacagtgaaatatgacacatctgtagctgctgaatctggtagtaataaggctatgctgcccattttttctagtattttacagcaatctcattttcccaattatttaaatgggttcttatctcttggtatagtatatagatttattaagtaaaagaatataactagatttttaagtcatccaatgtgacacttcctgctaatagcctattttaatcaagttacattttttatatttacagatacatctaatttnattcctatcactttacttcacactttccactttttgaggtttttccttttattcncctctnccttcttgtcctctttngctttgtgttttcngtttctctttcccccatctctgatggaaagttacacatcatctccctccattcatccctccctccct

SEQ ID NO: 432425 - DNA, 1300 bp, Homo Sapiens
acacccaggcttctggccccgctagcatgtgacaggaagagggcatgagggcacagttctaaaacagcattactgtggtttttcacttgtctgaggccccgggaacgttttaaagttctagttcttgggcctggcactgtctccatcattcctccttcagccactgcagcagctgcggtgtgtagtaggtgatgatgatgtcagcacctgctctgcggaaggcagtcatggcctccagtacggcagccttgagatcaaatgccccggcctgggctccatgccacagcatggccaaactctccagagacgtggtacacggcgagagggaggtcagggtgcttgttctttacctcccgcacgatgtccaggtagggcattcccggctttaccatgagcatgtcagctcctttccccgtacatcccggtccacagctcggagagcccaggcttcgtgctccagggggcagctggtagcagcggctgtcccccaaaagcttgggcttgacttagctgcatcccggaaagggccatagaaacaggaagcaaatttggcactgtagctcatcaccgataccctgttgccaagtccatgtgccatcagggcctctttgatggcttccacgcgtccatccatcatgtccgacggggctaccacctgacatcctgccttggcatacgccaatgccacctcagccagccgctggcggctctcctcagcccggaatgctccgttttcactcaggagcccgcagtgaccatgggaggtgtagggacacaggcagacatcacaggccaccaggaggttggggaaggtcttcctcaacagatggattgcctcaatagctggggactcctcggagtcagctgcggaaccccgctcgtccttgggaactctgctggggacgccaaagatcaagacacagcgtaggccctcttccaccaagggcctcagcatctcttccagccgcttcacaccatacctggccactcctgggaggctggtgataggctgtatgtcatcaggaacatccgtgacaaagatggggtagatgaggttggaggcattgagggtggtggtggctgtctgccaggcccgaagtagtgggtggaagtagccgctgtgcagaacggactggggctgcatggcgtgggccagtgggcacaggggcatcagttggttggaaccgagggctcctggggcattggctacaggctctgtctgcctccctaagggctcccggccgctgctcctgtcaccgctgtctcccgctccggtctcccatcccgggaattccggacc

SEQ ID NO: 432426 - DNA, 1882 bp, Homo Sapiens
  misc_feature (1031)..(1039): n is a, c, g, or t
  misc_feature (1373)..(1373): n is a, c, g, or t
  misc_feature (1395)..(1395): n is a, c, g, or t
  misc_feature (1400)..(1416): n is a, c, g, or t
  misc_feature (1529)..(1529): n is a, c, g, or t
  misc_feature (1531)..(1531): n is a, c, g, or t
  misc_feature (1549)..(1549): n is a, c, g, or t
  misc_feature (1776)..(1776): n is a, c, g, or t
  misc_feature (1804)..(1804): n is a, c, g, or t
  misc_feature (1838)..(1838): n is a, c, g, or t
ggttgaaccgtgcagataccttctcgaaacaaaagattttcctacctgcttatacttggtaaccgagggaattactaagacttcttgctcatttctgagtattgtctttatatcctgacactatgaatgctacttggatgcctcttaagtctgttctctggggaggcagtaaggggccgtggagctggcctcggcctcggcatcgggagaggctggacttcctgtctctctgtgctgaatggctgcgatggcgcccgctctcactgacgcagcagctgaagcacaccatatccggttcaaactggctcccccatcctctaccttgtcccctggcagtgccgaaaataacggcaacgccaacatccttattgctgccaacggaaccaaaagaaaagccattgctgcagaggatcccagcctagatttccgaaataatcctaccaaggaagacttgggaaagctgcaaccactggtggcatcttatctctgctctgatgtaacatctgttccctcaaaggagtctttgaagttgcaaggggtcttcagcaagcagacagtccttaaatctcatcctctcttatctcagtcctatgaactccgagctgagctgttggggagacagccagttttggagttttccttagaaaatcttagaaccatgaatacgagtggtcagacagctctgccacaagcacctgtaaatgggttggctaagaaattgactaaaagttcaacacattctgatcatgacaattccacttccctcaatgggggaaaacgggctctcacttcatctgctcttcatgggggtgaaatggggaggatctgaatctggggacttgaaggggggtatgaccaattgcactcttccacatagaagccttgatgtagaacacaccattttgtatacccaataactacccactgcaaacaaatccctctggtcatctcccatggaaacagcccggcactttcaaggaaagccgtaagaattatcaccctgggtacaggactcccagcccctaaccttnnnnnnnnntgtatacatttgggaaggggtaaataaaggcctccccgcatggccttccccatattcctattttccgatcgccttttcacatatttccttgaccccccaacggcgacaaatcgtgccctctccacccggacggggcggcacacacgggcttttcggaacaattcgcgcaaggagactctcggtggtcaccccgcggcatagaaattttttcccccgcacacacgggctggcccctctatatacagagcgcctcttgtatgcaaccccacaccccaccaaaaggccctgctgcgggttgtgtgtatgagcaggggcgcctttttcattttcccanaccacccttcttttccccaccngcctnnnnnnnnnnnnnnnnncccacatttttttcctttgcggcccccgctaaatcccaatctcctttgtttggcgcccgatagatgacgcccgggcctctgcgacgagtccttggttggggcgaagaaatttnangcgttctggaagtaaagnaccaacccccggggtgggggtaacgcccacagctatatggggggcaagtggcccataaaactaccttccacttaaaaagaaggccgctcccgccaaaaacactttacggcccctcgtgtgggggacaaaaacagaaagaaccccggcggccgccaggagaagggacgtaaataatcaacccttcaccacacgctttctttgtaagacgcggcggggtaacttccttnttcccctaaccaaaataaccaacttttntttggccaggaagtaaaaagagaaattcccccanttccgcccttatgtgtttgtccacaagctgaatatctatttctg

SEQ ID NO: 432427 - DNA, 701 bp, Homo Sapiens
gccttctcgaaacaaaagattttcctacctgcttatacttggtaaccgagggaatttctaagacttcttgctcatttctgagtattgtctttatatcctgacactatgaatgctacttggatgcctcttaagggtctcttctgcagggtccccatgaattgtggctgaagttgtgcacaaacaagtatctccagtgacaggagtgccttctgaggcagccattgcatcttcatctgctgacactctgctaggctgacttctgtagttttcaccactgatcttcagtccacctcacagagctctataaaacgcttaaatcctctttacatcatagactttcagctacttgaagatagccatcagccgctacgtgactcttttctccaggatctccctaatactatgaacgcggcagagataacggacaagctcggcctccattccctccgctacagaaactggcacattcaggctacttgtgccactactgggacatgggctttacgaaggcctgaactggctcgccaaccagttccagaaccagaactgatcagaaggatctattctttgtgccttgtggccacatcagctagcctctgctgtgtgcacgtgtacgtgtggtgctgggagtggaggcagcttttctcacagtgccttattccatgccattaagaaaagcagtgttacaatttaaggaaacc

SEQ ID NO: 432428 - DNA, 478 bp, Homo Sapiens
  misc_feature (350)..(350): n is a, c, g, or t
  misc_feature (444)..(444): n is a, c, g, or t
  misc_feature (465)..(465): n is a, c, g, or t
taccttctcgaaacaaaagattttcctacctgcttatacttggtaaccgagggaattactaagacttcttgctcatttctgagtattgtctttatatcctgacactatgaatgctacttggatgcctcttaagtctgttctctggggaggcagtaaggggccgtggagctggcctcggcttcggcatcgggagaggctggacttcctgtctctctgtgctgaatggctgcgatggcgcccgctctcactgacgcagcagctgaagcacaccatatccggttcaaactgggcttcccccatcctcttaccttgtcccctgggcagtgccgaaaaataacgggcaacgccanacatccttaatttggttgccaacgggaaccaaaagggaaagccatttgcttgcagaggtttcccaggctaggatttttccgaaataattcttancccaggggaggattttggggnaagtttgcaaaca

SEQ ID NO: 432429 - DNA, 683 bp, Homo Sapiens
  misc_feature (84)..(119): n is a, c, g, or t
  misc_feature (274)..(316): n is a, c, g, or t
tacaataatgcaccatatccctatgcataaagtgcttcttctatttataaggttgaaaattctgaataacccttttagcattgnnnnnnnnnnnnnnnnnnnnnnnnnnnnnnnnnnnnccttgtattttgtaaatattttcttttcctgctttggagctgtgtaatggcagcgaaacatgtagctgtctttgttctatagaaatgcttttcttcagagaagctgatctttgttaatgtcttgattctgttcgcaaagcacagactagtgcttnnnnnnnnnnnnnnnnnnnnnnnnnnnnnnnnnnnnnnnnnnngttacagaatgctgtgtaccaggcctttcttgacttactgaactgtgtatgcatggtagtgttggcagtttcggagctggctctctgccgccgttctttggggtactctgacttgctctataccttggaaaatctccattctgtcttgtgggaacgccgcaggttgatctgatggccaccagagagagaatggtggtggcttttcactgagggtaagggctgccaggaggagaggggatctgcattgatcatctcttttttctttttgttgagtgaaagcagttgatgcactttctctctagtgaagtcagctgtatgatattttctatctgttctaagttgctctttaaaggagattttgcttctc

SEQ ID NO: 432430 - DNA, 895 bp, Homo Sapiens
catttggtttcttcttcttcttctggcttttccttcggaatctgttgcctaattactctaacgaggtcatggaaggctttgtcgacattgagaggtgggtccttggcactggtttctcatgtacggaatattgtgctttggtcgccatttcttttccttgctccctggtgatcttcctcaagtgcatcaacatcgaccttgttggccacgaggatcatcgggaatgactccctgtctttgacgcgcaggataagctggtggaagcggtccacgtgctcaaagctggccttgtcagtgacggagtagacgatgaggaagccatcccccgtgcgcatgtattgctcccgcatggcgctgaattcctcctgcccagctgtgtccagaacgtccaagatggcccattgattgtcaatctccgtatgtttcaggtaggagtcttcaatggtggggtcatagtcaggcacaaagatcttctggaaaaactggatggtgagggcacttttgcccacacccccatcccccaccaccaccagcttgtatgtggggaggttgtcactggggacggcgctggttgccatgtttctcgtaggtcagaccgcgcgctccagccccggctcggctacggcactcaggccgccccctcctagcctgcgccggtgaggaggcagcgtcgcgcccgccgggccccgcggccgccggactgacggctccccgccagccggccactccggtccgtccccgccccggcgcctccttaaagcgaccgcgccgccagcgtgcgccccgagcgcctagcgctgcgcattccttatattgccacagcgcctgctaaaaatagagcgccgctgcgggcgcgccagtggggagcccgggccgggtgcctcgaccctccgct

SEQ ID NO: 432431 - DNA, 2123 bp, Homo Sapiens
gtttcattggaaatgaaacaaattctaaagtatgctttttcactagtccctttgattttgctatatcataacctcttggttcatatgctgagaaatttttcagaaagtccatttttgtttaaaattagaacttttcagaatgccaaatgaaggctaaaattttggccagaacattacaaaagttttaaatcgtagacgtaactccccctgaaataaagttaggtagtaaaatccttaatgaaaccagtggatgtgcttaacgtaaggttagtaaagcatacaaagaatctagtgtgctcagggcttggtacaatgagctgaattagatggccttatgaaactctttctaacctcttacccaacctgtttctccttggttaaaattatacttgaaggcccagaacactcatggcacatttgtttaatattgcttatagttagtttaaggtaattttgcttctacagtattttggaaggtctgaaaacttgcacagggtcatctttgtaattatataaccccaaactaagatgcacaatgtctccttcaggtgatcacacacagtggacgagtatgtgcaaacatggacataatagttcacttacaaatgtgatttgatgttaacactagagaatgatgactgtagaacatttgagcaagtaaaatagtaaagcacatagtgagtgtatgtccgtctaactggtacattgataatttagtttgggcacataaaaggaatatttatatggcttcccaaatgcagagttacatcttattcgtgtatttctctgagtatttatatcccgtctccttttttcattcttaaaaataaatgacttttcactgttggcacatatgaggcttaaatataaggaacataacacttgcattctaatttttgcatatattgtaaatgtgtctggtatttacagcaaaatactgtgtatccttttatgggtaaaacaaaagtgaacattgcatgcatgtaatgtgatgaatttgtaatttaggagttctttggggcttctgtgacttgggaaatgcttacattcaggccttaatgttgcattagctagcatgttttccctctgatgtatatagtcactgttgtataaactaatctttgcttgttttctactctgtgatctttccatatcatatttcattaatgatcagttagtgtcaaggagtcaaaacagattaaaattaatttcatgtgtatatggtggaaatttgtggctagtgtgatttttgtttgtttccttttaagtactgttgatcagttgtgacacttactggttaaacttacgttgctaaagatttctctataataagccacacattatatttagactatattaagggaccttggttttcttctagatagcagctgtcccaaagaaaatatttcttctttgtctgttaagatttagctattatctgccagttgttaagaggttttggttccaaactcaaccagcaatgttgagagctgaacttaagatagctgttgtactttttgctttccatctgttactgtccttcattcttggctccctactatctataaacagctgctgtgaagaagaaaagttgaataagagttggcttaaattttaaaaaagaaaaggaaaattgaggttttaggattttcatggtaacaagctctggtataagctaaggctggcaagttcagatactaaaatattatttgatcatatcttggatccttttgaaaaagttaagactatatgaaggtaaattagaaataagtatgaatattaataaaatagcatttatcttatttctctattttatgttgtgacttaacctaattttatttttttaacattttcttatttcttataatatgaatgctgatatttaaaggtagatctatgtggtattctttgtgtttcttaattgtttaactcttaagattatttgtgatctggatttatgtatttgttagatacatacgaattgttaaaatggaatgcaagtttttcaaaagcccaggtctaaatgtaatggttggtttattgttctataaccccagcccatcattttctgtgtaaatcataaacaataaacagaatatactcggtgggtcatttctaataaa

SEQ ID NO: 432432 - DNA, 1005 bp, Homo Sapiens
ttttttttcagagaaagcactttttcttaagcacttttgccttgggtcacatggttagtgcctctactaaggggatgggttgtccagtatctgctgagcttctgctgtattccaggcagtgcttggaccgtagtgcattatgtcctttaaatctcacagcagccccacattatcacctttcacagatgagaaacacaaggttcagagagatcaagcaacatgctcaagcttccacagtgacagagggggctctcaaatcttaactccaagtctagtgctcataccatggtgctggcagaagtgccttaactgcaccggatggggaaggcacctgaggtgggttctggctgctctggagaaggtggggacaaggtgtgctcttgctcttgtccagaccacgtaggaaacgatggtgtgacttggggaaagatggaggagcctttccccaacaaggccctagggaggagatggggatgtggagaggacagagcaaccttctttggggcaagtttgggttcagagatcaccctgaggggcggggcacaagggaagtgtctgagggagagggaaaagagaggtcccaagtctgaaaggttgggaagagaaagggaggagggagaccaggccggccccactagccatgcccagcagggactcttttctgttccctgggccacaaagaagcaggtggaaccttccacagatacctgggccaatcaggtggcccttgtacctgccagggaagtggggcagggtggggtggggctacatgtcagggaggatattaaatgagcttctagctcatttgcatgtcctaattaaccacaaagtgcgccccagaggaagaactaagctctctgatttctctctgcttacgtctgctgtctcctccacatacacactgcttacctctccctacaccttcctgtatacttaggccctaggcatttgcattcacctcttccctccacttcagtaaaatacagcctctgtcattgccatggc

SEQ ID NO: 432433 - DNA, 467 bp, Homo Sapiens
  misc_feature (414)..(414): n is a, c, g, or t
gacagcagacgtaagcagagagaaatcagagagcttagttcttcctctggggcgcactttgtggttaattaggacatgcaaatgagctagaagctcatttaatatcctccctgacatgtagccccaccccaccctgccccacttccctggcaggtacaagggccacctgattggcccaggtatctgtggaaggttccacctgcttctttgtggcccagggaacagaaaagagtccctgctgggcatggctagtggggccggcctgggtctccctcctcccttttctcttcccaacctttcagacttggggacctctcttttccctcttcctcagacacttcccttgttgccccgcccctcagggtgatcttctgaaacccaaactttgccccaaagaaggttggttttgtcctnttccacatccccatcttccttccctaggggccttgttgggggagagggttctt

SEQ ID NO: 432434 - DNA, 3136 bp, Homo Sapiens
tttttaacttcctgaaaactctttataataatgcaggacaactgtatatagcaaacgccttcaaaatttaaactctttaaacatttaattcttcagcattaatacacacaaatgcggtaacaggggtcaggggggtggtgcgggggcaggtgggttacagcctccactgggatcagggtttcaacagtgttacttataaattatattacatcaattttatttactgatctaggcagccagagggtggaaggatatacaatgtggaggaaacacattcataccggggtgaggagtgctggcgggagacacggctctttaacatgaaaaatgtataaagtatttagcaaaagttacagaaaacagatcaaacaagcaagtttattttgttagaaaattccactttcatagggtttgccgatgtgctcgtgtctgtgaaggggttgcttccggtcatctccttcctaacggaagggaagggatgctaagttggggcccctgtcaccaaggatggctggcgtccctttgaatgtctgtccctgggtccacacagctgcctggaacccacgactcccgagagcccgtctgctgcaggtgatgctggaagggaagcgcccccacttgacagatgagtgcacggaggtcccgacaggggatgtgacttaacttcaggttatgggacaaaggaggccgcagagcagggccagtcctgtgctctccccctgcatagcaggctttccctctaggtctcccagtcaccccaccccgagagagcacccacgtgccctgaccttacattccactgcaatcccactaaagtttccctcaaacaccaaggaacagtcctgaacaccacacgcaatctccaaaggccatcgccccaacctcaccccacccccagagacacctcccaggaagccctcctgacagccatgccccagcatttagaacgtggggagaagcgaattggtttttgccctctgtctgattctcgctctaacctgctgcaatgggaattgcttcttcacctccaggaaagcctcaacaaaaatactcctgagggggagacaagagtcctccccggcaaatttcaacccagcagagtcctggcagcctcttcggctccctaccttgaggccccgggggctcaggcttcctggccctaatcttcacctggcctggatccagaaatgtctctggttcgcatagagaggtacccaactggtctcgggactcacctttcactgagcagggggcatgaacaagacacagcttagtggagtgtttacctcaggggtcacactcagcctggtctggccttaactgggtgtggtcctgtccctgccaccatgtaccaccatccagtggggtgcaggtacaggccaggctgtgtgatcaccagctaggcaaggctccagctgcgacaaggactccatcttcacgcctgtcctggctcctggggagtagactccagaacatactatcaaagatcgacgaatgagatccaaacggtcattacttgcactgtctttggggggtcctaggagaaactacctcattcttaacagctcataaaactcttaattttagctccatttgaatctaaatggaaaagtaccacggcatctctctcaccaggacttgaggcaattctatgcacgattgtgcagatgagagccagacacagcatgaacacgtgtacagggtacatcattggaaatgagaaagggaggaggtacatgcagttgccggtggcctgagacactcatctagaacaaacaccctcagcttgcagatgaagcaacagatccaggaaagcatcatgatgagccccagggccagccccagccttcttgtccatgctgcttctgctcgcctttcaaagcctccaacgcccaatacatagccaaggaccgtgtgacactgaagcctgggtcccagaagggagcagatctgctggctgagatgcaagcttcaggttgcagcagacgtgagcagcaattgagcacccatccgtcccttcccctcccatccctggattctttctgcactaccaaaaacccaccacgcgccaaaaggcgagtgtgagccctaagaacagcttgtgggcacagctggcatttggaggaggagcctggggaactgaaggaagcagcaagctggaagtggtcgtgcaaacaagttgaagaccctgggccaagaacttccagggcgaaaggctcagtgtaaaaataaagaagcagagtagtacgcccatgcaatgaaatacttcccggcaaggagaaggaacaaaccacacgcacacatcgtgaatgactcaaaagcattaagctgagggaaagatgccagactcaaaaggcgacatcagtgtgactccatttatatgacattctagaaaaggcaaaattataggatcagataatcaatcagggttgccagggaaagagggcaggagaagggaattttttggagtgttaaaaacaggttgatcttggtgatggtcacaagacactaaatttgtcaaaattcacagaactgtatatttccaaagggtgaattttactggatgtcaatcatacctcaataaacctgggaaaaggtggtggcgatgggccttgtagggatggcaaggattatggggataagacgatgtccaggctacgtgggggggcagctgatctgtaccccacttaacattagaagtgctctctcccacctacacaaggaatgcatcttgagccttctgtttaaacgctccttgtcaagactacctgcagctggaagtaaaatcacctaaacaagccaaggtcgctgatgtccttcgaatgttatggcttgtatttccaaaagggactttggctcagcccagatttttctgcatccatccactcatctagtaattgattggttttcacaaagggtagggaaggaaacccctggttggtgaattcgttggtacactgtttcggtgtgcccagctgtttatcaatcctgactagcagagcactgcctcccaccgcagaaattctccttggccaacagggtgctgagtggaggtagaaaggaggcccagcggtgtcccactgacagaatctcagggccgccatccccaccggtcccaggggcctatgtgtgccac

SEQ ID NO: 432435 - DNA, 661 bp, Homo Sapiens
  misc_feature (259)..(259): n is a, c, g, or t
ggaatgtgtaaaaaggtgtaacgtataattagaaagacataagtaaaactcaattattgagccacaattctcatgaattaaactttaccatccacagttaagtccttattgcttgttaatcttgggtgcctgcactacacttgattttaaaattgttggtcttctataaattttcaagattttcctgagcagatacaaattcaggttttgatgtgcttcaaactaaggaacatcacctttcatgaaatgtttccagtangatgtgatgtgagtggaaacctttaaaaaatgtcatacttattgctacatttgaatagaaaataaaaggaataaagtatttttcctttgctacaaattaataatacgatcacatgcagagagaatgtgaggaaccttcaacactaaactttgatagtcacattatgtgaaatttgaaattttctgggtgacagtatacttattggtaggttttctggttcatgaaaataactcaagaactaatatttgtaattgtgaccttgttgtaattgggaaaggccactagttgatcatatgacctttattgaatatgtcatgcttgctgtttaaaaaattcctaactaatcacatgcaaattaatgctaaacaacttttttgtatttattaaaaatgatttaaatat

SEQ ID NO: 432436 - DNA, 562 bp, Homo Sapiens
gaaactcaaatttttattccttccacagaaaacactagagaaacttcgagccaaaaatacatgctgactttctagaaatagtgtaaaggttttttaattgtgtatatgtagcattagacaaaattatttaaagtcaataaattgttattcgaggaattccatgttgtgatttcttccactgtccatcaaggtcactttagatcctctaaagagctggagtcaaaagatttatcttcaagtttgccctgaagaagagaaattttgattaacctttaaaactctcacatggcaacaatcatggattattacgttttatatctcctcaggaaaacatagcaccaaacattaggagtgctatagggcttcctatagagaacttccatctttggtcacagcgttaagagctctgggtttcacagcctcataagccctctttgaaatgacccatacaaatgtcttttctaatgcatacatacctttttaatgaaactgatccagttgtcctgtcagccctacataacaatagtataaaagtaaattttacatttccagagatgagtgt

SEQ ID NO: 432437 - DNA, 1802 bp, Homo Sapiens
  misc_feature (1345)..(1353): n is a, c, g, or t
  misc_feature (1441)..(1532): n is a, c, g, or t
accaaaggtggtcgtgagataaccccccctggtgccaatttccagggttttctattacaattgccccgttttatggagaaaggggcttttccccacgtgttcgggcccaggaaaatggccttagaagggaaaattttccgcagccccatgtttcttgttgcgaataagaattttatcacagggacccggggggtgcgtgtaaaaatttagggataattcgggaaggctccccgcctgtggggacgcttccctcgtttggagtaaagaattctcccaggttaaaatgggcccctctccaaggaaacggtgcccactttgtggggaattttttgtttccaaggtaaaccgggctttcggggttttgtcccgacccggggggcagtttttgtttatttggggggagagaattcccaaagccacttaggttcatgggcccagggattcttcctatggaaaaccagcttatggaccagtgtttcaggttagcgttatggggcgccggcgcgcgcaaacggaatgggtttaggaaagcttctggagggcccgaggcggccgacaagatttttttattatttgggttgtttgtggttacacaactgaaactcaaatttttattccttccacagaaaacactagagaaacttcgagccaaaaatacatgctgactttctagaaatagtgtaaaggttttttaattgtgtatatgtagcattagacaaaattatttaaagtcaataaattgttattcgaggaattccatgttgtgatttcttccactgtccatcaaggtcactttagatcctctaaagagctggagtcaaaagatttatcttcaagtttgccctttttaatgaaactgatccagttgtcctgtcagcccataattactttggcttctgtcatctcgttttaatatggatatactgatgaagacttcaaaattcaccaagaatctttgggatctaatttcttcaaccaatttactttagggtcctttttactgtaggtggtggggatctacctggttctcaatttgacaccctctcaacatgaatgagttcaaatcacattcattcctaagcgatcactcgagaatggtacagatgtgtggagtatgccaatacctaaggtaaaaaagtagattatctggtttttcataacgtttagcaaccgtctttttcaaacttttagcaactgtcttgtaattccttcccacagatctaacaatagtcctgtgagtaaagtaaaaccacagagttactctatgaggcgtttccaacgatgtgcaggctacaggaaaagccccatcgggatagacctcaaccactatttacaaggttttgannnnnnnnnaaagacacaggatctgccatgtcttttaaaaatcgtgtgattcttgctgaatcacttgagcccaggggttcgatgctacagcgagatnnnnnnnnnnnnnnnnnnnnnnnnnnnnnnnnnnnnnnnnnnnnnnnnnnnnnnnnnnnnnnnnnnnnnnnnnnnnnnnnnnnnnnnnnnnncactgtgtccagctagtatttatacacataaataacaagtctaacactccataggaaagaaattatgagcagaaactgcaatatgctcttacaatattgccaactgcagaaacttcctactacgttaatcacaaaacataatttcacaatcacgttgtgcttaggagccagaggaatgataaataaaaagtaacatcaatcgacgctggtcgacgatatcccggaattccggccgtaccagctctttttcaccactggttctatatcaaa

SEQ ID NO: 432438 - DNA, 1261 bp, Homo Sapiens
tctataggaggaaaaccggtaatctcttatctccttcctgttgcaatgttatcattcccaagtggtatccttttttctgggtttagtaacattgtctacgctttgtcttccaggagctaaaaaaggtctttctggttgactaaaaatatctcctggaggaaaaggtccacggggtggtggatgaagagctgaatcaagtaccgatgggggtgggattccccgttggggtggaattccaggctgtattaaagggaatcttgggcccaggtgcctgtggtattagtcccggacgaatgtctaacattggcattgtgggcatcctttgattagggatacttaaagggggtaagttttgaggtccagctggtggctgtgttcccagaagtccaggagtatttggaacatttggtggctgtactcctacaagtccagaattgttaggtatatttgggggtagcactcccaaaagtccagaactatttgacacactgggtggctgtattcccaatattccagagttatttagaatatttggtggttgggctgcaataatcccagaactactggaaacattagatggccggaccccaagaatttcagaattacttgatacatttggtctttggactcccagatttccagaattgcttgtcacatttggcggctgtcctcctaaaattgcagcattacttgaaatatcatttggaatcactgatctggtgttttcaccagaagaaatctggtggtctataagatgaggtactttttcttcaggctctgcccgtttagttggagcattaaaaacatttccagctggcagagcggaagtagcaagattgctggcaacagaaccgcctggtataacaaggctaccaaatccaacatctttcacagtttccggtgtcatggataatgacggctgcactaaagatgttggtactactggtggaatcgtagggggtggcacaacaggtgggggaactggaggcggcatgaaaccaggtggtggttgtgaagggttaaaacttgctcttaaaaaaggaggtggagggattggactgaatccaggaggagggaccggcatcgacacaggaaatgctggtgggactaaactaactgtaggcacggctggcgccactggaatctgcaacatagcaacaggaggagggaaaacctctgcctgggttgtgaccactgtctccttttcaactggagttgggctctgagttgtctggaccgtctctttaacaggttctgagct

SEQ ID NO: 432439 - DNA, 2018 bp, Homo Sapiens
  misc_feature (185)..(185): n is a, c, g, or t
  misc_feature (197)..(207): n is a, c, g, or t
  misc_feature (581)..(590): n is a, c, g, or t
  misc_feature (620)..(628): n is a, c, g, or t
  misc_feature (654)..(654): n is a, c, g, or t
  misc_feature (676)..(676): n is a, c, g, or t
  misc_feature (722)..(732): n is a, c, g, or t
cttttcatggagggctgtgagttatttatttgtgaggggcagcgttgtcttggtttaaaacgcgccccagagggggtggaaaggccctcctttaagtaacaataatatatattggggagattatatagtggggcttcgctttagttaagtggggatttgtcccaatatgaataatccccaaattntcttcgtgggtnnnnnnnnnnnaactttcttataataaagggggtaggcctgcgcgggggagaaaaagagggggagacccccctctctgagggggtgaacacacctgcgggtggtgaaaaaattattgggggaaaaaaaatttatgtcgccccgccccgcgccataccccgccccaagatgcttttttagggggggatttaattcgcccacggtttttttatagggggcttcgtggccccgcgcggtgaagttgttggggtgggtataaaaaataaatgatatgtggcagttgttgtttggtggcccgcgaatctcgattaaggtgttagcgcccgaaatagaaataaccgtttcttccccgagggggggtacaaaacaagcggcgccaaccctgnnnnnnnnnncgtttctctttgcctaagttccggcgggannnnnnnnnaacaactgcggggggcgcaacaaaanagggggcgccccatttataagntgtattaccacaacggggcgtttataaattttttttcgtaagatannnnnnnnnnnagggtgttggtgtaccaggcgttttataagaaagagggtgtgtttataatagattttttcgcgccttcagagagagggctcttatttaaaagaggcttttctgggtaaaggttaaggtggtgtgggtcccccaatttattttttgctccaacccgtctggggaggttatatggttttcgttttccgacaaagtaataccgcaaagggtgaggcagggttatacgccaaggccggggggcggtagaaaaacggagcagcccagtggcctaggctgtataatggtgagatcgcttatagggatccaggtggttacaaggagaggcggggtgcggcgtaaggcttggggcccctgggagggatattctaggagcgggccgccctttttggtttgttggtatgccgcgatttttgtgttaggtgtaaagattttttaattgtgtatatgtagcattagacaaaattatttaaagtcaataaattgttattcgaggaattccatgttgtgatttcttccactgtccatcaaggtcactttagatcctctaaagagctggagtcaaaagatttatcttcaagtttgccctttttaatgaaactgatccagttgtcctgtcagcccataattactttggcttctgtcatctcgttttaatatggatatactgatgaagacttcaaaattcaccaagaatctttgggatctaatttcttcaaccaatttactttagggtcctttttactgtaggtggtggggatctacctggttctcaatttgacaccctctcaacatgaatgagttcaaatcacattcattcctaagcgatcactcaagaatggtacagatgtgtggagtatgccaatacctttaactccagacaccatgttctcaagataaaagcctttgacattcatgatcctgtcacattttcaggcctctctgtccagtatttttggcttttgtagctctctttttagacaaagcagcttcttcagtaatatcctcttcttctaagtatacactcagtcttacagggaattcagaacttactatgaaactatcccctgtaagactgagtgtatacttagaagaagagcacaaactagaaaaagaccagaagtctgctaactatccctcccttgggcctctctggtttataccttcaagccaccccactgctcagggaacatgactggtggagaagatctagtgatggaggatgattctgacagtcttcagtaaatactggaggctttagtgaaacagttacttttaagatttcactgtt

SEQ ID NO: 432440 - DNA, 408 bp, Homo Sapiens
  misc_feature (16)..(16): n is a, c, g, or t
  misc_feature (59)..(59): n is a, c, g, or t
tgccctatttcaaggnaactggatccaagttgtcctgtcagccccctaattactttggncttctgtcatctcgttttaatatgggatatactgatgaagacttcaaaaattcaccgaagaatcctttggggatcctaatttccttcaaccaatttactttagggtcctttttactgtaggtggtggggatctaccctggttctcaatttgacacccctggaaaaaaaagcattgcttactattttagagtatatcaaactgaacactctgagaaacctacacaaatactgtatcagtagaaataccaggtttaacaagcacaaagccaagaaaaccaacgatgccagatactgaatttctatagcactgacctttgaacaccctagcaggtgtaaactgctgagtgcc

SEQ ID NO: 432441 - DNA, 488 bp, Homo Sapiens
  misc_feature (17)..(17): n is a, c, g, or t
agtgtaaaggttttttnattgtgtatatgtagcattagacaaaattatttaaagtcaataaattgttattcgaggaattccatgttgtgatttcttccactgtccatcaaggtcactttagatcctctaaagagctggagtcaaaagatttatcttcaagtttgccctttttaatgaaactgatccagttgtcctgtcagcccataattactttgggcttctgtcatctcgttttaatatgggatatactgatgaagacttcaaaattcaccaaggaatctttgggatctaatttcttcaaccaatttactttagggtcctttttactgtaggtggtggggatctacctgggtctcaatttgacaccctgggaaaaaaagcattgcttactattttaggggttatcaaactgaacactctgaggaacctacacaaatactgtatcagtagaaatccagggttacaagcacaaagccagggaaccaacg

SEQ ID NO: 432442 - DNA, 420 bp, Homo Sapiens
gcaggctacacttccaggggcaagattgggtgtacccagcccagaagagtggcagctatgtcggtggccaaaagagtgtcagaggagtttggttgttgcttaggccaagaggtgtgctacaccattcgatttgaggactgcactagccctgaaacagtcatcaagtacatgacagatgggatgttgcttagagagtgcttgattgaccctgacctcactcagtacgcgatcatcatgttggacgaggcacatgagaggacaattcacactgatgtgctctttggattgttgaaaaagacagttcagaaacggcaggacatgaagctgattgtcacctcagccaccttggatgcagtgaagttttctcaatacttctatgaagctcccattttcaccatcccaggtcgaacatatccagtg

SEQ ID NO: 432443 - DNA, 1016 bp, Homo Sapiens
accaaatcgaagcagctttattgcaccattaagtacatcactgcatcaaagacagtgccacaaatgcaaatccaatcggagaaggtagccctgagacatgtggtggctgtgagggagaaggacccccaacccttgaggagcagcgctggaagagaatcattccttaatatggctccaattccagaactgggctttatcatcacagaaggaatggccttgggctaaggctccaacataggtggagtcaagggcagttccccataggctgtggttcccctgctcctgtctcacagcctaagacagcttccagcaaaaggcagttcatccctttcaccttccatccaacctagcccacccttaataatgccggcagatgagaaattccattttaacagcgccaaagtttcctctcttggttctgctcagcacccatccctcacgtccatgagttgttcaaagggtgaacagcagtcagctctaccccagaccctgggctacagagaaatacggacctggaaataccaagtcagaggcagggaaaaggtaagggcaggctcataaaccacagaagggagaaactaaagacccacatgatgggtcacagcagaggtaggcttaaaagtaacaatcctgttcaccctctcagaagccacttaaatagaagatccctgggggagaagatatcctgccccaggtccttacagagtgtagtattagggagagtgaagaactgattctatgccctgcctccaggcctgagagtgtcttggacagatcctagaaggccagacataaaggagtaaaaagcaggcactcagctggtttggagccaagcctacagcatcacatacctggcagcaaggaaaagagtcgggaaaaagaaacagaatctgttgcagaagtcccctcttctgcagggaggagttactgtaacagcagaagtggcctcctagcaagagaggctgcccggacgcgtgggtcgacgatatcccgaaaattccggaccagtaccagct

SEQ ID NO: 432444 - DNA, 703 bp, Homo Sapiens
ttctagatcccttggagtcatacctggggaagctcaagtcttgtcctatagccacaactggactccacaggcctgctgactctgctatccagggactccagggtgtccccatcactgggtcgggaggtattatgggagatggttgggtcccccaggttacagtcagaatgttcctggggtgcactagtggagccacagggtgatcagcagtagcttctccagactttgactcttctgggggtgggtctaataaggggccagttgtttcctctgaaagggaactgatgcccaaatagggcatcactactccctgggggcccctcttctgtctctgactgttcttgctcttcccccctttccaagccagactcttcacacttcttattgggctttcgcgtagctgggagcttccctatcagtggaaggacaggcttattgccaagagatggggggagcttgggcccaaagtaaccttgtggggggtccttgagcttgggcccagctttattaggggtggcctgcacctcctcactacactctgtaagaacctggggcaggatatcttctcccccagggatcttctatttaagtggcttctgagagggtgaaaaggatcgctacttttaagcctacctctgctgtgaaaaaacatgtgggtaaattgtttctcccatctgtggctcatgtttgtgggtttcctcta

SEQ ID NO: 432445 - DNA, 404 bp, Homo Sapiens
tttaacttgaaatgcagtggaagggctcatgttccattcttctccatcaaatggcttaaatgccactatgtaaccaaaattgttgccatagtggtattctcttgacaaaggcgcccatgttatggtcagctctctgtttcttccacctccacctcctacatctgaaggagccacatttggtgcagcaccgtctgttttaattctgttagatggtatactgggctctcctctacccagtgtattggttgctaccacgcggaattcatactccatccatgggattaagtccactgctcttgctgcctccatatttccttcaataattgggggatctgtctttgcatctttccagtcatctgaaagaatagtcttggtctggatagtgtatttagaaataggactgt

SEQ ID NO: 432446 - DNA, 1909 bp, Homo Sapiens
  misc_feature (1728)..(1736): n is a, c, g, or t
attcagtgtgtttttgtggtgtctggtgctggtctttcctttccatatctagtgattccttcaggagctctgcaccaaatgtggctccttcagatgtaggaggtggaggtggaagaaacagagagctgaccataacatgggcgcctttgtcaagagaataccactatggcaacaattttggttacatagtggcatttaagccatttgatggagaagaatggaaaaaagtcacagttactaatcctgatactggccgatatgtccataaagatgaaaccatgagcccttccactgcatttcaagttaaagtcaaggccttcaacaacaaaggagatggaccttacagcctagtagcagtcattaattcagcacaagacgctcccagtgaagccccaacagaagtaggtgtaaaagtcttatcatcttctgggatatctgttcattgggaacatgttttagaaaaaatagtggaaagctatcagattcggtattgggctgcccatgacaaagaagaagctgcaaacagagttcaagtcaccagccaagagtactcggccaggctcgagaaccttctgccagacacccagtattttatagaagtcggggcctgcaatagtgcagggtgtggacctccaagtgacatgattgaggctttcaccaagaaagcacctcctagccagcctccaaggatcatcagttcagtaaggtctggttcacgctatataatcacctgggatcatgtcgttgcactatcaaatgaatctacagtgacgggatataaggtactctacagacctgatggccagcatgatggcaagctgtattcaactcacaaacactccatagaagtcccaatccccagagatggagaatacgttgtggaggttcgcgcgcacagtgatggaggagatggagtggtgtctcaagtcaaaatttcaggtgcacccaccctatccccaagtcttctcggcttactgctgcctgcctttggcattccttgtctacttggaattctgaatgtgttgtgacagctgctgttcccatcccagctcagaagacacccttcaaccctgggatgaccacaattccttccaatttctgcggctccatcctaagccaaataaattatactttaacaaactattcaactgattttacaacacacatggtgactgaggcattcgggaaccccttcatccaaaagaataaacttttaaatggatataaatgatttttaactcgttccaatatgccttataaaccacttaacctgattctgtgacagttgcatgatttaacccaatgggacaagttacagtgttcaattcaatactataggctgtagagtgaaagtcaaatcaccatatacaggtgctttaaatttaataacaagttgtgaaatataatagagattgaaatgttggttgtatgtggtaaatgtaagagtaatacagtctcttgtactttcctcactgttttgggtactgcatattattgcaatggcccctatcattcatgacatcttgagttttcttgaaaagacaatagagtgtaacaaatattttgtcagaaatcccattatcaaatcatgagttgaaagattttgactattgaaaaccaaattctagaacttactatcagtattcttattttcaaaggaaataattttctaaatatttgattttcagaatcagttttttaatagtaaagttaacataccatatagannnnnnnnnacttttatattctactctgaagttattttatgcttttcttatcaatttcaaatctcaaaaatcacagctcttatctagagtatcataatattgctatattggtcatatgtggagtgacaaatttgaaaagtagaggcttcctttttattgagatgtgacagctttacatgggt

SEQ ID NO: 432447 - DNA, 756 bp, Homo Sapiens
  misc_feature (374)..(374): n is a, c, g, or t
  misc_feature (394)..(394): n is a, c, g, or t
gcctcctgttgtgctttgatctgaggcaatagcagcctgccatagtgtcaggaacttcctgtgctattcagctttgcacttctattagcgctttgcaaagtagtcttgcatagtcaatttcctttggccacatcatctgcacatatcagctgagagcttggtccctgcaagatctccactctgttggcacgccatcctccagtttcctccctgagggcatcagcctttggcacccgcaggcctgtaagctgctgcgacacacctgaagaccttggaagtctgctgccaccctggttcgtgaggcaatccactgtccagcaccaacttgcgctaagtgtctcctccgcttcctgacatatcattgggatttccancctccgccaagcatataganacggggctccactcacgtctctcgtcataccttgcaagctcaagagacatgtactcatgctcttgacgccacgaattgtcctgccgtctctccacagagctttcagccatcttcccaagaagtgtgtcatctgcccaggatagctgacccctccatcagacactgagccacgatgtctgtcaaaggcaactttttggagcgtcttgtcacgcctctgccccttgctggccctgcagacatgcggtgagcttcttgtgcgtgcctgtgggacacctagtttcaccagctccagacgcttctccacctgaagaaggtcattcactcacaccttctgtcttttcagccctgcccaccgctccgct

SEQ ID NO: 432448 - DNA, 566 bp, Homo Sapiens
tgttgacataacgggtaatgtataacaaatcccttgtagctttgaatatactggggtaatttcaaagctacaaggggatttgttgacataacgggtaatgtataacagcaatttttttctcaagtttttggattacctgtaagtgtctgactcagaagggcataggcattctttttatgtcatgggtttgatttctttcttcctttctcctttcattcccctggctcccatcttcaaagtgaaaaatatcacattcacttgctgacctagagcctttttctttttccagggctggcttctgacgggctctgcttgccttcctgatagtcttcccctttatgaatgaagccacttgccccagcttccctctgctgcccctatctgcaggcttgctaagatctcctgacctaggcgctgtcacccacagtgggctgcagagctggctcttcctagctggctaactatcctgaatcagtaaaaatttcctagtggagagtgatgggaaatcgaatccaaactggcttaaacaaaaatgagaatttattgttaacatgactcaggagacc

SEQ ID NO: 432449 - DNA, 281 bp, Homo Sapiens
tttttctactttttgtagagacagatattcgggcgcccccagtctagccacacgtatgccccccagtggtggttctgggaatgaccaaggttggctgctgaagtcagttgtctgggtgagtcagagtgagacacacagacacactcacaggcacgcctgagggttggggggcgttgggggtggtttttgggtacttctcagctcctggggctccccagacctcccttcccagccctcaggccagaaagcaggggttaacagagcgcacagagacgtgggga

SEQ ID NO: 432450 - DNA, 847 bp, Homo Sapiens
ccataaaatatgtgttttccattctcatctgtaaccattacagaatgttaagaagggtgagcttggagcaatcaaagtttccaaaatcccactgagaatcatatctggaaatgtcacagaaatgcaagcagctcatcagcccaccgcagaattttactggaactgtggagactctagtccaagggacgagctcaaggtgattgtggtgaaaaagcaggaagggtgagaagcctcttcttccagtgtcttcttgggaactgtgggagggtttggtttccttgcataagtttaagaaggcatcttggcagccaccacagcggaacactgtagtccacagggtctgagtggagatatggaatcgctcatgaggatatggagatggcttctggtccaagaggccagccaactctcgcagccacagctttgtctgcacgtgacctggcggatttaacacaactgcccaggaaattccacaagcaaactcaaagccagaaagagctgtaagaatggccgagtcagaactgggaccagacccttcttattctttctttttctcatttttgtacgatctggatcttcctttccagcatgagtggggtgaatgccagcaggagacagtgtgctcaccaccgcaccctcagggtccacacctgtcacttcacaggaatggaggtccagagtgatgagaagtcaccccaagagtctcagagtttgttctcagcgaaaacacagggtgccaagtggctgactccagattcacttgctcctgctgcatcatgcctggttcatattgctgccagctagggcagaacgagacagaagggacgctcagagggactcctgctcg

SEQ ID NO: 432451 - DNA, 950 bp, Homo Sapiens
  misc_feature (58)..(131): n is a, c, g, or t
  misc_feature (749)..(805): n is a, c, g, or t
gaggagcaagggaacagaaactacattgtaacctgtttgtctttcttaaaactgacannnnnnnnnnnnnnnnnnnnnnnnnnnnnnnnnnnnnnnnnnnnnnnnnnnnnnnnnnnnnnnnnnnnnnnnnntcacaggccaaataatacagcgctctctctgcttctctcttgcatagatacaatcaagacaatagtgcaccgttccttaaaaacagcatctgaggaatcccccttttgttcttaaactttcagatgtgtcctttgataaccaaattctgtcactcaagacacagacacccacagaccctgtcctttgcctctattaagcagaggatggaagtattaaggattttgtaacaccttttatgaaaatgttgaaggaacttaaaactttagctttggagctgtgcttactggcttgtctttgtctggtagaacaaaccttgacctccagacagagtcccttctcacttatagagctctccaggactggaaaaagtgctgctattttaacttgctcttgcttgtaaatcctaatcttagagttatcaaaagaagaaaaaactgaagggtactttactccctatagagaaaccattgccatcattgtagcaagtgctggaatgtcccttttttcctatgcaactttttttaaccctttaatgaacttatctgttgagtacattgaagaatatttttcttcctagattttgttgtttaaattatggggcctaacctgccacttannnnnnnnnnnnnnnnnnnnnnnnnnnnnnnnnnnnnnnnnnnnnnnnnnnnnnnnncctgcagcaggaaacatagttttgagtagttctacctcttatttgtagctgccaggctttctgtaaaaattgtattgtatataatgtgatttttacacatacatacacacacaaatacacaatctctagggtaagccagaaggca

SEQ ID NO: 432452 - DNA, 1218 bp, Homo Sapiens
  misc_feature (1014)..(1014): n is a, c, g, or t
  misc_feature (1134)..(1134): n is a, c, g, or t
aaggctggtacgcccggaattccgggatatcgtcgacccacgcgtcgcaaaaggcggctgagattggcagagtgaaatattactgccgagggaacgtagcagggcacacgtctcgcctctttgcgactcggtgccccgtttctccccatcacctacttacttcctggttgcaacctctcttcctctgggacttttgcaccgggagctccagattcgccaccccgcagcgctgcggagccggcaggcagaggcaccccgtacactgcagagacccgaccctccttgctaccttctagccagaactactgcaggctgattccccctacacactctctctgctcttcccatgcaaagcagaactccgttgcctcaacgtccaacccttctgcagggctgcagtccggccaccccaagaccttgctgcagggtgcttcggatcctgatcgtgagtcgcggggtccactccccgcccttagccagtgcccagggggcaacagcggcgatcgcaacctctagtttgagtcaaggtccagtttgaatgaccgctctcagctggtgaagacatgacgaccctggactccaacaacaacacaggtggcgtcatcacctacattggctccagtggctcctccccaagccgcaccagccctgaatccctctatagtgacaactccaatggcagcttccagtccctgacccaaggctgtcccacctacttcccaccatcccccactggctccctcacccaagacccggctcgctcctttgggcagcattccacccagcctgagtgatgacggctccccttcttcctcattcttccctcgtcgtcatcctcctcctccttctataatgggagcccccctgggagtctacaagtggccatggaggacagcagccgagtgtcccccagcaagagcaccagcaacatcaccaagctgaatggcatggtgttactgtgtaaagtgtgtggggacgttgcctcgggcttccactacggtgtgcacgcctgcnaagggctgcaagggctttttccgtcggagcatccagcagaacatccagtacaaaaggtgtctgaagaatgagaattgctccatcgtccgcatcaatcgcaaccgctgccagcaatgtcgnttcaagaagtgtctctctgtgggcatgtctcgagacgctgtgcgtttttggggcgcatccccaaacggagagaagcagcggatg

SEQ ID NO: 432453 - DNA, 487 bp, Homo Sapiens
tagagaagaaacactggtccttctttcaaaattaagcaactattaaaagcgccattttatttatttcatttaaaaaataatctatgcagcatttcaagaaacaaccatatggtgttgtatattataaactggtgacattctactattgaattatgtacaacattttcattttttatgcttcttgaggtggtaatgagaaaaaagttttttaaaaaagtgtgccttgctgtatttcttataccatttattaaaaagctgctttcacggtaaaattatgttggtttgaaaggaggaaatagcaaggttaagatgtgtgaataatttctgtatatatgtataaccaagtacaaacattgatgtataatgacagtataaaatgctttcatgtttgtgatgtctagtgatgtggaaaatataagccttaaatccattagattgcatggtaattaaaattggcataataaacacagattattgggggaaaagg

SEQ ID NO: 432454 - DNA, 1018 bp, Homo Sapiens
  misc_feature (24)..(24): n is a, c, g, or t
  misc_feature (47)..(47): n is a, c, g, or t
  misc_feature (112)..(112): n is a, c, g, or t
  misc_feature (819)..(819): n is a, c, g, or t
  misc_feature (858)..(858): n is a, c, g, or t
  misc_feature (874)..(874): n is a, c, g, or t
gactttaacaaccgggtttaaaancccccaagcagctgggattcagntgtagtttaactcgtacatactcccctgcttttgaaatttccttctacttttgttttaatgtttntcttcttcctttttttcttgagccgtgatgcaaccttcttcagtgcaatacagttgtcaatcacaacaaaacgagggcatcccaagagaaaaggttttaaacctcctgctttttctagtatctgtcgagtttcttctgggaaaaactcatattctgcagagaacatcttgttactcatgtccaagggaccatgttcctccaaaaactgagagaagtaatcatatagagttgaacatttttgttttgggttcatgtcccatagcttcttattgcggacaacatattcgttactgtgttggtcatagagagcttcgaattcttctacatcttgccgaagatggtcaggcactgcaaatgggcctgcagaatctgaatttcgattgctatggtcttcacttgaagtgatgatctcattatttgaagttactgaagttgttccagacccaactaacataggctttgaatcctttggcttctttttcttgcttttgtttttcaccttggttgaactaaacggtgcttcaccactatcttgtttccttaacacagtacagcggctgttaatagattctgtcagtgtaacatgcaatctttcccatgatgctgtgaaaatatccattatatcaaagaattcatctaaagcactatgcaatgctgggaacttgtctctgtgttctctagcaaccatattaaacaacgggcttccntcaatgatgctggctcagagaaataatcaagttgctttncttctatagagtctangttgtgaccatatttctcattcccagagaaagtcatgatacctaaaatcagccagtttagagatgcttcataaccagaaaaagaaagtccctgtgcatctaagccaaaagttataaagttttggatccaggcggctaattgggc

SEQ ID NO: 432455 - DNA, 1104 bp, Homo Sapiens
cctgttgaccattttttaatttctctttccaaatcttgaaggaaccaatctaattccgtctttgagatcttgttttcttctaagtgccttttcaacttctcttccaggtccctggtctcttctaagcccttaagttttatctgctcataattttcatacacttcttgaagttggtcttgtaatacttggtggctccttttcaatccgtgaaatttccccttgtcgttcctcaaaaggattatatggctcagtattgacttctttggtgtattatgttccaagatacctgtatgggcaaccatctgcacgtgtggaatgttttgttactgcacttggtgcttttctggaattacttcacatttgttgttagaatttccacagtgcttcatcatttctgttagactcactcaggactgtatgagcatcacctgtgctgcagtgtgactttacagatattcccaaagagccctcaaggatctgtgtttcagaggcaatctggtgaccagcaacattctcagcattcaaatgatgaccctcagaataggcagcagcattgttatctgctctgtcattggctacaaaagacggcaccactggtactgatcttggtagctgatattcaggagaaaggctggccaagggtgtatatatgctggtgtactggggcaaacctggtaacacgtttatgtatgctggcggtgtctgggtgatatcaaatctctggaaaggaagatacgtacagtatcctgtgaccaaatgggattgagcccaataagttggtttcacatcctcaagaaccggtttgggggaattacaggagactcgcttgtaatttgcatcctcagagcctggtttaggagaattagaagagacccctttgggttgcccatcctcagaaacttgtctagaagaattgtcggatactggtttggccttcacatcttcacaagctggcttgggagaatttgcagacacaggtttgggtttcacattttcaaaagctggtgctgaagatgaatctgacactggtttagactttacatctggtttaaattccctagcagctggattcagttgtagtttaactcgtacatactcccctgt

SEQ ID NO: 432456 - DNA, 766 bp, Homo Sapiens
  misc_feature (3)..(3): n is a, c, g, or t
  misc_feature (6)..(6): n is a, c, g, or t
  misc_feature (8)..(8): n is a, c, g, or t
  misc_feature (97)..(97): n is a, c, g, or t
  misc_feature (138)..(138): n is a, c, g, or t
  misc_feature (154)..(154): n is a, c, g, or t
  misc_feature (164)..(164): n is a, c, g, or t
  misc_feature (175)..(175): n is a, c, g, or t
  misc_feature (188)..(188): n is a, c, g, or t
  misc_feature (190)..(190): n is a, c, g, or t
  misc_feature (194)..(195): n is a, c, g, or t
  misc_feature (197)..(197): n is a, c, g, or t
  misc_feature (201)..(201): n is a, c, g, or t
  misc_feature (210)..(211): n is a, c, g, or t
  misc_feature (215)..(215): n is a, c, g, or t
  misc_feature (382)..(382): n is a, c, g, or t
  misc_feature (384)..(384): n is a, c, g, or t
ccnaanancccctggagagttcaggggactccaacacccccaaagacctggtcgatcatcttccgggcctcctccacctccgtgtcctgcgcctcgntctcgatggtgtatgtccctgcgtcactgaggctgtcgtcnttctcctgtttccgtnccttgatcanctgggagtccntgggagcgagcantngaanngnggancaacggaannggtnccatggggtgtcaggggagcgggcagcaccggaggaaccttctcggggctgggccgggcggccggggagctctcccgcagacactgggccatgaagtcctgggccaggcgggagcggcgccccacgcttccgaaggggcgggcaggggttcgggaggcgggcgaggngntgcccagccgttcctctgtcttctcccgcttgagcgagccggccctctgtggccccgagctgcggccccctgcctggactggggctgggacactggggcggtccctatcggccggcgttgggccacggcgcttgtcggccttggggtccccggacgggctgtgcgtgaaggactgggagcgcttctttcggggtgtgtcctcgtcgaagaactcgatgacaaaggcctgctggttatgtagtagctcctgggggtcccgcttgatctgcctctgcagccgcacctgctccccgctggcctccaagggcaccccagcggccgaggccgccttggccagggggtcctctgagtcactctgcgtgccgtcctcgtgcttgtggcc

SEQ ID NO: 432457 - DNA, 913 bp, Homo Sapiens
  misc_feature (198)..(207): n is a, c, g, or t
  misc_feature (646)..(664): n is a, c, g, or t
actaattcacctaagtctttatttatttggctctaggaagaatttgcatgaaaatgagcctgtatggcaggtacagaatgtactgtaacagcaccagagaggtacatcctctctcctctacagagcctcaatgtttaatacatacatgtgactttagtcataaaaccacatagtccaggaaaaaaggagccctttagnnnnnnnnnntcagtttagaatgactttcaaattgaccattccttttcaaatacttaaattcaaataacagatacattcagaggcccaaatgttggcatagaataaaatcatgttcatttatttttttctgcatcttagaattagaaggcataaaattaaatatgttgaatgtaataaattcatccatacaagtgcaagtctccagatataatgcattttatggcagatttattattttaaaaatgtaccagtaaatcaaaaaagagggagtatgtccatttaacttttattgaagtgtatgtaggaggtcttcagaaatcaaatgtgagcatgaagatatggccaaacataaaatctatcaaattcagtgaaaagttgctgactttaaatagtagttgtaagaatgaccaatatatattctttgttaacaacccctcactctatagtnnnnnnnnnnnnnnnnnnntaaacattcagtaaacattctttcctaaggtagtttcccttatatagcagtgatttatccatttctttgtatacacaaatttgttgaacataccaatcagtggttctcacaattgaaaaataaaagcacaaaaaagtttacactcctgtacaggtaaataaaagatcaccttgaattaaactggatctccttaagggcatagtatagtttcagtttcattacctattacataattagtttcttacatcc

SEQ ID NO: 432458 - DNA, 1028 bp, Homo Sapiens
tgggggaattttgtttttccctggcccttggggggaatgtacctttccttggaaggaaggtgtctgggatcctttataccccccaatgttccaggcagggctgaattgccccaccagcccatttttggttatgcccaggaaggttctattagagttcagatcccgggacatctcggggagctgttctccagggtgattagctcatgactgattcccattccttccccggccgatggcattctgggctttattaatttccttttctacctctgaagcatccgaaatctcaatctcgtagtcctggtaactgaccttgcctctccacttatcttcgttcacaagtttcttcagtttcagcaccagcgggcatctggtcacgatcccgctgcctctgggaagggcaactcctgacagtgcctcctacacggagctcttgcccgagctctggtccccgatgacggcgatggctggcagggccaggtcctgctccacacctagagcccgcagggagtcaatgaggtcgatgcaggggcgcaccttctcctcatactggctgcacaggttgttctcagccaccgagcctggatttttctgggccacagtagcatctccattcagtaatagagggtgggatgcagcagctggatcagcttttgcgatgtccacttcggaaacaaccatcttccttctttgcaaagtaagctctaatatacgttccttcaaataaaagtaatgtcaacaagttaaatggtatcacagagctgttctcctgcacctccttggaatggtggctggatggcggcgttcttcactccagatttcagggagtgggagtcttcctgtagcctccgacccagaaccgatctcctcgcagtgtggccacagaattccaaagcccctgagctgggtgagcaggtgggcggcaagggcgcgagggaggcgtgtccaccgtgacactgggattcctggccggcaactgcggtccaaggcggtcctgcgcagtgctggagtgcggcctccgctctcgc

SEQ ID NO: 432459 - DNA, 892 bp, Homo Sapiens
  misc_feature (32)..(32): n is a, c, g, or t
  misc_feature (141)..(141): n is a, c, g, or t
ggaatccccactaatgccttgtagctggttcnacgtactctcagctttcctacctcccctccctccccccaatctttggttccttaaaacctaatggtaaatactgtatgaagagctcagacgggatgaataaaaatcccncgccgtccctccccaccacataatttgttaggaaatcctacttctaaaatcatcatctttttttggagaatgaggccattctctggaatgaaagcaactggcacagaaatgactggcaatcgcaagtgatacacaaaggcatttttattgcgccggggaataaccactactgctctctttggttcacaagagtcatctatgcatttcaaaagatatcagtaagtcaatgtgccaaagaaattattacaacttctttcttagaaagtatcagtatttctgcttttcttttttcacgtatctctggctcccttgcaacttgcctcacttgattaaaattgacaaattttggtaggacggttaccaatttaagtaggtaaggctcaggggaggtgtctcagtatgatactgagatcagaccaacagacagtgatctccaggcatcagcttcagctgctacaagctaactgtaccaactatggagatgtaagggtggggctggtcaccccaagcagcctacttcaaaaacttttaagaatctttaatgttctattagggatcttcttgcactttcttcctgagcatcaaatatgtaaggtgctaactacataatactcttcccttctaccaccaggcaatccagagccaaaagtgaggtagcaggctgcacactgagcaatctctggtgtacctcctcccaatagtcgttcttcctttctcttgcttggaatgttaaaaatgtttccccttattt

SEQ ID NO: 432460 - DNA, 1830 bp, Homo Sapiens
  misc_feature (68)..(107): n is a, c, g, or t
  misc_feature (1801)..(1801): n is a, c, g, or t
actaaaatgaggaggtggggaagagctatttgcaaaacttgccggccaggcaaatgagctaaaaaccnnnnnnnnnnnnnnnnnnnnnnnnnnnnnnnnnnnnnnnngttaaaccaaccaccctgaaagtttccacatgtgaaatatagatacaacagtgaacaaaatatgtggcctcccatgtacattggttacctatgtacaagtatcctatacaccagtaaaacagcagggcaattagtcaattaaaaaaaatagtacatgttatgtgtaataaaattaaatttacaaaggcttttccactcgtggatttgattccttttttggaggagggagtaatcctggagcaaccacttgcccgtctcagactctacactagaacatttctggttgctggttggatttgccagtgggccagtgaggtcagcgggaatgagggaacagcgggtgacactgcctcagatgataccattaggggggccacagatgggccctaagtcaacaccgttcttcatgtagtacttctccagcttggccagaatgtgcttgccataggtgtacttacgaagagttgcgatgtggggccggatcttatgcatgacgatcttccgctggcctggctccgccacgtcaatcatcttctggaccacgtagttggcatactggtccttcatcatggtgtataaggcactgtggggaccgtcgttcatggtgcacacctcatcgatgagcacagcgcgctccgtacgtgaggcgtgagtaacacacttctccacaacattgcttgcaaatttgtgctgactcaatacaagtacattgcctcggatttctgctacaattttgcttttatcctcaggacgaccgtgctccaatacatgttggattacataatttccatattgatcctgtacaagctgctctgtgtgctggtgaagctcctctaaaatagggagtgtctggtcagggagacagtgctccaggattctctgaatcactcggcagccataaggatgtgtggataaggcaaatacctgtcccttaaacgcatcgatgataaattgcaaagactggggctgtacacattcaatgcatttctgaaccacgtgattgccattctgatctttcacacacttcaagacatggccatctagttcccgaaccatctcattaattacctgctggtctgaaggaataaactcaagagctttctggataacacggcagccatacatctgtagtgccaatgacaggacgtggcctcgaatccgttctgccaaagccagcttctgttcaagactgccaaattcaaagaacttctgaatgacgtaattaccaaacacatccaccatgagttggtaggcagcctggaggatttcattgaaagacaagctggcgctcagctggtgtggcacgctccagtttcagctgaatgaatctggacccatgctggtcttgggaaaattccattatatgtccagcaatctcccgcagttgtaaattggggtaccggttgtttcgaaaatcttccaaaagcctgctcctgccagaaggcatgacatcagacattccatatcgcaaacgagaggaagagaaaagagtgctgctcgggctgaagaggctggaggcgctgcttgcactgcggtacttggcttcagcgcctggagcagcagagatgtatcttccactgccattcgtgagtcctcccaggtttaagcttgaagaggatccatgtgaagagagggaaggaggtggtgtctgtgaatgtcctggtccctgactagggagaggcatgcccacgggnccaggagaggaggaaaagctaaggccgtc

SEQ ID NO: 432461 - DNA, 1534 bp, Homo Sapiens
  misc_feature (883)..(924): n is a, c, g, or t
  misc_feature (937)..(1183): n is a, c, g, or t
ccgggagccttaaccctaggtgttttcctttctcaaatcagcaaattctctctgagtgcctggctttgtgagacactgtacaaggagttacaagactacagctataacctgcagttgagcagttataaacctacaaaatgggccctgccctcagagaggttccagtctagatgaggagctgatctagacaggtaaaaggctaactaaccctttgtgtaaataagttcatcaccccagtaaaagtgtcatcacccagtgaataggaccacctctgcctgcagatttttgttgttgtcgttgtcattgttgtcgttgttttaacctgggaagtgttcttcctgcctttctgctaggtgtcagatagatggtcccagagctaggtgctgtgtcaggccctgaagacacagatgactcaacctaagctttactttccagaggtccacagcctgagaggtgtccccaaagaaagggggacatgaggggactgcatgcttgagagcagggttgtttagggcaggtttggatttagtgagcaggctggtttgcttagagaaggcttttagtggcaacaaaggatgaagaggagagaaaaggaactcacatttattgaaggcctactgtgtgcaaagtgtttcatgtatatctcattgaatgtatacagccaccctgttgtggtataattttgctctttataaagagaaagaccgaagctcagatgagttaagtggtctcctcaacaccaaaatgccaagaagtgatggagcctagacagaagcccagaactttctgactcacactagtccatcctctaccatcacgatgactttcaaattgtgctctgcagttctgcagattttctagcagtgccatctccaaaatgtgnnnnnnnnnnnnnnnnnnnnnnnnnnnnnnnnnnnnnnnnnngagactgagtctnnnnnnnnnnnnnnnnnnnnnnnnnnnnnnnnnnnnnnnnnnnnnnnnnnnnnnnnnnnnnnnnnnnnnnnnnnnnnnnnnnnnnnnnnnnnnnnnnnnnnnnnnnnnnnnnnnnnnnnnnnnnnnnnnnnnnnnnnnnnnnnnnnnnnnnnnnnnnnnnnnnnnnnnnnnnnnnnnnnnnnnnnnnnnnnnnnnnnnnnnnnnnnnnnnnnnnnnnnnnnnnnnnnnnnnnnnnnnnnnnnnnnnngtgtgagccaccatgcctgggctaaactctttaagtctttagtaaatgcagctagattcaaatgggctggtaaccaaattttaacacatcagcattcaccaccaggtttacttttattttcagattggctcattttgggcagaccttagagcaaaggtttcttttagggatctgtggtaccgaatccaaacttcttttaattgttcacaggattttaaaaggcgttagcaccaaattggttggggggatcagaccctgcggttttaagtcaagacctggctcctcaagtaaggtccggaggtccagtgccacaccaccccctttagggtatttgggccttggcaaaactcc

SEQ ID NO: 432462 - DNA, 1432 bp, Homo Sapiens
  misc_feature (275)..(520): n is a, c, g, or t
  misc_feature (909)..(971): n is a, c, g, or t
caccctgttgtggtataattttgctctttataaagagaaagaccgaagctcagatgagttaagtggtctcctcaacaccaaaatgccaagaagtgatggagcctagacagaagcccagaactttctgactcacactagtccatcctctaccatcacgatgactttcaaattgtgctctgcagttctgcagattttctagcagtgccatctccaaaatgtgttttaaactctttatttttttaattattattagtattattttgagactgagtctnnnnnnnnnnnnnnnnnnnnnnnnnnnnnnnnnnnnnnnnnnnnnnnnnnnnnnnnnnnnnnnnnnnnnnnnnnnnnnnnnnnnnnnnnnnnnnnnnnnnnnnnnnnnnnnnnnnnnnnnnnnnnnnnnnnnnnnnnnnnnnnnnnnnnnnnnnnnnnnnnnnnnnnnnnnnnnnnnnnnnnnnnnnnnnnnnnnnnnnnnnnnnnnnnnnnnnnnnnnnnnnnnnnnnnnnnnnnnnnnnnnnnncgtgtgagccaccatgcctgggctaaactctttaagtctctagtaaatgcagctagattcaaatgggctgataaccaaattttaacacatcagcattcaccaccaggtttacttttattttcagattgggtcattttgtgcagaccttagagcaaagtttcctttattgtatctgtgtacgtattccaaacttcttttaattgttcacagattttaaaagcggtagcaccacatggttgtgtagatcagacctgtgtatttagatcagacctgtgtatcacgtaagtgtgtgagtgcagtgcagatgagcaccatttagttatatgtgctaggcaaatctccaacacagttgatgtgtagtcttgtggtagatttgtgcatactgtaannnnnnnnnnnnnnnnnnnnnnnnnnnnnnnnnnnnnnnnnnnnnnnnnnnnnnnnnnnnnnnacggttgttatgaacaaatgacttaatgctttttaagcacgttgcatgacatctggaacacagaaagccctcaatacattgaagctcttaggattttcacgatgttcctgtctgctcaatgcatgctttctttattgttctgacagttgtgtggtaacagctaatatgcttccagttgacttccagtctacctggtgttagaaaccgtttcatctcttatgtaaatctgagtgctgtgctcgcatattgcgaggactcttccagccagtgtgaacaatgtcagaggttggactttaaacttattacttatgtttctgaatgtgggtcacagttaactggatgaatatcccgaagattgtcagaaaagcctttttaacaccggcatctccttgtgacccttcaactatactaatctacttaaaatggtcccccaagtgaatgtcctgtgtacacatacacct

SEQ ID NO: 432463 - DNA, 1448 bp, Homo Sapiens
  misc_feature (73)..(106): n is a, c, g, or t
  misc_feature (119)..(363): n is a, c, g, or t
  misc_feature (1419)..(1419): n is a, c, g, or t
  misc_feature (1422)..(1422): n is a, c, g, or t
tgactttcaaaattgtgctctgcagttctgcagattttctagcagtgccatctccaaaatgtgttttaaactnnnnnnnnnnnnnnnnnnnnnnnnnnnnnnnnnngagactgagtctnnnnnnnnnnnnnnnnnnnnnnnnnnnnnnnnnnnnnnnnnnnnnnnnnnnnnnnnnnnnnnnnnnnnnnnnnnnnnnnnnnnnnnnnnnnnnnnnnnnnnnnnnnnnnnnnnnnnnnnnnnnnnnnnnnnnnnnnnnnnnnnnnnnnnnnnnnnnnnnnnnnnnnnnnnnnnnnnnnnnnnnnnnnnnnnnnnnnnnnnnnnnnnnnnnnnnnnnnnnnnnnnnnnnnnnnnnnnnnnnnnnnngtgtgagccaccatgcctgggctaaactctttaagtctctagtaaatgcagctagattcaaatgggctgataaccaaattttaacacatcagcattcaccaccaggtttacttttattttcagattggctcattttgtgcagaccttagagcaaagtttcctttatggtatctgtgtacgtatccaaacttcttttaattgttcacagattttaaaagcggtagcaccacatggttgtgtagatcagacctgtgtatttagatcagacctgtgtatcacgtaagtgtgtgagtgcagtgcagatgagcaccatttagttatatgtgctaggcaaatctccaacacagttgatgtgtagtcttgtggtagatttgtgcatactgtaagcaaattgcttagcttctctagacatcagtttccacatctgaaaaataagaagatgagagtacacggttgttatgaacaaatgacttaatgctttttaagcacgttgcatgacatctggaacacagaaagccctcaatacattgaagctcttaggattttcacgatgttcctgtctgctcaatgcatgctttctttattgttctgacagttgtgtggtaacaagctaatatgcttccagttgacttccagtctaccctggtgttagaaaccgtttcatctcttattgtaaatttgagtgcttgttgttttttatatttgtgatgactcttccagcagttgttgacaattgttagaggtttgacttttaaataattacttattttttctgattgtggttcagtttaactgaagaatatcctgagattgtaagaaaagcattttttaaaaggtatcacttgtgatcatttatctttctaaattctatttttaatactgttccaccaaagtgatgcagtggttaccatgacaccctaatttcatgtgtttttgtatttatgaaaatagtttcattgtcatttattggcggtatacaaagtaaaatgttataaatgtgaagttataaaataaatatatgctaataaaatcctgagtttttctgattcctaaagnaanccatcacaaacggaatgatgacatgt

SEQ ID NO: 432464 - DNA, 2103 bp, Homo Sapiens
  misc_feature (24)..(24): n is a, c, g, or t
  misc_feature (53)..(53): n is a, c, g, or t
atacacctacatgagccagcaacnaacctcttcttctatctgcaacagtgctnttcgtatggaggcttacatcacatggcggttggccgtcccagatttgaatctgagatagcagtcgttgcagtacagttggtggtttctgatcctgacttcagctcctgaggaagagcctccgaggtcacactcacaggcaacacactgttacgcagctgagagcctgactgtgaagctgaaggggaatggcttctcggggtgggggactgtgtggtggccacacctgtggtggaggtcttcacggagccagctgaaggtgggggcacgctggaggaggggttccgcatgtaggcacggtttgatgtggacaccagctgaggtggtgggcgactaaagtcttgccacagaggaagaagcatagaatcctgtgggctgattgagccaaggaggctgtctccaagaattggatcggggggagtccaggttatctaaagattcgcctcttctcatgatcccaggaagactaacaggctctttgttgacactggcactgcgctgtcggatccagctgttgtcattgtgaaggggtgttctcttcctcatttcctgaaggatttgttgcctctccaattctgctcctgatggtacttgttctttcttggatctcctctgtgaagaggtcgtgttcccaatttggtctaaatatttattgtttccatttttatttgtggagtaatcatccagttcagtagtagatctggatttattcctgtcaccaggaagaaaacctgaagatgcttcttctgtctttggtatatcataggaatcaacaggcctcctgtactggtatattctgactgatgtttcccgctctatctctgcctggcgcttctgctcctccgcaggacgcttctgctcctcagcctcagcctgaagccgcttttgctcttgctcttcctgaagctgttgctcccatttcctctctctctcaataacaagctgatcctgcggcttctttccttggtcctcatgaacaacttcctcttgtggctgtctcctctcctcttctcctgctcgggttccttctctgtctgaagacttggacccttcactccaggtagcttcccaggtggcaagagagggctcccgtgtggtcagagacatgctgtttgagcttaggaccatcagttcctcatccaagtacttggaattctctctctctgcctcctgtttggccctttgccactcttccctcagtttctcctgctcacgttgatatttttcctgcagtaggcggtcttgctccttctgccacctctccttgccgctttccgctcctctcttgattccccacaccccagcgactcggggcactgatggttggaactggaagatcaggaaccaccgaatcagagcttccttttgattcaaaagcattgctttcatcatgaattccattgatttctttggattcaatattagaactctgaaggctttcggagaaatcagttgttacagacagatttgaagatttttctgagttgtaaattccagaagttgcatcaatccactttgtttcaggtgaacctataattttggtagccatactggtgagattgagggttttatgccgtataaatggcagggaaggttggtctttgccccagtcagcctttccatagcgcctcacatccatcactaggtgtccagtttcttgagccttagccatggcttcctcccactcttttgaatcgttatatgaaaacttggtgttgttaatagcaataatttcatcatctacttgtagctgagaaaattctgctgggctacctgcttcaactgatgctacgaagatcccaggaatatcccattttattgtaaacccaaagtcaagactcttcccaggcgtctggtttatgctgattctcatatcactgaactgatcctgggatcttgagacttctctttgtggggagatttccccttctccagattcagacattaaatcaagaccagatgtggaagacaatgtggctttagaagtggcagcctggtcttgggaaagagatgagaagggggatgtaggagagggcagccttgtcacatctt

SEQ ID NO: 432465 - DNA, 155 bp, Homo Sapiens
cttgtgcaactcttggttgcagagccccacaaactccagtagtatcacttattctattgtacaaccttgctaatgcaaattactatacatgcacaaacttattgctactaaaattctacctcttgaaaattactattaattttatggcttttttt

SEQ ID NO: 432466 - DNA, 3603 bp, Homo Sapiens
  misc_feature (410)..(443): n is a, c, g, or t
  misc_feature (1294)..(1345): n is a, c, g, or t
  misc_feature (1733)..(1744): n is a, c, g, or t
accatttgaccatgttatattttaatttgcagagacaaaaatgacaagcaatttatttacataaaactgtacaaaagcgaattaaattatgcaaagtatttcataaatagttggacgagtgtttaatacatttcgccatgttaagcatagttgcgtgcatagtgactcataataaacgatgataaattgttctctgcttcactatcaacatccaagtagcagaacaatagtcaatgattaacattacaaacagatcgtaccacactgaacgcaagtgctttaaactgtaggaaaagtctgaaagtaaaccctaggtagctgaacaaatgatgcttcctccagatgttatcattataccttcacctaggtcacaactcacaagatttactatattcatgatcatgctcacnnnnnnnnnnnnnnnnnnnnnnnnnnnnnnnnnngcttaaggacacattttcttatttctcactgagagcatatacctaagattatttaggtctttagatttctcatgactgtttttggatggctgtttgtttcttgacaatttcttctggtctgtgtgttttattctattttcctacaagacagcttcctagggtagtgtttcagtcagacatcctcagtaccatcttagttcctcctcccataaaaataatgcctcccttgttttctgaaactcaggcagcaggccagtcagaaaccatacagaaatgatatctggagattcagaaagagcagtagattttagattgaagctacagacgttttaatacacataaatttatatagttactcattaatttataaatgtgtcctaatgtataatgcatgcaaaattcacttgagagtcttgtgtacagaaaacaaatatggtttatatactgtacaaccaaaatgaaaccatagctgaaagaaacacaacaaaaaagaaataaagaataaaactctaaatcagtattttaccttgccaaatggactgatttcactcctgatagtatctctgtgttacacttacaataaacgcttttcatcttttagtcagatttaagcagccccatattaatgccttaacctttgctttatgacataacaatattttagggctggtccattatctgagtttgtcagaaggcaaatttttaatatattatttattagggtcagaaaataaaccatgggcaaatatccaggatcaaaaaagttgggaatagcccatttcccctcattgtccaaacccaacaaccgtttttttaccgtaacaacaggtataaaaggcacagttgcttannnnnnnnnnnnnnnnnnnnnnnnnnnnnnnnnnnnnnnnnnnnnnnnnnnnaaaagcactctatatatggagtggcaccagatttaacctatttaaaataaaagtcatacaaacacaaaatatatttctgtgtcatgccagctcattatataataaacatgttatgacagctaattctactagaattactgtgaatacttacagtacactgaattttattctttcacatccattttagttttaaagagaggttcacgagttaaatgacaatggcatggctatcttgaatggggtgcaaacatcattggggaatgtggatccaattaatccgaaggtccggtgtgacccgtattagttttatagacaagagaagggtttaagatagggtgaaatgagctatcagtggtttcaatgtctcatgaaagaaagaaatgcattnnnnnnnnnnnngtttgtcaaacatccgtgttatgcaattgagtattttctttgtaacgtgcaagaaaaaatgtgtatacatttcataagtatctttagaagtattttgtcttaataggtacttacagattatacaaggcagaactgctttaatgcagtttcctaacaaagtactagaattgcatctttccatagtgtaaataataatcaaacataaacatgttcaattactgatattttagtccaatgttttttgtttcaattacatatctttttgcatcctacctattatacataaactaacatcaaaatgaaaactccatttaagaaagagcataaggaaatgacccccaaattgtaccccaccaaacagagaagcggttttcaaagataagtattttgaagacctatagtgaattatcaacctatattccaggctgtgtcactttatagtctaagaaattctgcaaagcatgaaactacccaaagctacattgtttctacagtttgctagagagccatcaaggctatgccttaaccagcttgcaaacattcagtgataagtttgttctcttcacacctgttattccctattctgtccatggattgtcactttcgtctgaatgtcccagctcaattttcagccgtgttaggttatcctctatagagtgagtagctcaaaatctgcatattctgtttctttttattgcactggaaaaactctgctttcacctttgagatatacattctgtgaaaaatgtcactgcccaaaactcctttctttcatgttcagtctagatttgtttaaataatgttcaaatcacattagtgataaagtcaactagggtgtcaccttgtttcaatgttgtgagtctcaaaatatttctatattgcacacgattcaaaattaatgcacttgtggtgcatcaaagtgtgcactgaacaagtaaaaaatgcaattgtaatttaaaatgtggataaaaagagcagcaagcatagcctggattctaaaatgataatcgtggacttaactatcaagactatatgccaatgcatctttcttaacctacccatgatccataaatactattttaaaacatggaatcttccctgataatattacctgaaactaaacttgaacctcaaccaattgcctattataatgccaaaaatatatctcactagttttcattttctgcgctttcaaataaaatccattttaaaagaaggaacattttcctgggcactataaaatgaactagtgtttgattgtttctgtgcatacatgggttcagttgcttttgttgtttaatggttttccacgtcaagaccaaatcaacttcatgacttccctgatctgccatatgatctttggcctttggatgatacaattgttcaagttagttaataatagtggtcttgttctgaaaaaatatatataatttttagaagtcataactggtgaaattgatacatgtaatcaagactgtgtgtatactgagaatatttggtgaatgtatggaattgaagttgatgctcttgacctgaaaataacaacatatgacaatttaggactgcaatcacccactgagtattgtttttctcttagtctttgttggaatattaaagctttgatattcccaaaatactttttaatacagtccctctttctaaggactgtacctttagagggactctatcactttcaaaggattgcctttgatggtgataaaccattttctgatggtatgtctgaaatacattttatctgtcctgcttatttttgaccagccagatgacactcgaacaaaatcaaagtgactaaaatcatgcttcagcttagggataatgagggtgtgttgtgttctgcc

SEQ ID NO: 432467 - DNA, 861 bp, Homo Sapiens
gagtttttaaaagcatgtttatgtgactgcacataaatgtttgtgtaaaaagagcattatgacagttgataccacaaagattacagtaagaaaaagcactttatgacaatatttcacaaattcacaaggatcactttaatatacaaagcaactgctaccattctgaacacaaagcagctattatgtacatagtgttaataaaatgcattgtaactcagtacatttttttctttacacataaagcacaaaaagatttagataaaaaaattaaaacagggatgtttctagaatgtagggaattttattagaaatgtatttccctcattatagttatttatttagtattcaactccaatagaaacatcagagttaaaaatcaataccctgttttgtgctgacagttgtgggggaagtcttctttaccccaaccctcaaaaaccaaaaagccaaacacctttctaggaacttccctgattattttgcttctaaaaagtttcaagtgatacatgtgggttggaaataattccttttgccagggagtgggggagttacaactgacgtgtggacaaatcagtcaaggacaactttacatggaaaactggtaactagcactcttctttgccacccctaataaatctatactcaaaaaaaatgttgacaattatttcccacttttaatataaataattttattacatacacaaattggagtggcacttggataaaaatacatctataaagcatttaccaattttaaaaacataagaaaataaaacctcccaaacacaatgatagatcatttcacttggccaacaaacataaaatcattatttgcagagattttcttcctcctcgttcccc

SEQ ID NO: 432468 - DNA, 1997 bp, Homo Sapiens
tgctgttttatcatcatgtttttacatggggcattcactgggtgtagaggctggccgcaaatacgatgtcccgccgtagcaaggtagccgctgtctccatcttggcacccagcacaggctctcctaccaggcgggctgccccccgcagtgagcgacacatctcagccaggcgctgaatgcagcggaccaccaggccctcaggggtccctgagagccctgccaactcggagaagggcatgccccgggcccactcatatacaacctcaaccagcccaaaattcagctcccccacaaattcctccaccgtctggttcaggccacaagccacctggacctcaccaatccgcttggccacagcccggacacgttctattccctgcttgagggtgtttgggagctgatccccagcgtccccagggctctggcagaccaggccagagagcaaggcagcaatctcctcaggccgcagggtgctcagtgcattgtcaaacatgagctcagtgaggagcaactcatggctgctcatggcacaagccacccgccctgccagcttcacagtgcccgcctcgtccacgtaacccagggttcggagcacctctactcgctgatggtactcaggaagcagcagcaatgactgatccgacagtaggaagcgcagccgctccatctccttctgtatctgcattcgctccccgcagcttcaggtactgggcaggaaaacggggggctgtgtacacactgagcccccctggatcagctcctccagcttccgggcccggagcccaccctctacaactgacatatctttgagctgcaggtcattgacagggtcgagggtgggaggtccggctgggtgggcctgagccagacgcagcagttcctggacagcagtggtcacggctgcaaggggaggatccttcttgaattttggctgctgcctcttgctgaagtcctccaagatcttctccccattcacccggagcaccttggtggtgatggcagccatatctcctggctggagcttgaccacggtgtggtcacaaggcccttcaggcaggaacagcttgaatcccacgaggtcatctggatagggcacctctgcagtggctggccccctgtcctgtgggtcctgggacaagggcttatcacacaagaccagggttgtgaatactctgctggtggagttcgaggagacctgtaggatcactcccaatgcgttgtgatgctcctgattcttcacaaccaccacccttcctgctgagagagacttcagcccgttcacagactccatgatgcgtcgctggatcatgtgctgggtctctgtcagttcctccccccagctgtaatattcaggcaggtcgaccagttggccagtcatgtcaggctcctccaaagctcccagcctcttggtcagttcagccagggcctgttcatgggccttgctgtctttgcgggagggaaactcagagaagctcctcttcatcatgtcctccaccctgagggcatccactcgcagcaagttgaggatcatagtgtacgtgaggcggaactgggactgcagctgggacggcttccccatcatcatgcggtgcaggtctgccatctcgggcactcggcccttgcagagcaggataacggtgcctgtggggtccaggcccctccgccctgcccggcctgccatctgcacatactccccagggagcaggtcccggaaggtggagccatcgtgtttgcgcatggagtcaaacactactgtacgagcaggcatgtttactcccatggcaaaggtctctgtggcaaacaagaccttgaccaggccacggctgaagagcatctccacgatctccttgaggatgggcaggatgccgctatggtgcacacccaggccgcgattcaggagctctgacatgtgcaggacctggggcagctggcggtcagagccacggaggcgagcaaggcagcgctgcaggaagaggtggatctcgctcttctccgaa

SEQ ID NO: 432469 - DNA, 395 bp, Homo Sapiens
  misc_feature (301)..(301): n is a, c, g, or t
  misc_feature (326)..(326): n is a, c, g, or t
  misc_feature (333)..(333): n is a, c, g, or t
  misc_feature (348)..(348): n is a, c, g, or t
  misc_feature (365)..(365): n is a, c, g, or t
atcaacgccgttgactgcatccagccgcctgactgcatccaacgccgccgtagcaaggtagccgctgtctccatcttggcacccagcacaggctctcctaccaggcgggctgccccccgcagtgagcgacacatctcagccaggtgctgaatgcagcggaccaccaggccctcaggggtccctgagagccctgccaactcggagaagggctgttggggaaagtagggtgaggactggatgcactcagcctggggcaggttctccccagccagccgtttgcaaaatcccaaacctcaggtantcaccatgccccgggcccattcatntacaacntcaaccagcccaaanttcagctcccccacaanttcctccaccgtttggttcagggccacaag

SEQ ID NO: 432470 - DNA, 1541 bp, Homo Sapiens
ggtttgcccgagggaatatttcttcgggctttcctccaaggcaggaacaaatccttgagggtttggactggatttaagcctctttaagagtcttgttccacataatgtcccgggagcatgtaaatggattgcccaccaggatcggttcagacaagtcaaggtgacggaaatgtttcctaagcaaactcgtcagtttgttcggggtaaaattgatgtgcttcaggttgctgtttttcagaaatgctttatgagccacaaattttaatccagaatccacaattgtcagatttctcagtcccacataagcttcaacatcatcttcgttgatgatttctaaccttttctggtttgcgatgaaaatttcggtgatgttctcaggatctacactgttaggctccaatctcggaaatgccacgatgccaggagaagggtcgctgcaccagatccgagaggcactgcatttgcaggacgtgggacaggcgaaagcggccctccagaagcccacaagccaggccagcagaagccccataggccgcgccatggcgggtccatgccacctgatccaggacgacatccctagcagccagtgccagcccgagtgcctgtccccgcgctgcaccggccgctttcccccacccgtgcggggaggccttccctgcgcttgcggctctcttaactcctcggtgcttgttgcgggcgtgccgagtccagcttatcagaggctgagctggtccggagcgaagagtgttccggcaggcggcagggttcacagtggccccggcatagcgaaccgctttacaggggggcgctaccgctgctcggagctccgcggcggccgtcgctgcatggcccggcgcgccgggcaccgaccggcggcgctcccgggactctctggggcgcagattccttgttagatgcgaatgggggtccggtatgcacctcgaggccgggctccggcgcctcacgcccgccggcggcgcctgggtccaggctcctgctaccgccggggactgagcgcgtagagcgcgagcgaagcagccagcgaggctcctgctccaacccaattccgggagccgccgccgccgcctctgctactgctggcgaagtgacgtgagggctgacgcagagcaggggcagaaactccagaaaattagtctctagagatgaaccgttcctccgttcgacgcctcccggtcccgtaattcacaccacagtctcttctacaatcgcggtagaggctgtctccctttttgaaatggaaaccgtgcttggttcagctcttgcgcgtgttcatgtgtgctagggtgtgcgcgaacgcgtgccctgcgcccgcgctgcccggagcacgatatgcatccagctacgaagaagccaggcgcgggcagagcctcggggtctcactagggacaaattaggcgatgccgggagggtcgggtgacaaaccgtaactattctgcgggtgcagttaaatgatcccctgcggggcatttgcaagccttgtctgagaatccgtcttcggacgcgtgggtcgacgatatccg

SEQ ID NO: 432471 - DNA, 588 bp, Homo Sapiens
cggacgcgtgggttttttgaaatataagttatttattaatcaatccacttacaaagcaggtggcttaatgcaagcttattgacatcttcacatatgatccatgggaacatgtcctccacatacagacagtgatattactgactggatgcatttgcaatctggggcatattaagcatatttaaacaaataaaattaggctatcctgtatatgaaagtatcttgataataatatgcatcctgaagtagattaaaacttcctccaaaggagaaatgttagtatgttaacttaactttatattctatattatgcagtaaatcttaactatagaaattaaaaattttaaatcagtgatcgactcttggtaatgtatgaagtgggagtatataaccatagcaacagtaggttgacagtataatttgtgcctcacagtatctgcagatttactgttttcaagtttagagagaaataaaacaagagacatgtagattcagctgactttatttacctttaaactaataaaaatcccttaaaagtgatcctgggacctttataagttctatgaatgcacagatacctgccagtgactt

SEQ ID NO: 432472 - DNA, 2089 bp, Homo Sapiens
gtttcattttgttttaggatagcttctctgcctaatactataggatatgtcatgttcgttattgtagccacctccctcagatgtttttcactatttttaaattatataatgaccagtagattcacagtagcatgtacttgacaagtgccatggatatttaagaagaaggtaaataattttaatattttttgctgtaattttataggagcagtggactgtaagagaaatatctataaatcagagagtatttaggaaactttgtattttataggtggtcattaaagtgatcttcaggatataagatagtttacacaaactttattctcctgataggaaatttttattcattttcctaccactcagcacttttgttctgccttgtactgcttatgaggattaatgttttaaatttgctttatttgtgcttttcagagagttgtcataattgtggcagttgtgtttgtggcactgtaaatgctgaaattcatgggaaacttaccaaatgactgcttgagtgttatttcccattaaattgggtagctgtcacaataaccagaagaaatcttgtggcccttttgaagaaagccatgtatgttttgttacctaggttcatagtattttaatttaaaggcaaagagaagcattctacttatttgtcttataaaccattaatcgttttttgtgcagaagagagcttattttgttatactactttgtataatggaaataagtcacattctgggggaaaaaaactggaattgtttgtattttgtttttttggggggggatctttatgtgaaaaatcagagctacttgttaccataagcccttactatcaacaagataattatttgtaatcacttttttatcccaggttggaattgctttccccttctaagttatcttcccttaataatatttatgataccaggacagtgagggtataagagcaaatgtagtgaggtattcaaaaatcctgcatatatggactcaaaagttctttagttatttgaattatatatagctatattattttattagcttgggttgtcagaagattgccaattttaagagtaaagaggagagagataagtaataaaaatagaggaggggaagaaaatggctcccttactggtcttagtaatcttctatatagttaatgagctaaaaaatgatacttaaagttccaggtttggtaccgctagcatagaaacattgcctttcctacacattcctcatcattgtttcctcagaaaattattttaagagtttgtgaaaccagattaaatatctatattcagtttggcctaatttttaaaaataaatatttatactccagcttttgtgtatttggtgtacatcaccacttatgcaaatcaaggatcagaaaactggaggttagccatctccattatttccttttgcacattgggtacagtgggtggcattagtatgcactagctgcaaagtcacagcaccttatggaaataagtatgtttattataataaaaaaagttaagctgcatctctgtagattatttactttgcagactgtaaagctgccctatcttttccagcagaatttactcttccattcttaattcttttttgaaatatcttaaataatttaacattcctttataacttcttaacagtgtcaaaactggggtagaagggattttattttttcccaaaagggttccatctttgctatctgttgatcagccttagaaaatctaagtatgatcaataaattttaatggttgatggcatcctgtgtcagctggagtagttggttgtgaatattaaaacctagtactattttccctcagtaacatgtaattgctacattttttataagaaggtatggttagaaaaaaatgtgaaagatcacttaaaccaaagccagttacaaggagtaatctctcctgttggtttaccttcacctcagaactacaagaatattacaatacatagtgaatagttgtctgtaacatttctaccagttgtttcagtagcatattggtcttggcatttcttggcactgtggttctgctgtattatttgtgatgtcttattgtttgtgagc

SEQ ID NO: 432473 - DNA, 2330 bp, Homo Sapiens
  misc_feature (2121)..(2287): n is a, c, g, or t
cgacgaggcagtactattacggttataaggtaacgaggcctgggtggtgaattcggcacgaggcgggtgtgaggggcttggcctgcgccgcgccagctgcccgcagaggtgcagcctcgaggaatctgagggcgtcggggcagcgaacctttgcatccacggactcctccttccctagtcctgctcaagcggtccggggaatgggttttgtttttccttcattgttgagaatttaaggacctttgatactgctgcacaatagagattgagttctgggatcagttataatatatattttttttagaaagagaaaatgagctgagagtttacaggcactgcagaagctgttcagtattatatgtgtatatgctatttttttagcagccatgtctgagcagaatgttaacataatttttggaaaaattttctttaaaccatctggtttttaagaaatttggtaccaaaaattgatgagtagaggcaaaaatgccccttcatctttctctatatattttccagttgaaaacaaactaagaagtcctttaagaatttataatccgttccccattaacttaatttagcttttccatcactgttaatgatcagagtaacaaagtgtgaaaaataagaaaccatcattgatgttaattaacacatttagatgggccagttaaaacagcttcataagttttaaattaattgtaaatggaatattcctcatttaaaatttttgcactgcattttctactgtaaaccaaaagaggttactaagcaaaaccacctaaatttaagttggtgatttaaatgaatctcacattaaaagaaagcttgacagtgttatgaaagccaccagactcagccagtgtgtccccatgggtatccccagccatccttgctcaatccattacttatatactaactacataatgacctgttcaaaccagactctatttaatgaactgtgaatttacacagaggccattttaaatgggtcaccccatttaaggattagtggatctcaaattattaaccaaacatcactccatttcaaagtaaaatattccaccagcgatttgatttattggctcttccattgccactgagcaatgcccaggaagcaggcacattgccaaggactgggggcatcttgactaggaagctcctcgtttgtgtgagcgtgggtcagaccgccaaagtaggacttcatcgtttacctacctattatcaatatggtgcttgaatatattcctataactgtagaacagtgtggaaagtgatggtaactttgaagttgttcatgttttattggctttgttttaattgacactagtagagttttaatggtctttgtgtaaattttaatggcttttccattgtttttgcttctcttaaaaagtttaagaagaatatgacctcattaaatgtgctgttttatttggaccagtcacacaaaatgtctctctggagttgactttaaagttttttacagaaatttaaactcaattccagagattgaagttgtccaaacagctcatgggcttagtgtccaaacccctgcccagccttccctttccaagttggtgccacctccaggtagccattggtggttttcctaatactgatgtggctgtggaatgataaggtcctagaggggccctggcatttcaggaagcggacctggtattccctgacaaacattgcttaggaaagagggccggagaataagaagccagcacctcatcagtcagccctgcaatgtgagacttccgtagctgttgagagtcactgcaggtgttctttcatcccgtctgattttaacccatggttgagacgttccaagttagatctgctgctcttaggtgtggggctgtccacattagggaacttgcctcaaaaacagtccacagtggcaataccggacttctgttcaagctttttaaagtgctgagtcttacaaacccctgaaggaaggtgaccctttaagagaggatcatctttttttatatttattttcaccaaatagggtgatgagggttggtttttgttccctcaacccatttgggtaaaataacggatctaattagaaactgttttaaggaggggctgggctcggtggctcannnnnnnnnnnnnnnnnnnnnnnnnnnnnnnnnnnnnnnnnnnnnnnnnnnnnnnnnnnnnnnnnnnnnnnnnnnnnnnnnnnnnnnnnnnnnnnnnnnnnnnnnnnnnnnnnnnnnnnnnnnnnnnnnnnnnnnnnnnnnnnnnnnnnnnnnnnnnnnnnnnnnnngaacccgggaggcatagttctgcggtgagccgagattcaacca

SEQ ID NO: 432474 - DNA, 905 bp, Homo Sapiens
  misc_feature (11)..(11): n is a, c, g, or t
gggaagggggnctgggctcccaccatgggcccatgccgagtggatgccccccaccctctctcctggcacactgaggagaggggagagagctggtgattccagaagggtgacccggacagcctagctgggggctccccaatattcgcaggcccagaagacagacccacagccctgcccttgtctctgaggctgaagaccccctgactcccatgctgtgcttgccgctctgaaacaaacagaggctggaactttgtggtccttcccgagttttgtaggggtcactgtcacatgcttgtgccctggaagccccaaggctcttcctccagctggctcccttgtctccagggcttgtggagtatcagggtagggagggctcttgtcctctaagcccaggtgtcaggatcaataatcatgggtagaaggtgccattcagctcacagccgcacccagaatcctttgcagccctccttctttatttttttcccattgcattctgggagtccacatctggctttctcagccactgttcatcaccaggggttttaggaggaaggcttggctcctgtcttcccagacccaccatgcctggagaggtcaggatggaactacctcattcggcaaattagccccaaattgagcgctgaatcgtgtcccatgagatcaggcgccatctgtaaagtctcctctggaaatgccaatccatccttcccccagctgcttcctcggggaggcccctgcccccaccctgccagcccttcccagtctcattagaggaagctttccaaagttctcagttatcaagacctcatccagctcgtccaaaggcttcagggatggaaacaaaccagctcgtctcataggccagcaagctggggcctgtccgccacggtgccctgtgcaccttt

SEQ ID NO: 432475 - DNA, 1020 bp, Homo Sapiens
  misc_feature (653)..(902): n is a, c, g, or t
aggtgatctagaggatccctgcatttactccatggcaacaggtgctgagtggaggtagaaaggaggccaggtggtcccactgacagaatctcagggccgccatccccacggtccaaggggcctatgtgttgccactgactgaaagcactagaaagaatagagggtaacaagtggctcttcctggaggttgtcacagcaaccaacttggaacaccatttggcttaaggaattttttgtttctttttaaatcaggctttcacaaacagatcttgtgcatcagtctcctgggtggaggcaggtagaaggggctgacttgttctcagaaatggaagggacattctcaagaatagcccagacccgcccactttgaataaacccagctaagtcctcacctaagcaccaagacataaaacaaaacaacaacccggatagcgtgcttgcctctccaaagtgcagtcttttattttctcagttgcatcctaaccttgatttcaaccagaaacgggcccctgttcatacggataggggttctggactgttgactctagccctggtcttaattcactggcaatttcatagcctcactggttacccttgagcttcactttcctatttgcaaagagttatttataatttttttgagatggagtctnnnnnnnnnnnnnnnnnnnnnnnnnnnnnnnnnnnnnnnnnnnnnnnnnnnnnnnnnnnnnnnnnnnnnnnnnnnnnnnnnnnnnnnnnnnnnnnnnnnnnnnnnnnnnnnnnnnnnnnnnnnnnnnnnnnnnnnnnnnnnnnnnnnnnnnnnnnnnnnnnnnnnnnnnnnnnnnnnnnnnnnnnnnnnnnnnnnnnnnnnnnnnnnnnnnnnnnnnnnnnnnnnnnnnnnnnnnnnnnnnnnnnnnnnntgagccaccgtgcccgacccttatttgtaaagagttatttaaagcaaacagagaaatttctgaaattcgaattggatatgggccgtgagggtctggtgaccaggtgattaaaatcttg

SEQ ID NO: 432476 - DNA, 996 bp, Homo Sapiens
gataaaatggtaaaaaggaaaacaaaaatgtactgaagccaagggaaatacagtccagttagccaatggcctgctctcaaaccttcatattttaatataaaatattcatacagcatactacacttctgtctgctaactgaatactgttactgatgagctctagacaacagataaagcaaattctctcttccaatatctatgaacagaaaattccaaacactactgggatgtcgctttagggtagggaaatgtgttccgaaaatctgtcttggagaaagcaggcaaggaaacagcgctttttccatcaccaaatctgatcccacgcctgttggaatcaagcctggagtttatagtgttcgcatttgaaggtctctgggctgcagatcaccccactgtttgctgtttcctgtgccgcacagtcttctccctctagaagtaagcatttctccagtcttccttttgttgtgacttctctttcttcagttaagagttaaataataattactgttgctctaaagatgagttaaaaacccaaagtgcaggctagaatcctgccatgagggtgtcatgtctcaggaagctggttaatgtctgtcagtttagtatcattcagaattgcccggattctctccaaggagtcagcttgccggatccgctctaactgcacctgaagggtctgtgaaagctttacaaaatctctctggacttgctcactgacatctaattctgtctgtaatctctgagctttgttcttctcttcaaacattagttgttcaacggtagccttagcagcagtctctttctttaactgctcttccaaactgatctttatttcctgaagactctcaagctgttgagacttctctcttaatgtggactccaactgtcctttttccacttttattctttctaattcagcttttaggctagaaatagaagctatttcctccttgcagttttctatttctagttgcagagtttcttcaagattttctt

SEQ ID NO: 432477 - DNA, 1614 bp, Homo Sapiens
  misc_feature (11)..(11): n is a, c, g, or t
  misc_feature (30)..(30): n is a, c, g, or t
  misc_feature (180)..(180): n is a, c, g, or t
aaggagtcagncttgccggatccgctctanactgcacctgaagggtctgtgaaagcttttacaaaatccctctggacttgctcactgacatctaattcggtctgtaatctctgagcttatttcttctctcaaaacattagttgtccaacggtagcctgtcctttttccacttttattctntctaattcagcttttaggctagaaatagaagctatttcctccttgcagttttctatttctagttgcagagtttcttcaagattttcttttaaacactgttctgcttggatctgctcttttaggaaaagtatctcagccttcagcttttcttctacgtggtctgctgctgtccgcacattaatgatgtcctcacggtattttaataccaactcccgcagtgcctctgtagtgtctgggaggatgaagtcttctgcttgctgtaatgacacatgcaggctgtgctttccctggagactgtcattatctttctgtaacctcaccagctcttctgaaacctgttcccgtgactgcatcagcaccgccatctgttcctgaacatccctctttgcctgggaaagcccctgctgtaactcttcaagtaagatctcggaggcctgggctcttaggacgagtgcagagatctggtgactcgaatcttcgctgctttgctttatgaagtcttccagctcctgcttatctttcattgtcttctctaactggtcattagcttgccttagcatcagctgtaagttttttcacctgttctctcggtttcagcctcctgaatctgaagttccttgtaactgtttttcgtaattggaacacatatcacaacgtctaccaaggtttatttccagcattatgtacctcgtttctgcaagagattccattctgtttcactaactatacgataaccactaggggacacataggcactcgtccatgccctgggtaacgctggagaggagggacgctgtctcttcttgttctggtgtcatcgccttgattgctctttcctgatctttggttaacataaacccacttggcatctggagtgacccaagggatgcagtatcaaagttctcagacactgaatctgctcctaccagtggtccagaatctgactcgtccaggtttccagcagattttgctttgtagttatagcctaaagctttggattgcaatgagcccgaggttcccaagctgtctgtagactgtgctctcctgagtccatctttacacatgtcattgtccgatttactgaaaggatctccagatggcaacagcaagcctgcatctaaggaatgaactgagccacgggtgctgtctaaatgctcctcttcatttgataactgggctgaagattcttcttgagttaaagcacacactactggtatttttatttcttcctcaacatctgcttttttgtgatcctttctcttattgagtctttgttgttcatcatcctcctgatctttcttcttcagttcttcaacttgtcggagctgttctgaagttagcacatctccattcgctgcatgtctctcatcagtaacgctgagagacaaggtagagccgagagacaggtagagccgagagaacaggtagagccga

SEQ ID NO: 432478 - DNA, 408 bp, Homo Sapiens
  misc_feature (389)..(389): n is a, c, g, or t
gaagccgtatgtatctcgaggtcagggattatatcttgctcacagttgtatcctgagggcctggttttgtgtccagcatgtagaaatgacacttagtgtttgttcaatgagtctgtgaaggtagcacattaatgattatcatgtgtaatgagtggcggaatacatttattatagtttttgtctttaaaaacgcagagaattgtctaacttgggccatatgtattttcacatttcaggagcatttagacagcacccgtgggctcagttcattccttaggatgcaggcttgctgttgccatctgggagatcctttcagtaaatcgggacaatgacatgtttaaagatgggactcagggagagcacagtctacagacagcttggggaacctnggggctccattgccaatcc

SEQ ID NO: 432479 - DNA, 369 bp, Homo Sapiens
cctttgtaaaagggtattttggacctcctatagtgtatttggtaccctgacatcatcccccgttaaagcagttttattccctgagatgagggtacagtggaaaacacattagcatccatagattaaaaccagttgacagcggtctcctaaaatgctaaataataaaaattccaccaaaagcaccataacaggttatgaaactcccaaataactacagccctaggaaatattttttaattaaaaaaagttcacaatcttttatgttacaggaaaaaaatccgtaaatctttctgactataaaccgcctcacaagtctgagaatatgacacttttacactgatttaccactttcattgttatcagttaaaa

SEQ ID NO: 432480 - DNA, 2350 bp, Homo Sapiens
  misc_feature (306)..(398): n is a, c, g, or t
  misc_feature (401)..(412): n is a, c, g, or t
  misc_feature (483)..(539): n is a, c, g, or t
  misc_feature (556)..(572): n is a, c, g, or t
  misc_feature (2078)..(2088): n is a, c, g, or t
tggagccgagggggacaaaacactcgaggtcaggaagttgaggagacacgccggcacaaactgggggaaacccccgtttgttctagaaataccaaaatagctgggcatggtgggcaaaatcaggaaatcccacagtactgggggagggcttcgagggcaggaggagtcaccttggaccccgggaggcgggggggtcacagtgaggccggaggagtctacaccccgttgggaacttccaacgcgtgggcgacccagagggggaactccctctccgaaaaaaaacctggccaagcacagtggcgtcannnnnnnnnnnnnnnnnnnnnnnnnnnnnnnnnnnnnnnnnnnnnnnnnnnnnnnnnnnnnnnnnnnnnnnnnnnnnnnnnnnnnnnnnnnnnttnnnnnnnnnnnntagggcatggtggcgcatgccatggtgctagctacccaggaggctgaggtaggaggattgcttgaacccannnnnnnnnnnnnnnnnnnnnnnnnnnnnnnnnnnnnnnnnnnnnnnnnnnnnnnnngagtgagaccctgtttnnnnnnnnnnnnnnnnntccccagcaatcctaccatccccagcctccaggagtgatctgtctcctaagcattgagaaagtggagactaggtagcataaactagtgtgcaaagcttcacactcacattagattggcaggatcattttatgggggaggaacaggtacagccagcttaggggcagagtaggggaggagactggtaagaaaaagaggtctacttcctatccatccctttcttcagggtagagtttcacatggtaggctaaggcagaaagctctcaacccctgcaggaaaagaagaaattcagggcttgagccaggagtaaaggaaagaagaaagcaagttatcctagacatgaaggaatggaagaaagaaatggagtcctatcctgtgtctgtgctccccaccaagggccaatgactccagctctggctctggcttaagctccagcggttgttgcagttcatccacctgtctattagagaccacaatgagcctgtgtttcaggtatttcctccgttcctggagattaactttctcctggtagtagcacccaaaagcttcatcccgggggattcggggatagaggaagcgcagtgggcaggtatattctcctcagtgagcaactggtaatggcggatgatttcagtcagcgggagtgactgcagcacctccttcgtgtacggttgctcagagtagatgagctccttgtcatcatcctggtgctccacccaggagcaggtaatgcccccttctgacgattcactggaagcgcagtagaaaggtgccagacatggtcttcttcagcagccggcgctcctggctccgactcacaaagcccatgatgcgtccatcattccagagatccttcaggtggtcatgtaccaactccagaattttgtccagccatgtccagaatggtaacttgccaggagggctctctcgcttagtgaagtcagcccaggacaataatggatcctcagtcctacagttctgcccgaacagcttgtttctcagcatgctcagctggtctgagttgaggcctcggccaacataggaggagaactgccaactgagagcagggcccagcaagctccagggtgccttgggcggggttggagaagaactgctggttctgaaggtttgggctgagcaaattgaaccagagaactgaagcccaggcaattgagagctggttcatgttggaaataatcaccacagggagggtgtccgttttcagctcctgcttcagaccctggtaggtatatttgaccgtgaagctgatgatgtgcagttcctctgtcacacctagtggccccttattgctgccctttcctgaaccacctgaacgttgctccaccagagtcaggtaaccaaagtcccaaatcgaaccctgactcttgccccttctgcgggggtcaaagttttctggtttgaagtcagaatgttgaacttccggaagctgttccaggaggaagatacatggagacaaggaatggaattattttaaaaactcagcagnnnnnnnnnnncagaagttccacttcatttcagatctcgccatctccctttgtccatctcccaaatccccctcttccttgtttgtgccacacagggctgccgaatgtggttctgcaggtcatacagctgtacagatgtttgcagtgtccttgtcaagcacctacccttgtaattgaggaggattcctgtcaatggagacttccacagtcagtgactcattgccttcctggagtctcaccagcagccttgttcggacggtgaacttgctgcgga

SEQ ID NO: 432481 - DNA, 1712 bp, Homo Sapiens
  misc_feature (1070)..(1070): n is a, c, g, or t
  misc_feature (1109)..(1117): n is a, c, g, or t
  misc_feature (1212)..(1227): n is a, c, g, or t
  misc_feature (1276)..(1292): n is a, c, g, or t
  misc_feature (1493)..(1504): n is a, c, g, or t
cttcaggtagagagaactgcaacaaccgctggagcttaacgccagagccagagctggagtcattagagctggaactagggctggtgccagagccagagctcagcctggacttagagccactgctgaaggcagggctggatctggggccagagctagagtctgtgctggagtccactctggagcctgtgatagagcccacactatgcatggtatcacaaacagtgccagagccagaccaaggacctgtatcacagccagtgccagagccagatttgccctgtgatctgagacatttgaacactgagccaatggaaatcttcagaaactgtgtaaagattgaagaaatcatgccgaatggtgacccactgttggctggccagaacaccgtggatgaggtttacgtctcccgccccagccacttctacactgatggacccttgatgccttctgacttctaggaaccacatttcctctgttcttttcatatctcttgcccttcctactcctcatagcatgatattgttctccaaggatgggaatcaggcctgtgtcccttccaagctgtgttaactgttcaaactcaggcctgtgtgactccattggggtgagaggtgaaagcataacatgggtacagaggggacaacaatgaatcagaacagatgctgagccataggtctaaataggatcctggaggctgcctgctgtgctgggaggtataggggtcctgggggcaggccagggcagttgacaggtacttggagggctcagggcagtggcttctttccagtatggaaggatttcaacattttaatagttggttaggctaaactggtgcatactggcattggcccttggtggggagcacagacacaggataggactccatttctttcttccattccttcatgtctaggataacttgctttcttctttcctttactcctggctcaagccctgaatttcttcttttcctgcaggggttgagagctttctgccttagcctaccatgtgaaactcctaccttgaaaaaaggatggataggaattacactccttttcttaccaatcttntctccctatcttggccctaaactgggggttaccgggttnnnnnnnnnaaaaataatcccggccaacccaagggggaggggggaaaactttctcccaacaattttttcggcccccaaatcttcccctttttttcaaagggttnnnnnnnnnnnnnnnntatccctctgagagacggggggaaaaagaaaaaaatttttgggggaaannnnnnnnnnnnnnnnnaaaaagaaggcgaccaactatttgtggtatcactgtcaaaagagcggttggggggtgcatatattccctccttatgctgggtcataccaccctcactgtgtgggttgatagactatatcccttttcaaccaccacaccctggggtgtgtagagaaccccataccgagtgggcgagggccaacaacccgcttaattatatannnnnnnnnnnnatgaaaacaacaacatatagcaatatagtaattacacacccataacctataaatcacctattaacacggtagcgacctattctaatgtgatagaaacgaatgtcaaaatgcaaaaattataagttacccaagatctaccgtatataagagggcaagcgtagataagaggaggtgacaagacgtgtagcactatataataatatttata

SEQ ID NO: 432482 - DNA, 387 bp, Homo Sapiens
ttgccagggagagagaactccagctttggaagaagtcataagaaggggataaacagaagcctcttggggtgggttagcactcctttcctctaacaaatacctgcagttagaaacatcacatccctctctgtgactcctgtcttctccccagacgtacaccctccctgtggtgatttatttcccacatgaacccgactctcaatatgcctgggacattcagttctctgtttcgatttgctcagccccaaccttcagttaggggagtgggtccgacatgatcaagagctcgtagaggatgggctgtggaagctcggtgtgataggttgccttctgagcctgcctatcgctgctcccatcacctgcagcaccaacagttctctctcctgc

SEQ ID NO: 432483 - DNA, 987 bp, Homo Sapiens
cctcccaagcccgggacagggacggacaggctgggctgaagatggggttccagtggctgaggggcctctgagaaacaaggaagggccctgggaccccaggccaagccatgtccggctcccccagcctggctgagtccacggcgcctccctgcccagccctcgggagaggggagagggcgctggctcctgggtagttccaaagtggagtgtgaaaatagagagatatatatatttatatgcagtgggcagtccagcgtggcactcacacctctgtctggaagtcaccatccggtggttctgtgggctcccaggctgctgcccggtgcagagtcagccgttctcggggcttggggggcagcgagcccagtgtcatagatttgaaggtgctccagctctgatggcgccgatgttgggacaagctggggcgctccccagggctgggcttatcggtgcacacgctccgctcggccgccccacccgaggacacactccaccgcttctccctcttggccgtggactggctgcggtagcggtcgaaagtgtggaacttctggttgagctcgtggtagagttctgaatgccgtttccgggtgtgcatcaccttctcaaagtccaggtctgaataccgtaatttctttcgctccagggagcccatcttcatggtagagccgggcacggtgcgaggcatggtccggctgcgctcccctggctcgggcacttggcgggcgctgggtgtcggcggtggcggttggaaggtcattccatagggattctggagagatccataggcagggcccagccccaggcccgagtggtccacggacaggaagctggggtagccttcagtgtgggccactgtcttggcagctcgccggggggtccctcgggccgggcctgggggcatcctcaccacctccacccccaccgccaggctgcaggctcaaagtccgccggggcagcaccatgtagtctccctcagagcctggc

SEQ ID NO: 432484 - DNA, 1765 bp, Homo Sapiens
  misc_feature (687)..(699): n is a, c, g, or t
  misc_feature (953)..(983): n is a, c, g, or t
ggggtgtgttaggtgtgtgtgcgcgtgccggtttgtggttgcgtgtgctgttacctgtgtggtctagtcgcggcggcctgcgcggtggcgggtgtggcttgccgggagcagcgctcgcttggatggctgcgcagcctccgcactgttcgtcggtgtaatttcagttgttcgtcgcagtgtgcgtcgtgtttgctgcttcagttcgacagcgctgcgcacgcacgtctcgagctgtcccagtcgtatcccgtaccatccacgagacgcagccctgcgccgtgcgtctcgtactatcgcgcttatccgcgccgccagctcgttcgagatggcgtctgcctggatggaggcgtctgctgttgtcgcgctgggcggcctgccagcgtgaggtcgccgcacgctcggttcgccgcggttttataataaaagcaaaggccccgcgcgggtataaaaaaaatgtttgttccacaaagttcaatatactccccgcgattctggcccacaaaagctctgttccaaaggctgcccaagtcgcaatattgcccgcgcggtatgtgtggtaacacaccccggttatgacaaccgcgtttttaaaaaagctttataaaaattgtcccccccttgtagaggccgttttaaaatctcttctgttatggggtgaggttgtggcgcccccagaatattggctgnnnnnnnnnnnnnacagggagagttaaaaggggctcccctcttttccgaagaggccccccaggcggtgccaaggtgttctccccacggtcttacccagacggttgtgtaaacagcgccggcgccaaatgccctatgcgcgttaaataataccgagcgctctccctattatggggcgccaccgttgggacccacaggaaaacctgggggaacgcggtataacaccttgggcgcccctctcggggggaactttttgggcggcgcccccnnnnnnnnnnnnnnnnnnnnnnnnnnnnnnngtgtttcgcacagagtgaagtttattcccaacaaagttcccctcccccctccccagcccgggacagggacggacaggctgggctgaagatggggttccagtggctgaggggcctctgagaaacaaggaagggccctgggaccccaggccaagccatgtccggctcccccagcctggctgagtccacggcgcctccctgcccagccctcgggagaggggagagggcgctggctcctgggtagttccaaagtggagtgtgaaaatagagagatatatatatttatatgcagtgggcagtccagcgtggcactcacacctctgtctggaagtcaccatccggtggttctgtgggctcccaggctgctgcccggtgcagagtcagccgttctcggggcttggggggcagcgagcccagtgtcatagatttgaaggtgctccagctctgatggcgccgatgttgggacaagctggggcgctccccagggctgggcttatcggtgcacacgctccgctcggcctccccacccgaggacacactccaccgcttctccctctttgccgtggactggctgcggtagcggtcgaaagtgtggaacttctggttgagctcgtggtgagttctgaatgcccgttcccggtgtgcattaccttctcaaagtcaggtctgaattccctaattcttttccttcagggagcccatcttcttgtagaaccgggcacggtccaagcatggtcggctgggctccctggctcggcactcttgtgccgaatcttggctgaagg

SEQ ID NO: 432485 - DNA, 473 bp, Homo Sapiens
  misc_feature (248)..(248): n is a, c, g, or t
  misc_feature (303)..(303): n is a, c, g, or t
  misc_feature (343)..(343): n is a, c, g, or t
  misc_feature (449)..(449): n is a, c, g, or t
  misc_feature (459)..(459): n is a, c, g, or t
cccacagagtgaagtttattcccaacaaagttcccctcccccctccccagcccgggacagggacggacaggctgggctgaagatggggttccagtggctgaggggcctctgagaaacaaggaagggccctgggaccccaggccaagccatgtccggctcccccagcctggctgagtccacggcgcctccctgcccagccctcgggagagggaagagggcgttggctcctgggtagttccaaagtggantttgaaaatagagagatatatatatttatatgcagtgggcagtccagcgtggcanttcacacctctgtttgggaagtcaccatccggtggttctntgggtttcccaggtttgtttgcccggttgcagagttcagccgtttttcggggttttggggggcagcgagccagttttcatagattttgaaaggtgttccagttttnatggcgcctnttttgggaaaagtt

SEQ ID NO: 432486 - DNA, 1283 bp, Homo Sapiens
tgagctgccttcagggcccacgaggcaggacttgggctcctcaatcctcatccagggacagccgggatagtgtgcccgtgatggtggacgggttgcaaagtgttgacctcctgaacagcactgtttgacaagccagatccacatccttgttcaaagtctgacaggatctgcagctgcccgttcttacacgagtcaggggagtcttcgctctcatcagcccggcacacccccatctggcacttcaccacatcctggacctctcggcgcaggaagcagtgcacagcagtgatgacaaagccctgcgcggagttgaagacagcaaagaggtcctggaagaggacggaacggcggtctgtcatagccaggacggcagacatccaggtgagcgccagcaggggcagcaccacgcaggagctccagagtgaggccccggccctctgcttcttggatttgtcggagatgccatcacgtgccatgagcttgttgaagacgatgattccgatgagcatgttcaccaggacaatgacggctgcagggcccacaaaggcgtagagcaggccgccctccagggagagccagcagtagctggatgtaccgtatcctttcgttcgggtaaagccaacagacacggccaccaccagggcaggcagaccccagcccaggcagaggaagcgcttgcgaacgaggcgggtgcgcatccgcccaatgacagccaggtaggactgccaggcctcggtaagcacccagcaaaaggaggagagaaagaagaagtgcaggaaggcagccgtcatggtgcacacgcccttgctcagcacccgggactggcccacgaggatcaggatgttggatgccaagatggacaggcagaagttcagcaagatgatggagcgttcagattttatgaacctccaaaaggcggcatagatggcgagcagggtgagcagcgccatgcacgacactgcacagccgatcaccagggggaccgagggggagcccgccagctccagggtcaggtccttgggcggctgggctagtacagcaaaggtggacaggtgctggcactggcagcgggtgtgagctgcctgggtctccagggtctggcaattttcagtgtcccagtctcctgagctggcatctgctctggagtagtcccagctggcgcaatggggatccgtggtcccattgatgatgtaggagagctccacagtgatgaggggctcagctggaggctgggtaggggggcgcacagtcactgtcatcacccgggatgtgacggccagcgg

SEQ ID NO: 432487 - DNA, 1714 bp, Homo Sapiens
ggtccaaggcgaaggcctttgagaaacaaggaggcccggaccccaagccaaagccatggtccggctccccagccggctggagtccacggggctcctgccagcctcggagaagggagaggcactggctcctggggtagttccaaagtgggagtgtgaaaatagagagataaaatactatatgcacgtgggcagtccagcgtggcactcacacctctgtctggaagtcaccatccggtggttctgtgggttcccaggctgctgcccggtgcagagtcagccgttctcgggcttggggggcagcgagcccagtgtcatagatttgaaggtgctccagctctgatggcgccgatgttgggacaagctggggcgctccccagggctgggcttatcggtgcacacgctccgctcggccgcccacacccgaggacacactccaccgcttctccctcttggccgtggactggctgcggtagcggtcgaaagtgtggaacttctggttgagctcgtggtagagttctgaatgccgtttccgggtgtgcatcacctcaaagtccaggtcttgaatacccgtaatttctttcgctccagggagcccccatcttcatggtagagccgggcacggtgcgaggcatggtccggctgcgctcccctggctcgggcacttggcgggcgctgggtgtcggcggtggcggttggaaggtcattccatagggattctggagagatccataggcagggcccagccccaggcccgagtggtccacggacaggaagctggggtagccttcagtgtgggccactgtcttggcagctcgccggggggtcccctcgggccgggccctgggggcatcctcaccacctccacccccaccgccaggctgcaggctcaaagtccgccggggcagcaccatgtagtctccctcagagcctggctcagtgggccgcagccatgtgaggtccagctgccgcaggccaccctccccacacatgtaaacagggttggcctcctgtgggggcggaggctcccccagccctggtgaggctgccatgggcaccaggatattcccaggcagtggtgagaagctgaggctgccctcagggcccacgaggcaggacttgggctcctcatcctcatccagggacaggcgggatagtgtgcccgtgatggtggacgggttgcaagtgttgacctccttgaacagcactgtttgacaagccagatccacatccttttcaaagtctgacaggatctgcagctgcccgttcttacacgagtcaggggagtcttcgctctcatcagcccggcacacccccatctggcacttcaccacatcctggacctctcggcgcaggaagcagtgcacagcagtgatgacaaagccctgcgcggagttgaagacagcaaagagggcctggaagaggacggaacggcggtctgtcatagccaggacggcagacatccaggtgagcgccagcaggggcagcaccacgcaggagctccagagtgaggccatggcgttcctggccgaggctgagctgagcagggggctggggaccgctccacacgctgagcaggggaggagcaggctggcccaggggcaccgctccgacccggccctctgcttcttggatttgtcggagatgccatcacgtgccatgagcttgttgaagacgatgattccgatgagcatgttctccaggacaatgacggctg

SEQ ID NO: 432488 - DNA, 1833 bp, Homo Sapiens
  misc_feature (307)..(307): n is a, c, g, or t
  misc_feature (381)..(381): n is a, c, g, or t
accataaggggtttgagagggaaccaggactcaagccggaaaggcattttttaaggatccccagggccttattttctgccgccagagtaagcccagtttttgttctggatccggaaatttttagtaacttatacagcggcagctcacatttttcagccagctgttttcatgtctccttgtgctagtaaatcatccagatgtaaactctggcttcatatggtttcccatttaatatgtcaaaatacctgccagctggtggccatatctaggagggcgtgtttccaggcacaactccttcatcctctcntgcatttccccaagagtcatccaggtcatagagaggctcaaagttctccaccaggggatctgctcctgctgctntgagaagagctgccagcctggtggaccctctcccagctgctatatgcaggggtgtggttccatcgtaggtagtactgtccacatgggcatcaccctccaggagcaggcagcctgccaatgagatgttgtcgtgctccacagccaggtgcagtgctgtgcgcccggacttctgctcctgagcattgacgtcagccccagcggccaccagtagcagcaaacatggcaggctattgctcatcatggctagatgaatggcattcagaccgtccccgttggggtggtcaagaagtagtgctgcctttttgtgcttgagtaagatactgagaactttatcatgtccttctttggcagctaggtgcaaaacagagttacccaagcggtccagaaggctcaggtcggccccagccctcagcaaatcctccaccacatcttcctgcttagtgatcactgccaagtgcaagggcgtctggtacagatcatttctcatgttgataatgtcatcagaaatcaaaccagatgtgacttctagtagatcccttcccaagttgagaatgaaggtggatgattgctaagtgtaaggacactgtcccccattctcatcttgcacagcagtgagatggcgctggacggcccagcagcatctttcacgtctcctgtccaccgcgtagtcgaaaagggccattggcatgcctctttgcaagctgcatagctttctctagaaagaggttatcctgaactccagcactctcttcttttgttccctgttgcatacgttagagtgacctcaccattcccaacggtggcctcgctgggctcctgatcttgctctgtggtttcaataactttcccaaagaggtttacagtgtttttgtcatcacttttgtcacaaccttcagggtcctttttagattcagtgtccatggttccatgcttcatcccagcattagatttagtagttccaggatggaaagtaatcccaccataagtaggaaatccatagtgtgggaagctataccctggacctgtacttccagtgccccctcctccaccgccactaccaaacatgcctccgcctccagctccggcaccactaccaccgccgaaactatccgaaaaattgggcatgagcttctgacgtttcctctgcacttcttctttatctttgatttcaggatagtagaggaaaggttttggttcactagtttccaagtcagatttcctccgaagctggacaaacacagaggctggttttgtaatattaatatctttatactttggagttttgaagacaatggcaaattgtctatgaacatctgtgggggaaaaatctccaaatccttcccagactccaccattttcttcctcttcataaaatcgaatctggatgtcatctttctgaactttgtcacaaagaagataaatttcctcccctccagtcacacatccagctgt

SEQ ID NO: 432489 - DNA, 132 bp, Homo Sapiens
agagaaggctatgcagcttgcaaagaggcatgcctatgcccttttcgactacgcggtgacagtaaacgcaaaagtacattttctcctaatccgtacttcttcaaagaggcacgtaagatcaggtacgagctt

SEQ ID NO: 432490 - DNA, 1141 bp, Homo Sapiens
  misc_feature (5)..(5): n is a, c, g, or t
  misc_feature (8)..(8): n is a, c, g, or t
  misc_feature (18)..(18): n is a, c, g, or t
  misc_feature (29)..(29): n is a, c, g, or t
  misc_feature (34)..(35): n is a, c, g, or t
  misc_feature (45)..(45): n is a, c, g, or t
  misc_feature (51)..(53): n is a, c, g, or t
  misc_feature (55)..(55): n is a, c, g, or t
  misc_feature (64)..(64): n is a, c, g, or t
  misc_feature (66)..(66): n is a, c, g, or t
  misc_feature (73)..(73): n is a, c, g, or t
  misc_feature (93)..(93): n is a, c, g, or t
  misc_feature (96)..(96): n is a, c, g, or t
  misc_feature (107)..(108): n is a, c, g, or t
  misc_feature (122)..(122): n is a, c, g, or t
  misc_feature (134)..(134): n is a, c, g, or t
  misc_feature (136)..(136): n is a, c, g, or t
  misc_feature (138)..(138): n is a, c, g, or t
cctcnttnagaatccctnggtttttgatnctggnntgagccctcnttagannnanaaagaagangngtccccngcctggatcgatccaccacnccngctcatccacnnggaagctggtacancgctccaatgtntncnccgcacctcctccatgtactcggctctgaggcagatgcatcccagcggttgttcaggatgaagatgtttggccgggagagacgctcactcaccttgtggaagaaggtgcttttccgtctgccatcagggttggactctgagttggccaccagcacaaacacatcagcatccagacaaaacttgtcaatccagctgtccagctctgtggtgacatcaataccagggctgtccatcaaaacgaggtcatccttcagaagtgggcacttagagttgggccacatcacactcactaggctgccggcatggagctgcttgtcctggtggagggcatgggccagctggttcacagtcttggcactcctcttttcctctgagccctcggtaaggagaaaggcctcatggccatctgtgccctctacccgcaggaagcaattggtggtgtggccaatcccagagggcagaactttgtcccagagcatggcattgatcacggtgctcttcccattgctcgtccggccaaaaaaagccactttcatgtgcctccgagccagcacctcactgatgcctctcactttggataggtaacctttgacgtccagaacctgttcttctgtggtaacggggtccagttctgcattcctgtacgtgtcttcaaggaaggtggcgctctcctggatgtaggcccccagctgctcaaaaatgccattgatcttcttcttggcagtgacaaagtgcttaagtggggatgcattcacctcagccatgtgtctcttatttttcttgactgtgacgatagagttgcatcgagagaagagcagggacattgcgttttttggatggtgagagatcttcacaggttaggcatcatggacttggctgaagtccaaaagacaaaaagattctgagttctcttctgtcctgtctcaggttgaggttggctattgattgactgtgttgactccaccagtcctgacttcaccttcccggcctcgcgcccaccgct

SEQ ID NO: 432491 - DNA, 461 bp, Homo Sapiens
  misc_feature (311)..(321): n is a, c, g, or t
  misc_feature (426)..(426): n is a, c, g, or t
  misc_feature (432)..(432): n is a, c, g, or t
  misc_feature (448)..(448): n is a, c, g, or t
tttttaaggatttccaactaggttttattttagtttccaatattatgagcaatgatacaggagtaactcaagcaaatacatcaccttaaatacatcagagaaaactcactgtgtcagcacgtcttgcgctccagcaaatgaacataaaaacaacaatgtcagcagcattaaagtgcttttggccatacttctttcagaaagggtctctccctcagtggtataaatttaattttacgtattgaagaagctcaaaatttcattcattccccaggggctacattgataaaaaattcatgtttacgctaaagaannnnnnnnnnncaaaaagaggcacaaaatccattgggaattgtgtggacagtgattttccctggacatgctgtgaagtgggcccctgtccatttcagggcccggcacacggggganaacctnccacccacaggttgtncaccggggcagag

SEQ ID NO: 432492 - DNA, 1386 bp, Homo Sapiens
caaaaagagcacaaaatccattggaattgtgtgacagtgattttccctgacatgctgtgaagtggcccctgtccattcaggcccggcacacgccgggaacatccacccacagcatgtccacctggcagagtccatcacttcgccccacacaacaggacagactgagggctttaaatacaagcaggtatgtgaacaggacatcacctgtgatgtggccaccaaacagtgcacagaggctaccaactcatttcctcaaagatgagtgatggctgggctgctgggcccctgccttgtgggctgctttttgggagaggtgttgcttatttctaggaagcgatccaacttgtgccacacaggatttgtcacccaaactgcttttctcacacagtcaacaccttggtgacaggcatctgcccccacttcaaccagtaacaatcccaaaactcaacatcagcataaagacaagggggtcagtcgaaggttctggagatcagggagggtggaaagatggacactgggttttccacattgtcccttggccaactgcagtcactggcacaggaaatttagtccagggcacttgggacaaggttgggggtggggtggaaacatgtctcttaaagggcacaacagggatgcaatcaagcctagtgggtgggggctctcagacccatgagcccctcgcagaacgaggccaagtggacggcccattctccagctgtcctgtgtggggcccatgcacctcagccagccaccaacgtccccaccttccaccatccatccttctactacatccttcaaccacctagaccatgccatcttccaaaacagatctacacaaaacaggcctgcacaagtccaggactgacactaaagcaaaggacacaataatgagaagagaggcaagtccctccttgtcccagtgactgccacctgctctgccagctccccatacatccaacagccctcccctctgagctactcccactcctccagctgcctcagcagcatcctttctaccacccccagcacagggcccgcctcagcctaagcccaggggtaactgagcctcaccaccaagacgtgtctgaggctctgcaaatgggatgaagcactgagccaacaggcgagatggacacacacaagccacagtccttctgggacagactctctgggaagaaactccaatcgtcccttacacctgcaggtgtgctgggctgcaaggagggcaggtgcgcacaggctggaggaaggtgggggtgtctgtgtgataccctcaaaggcttccatgaggcattgtgcaatgctgagatcctgaggccttatcaagcaatcaaacggacgcgtgggtcgacgatatcccggacttccggaccagtaccagcc

SEQ ID NO: 432493 - DNA, 1451 bp, Homo Sapiens
tcccctctgagctactcccactcctccagctgcctcagcagcatcctttctaccacctccagcacagggcccgcctcagcctaagcccaggggtaactgagcctcaccaccaagacgtgtctgaggctctgcaaatgggatgaagcactgagccaacaggcgagatggacacacacaagccacagtccttctgggacagactctctgggaagaaactccaatcgtcccttacacctgcaggtgtgctgggctgcaaggagggcaggtgcgcacaggctggaggaaggtgggggtgtctgtgtgataccctcaaaggcttccatgaggcattgtgcaatgctgagatcctgaggccttatcaagcaatcaaatgaaccagagaaagctggaaaaagcctcaacttaactccttggtaccatgctgtccatagctgtcgctgaaagtgtcctttgggggtatgagccagctcttccagcaacagcaggcaaaggtgggggaaaataagtagtgctggagggctcaaaatggtacgagactgggtgcttcattctcttggcagtggccagggggcaggagccacacgtgcccctgggggagcccacacggcacttagggctggcagcaccgcccctctccacgcagactccgcctcaggtgcccactatctgctgggctgcaggtactggtgtgtgaacatgttgagctcactgtccaaccaaccggctttattcctgagcagctttgctttgctctgaagtgagtcaagaacctcaattttcttgttcatggcggcaatttcctgctccaggttctcccgggtgacgtcaacttgctgacacagatgagcaaaggtcccagacagttcctgctggacttggtggctgcagttggagccagtgtagctgatgacaagctgcagcttctcgctggcatgctccacaaactggcgcttgaaggccctctccttggccttggtggtccaggtcagacgctcatagacgtagaggaggccatagagcccaaaggagagggcaatgagccgccagcccactgccttccacaccactcctccaacaacaagaatgcccatggaggtcctggatgtcaaggaggccaggccggtaaccatggaaaccatgaactcctcctgggtgagcgagccctgtggcagtgggggcatgctggggttggctggcgtcagagggatgggacgctggacctggtcattgtagcccatcaaggcccgacggctgttcttggggcccaggaacctattcaccagcatggtccatccgagagagaaatggaactcaatgtcttcctggaagtcagcacacagcttgtcacagtttaggtcatagttgaggttggctattgattgactgtgttgactccaccagtcctgacttcaccttcccggcctcgcggcggccatcacactcactccgct

SEQ ID NO: 432494 - DNA, 1167 bp, Homo Sapiens
gcccagggggcacccgccagcttggaaagaaagggtggggggtgttcttgggggattcccctccaaagggtttcaccgaggggccattggtccaaatcttgaggtgcctggagccccttttccaagccaattcaaaggaagcccagaaaaaaggtgggaaaaaagccctcaaccttagctcccttggtacccaggctggtccataggctttcgctgaaaaggttcccttggggggtaatgaaccaggctttttccaggcaaccagcagggcaaaaggtgggggaaaaataagtagtggtgggaggggctcaaaatgggtcggagagctgggtgtttcattcttgttggcagtggccagggggacaggagccacgcgtgcccctgggggagcccacacggccacttagggctggcagcaccgcccctctccacgcagactcggcctcaggtgcccactatctggtgggctgcagggttactggtgtgtgaacatgtggagctcactgtccaaccaaccggctttattcctgagcagctttgctttgctctgaagtgagtcaagaacctcaattttcttgttcatggcggcaatttcctgctccaggttctcccgggtgacgtcaacttgctgacacagatgagcaaaggtcccagacagttcctgctggacttggtggctgcagttggagccagtgtagctgatgacaagctgcagcttctcgctggcatgctccacaaactggcgcttgaaggccctctccttggccttggtggtccaggtcagacgctcatagacgtagaggaggccatagagcccaaaggagagggcaatgagccgccagcccactgccttccacaccactcctccaacaacaagaatgccatggaggtcctggatgtcaaggaggccaggccaggtaaccatggaaaccatgaactcctcctgggtgagcgagccctgtggcagtgggggcatgctggggttggctggcgtcagagggatgggacgctggacctggtcattgtagcccatcaaggcccgacggctgttcttggggcccaggaacctattcaccagcatggtccatcacgagagagaaatggaactcaatgtcttcccctcgtgccgaattcgcaacccagcctcgtaccttagccgtatagtgg

SEQ ID NO: 432495 - DNA, 1564 bp, Homo Sapiens
  misc_feature (18)..(18): n is a, c, g, or t
  misc_feature (1419)..(1419): n is a, c, g, or t
  misc_feature (1442)..(1442): n is a, c, g, or t
  misc_feature (1481)..(1481): n is a, c, g, or t
gggcgctcccgcaggatntcctccaagatggcggcgcagaggaggagcttgctgcagagtgagcagcagccaagctggacagatgacctgcctctctgccacctctctggggttggctcagcctccaaccgcagctactctgctgatggcaagggcactgagagccacccgccagaggacagctggctcaagttcaggagtgagaacaactgcttcctgtatggggtcttcaacggctatgatggcaaccgagtgaccaacttcgtggcccagcggctgtccgcagagctcctgctgggccagctgaatgccgagcacgccgaggccgatgtgcggcgtgtgctgctgcaggccttcgatgtggtggagaggagcttcctggagtccattgacgacgccttggctgagaaggcaagcctccagtcgcaattgccagagggagtccctcagcaccagctgcctcctcagtatcagaagatccttgagagactcaagacgttagagagggaaatttcgggaggggccatggccgttgtggcggtccttctcaacaacaagctctacgtcgccaatgtcggtacaaaccgtgcacttttatgcaaatcgacagtggatgggttgcaggtgacacagctgaacgtggaccacaccacagagaacgaggatgagctcttccgtctttcgcagctgggcttggatgctggaaagatcaagcaggtggggatcatctgtgggcaggagagcacccggcggatcggggattacaaggttaaatatggctacacggacattgaccttctcagcgctgccaagtccaaaccaatcatcgcagagccagaaatccatggggcacagccgctggatggggtgacgggcttcttggtgctgatgtcggaggggttgtacaaggccctagaggcagcccatgggcctgggcaggccaaccaggagattgctgcgatgattgacactgagtttgccaagcagacctccctggacgcagtggcccaggccgtcgtggaccgggtgaagcgcatccacagcgacaccttcgccagtggtggggagcgtgccaggttctgcccccggcacgaggacatgaccctgctagtgaggaactttggctacccgctgggcgaaatgagccagcccacaccgagcccagccccagctgcaggaggacgagtgtaccctgtgtctgtgccatactccagcgcccagagcaccagcaagaccagcgtgagcctctcccttgtcatagccctcccagggccagatggtcaacggggctcacagtgcttccaccctggacgaagccatccccccccttaccatccaaatgccgaccttatccctgcagtccaccaacaccgcacacgcagagcagcatgctcagcttctgacggagggccttttcgnttccgggccgccacttgttccgnctgagaggacagtcggttagacctatgggacttggtggnttaccgccttggacgggacctggcagcagacgggtgcagcacgtaggcaccggaatgcaccaacaggctgctggggagaagag

SEQ ID NO: 432496 - DNA, 651 bp, Homo Sapiens
  misc_feature (40)..(40): n is a, c, g, or t
  misc_feature (232)..(232): n is a, c, g, or t
  misc_feature (431)..(431): n is a, c, g, or t
gttaataaggaagattggggtccgggtttccctaatccanggactgtaaaaatgtttaaataattcctatttggtaataaacctgaaactagccccttattttcctaggcaacaagttggcaaaaaccttgggtttaccccataaagtgaatttccttaagatattttttaagaactcctgtcctgttatatcccagagacattatcaaattttaaaaggcaaataattcanaaagaaacagctattcagtacatataaaggtaaaatacagttatcttgaaaacacttgttttagaaaaggaaataagctaactagacactttactataaaaattttccatatcttaggatggcagtttaagaaacagtcaaatttgaaagtatccatgttttaagcggggaatgaggagtgtgggggaggtggtgctcncgtttcactgctgtaagaagcttcagctttgaccgctacagtggtaggtaggctcttgtcacacagtttggaaatactttactttagagagattcagatcaagcaaacaactgtgtctgctcattctcgtcaactttgctgtccaaagttgggggctgggggagcacttctgtcgctattcaaatggcagtgttttgagagaatccatttttttatttcg

SEQ ID NO: 432497 - DNA, 1387 bp, Homo Sapiens
catggtgatcccttttccaactgaagtccacccaagtacacactgaagtccatcttccggtaaattatcaagatgtacaaatcgatcataaattgtatctatgtttgcctctgggtcattttcttttaccaaggttataaatatagcttcctcatcttttatattcatgttttcaggagccatacttattgagagttgatttccatccatcaatactgggaagcaggtataaaattttaccatagactcagcagcttttctatttatttctatatatgcctttttatgagatgataaaatcaagatatcctttaaaccaccaaatggttttgctaagtcataaacttcttctacagaatatcctttattaggcaaattagagacaagcatcacacacatttcttctgtttccttgttaagtggttcattctctgtggcctccaaagcagcatcagaaatagcttctttagcacagttttcagtggctttgacttcaatactggtctttatttcagagttttctggtatagtcacaggtttgttagagtctttgtttttgacattcccagtctttttggcttctagagacttctttccaccagattttgctgttttgattgaagctttattacctttaacagctaccgttaccacagattttacagaacttgctgatttccctgtagatttgtttactttggctacagatgccttggcttgtccagttttggcagcagaagttgaagtaacaatttcaacagcttttgaagcatctgcatctctttttaaggtagatgcagatactttctttgactctaaagtctttttcttcacctctttgttctgtgcttttttctttcctggaacacatattttcacactttttccttttatcgtaagaggtgttgtttcaatgtacttcataattgcagtaattgcctctttaaattccatttctaggtaagcctcttttctatatggaacaattaggacatcattcactttcccaaatggttgaaataattttctcacatcttcttcagtacaaccatcctctggtaattcagttataagaagaaccgaaccataatgcaatgactgttctttccgaagctttcgctggagagaaacagctttatcagacacctgtttacattctgacaaagtgtcatcttcaagattctttgatttacaacgaatagaatgtcctcctagatttgaatcactctttgtagcgcttgtaggtttaactgatggttttgttccactgctagttttaggcttttgtgctggtgaatgtcccttatcagcagcttcaagatgcttctgtttattaaattctgtcccatgcccagatcgttgtacctgcccgggcggccgctcgaaa

SEQ ID NO: 432498 - DNA, 2475 bp, Homo Sapiens
ggtattttaaatatacagtaggaacatttattttaacacttctaaaagatatttctccatgcctgatgatttgatataaaaatcaaacccatcatactttccccatcagtctctctacatttagggcaatcagaaatttgtacaacacgaatatttgcttctgaaacgaaaattacaaattaaatgataacaaaaatacacaaatcaactggaccctaaacaaatttctagtgaattctttcctttcccccaatcacctagagcttctttcttcagcctcattctgctccttttcctttctttgcttggccatgaatttctcagtattttgcttatgacgtgtactcttgcagtgatttgtcattgctttttcacctgagtagaagagggaacaaattggacagaagaatccagccttaggtacaagaaagtctaattcctcagggacatcagacgccactgatttgcctgaagaagagtcttcagtcttcttgcgttttcgctctggttctgaatcctttaatccagattcctcatcgacttcactcatctggaaggcctcttcaccttttgctggttctgtcacaacagctttttctgatggcagagttttcccaattctaactctcttggttggagttttagctgttaagtgtctttcaatcatggtttttagatcttcttccataacattctcatttactggacccacttgggacaaggattcaagttttgtcttttttgtgtccacagctctcttctttctattcccttttttatctgtgggatggtcatttttgctttgtgctaactcaacttttaaatcattatctccatcttcctcctctccaacttcatcaacagtaacaaaattaagctcttctttaaggttgttaaaatccgccagagagtcttcatcctcttcagttacttcatccaaagtcactaaatgcaaattcactgctgtcatcttgtatttcatctacagtaactaaagtagaagggtcttcgggcatttgagaagaaatgaagcccaatggaatcccttacagtatctccttcatttcctttagtatttaaagtggcaaaagttatgtctgctgactcattcaaaggtagctcttccacttctccaatttcatccacagttaccaagcgttcctgtttgaggagatcttgttcttcagccactgacagaacagtaacatctttaggttcactgtgggaaatgcaatcatcttggtcaattaattcatctaatgtaaaaagtgaatttgaattttttaccatttcttccatatttagttcttcttcatcaattacttcatccacagtgactagagcttgtgctagatgtgcagctgcatcttcctcttccccaatctcatccaatgtcacaaaagatagttctccctcaacaccacgaggagtggaagttttcccctttttcttctttaagttaagttcagagaaaggaacatttttgagagtttctttcctttttccctttagtggattctgcttggcctgagaaggattcacttcttctataacctcatccacagtaacaaattcatccaaattaaatggaaataatggctcctctttagatttggaacttctaccagtagtgcttttaggattcttagtgttttgctcagccaaagtcttattgttgctgtcatcccgtttcatgatggaaggtctagcctctgtttcctgagattgttttgttatatctctgtaatccagtttagaaagcttgccttgcagggctgagatccttccactgcctcctctggtaagactgctctgagtaggtttgaatttactgctgctttctgccaagcctgacctggcacttgtgggtttaagcagaccaaattccttggctgaaagtttcttttcagcatttatttgatctctgggcacagattttggaaaacttttctgattttcagtttttgaaactgtagcttttgccttaggagaagagactataacagccttgatgcttggtttactgctagatacatctgatacagccagaatactagttttactagtttcatcaggcttattagcctgacccactcctttatttgggtatgccttgaataaagtgttttctgcaggcttttctttcattgctgccatcttttccaccttttctgcactccatcctaccttcattcttttcagccttctactgttcctatttgaagatccattctgttttccttagtattaaattccttctcctccttttcactccatgttaccttttttttcagacatattctattttgtccgctgtcttctcatcacccagtgggtattcctggtacgtcacgtcacactacaagtttgatggctatattcgacgcgacagcatacattgtgcattatagcgacagctacagcgatctaacatgtcggatactctcagtggatacacgtcgcgagggtaagagc

SEQ ID NO: 432499 - DNA, 1987 bp, Homo Sapiens
  misc_feature (628)..(640): n is a, c, g, or t
  misc_feature (1796)..(1847): n is a, c, g, or t
ccttgcgtgcggtcgtgtgctcagtcgatgtggattatggttagcgtgttgctgatggtgatggcttgcctttgtcccaggggacttgctttctagttgtgccctttgttatctggagccttgcctatcctttgtatcgtatcctgtactagcccctgacccctaaccctctgacacctgtgaacaccagatggtccagagattgaagcttgcatatgaatgtaggctgagaagctggccagccctttgaggtgagggctgctgttactgacccatatcctcagcagccttccgccccactctgcctggagtgaacctggtggtatcagaagggaccccacactggtgataaacccccagaaaaaccctggaggtaatttagacctccatctttcccagtaggttattagcatttctgttaaacaagctggggtttgtttacaagagaaaaacacactgaccatggcctttactgtctggaaagaggggcagtggagaagggacaaggggcttgggcccagggcctggctgtggaggtcatacaggccagcagaagaggaactgggggcaatacgcctgcccaacaaggcagccttgtgaccatcattaatgtgaactcgagcaaatnnnnnnnnnnnnntattttgtaggctttttttaaagtaacttaaaagcaccctggtaaagtactactatacccacctgaccctatccccccaaataataaactgagaggaaaatcagtgccctgacttgaatgagtttcctctaaagacaccactgctctgctttatagtttcctataaagacaccaacagactggggagactggagaaactaccctcctgccagccccgaaccctgagtggtggtccccatggcctggagtgggttgctgtatgtggccacttgggagatgacaattctacctgcatggctatctgcttccaaaaggagaagccccctcccaccctctttacccaggagcctgctgaacctgaccacatgtcctcagggcctggaagcctggctgggcagccaaccccatggctcagaggtagtgctgaaaatccctgattcaggagctgatggtaggcattctggatgcttctgaaagctttgaggatttccggcgcctgccacaccccacactcttacaccagtctctctaccacataggaaggggaccagctccccctaggaggaaggtagctaggatagcctctctggctccatacctccactcaaaccccagagggcgggagataacccttgcagatccagtcaccactggggctcctgtggggcatgaggtgtttcaagaatggaagggagcaaatggtcagaaatgatgtgatggagagaaaaatccaaggtggagtaggagacggctggcccattgaaccctggcagtgccctgggcatgcagttaggccagtcacatgcctgagccagcaggttggtccagccagcccctcagtagcacactcctggatggaagaggggcaggtgggcaggcatttgtgcaaaacggcttgtggccctttttccacctgtgacatgtctatatggtccttgcaatccctgaatgcaaccatgaactcttctgtccatacagcaaaggaagaggtccttagtgcaatttccattcggtgcatctctaccctggagggagggcctgggctcccactcctgggccctgcagtgtggcaaagtgattctgtctgtgcaatttctccatgtagctccacatggtccagaactgcaggaggaagaaagcatctactgcataaagnnnnnnnnnnnnnnnnnnnnnnnnnnnnnnnnnnnnnnnnnnnnnnnnnnnnccacaacccttcatgctgctgtggcctctgtacatggcaacacatgagttcacggcagtagaacggagacttgggggtggttcttctcctgagtgcaagcctctctggctcctggggtggggctgggggacttgcttttc

SEQ ID NO: 432500 - DNA, 786 bp, Homo Sapiens
gagaggccatccagcgcgtcctgtccgcctgctcagccgtccttttgcagtcgcagcagcagctcaccttgcggtaggccgtaggccaggagtgcagcactcggtcacggaaggcctctgggacaccccgctgcccccactcacggcactggcaccactcttcctgatggcactcgccaagttgatggggttgcccgcttccgggagggcaccgcgtctgttgcacctggggctggttttccgaaactgaaccttcttgcccaggtagcggcctccagccttgatgacaatggcacttcggctccgcgtctcctcctccgcctgggccatgctctgccgcgccttctggtaggagtcgtcggtggcacacaccgtgatcttgtcctgtatgctgcccaggcagtccaggtgaacttccccatgactggagacatactgctggatgcagtcgaagctgccctgggggttgtcgcggccgatgttggagaggtagaaggagaacgtccgcgcctctgcggggcagtcaggctgggggatggagatgtgcccttggcttccttgaaatcggatagatggcctcagtgaaacagaatcctgtctggcgcggtagctctcgaaggccctcagggcactgtcggtgagcttcacgtggaacaccgacaccttgctgccgtcgctaacccgcccgcacgacagcccgtagctcctatcctccttcagcgccgccatcttgcgaccatctctcccccgcgcccccttcccggctccagcgccgccacgccgatg

SEQ ID NO: 432501 - DNA, 733 bp, Homo Sapiens
  misc_feature (100)..(113): n is a, c, g, or t
  misc_feature (267)..(267): n is a, c, g, or t
aatccctccataatgtgtgccatgataggtccccatcatgaccacctctgatgtctgtgctgctgtcaccaggcacctttgtttttcaagacaacatacnnnnnnnnnnnnnnctctgtttgtgatatcactttaatttttcttgggtggcttagagactaagggaggagacatctggcctttttagaacctgagaggaaaaaaagagtctttttttcccctctgtctctttttgccattggtaatccctgcatttccattcagggnaaaaggtggttagttgagcatagaactgcaacagttatattctgagtcaaagttggggctttttacggcataattatggaatttttatttactggtagagaggagacgagaggctttttcagtgggcctgggacagtggctgctcttgactttgtgtgaagggaaatgccaaggatgcttctggtggacttcaggggaccccagggtttggccgtgggccgtgatggcagcaggcggtgggatgcttgtagctcctcacagcaggattcctgcccactgtttttttctctgttgggagggaagctcttttctaggagtgtctcagttctgcttttggcattagtgatggtggtggtacagttggaattagtgccatgtcatacacaaatgttccacaaggcgggagtgtttcactttctggtgataaacttgatggtcattgttatgattaagataatgccgggca

SEQ ID NO: 432502 - DNA, 505 bp, Homo Sapiens
ttgaggacacgagatcccagcccactcagccctgggagtccaaagacattttaaacagagcctctcttcacatttattaattcctgggaggaatgagggaggcttctccagccccccagagaccccggccttgtgctgcaacaggaggggagggagccagtccagaatccccggcacttctgaggacaccaacagcaccctgggcccgcggctgcatcagctttctgccaccaggagctccacagggtcgctgagctccgattcgaaggtgtggggcacccaggagcggtagcggcacctgtagttgccggcgtgctggggccccacgaagatcagctcgaggttcgccgcggccccgggggtgcggaccgtcttcacggccttcgtctcgccctcgcgcagcagctcgaaggtgacgtcggggatgggtccctcgcagcgcaggacggcatctcggcccgccaggaccgcctcactccacgtcgcccggagctgaggcctggga

SEQ ID NO: 432503 - DNA, 330 bp, Homo Sapiens
  misc_feature (117)..(117): n is a, c, g, or t
ccattgtaaacatgtatttgattttacataaaatatttactttaaaatgagttaatatttatagtctaaaaatgtgaaaatacatatatggtcatagtctgaaagacatatatacancagtaagctttatacctaaataagaacatgggaagtaagaaagataactagcacaaaaatccacactggctgttttactccattgaaagttgcatttaacttttgagttgactgagaaaggaataagatgggatatactataattcttattatgaaatgaggtaactgtactagttattaagaaggaatattaaggctgggtgcggtggctca

SEQ ID NO: 432504 - DNA, 2022 bp, Homo Sapiens
  misc_feature (1718)..(1796): n is a, c, g, or t
gccaaggtatatacacgtttatttaaaaaagtttacagttttcattatacacaactattaagaggttatagtcagaggaggcatgtgtcctgttgacagacgtgcctactagatcatcacaatgcaaggagaaaggtggaagggaggagacagggcgaggaaaaataagcgataaaaagcttcagatttcagttaggggctggcagtcccttttatcttttcaagtatcacacaatatgtaccaaatacaatctgtaaataatggccatttcttcccaagcccacagccaagatgagtgttaggctaaattcagagccctggctcttcctcagatgagtggaaaacctgcgcatgacagggccggctcccccttctcaaagggcttcctcccactcatcccatccctaacagaatcgccgaggtgttcacgggccagagaaagcacaaacatggattcagaagtccaaagaaatgcagttcgttgcgcccaatcagagatagatgatttcattcaacaaggctggaagcccagttgggaagtcgataaaaaatcttgctaacttttttaaatggcttttacttttctaagtcactgaaacaaggaagggccacatgccatttaaaatcaaacactagttcccagagacttggtgtccagaaacttgacccacagaggctagcggaggatctgtctttcatgattctcagccatcccaacgggaggcctaacataaagcatgtgccaggccaatgccaactaggacttcagggggcctttggagggaaaaattcctttgagaggagacattcctcaggagcttagatcagccagctggcagtcagaacagcttttgaagtggatgagaaatgttaggtactggagagatgatatggcaactcctgataatgacctcactaggataaaatgctggttgaaactgcacagtaacctcaaggagggtgatgaaattgacgacaaagccaaatgtcagtgtctaagatggctaccactgaccctgtgcccaaaagccccccggtgctggggcttccagagggagcccaagggtggtggattcaatgttgccaggttgcaaccatcttgcttgttggtgtttggcaagagcttgagctcagttatgtgaacaggggcaaagaatggcttgtgctggtaaaactcaagggaggatccaaaaactatgggcactaaaaaggggagggaaaccgccagaagtggctctgacctgctgccgctgccaccacctctaaagccaagaatgtagagcctctgcccagggatctggatgctctcctgagtgttggaagggcagcctggaaaggcatttggtggtgaaacaccgctgctccagacttacgctaccatctattgttgggggcccagagtccttggattcactgccaggccttcttccagatctttctgtacctgtgtgtttgggctcctactcccacctctcccaggcgcagggagaggacaaaaagcataagggactctgttcaacccagcaaaagtcagtttcccagtggagaggcaaagccccacccagaacataaacatgcatgggaccaaggttagtgcccagacaggacagacttgcacagaacaagagggcacagtgggatccatgcggcaattacaggagcttccagcactaacagaggagccttatcccaccttcatcacacagacttagatggnnnnnnnnnnnnnnnnnnnnnnnnnnnnnnnnnnnnnnnnnnnnnnnnnnnnnnnnnnnnnnnnnnnnnnnnnnnnnnnatctgctaaactcctacaacctcccccagcaggtcatttgacaattctgcatcttccgctctctggtgctggggctctggtcagaggcgagccaatgtcttatcattagagagatgtgggattaggtaaggggcagagtcatggcactgctcacacaccttcccgaaactggggtctattcagttttttgacaagatcaaaagcaattcttaaccctcgtgccgaa

SEQ ID NO: 432505 - DNA, 599 bp, Homo Sapiens
  misc_feature (298)..(362): n is a, c, g, or t
ggccttcttccagatctttctgtacctgtgtgtttgggctcctactcccacctctcccaggcgcagggagaggacaaaaagcataagggactctgttcaacccagcaaaagtcagtttcccagtggagaggcaaagccccacccagaacataaacatgcatgggaccaaggttagtgcccagacaggacagacttgcacagaacaagagggcacagtgggatccatgcggcaattacaggagcttccagcactaacagaggagccttatcccaccttcatcacacagacttagatggnnnnnnnnnnnnnnnnnnnnnnnnnnnnnnnnnnnnnnnnnnnnnnnnnnnnnnnnnnnnnnnnngcagccacactcaaatctgctaaactcctacaacctcccccagcaggtcatttgacaattctgcatcttccgctctctggtgctggggctctggtcagaggcgagccaatgtcttatcattagagagatgtgggattaggtaaggggcagagtcatggcactgctcacacaccttcccgaaactggggtctattcagttttttgacaagatcaaaagcaattcttaactggtcatta

SEQ ID NO: 432506 - DNA, 781 bp, Homo Sapiens
tagtatccgttgtaagtagtcagtttcaagtattcaaagttcaacatagattagaattttgtagttaattggaatgacatcatcaactgtttgtgtctggccaatatatatgctttgatgtaataatgacatgcatgcacattgaaaatgtttaaataacactgacttttagattaattctcagtttaggcctttgcatatctggtatattaagacaaaagcaaaaacaaatatttgcagtgtattcagttttgtcaatggaagcaattgatttccatcattaaatgataaaaagccacttcaatgaggaaatgatttttcagaccttctcatagattctggtgcacaccacgcccttcattttacattccgctaccattttcccattcactagctttctctttatggttgtctctttgccatcccatctctgcacttgattcagtgatcctctctgcagggttacgatgctcttggtctttctattgtcagctgtggtttcttcaaattcctggcctagcttgaaggagatctctgtatttttaaaggtactttcagttcgtatagttataatatctcctttcttgctgatgatcacagtgggtttggccaaatttcccagttttctggtggctaaccccacacccagagctttcatgtaatcgtcaaagttctcactagagacaagtttccaggtgcccaggaatttgttgctcatcgtgatgggtgagagctcaacacagttctaagtgggattcagaagactcagatacaatccgct

SEQ ID NO: 432507 - DNA, 2307 bp, Homo Sapiens
  misc_feature (1749)..(1761): n is a, c, g, or t
gtgagtattcttcctataaaagtggttttattgaccgtatcataacacgcacatacatttatcatttcatatgagtgaaataacaatgttgaacacagttggtactcaataactggtaaacaaactgctaaagttgttggatttttgtatcaattaatttgaacatgcatcacggtattcagaactgaatataattcaattggttaaatgtgccatcactaattttcctaacattatgatttgacaaaaatgttatttactattttacaattataattaatactacattgagttacatgcatctttgaacacctcctattatatccttataggtaaatatctaaaactaaaattgttggtcaaaagtgctaatttccatcttacatatattttctactaccttcctgaaagattttaacatatcaggagttgtaaattctccccaccttgttaacacatataatctgttaatctgataggtgaaaaaaggcaaataattgttttattttatatatattttaagtatttcatatatacacaaatttcattatttccttataatgactggtaaagattgagcacattttctatgctcttggccatttgcaatgcttttcttttatgaattgttcatttacgtgctttccacaattgatttgaatgagcctgttcaacactaaatttggcatatgttttgagtaaatatacatacattactgcaaaagagaaattgcccaaatttaattttaacttggcagtttattcattctttttacctcacctttaattactgcaatgcagatagcatcaacaaacaagagcaaatttgtaaaaaccatttaattggattaaagatggcattcatttgctatgtatattgttgatgctatcatgtttttacaagctgagttaaagaatagctctggcatgtagtaatcttactctgatgtggtgaaaacaattacaactgctcaaatgaagtcaaaataggctaaattcattgtccaaggaggatggataccaccatggctgctcagagacaatactgctaactgggaaaagaaggcaggcaagattttggaactccttggaactttatagatgaaatttggaagaaataggttcaattttgaaacataatttatcaactataactattacagcaaggggtttatatcattccaattacttctactatgcttgttttgcactgtttaggtgatgttaatggcacgtggtagtcatttgtatcactcacagatggaatttggcaaaagagctaaaaaaatttttatgaaaatgaaaatgttgaaataatactctaaatattattaccatgtggctgagttgatgtgattattttttcaggttccagtttagccaatgctctggtttcccaaagggtaaactccagcccacaggatgcttttgtaaagttttattggaagaaaggcacagcgcactcattcaattataaattacctatggctgctttcataacacaacagcagagtagattagctgcaacaaagaccacaaggctttcagaactgaaaatgtgtatttggcaatttacaaaaaaagtttgccaatccatggtctagtttaacacaggctggagaaataattctacataattaaaactgagctctaaatgtggaaatacaaaagactgaaatggcagagtcatcatatctactctaagttttctcagacccagaagacaaagaatgtcagcactattttgannnnnnnnnnnnncatattcaagcacagtataacaaggccagagtgcctgctggacaaggtccctgagttagggcatgctctcttctagtttttctttctatacatcaccacctcacagatcaccatcaccactgtccattcacatggaggtaactcctttgagtttccactgctatgcccttctgtctcttatgccaaacggcacagatagattacagacgaatgattgataaagacagatatatagatgatagataaaaatggactgatagattatttaacaatagatagataagatgaatttagatgaaagcagaattggggaagtttgagaactaccaataacatcagacattaggatacgaatcaaggtatttctcagaacagaacacttactgtaccacataagcttatttatcttatatgtacattggtatgctgtttctgaatttttcttaagaccacagaaagacagtaactatgttttagtgatggtatgcactacaagaagtgcaatcatgctgctttcctgcatgatcatcatgggagttgacgtcc

SEQ ID NO: 432508 - DNA, 954 bp, Homo Sapiens
  misc_feature (370)..(416): n is a, c, g, or t
  misc_feature (588)..(588): n is a, c, g, or t
  misc_feature (840)..(903): n is a, c, g, or t
ggatcgttagtgtccatgtgaatgaagtcctatatagatcacaaatttttatagacaaatctaagacattgaattatttcttctatatatatgatactttggtgtactgtgatcttgctgcttttatccatatgtcagctttggttcttgtgagtttacctgcttattatgatacttggagtccattcatagtgtggggaagaatgatttttgccctgcaggagaaggtctaattgaaataatgctgcttgtccccaaagaaattgtttgccttgtactcttgttaaccttagagctagacctgggaatgattcaacttcaagccttaacctggaattttctggatttgagggaattcccaagcctatgnnnnnnnnnnnnnnnnnnnnnnnnnnnnnnnnnnnnnnnnnnnnnnntttctggtgatagtcttttaaaatagagattgacagtgtatcataggattaccctctaagtgtgaaaatgtgtaattatgtacggtatttagaaaaagcccttatgtgtccattttgtcaactgaatacatttagattcactgggaaagtcagagaaatttattctttagtnatcaaatcaaaccgaggcttttgccatctttggaagaaaagattattcataacccaatgcacaaaggtttaatttgagctgctgcatacgtcaccaaggggacactaggtgaggccttcaaatgattactacaagtctgtggcctgaggttattttaaaattaacaatttcgcatatagccaatatgacaacagagtgtttatattttatacaaatatctgctaaacatgcacacatatactcacgcacacnnnnnnnnnnnnnnnnnnnnnnnnnnnnnnnnnnnnnnnnnnnnnnnnnnnnnnnnnnnnnnnntatggctttattccacagggcacagtggctgtatagcctcaaaattttaat

SEQ ID NO: 432509 - DNA, 750 bp, Homo Sapiens
  misc_feature (661)..(671): n is a, c, g, or t
tttttttatttatttatttaaaggaattagtttgttctcctggctcattcctctttgttactttctgttccaatacacagaaagcttgatcatctttgatcagcagaaatatcttttatttagcaaagctcaacttcccaagagttatgcatggtgtgcctatctgaaggtggtgttagctctgttgaaatgcctgggtctgagtaactgtcatgatttttatgattaaaaacagactcttcatcaagaataatgactaattctaattggtctttgtgatatgtaagataactcataaatgaattgcaatggattttatttcgaattaactatatatttatcaaagaggaactggcagcaagggtttggagaatatttttaggtaccaaatagcatagtgaggattcaaccaaaagatgaatttataagcagcagtgcccatcacctaagtgttttaactaacaggttttaaaaacattttatttacacaaaatatcagggctggataccttttaaagaggaggctcaagtatcgggctgtcatttccaatagatctgaccttttcttcagatacataagcattattttctctgtttaggtccaaggaaaaacaaaaggtaaaggaaataaagggaatatacataaggcaaacatttctcnnnnnnnnnnngcattatatcttaccaattaattaaattgtggcctttgttattataaatgtaatgattcattaacctatattatgtaag

SEQ ID NO: 432510 - DNA, 1477 bp, Homo Sapiens
  misc_feature (46)..(64): n is a, c, g, or t
  misc_feature (68)..(131): n is a, c, g, or t
  misc_feature (1324)..(1352): n is a, c, g, or t
ggcctgggtggcgaattcggcacgagggagagaactagtctcgagnnnnnnnnnnnnnnnnnnnccannnnnnnnnnnnnnnnnnnnnnnnnnnnnnnnnnnnnnnnnnnnnnnnnnnnnnnnnnnnnnnnctacaaaaggcaggtgatgattgttgatctgcaactattgtgttgtgcactccccgaaagggggcagagtaggaagccagggaaggtgctctgaggatgctttctatggagggaataagggctgcaggacactcactggagggagtgtctgggcccttctcctgtcctcctcagccttccctagctcatgtctatggtgttgaagacccattctgtgaacttcttcagcttgtccgaggcgttctgggactcctcctgtagcctcaggttgtcctctcgcaggtgctgcacctccgcctgaaggtgagctttgtcttctttttccttcttcaaatcttcccgaagcatcttcagcataccttccagctggtccactttagaagccagagtgggagaggagtctttactgctgctgtaaggcttcatctgggccagagcctggtcctccagctgatcactgttggatgcagcactccaggggcgatggttttcatcactagcagcaaaaaaatgaggctctctggacctcataggctttggcagcatctaccaggttggaccaatccaagtctgcagcagtgtcaggcaggggcatcaggccagggtcgggcataggctggctgcgggtctcctggatgtcagtgagggagctgtccgaggctgagaactctccatgcagcgatttcattcctaaggtgtaagaaggcctcctcaacgggagcgacttggggagagaagggtacgtgctactgaagaggacgtcgttgggcagggcttggtccagaagtgacgccctggaggtgaaaaagtgctccctctggctattgtaaatgctctcgtccgacagtgttctgtgcaaggcccgccgtgaggtgggggtgctggggaaaggagactgaggagaggagagtgcgtggaacttaaaactcttctgtgattcaggagttgggctttcaagatcaattagtttctttagatcttcttcaatggtggacttggaggttggcttaggagatgcccggaggtctctggttgaggcacgcagcctggtgtgggctatttcattgccatcgctctgatgacgctttctcgtgtccataaatcccacggagtttatggttccttcgggttctttccatccaatcaggtacttgctagtagcgcctggcgagggtaaaaactcctaggaccannnnnnnnnnnnnnnnnnnnnnnnnnnnntggtgcgagctgtgagggggcagctggatgaagctcttctttaggtgaactccgggcactggtgaaaaccactgggctggcagagtgtcgggagctcatggtacttgtgtgggaagcagctcgct

SEQ ID NO: 432511 - DNA, 1131 bp, Homo Sapiens
  misc_feature (943)..(988): n is a, c, g, or t
ggagtggtatcaacgcagagttgccattacggccgggcattcccactgcggaccaactatatgtatgccaaggtgaagaagagcctgccagagatgtacgccttcactgtctgcatgtggctcaagtccagcgccacgccaggtgtgggcacgcccttctcctacgctgtgcccggccaggccaacgagctggtcctcattgagtggggcaacaaccccatggagatcctcatcaatgacaaggtggccaagttgccttttgtcatcaatgatggcaagtggcaccacatctgtgtcacctggaccacccgggacggggtctgggaggcctaccaggatggcacgcagggtggcagtggcgagaacttggcgccctatcaccccatcaagccccagggcgtgctggtgctgggccaggagcaggacactctgggtggtgggtttgatgccacccaggcatttgtgggtgagctggcccacttcaacatctgggaccgcaagctgacccccggggaggtgtacaacctggccacctgcagcaccaaggctctgtccggcaatgtcatcgcctgggctgaatcccacatcgagatctacggaggggccaccaagtggaccttcgaggcctgtcgccagatcaactgagcacggcaggccaggctgagcccgcccgccctcgccccctgcttgtgcggcgatgatctgttttgtgcgtctcttctctcccttttccccaggaatgaaccgaggccgtcgcccctgcacacgcacacgcacacagcctggttttgtcctcatgcacacgaagcagcccctgctcccatctgtccctgaggaagccccacttctctgtaggagcccggactctctcaggcatgccccattcacagctgaagtgggtgctgcaacgtcttgaacaaggcagaagttggtgagaggatcnnnnnnnnnnnnnnnnnnnnnnnnnnnnnnnnnnnnnnnnnnnnnngctgggggaggccttttctttgaggacgtacctcatttccttctttcttctggctttggaaaaatctcatgatgaaaattcatatttgccaactttgttagctgcgtgcgtgctttggggttggtgcaacctcagtacacgca

SEQ ID NO: 432512 - DNA, 791 bp, Homo Sapiens
  misc_feature (43)..(43): n is a, c, g, or t
  misc_feature (639)..(639): n is a, c, g, or t
attttaagccacttgtttggtgttatggattttaagaatcagntggtgttagaatttttaataacacagagaaagccattgaatatggaactcaaattatctaaggtttacccagaagtcaaaatcacctggccctctgtaaatttctctttgtgttcctaggcccacaaagtctttggtctgaagactcagagcttaaattgcattggtcctgttaatctttgtcaaaaaggaagtttgggcggcagtttcagggtagtgttgagaagataactcctggtcccattttattctttcctcatttgttcagtgctcatggccatctacaaccttccttgattctattctgcctaagcctcttatttccacatctataagtatagtgctacataatatttacaacctttaagaaaatggagagttttcattaaagggcccctgcaaatctatgatgctagatgacagattctaccagaaggccagagtattaatagcacccgtgataactgtaataagaatatgtctcgttttcttttaaagacatagatattccattttaatcctgtataactcaaagaaaatttgggtgttaacactttgaaatacctttacctcctttgggggaaatccaaactgaanggaattaatatccacatcagttcctaaagcaaaatgcctgacacagactaacaaagctctttctcatcctgtggtaggaacttaggagtgataactcacattgagaacttgtgatctgaaagcactaaggaatttctgccattgcaggtagg

SEQ ID NO: 432513 - DNA, 712 bp, Homo Sapiens
  misc_feature (505)..(514): n is a, c, g, or t
gtacttcagtgtacatttttattcatagttgaaaagaatagtctattactgctaacttactgtaaatttacttagaatcaaagggtccagagagacataaaaaatgtatgtagtttctgttaaataacactttctgatcactttcaaatatgagtataatatacaggcattatatgcacaaaaatgtaaataggtaattgtgaaagcaagtcttgttatcagtttgtataagaaaaaagacatttattttttcacaggctaccaacatcatataagatagctcctgataggctttgactttttcaattaattcatctcataagtcaaacatctgtagaaaagaagttaatatacagtgaagtcactacacagtgttatgggacagtagaaattcatatcagtacaaaatatcattcaagatttttacattgaattccagtgtcaagatcaagagacatctttgctggcaagcaatctaagaattatttgaagattgagagatttnnnnnnnnnntgatttctgctggtaaaaatgttaaaatccataacaccaaacaagtggcttaaaataataaatggaattaatgagctttgcttgtgccatagaaacaaattaagctaagcatgccacacaaattgtccaacattccattctccacagttatttcacttggtgctccagacattatgttttgcctaaaaatatcatgta

SEQ ID NO: 432514 - DNA, 706 bp, Homo Sapiens
  misc_feature (417)..(417): n is a, c, g, or t
  misc_feature (434)..(434): n is a, c, g, or t
tgcctggtgcgtcaaagtcggctacgggggtgctttcatcagtctcactgtctgtaggggtttccaccgagtcaggggggatagcctgttccatcaccatctcctgtgattttaccccagctaaggtttcggcttgacaagtggttacaagctcactggactctatgctctctgtgacttgaggagctttttcaaagctttctggggtggtctgccccaccaccttcccttgtgtaaaaggctcagtttttgcctcctgagcatctactttcaacactacatccgtctctttcttcagacccgacgcttcagcctgctcttctggtctttctgcctctgctctctgcacaggctgaagcacatcttctggcccaccggtgccaggcagctgggattcctctttcactttttctgccnctgcctggaggacctcntgagtccgcctctcttgctcttctatgtcaggtacgccaccttccacctcctgcaccggagtggcctcctctgtggtgtctggggagtcggttaactgggagactgctgacaccatttctgtggtctcttcagcagcagatgcttcggttccttcttcggcacccaatggccctgcagtttctgcagctgtcacagcttcgggggtcaattccgcctcactaacgaccgtgtcgccccgggcctctctgttctctggcagaggttcagtaac

SEQ ID NO: 432515 - DNA, 801 bp, Homo Sapiens
  misc_feature (474)..(506): n is a, c, g, or t
  misc_feature (534)..(556): n is a, c, g, or t
  misc_feature (668)..(668): n is a, c, g, or t
  misc_feature (673)..(673): n is a, c, g, or t
  misc_feature (701)..(716): n is a, c, g, or t
gtagaccatgcacatttcctgaaatcagagaattgtctattttgtatgaagccaatccttttgctttggtaagaggaacaaatagatgttacaccctcgtaaggggaatgtgaaggtaaccaaagttcacaaacagtacgaagaaggggcaacacaagaacattagaaatggagagtggccaagagctggcttcaactctctccgatgaataaagcaaagcaaaacaaaatcccccaaaacggcaactcccaaattaacggtggggagaaagagaaaatatgctcatgaatttgttcacgtaaacttcaattttcttgcagtgcaaatttatgtggttaaattttgcctatatgaaagaacatgtgtattttttcctctttcctgatgggaatccacaataaataaacacagcagcatgtgccaactctaagcatcaggaagctgcattttgtgtttatcatggtttggtggannnnnnnnnnnnnnnnnnnnnnnnnnnnnnnnngccaggtatttatctcagtgcttgccannnnnnnnnnnnnnnnnnnnnnnagctatcacacactctcctcactctctccaggagacactccactccattgcctggttactcgcctgcaaaggtcaaaacacatcattacacctgctacctttaaaggatagnccagngtcttagagtgctttccttttgccttannnnnnnnnnnnnnnnaagggacggggaaataataattaaaaataaaagaacaatcagaagttagagagggaacaagagggccgggaaagggccaaggacc

SEQ ID NO: 432516 - DNA, 476 bp, Homo Sapiens
aagttatggctataaaatgtcctcggatagagtcattactacattatacatacattctgccatatacatctatgtatttctgccaacagatcagacattctgctgtatgataaaaataatgcagtgtcatttttaatatagctgtcctactcctagaaatagcataaaacataaacataaaagtaaacatagaagactatgaatctgaaagaggagttaaagcaaatgtgggaaatgaagaatgttaactaaatctaattattgcagtgatgaatttcatatataatcatatacatcttatgaaactgtaatctattgtggtgttagtatcagtgcaaaaatgagagacctgacatatcagatgtgcttcacatactttaccaaagatcattctgagtcgactatatgcatctgaaccaatacaaaataaaaataatgttacattctcttcaaatatttcatcaagattcacttga

SEQ ID NO: 432517 - DNA, 1808 bp, Homo Sapiens
  misc_feature (1411)..(1420): n is a, c, g, or t
aatgagtaatgaattattttaacttttatttgattattttcatttacagttctggcactgacactttttttaaaaaaagattttaattttatgtaaagattgaacttcaataaaataacttaaaaaacatttacatgtatatcactaaatctccataaaatatacaatacttttgatacagcataggctaggatgactttgaaggaaatggtacatattcataatttttaagagatatcccatatatcgcttgtgggaataaatacttatattgaatttgccaagacatctgaagtattaaatactatataacatgcactcagaaattaaaatatacagtttgaaatacatatattttaaaagcataaaactgtgatttgatttaatctaggtatacattagagcttctaaatagaaatttgaatatttattacaaataaaagatactttaacatcaagtgatatatagtccaaaagctgctaggagacagtttggacgtgtagaatataaatttctactttggctagagttgtctcttcttttttaacctttaaattagatggaataatgttgtttgctaaaactttaaaactttacaaaatgttggttactcattagctgcatgatccacttctttttctcatttatgctgacatgacaaaatcaaacacatgaacttaactgtctaaaataaaaatgtgaatattactgctaaatgaaggcatttaaaattccatagaccaaattactcaagtacaacagactatatattttgtacatataaagatttacataaattatattgttttagctcactagcaaattatacggataaaatactttcatgaacttctgaacatcaacactcttataaaacacctctttgatgattactggcacacaaaaatttccttctctaaagagacaagatacaagaaagagttggtagcagttagctatttggcatttttaaatgattgctatttctagaaaaatagcagcagtattgctcacctagaagagctgaatgtaccgacaatttatagactgctacaacctgaaccatttcatcaaattggctttacattattgtacatgaggccaagaagattggtaaaagtgacagaaaacaggatgtaaaaattaatccacagaacaattctgagccttcttattggcagcagctacatatgagctataaattttaaccacaatttaatacattttgctataaagcacatattataaattctctgctcctggtctgatataatcatctatttcttttactcatagatactgaaaaggtcttaatttggtaattaaaaacttgtcacaacaagtgaataaaaaagtcagttgttaggtacttagtataagttgaccatttttataacttgcaatatggtnnnnnnnnnntctgattataacaaaacgtctcattaattttgttgtttttaataattgtgctgatgaaataaaaccaaaataacattccaactctctccactgtattacagtatttatgaactgtattagtgtcactaaattctgagactttcttagataaacatatggatggtattttctaaaacattcttccatttccaccaacttctggatctgtgagttattctaatatattttcaatattattttgttgttaaaaagcaaaagggtaagttgtcagcttatatttttcctgatcattcttcccctgtataacagatactgaaattacagcaaaaatttcataaattccttgcttttactgatttccccttttagaatgaataacttaatattt

SEQ ID NO: 432518 - DNA, 972 bp, Homo Sapiens
  misc_feature (758)..(819): n is a, c, g, or t
tataaagacactggagagactatctatcttccatttctataatgtgcgcccttatgaagccttcgtacacttgaggggtgagggtcattgctcacagagtagttcaagtcaaatggaacttgaactctttgcctatgggcctggtggtcagactctgtgtagagttcattagattattggagacacaaggtagagctggatgcttcaaaaatatttggctaaaggatgacattgctggttatttgtagataaagccatgatggaacctgcttggaatcatgaaatatggaactggtggtcatgtttaaaaatacaactaatagttaagtacctactggacactgtagagacttaggggctagacagacatggttcctgcccccttggagcttacactgtagcttccccttaggtatgaagaacagtggctacaactaacaaatggccacaaagatataattgagccagtgttccaattattagggtaattcctatttccttaatcattcctattgaccatgttctataagcctgcattctataaatggcgtatgaccatgggctgtttccccccagcaagttgtacaaagttctgtggtaccagggaaagggcttaaggttagcagggcctctgcggaaggacatatgaagtgacttgggttaggaaacaggaagggataggattcaagaacagctattgcttctgttctatataggaaactgcagcgtgaaaaatgctgggctgggaattttgagannnnnnnnnnnnnnnnnnnnnnnnnnnnnnnnnnnnnnnnnnnnnnnnnnnnnnnnnnnnnnattccatttggatgcctcttgagtgactccaggcctctccagctctaaaacattaagatcaggccctacgctacagctggccagtgtgtaattcttctgtttctatgctgttaggtcaaatagatcttcaatagttacttgattgttattact

SEQ ID NO: 432519 - DNA, 1974 bp, Homo Sapiens
  misc_feature (125)..(125): n is a, c, g, or t
agggactgtagttaggagtagagggatgtttgggaggcagtgggtgtcgtggggaggtcttgatacattgaagcttagcatgtgtctagcgctcccactcggcatgtggttactggtaatacatnttatttgtatcgacgagcggtgtgtcgtcttagtctgtgttgccggctgcgtaatgagtgctgtatgttgttacttgatttatctcaagggggtgttagccgtctgcgtgtggcgcgtatccgtttatgtaggttaggttgtttggtgacgtatgtgttgtgagttatagcgtcgcacaggtgagtcggaagttagggaggtggctttgatgttaatgggagcaagcgttgagtggggacgtcgctacgactgctcacactacagatatagtgtcttcctccccactcaggacgtgtgtaccgtagcggcgacgggtctggtggttggaatctcagatgccctcatctctcatacctgctgccggccgtacaacaggccacggggctttgtgatctttccgcttccctccggttccgctgccgctctctcgtgcgcttctctcgcttgccttccggcgcgcgcgcattccgcggcctcgcagcggtccgttctgtgccgtgggtctgtacgttgacgggcgtgcgcgtgggcgtcgcagcaggttccccgagggttctctcaatccctgcagaccttttttttggggtcctagtctggagcgttcctccctgcgggcccttgtagccaccctccaggtcacccagaagctggttccaggtgtcggggatcctgacactcatcgatatgttggcatcttcgctgggccaccagctggaagccgtcggggcacaggcactcgtagccgatcttaaggtcattgcagacgtgggaacagccgccgcttgttgtccaagcaattcgtttggtcccgcactctttgatgggttcatctgaccagtcccggcagtctctagccatgttgcagactttgtccagggtgatgcattcgccgctgtgacacttgaacttgttgggtccctcgcagagtgtcacattaacgcagccaacttcatcgctcatgtcttgcagtcatattcccggtcacactgccggctgccatggatgcagtttccatcagagcactggaattcgtcagggcgacaggtggccacagcgcagttttcctcgtcagatttgtccttgcagtcggggccaccatcacagcgccagctggagtggatgcactcgccacttaggcagtggaactcgaaggccgagcaggggctactgtccccttggaacacgtaaagacccctacagcgctgcggccactcatccgagccatcttcgcagtcggggtcgttgtcgcaggcccacagctgggggatgcaggtggagctgttgcactggaagctggcgggaccacaggtgagcaccgggcaggaggcctcgtctgagccgtccaagcagtcccggtctgagtcacagacgaactgccgagagatgcacttcccatcgtggcagcgaaactcgtcctgggagcacgtcttggggggacagccttgctcgtctgagccgttgtcgcagtccacttggccatcgcacctccagaactgaggaatgcagcggttgacacggcccccacagctgaagtccccggatttgcaggtgacagacaagcacgtctcctgggactcatcagagccatcctggcactcagcgctgccatcgcagacccacttgtaggagatgcatttcccgtcttggcactggaactcgtttctttcgcatctgtcgcccactgcagtccccgccgcggcgaggagcaaggcgacggtccagcgcaatttccagccccagggccccatgctcgcagcctctgccaggcagtgtcccgacccggatcacgacctgctgtgtcctagctggaaaccctggcttcccgcgattgcactcggggcccacgtc

SEQ ID NO: 432520 - DNA, 1265 bp, Homo Sapiens
  misc_feature (238)..(238): n is a, c, g, or t
  misc_feature (243)..(243): n is a, c, g, or t
  misc_feature (1204)..(1204): n is a, c, g, or t
  misc_feature (1237)..(1237): n is a, c, g, or t
taaaccctccttcccgccatgtttgagggaggcctgggtgaacaggcccccagtgccctggagtcccacaacacggccccagggccaccagaagccaaggccaagcccccctgggtggggaggcccaaagtctcttccccactttctgggtggtgagcccatcactgagcccgtggcttcgcatccaccactacacccaggagagggtgatgacaggagggggtctgcttcatcatcncgctnccctgtgggacctgtgtctttagtgaattaatgagtttggggccccacatccccgtcagctctctttggaggctctgggcaccctgacccttggcctggcaggtgcacccactgccataggcatgcgcatagccggtagtcttctcagtaggcagggcaggcaggcacggcgattcttcacaatgggcaggcgccacagggcctcagatgtcggcgcccagctctgcgcactgcttgtctgagatgtgggaggccagggagtctatgatgtccagcagcagctgctggctcagcgaccgcagggtgggcaacttggagaccttggtgaactggtgcacaatgatgtgcaggcagtgccgcttcatgtccagtgcctgcgttttgtcagctgcctccaggatctgcaatggcagggaccttgaggcgctgcccctttcacccactcagtgggagctgcagccatgtgcacggggctggggggctacctgcagcacgttctgcaccgtcacgttcatctccaggttctgcttgcagtacgcctgcagccggttgttgtagaagccgtagtagtagggggccgcaaacaagtagagcgagtcctcgggcggcatgttgacctcgccgtagtagatgtagcgcagcatggactcgaaggcctgcctgctgggcaccatctccccgatggagatgttcacctgcccatcttcgggcatgaaggaccggaacatggcttcaaagtagctggagcgggcggccaggatagccttgtgggctggccgtgggtgcccgtcaagcaacagagtgatgtcacagattccgcgcccgctccctccaggtatgccttcatgtcctggatcagagatgtgccaatgtccactggctggtccaagggagtgcgagggggcggctgctgcttccgccgcacaatctccactatcagtggagaggagaggcgctcganctccttcatcatgatcacctggttgaagtgggnctcctttaccacgaagttcaggcagtgc

SEQ ID NO: 432521 - DNA, 1470 bp, Homo Sapiens
  misc_feature (27)..(27): n is a, c, g, or t
  misc_feature (403)..(403): n is a, c, g, or t
  misc_feature (511)..(511): n is a, c, g, or t
  misc_feature (540)..(540): n is a, c, g, or t
  misc_feature (583)..(583): n is a, c, g, or t
  misc_feature (1220)..(1220): n is a, c, g, or t
aggagaacaccgggggggacttttggngggggtttttttccccggggccggggcccctggccaatggcaccaccagggtggagtttgggaatccctttcaagccccctgtggaaaacccagggctttggccccaggcaggaccggaccttgggaggttgacctttcaggggccttttcatctccaaaatttccaccttaagtttagggtgagaccccatacattcaatgggtcccccattcacaagtttccaggtgggaggaggagcccctttccatggattttcagtgagggttggtggggacaggagcagcccagggcagatttcgctggtgcagcgcaagttctgttaagccttcttcccgccattttggaggagccttggtgacaggccccagtgcccntgagtccacaaccacggcccaggcccacagaagccaggccaagccccactggggtgggaggcccaaagtctcttccccactttctgggtggtgagcccatcactgagnccgtggcctcgcatccacactacaccagngagagggtgatgacaggagggggtctgcttcatcatccgctcncctgtgggacctgtgtcttcagtgaattaatgagtttggggccccacatcccctcagctctctttggaggctctgggcaccctgacccttggcctggcaggtgcacccactgccataggcatgcgcatagccggtagtcttctcagtaggcagggcaggcaggcacggcgattcttcacaatgggcaggcgccacagggcctcagatgtcggcgcccagctctgcgcactgcttgtctgagatgtgggaggccagggagtctatgatgtccagcagcagctgctggctcagcgaccgcagggtgggcaacttggagaccttggtgaactggtgcacaatgatgtgcaggcagtgccgcttcatgtccagtgcctgcgttttgtcagctgcctccaggatctgcagcacgttctgcaccgtcacgttcatctccaggttctgcttgcagtacgcctgcagccggttgttgtagaagccgtagtagtagggggccgcaaccaagtagagcgagtcctcgggcggcatgttgccctcgccgtagtagatgtagcgcagcatggactcgaaggcctgcctgctgggcaccatctccccgatggagatgttcacctgcccatcttcgggcatgaaggaccgngaacatggcttcaaagtagctggagcgggcggccaggatagccttgtgggctggccgtgggtgcccgtcaagcaacagagtgatgtcacagaattccgcgcccgctccctccaggtatgccttcatgtccaatgtccactggctggtccaagggagtgcgagggggcggctgctgcttccgccgcacaatctccactatcagtggagaggagaggcgctcgaactccttcatcatgatcacctggttgaa

SEQ ID NO: 432522 - DNA, 2008 bp, Homo Sapiens
ttgctttttagggcccttggcatgtaatttcatttattcatataagtctagatcagggttcagtgacaagggtcagcatagagcagggttgcagactggttcaaggaggcttctgggtaggcccctccaggagggatttggaggaggctgccctgtgggtgtggcaggagccacatcttgtggaaactgggtagatgggtgtgtggccccactctgagtgaatgcacctggcccacatggctgggcgctgcagcctgcactccacttccaggtgctgacatatcctccccagccatggtcctgggcctgctgtgtcctcacctcaagggcctcccggctcagcctctgccccagctcctgctctctcctcccttgttcccagctcatcttgcactaggccacttcctagcctgcaggctgcctatggatctcctgttagctaagcaacttgccactcagggccccccacacacctgcatacacccaaaggagagcaggtcacttccccaaggagctgtggcttcatggcagccacaacaagaaaggggtcctggaatcctgttcccagtaagggagcgctggctcccagcactagagtggatccaacatggggccctcactagggcaagagggcagccctccttccacaggagccaagagcatagtgcaggggcaaggcagggcagaaggggcaggagcccaccccaggcctccaggattcccctggaaggggccagcctggaggccttcacagcccttcccaatgtgactgggtgaccccaggtggaggcaggagttgacagcatggatagagacaggtaaggccactgacctacatctgggggtctgctaagccatgggctgctcaaggggctgaagccagcagtggtggccgggccagcaaggtgtgtgtggtgggtagcactgctgtggctttaatggaggcttgtctgtgacagaatactcagcaagggacacgggggactttgctggcttcttcccggccgagccctgacatgcacacaggtggactgggatccttcagcccctgtgaaaaccaggcctggcccagcacgaccgacctgggagctgacctcagggcccttcactccaaaattcacctcaagtcaggtgagacccatacatcatgggtccccactcacaagttccaggtgggaagaggagccccttacatggatctcagtgagggtgggtgggacaggagcagcccaggcagattcgctggtgcagcgcaagtctgctaagcctcctcccgcatgttggaggagccttggtgacaggccccagtgcctgagtccacaacacgcccaggccacagaagccaggccaagccccactgggtgggaggcccaaagtctctccccacttctgggtggtgagcccatcactgagccgtggcctcgcatccacactacaccaggagagggtgatgacaggagggggtctgcttcatcatccgctccctgtgggacctgtgtcttcagtgaattaatgagtttggggccccacatcccctcagctctctttggaggctctgggcaccctgacccttggcctggcaggtgcacccactgccataggcatgcgcatagccggtagtcttctcagtaggcagggcaggcaggcacggcgattcttcacaatgggcaggcgccacagggcctcagatgtcggcgcccagctctgcgcactgcttgtctgagatgtgggaggccagggagtctatgatgtccagcagcagctgctggctcagcgaccgcagggtgggcaacttggagaccttggtgaactggtgcacaatgatgtgcaggcagtgccgcttcatgtccagtgcctgcgttttgtcagctgcctccaggatctgcagcacgttctgcaccgtcacgttcatctccaggttctgcttgcagtacgcctgcagccggttgttgtagaagccgtagtagtagggggccctcgtgccgaattcgccacccaggcctcgctc

SEQ ID NO: 432523 - DNA, 419 bp, Homo Sapiens
  misc_feature (347)..(347): n is a, c, g, or t
agggcccttggcatgtaatttcatttattcatataagtctagatcagggttcagtgacaagggtcagcatagagcagggttgcagactggttcaaggaggcttctgggtaggcccctccaggagggatttggaggaggctgccctgtgggtgtggcaggagcaatcttgtggaaactgggtagatgggtttttggccccactctgagtgaatgcacctgggcccacatggctgggcgctgcagcctgcactccacttccagggtgctgacatatcctccccagccatgggtcctggggcctgctgtgtccctcaccttcaagggccttcccggcttcagccttttgnccccagcttcctggttcttttcctcccttttttcccaagttcattttttgcaataggggcaatttcctaggc

SEQ ID NO: 432524 - DNA, 823 bp, Homo Sapiens
  misc_feature (635)..(635): n is a, c, g, or t
  misc_feature (667)..(667): n is a, c, g, or t
  misc_feature (687)..(687): n is a, c, g, or t
  misc_feature (719)..(719): n is a, c, g, or t
ttttttttctctgtatcatgcaaattttaattattcccataagttaatcatcaaaaactaataatatttatggaaaactagattatgccaagccctgcactagatactttactggcaaagactcattgaattcttccatcacaggatgaagagattcagagttcaagtaatgcccccacccacacaaaagaaaacagccaggtatttcactaggctggaaggattacaatatcaaaaggctggtacttacaaacaaattaaagaaacaaagcacatatttactcccaactagcataaagataagaacctggctgagcccaaggtaagtattcaaatactttatagcagtgactgggggccgagaagaggggggccaatcaatactcctcagggatgaggagtaagagacacgggacagtatgaaaaagtgtatttaccattacagggataactttcatatttacaaaatgaagggggaaaccccatggttttcttaatacaaatcacatactgtaaaggtccacaaactcttctcagctggggatctacgcagaacacatgatggcatctgcccgaacaaagtagcagtgcatggagtgcacgtggacgtcttcactcacagacttggctgcagncaccagggcctggcccacgatctgaccaccanacagcctcttggccggtacncagtaatgcctttctctgaagagatcctcgtncagccgctcgaggttgagcaccgtcgtgaccaagacgctaccgaggtccccaaggggatcgccgcgtcggcacagccctgcccatcttcctgggcctgccggga

SEQ ID NO: 432525 - DNA, 1174 bp, Homo Sapiens
ttttttttggtatcagtctctttattggatgtgagggccaaaagggactgtaactcctgtctcaggaatggggatagatgggaggttcttgaagccccaggcgaagctggtacctctggctacagcttgctctctgagacctggggcttcactcggatcacgccctcctgggcacaggtcacagctaggactccatcctgacgccacagccgcccatggaccagcccccgagagccaccggcccaggggctctcgcattcatagagcatccagtggtcagctcggaagggggcgtggaaccacatggaatggtccagtgagaccatgaagtgcaccttgtgctgccactggtgaggcagcagtgcagtgcccaagaaggcatagtcggagatataggcggccacgcagcagtgcatcttcatgtcgccctcgccaatatagccccgggctcgcacccagaacatctgtttgggctccattctctgcagctggctcaggggggatgggtttactggcttgatctcaatggggacctcctgagcagcaattcggttgagcgccaatgggtacctcttttggaggttagggtcccttaaatactggtcaaatgagggtctcacagtcaagcagctcttctggtgttggcaacattgggcatggagaactggtgctgcatggggctgggctgggcttgctggaaggaggcctggcagatgaagatgggcttcccatgttgcacggccttcacagagcgcaccgagaagctcgaccctgttcgtgtccgctccacttggtacagtactggcagcttcgggtcccctgcccgaacaaagtagcagtgcagggagtgcacgtggacgtcttcactcacagacttggctgcagccaccagggcctggcccacgatctgaccaccaaaacaaggcctcttgggcccggtacccagtaatgccttcctctgaagagatcctcgtccagcggctcgaggttgagcacggtcgtgaccaagacgctacggaggtccccagggggaatcgccgcggtcgccacagccctgcccatcttctggggcctgcggggacgacatctagttcaatgctgcaggcctgcacacccgctccgccctcgtgccgaattcgcaacccggcctcgacctagccgatgttatctttgc

SEQ ID NO: 432526 - DNA, 1140 bp, Homo Sapiens
  misc_feature (23)..(23): n is a, c, g, or t
  misc_feature (99)..(99): n is a, c, g, or t
atggaaaggatatgatttgcccnatggttattaccaaagaatctgaaacctgtttttggatctagaactgggtccctgggagaaggtgaatcacatttnccagccccattctagaaatttagagcagagcaggttcccgggcctcaccctttttcatttggaagatgaagatcccaaagccggcccaggggctctcgcattcatagagcatccagtggtcagctcggaaagggggcgtggaaccacatggaatggtccagtgagaccatgaagtgcaccttgtgctgccactggtgaggcagcagtgcagtgcccaagaaggcatagtcggagatataggcggccacgcagcagtgcatcttcatgtcgccctcgctcttaccaatatagccccgggctcgcacccagaacatctgtttgggctccattctctgcagctggctcaggggggatgggtttactggcttgatctcaatggggacctcctgagcagcaattcggttgagcgccaatgggtacctcttttggaggttagggtcccttaaatactggtcaatgagggtctcacagtcaagcagctcttctggtggtggcacagtgggcatggagaactggtgctgcatggggctgggctgggcctgctggaaggaggcctggcagatgaagatgggcttcccatgttgcacggccttcacagagcgcaccgagaagctcgaccctgttcgtgtccgctccacttggtacagtactggcagcttcgggtcccctgcccgaacaaagtagcagtgcagggagtgcacgtggacgtcttcactcacagacttggctgcagccaccagggcctggcccacgatctgaccaccaaacagcctcttggccggtacccagtaatgccttcctctgaagagatcctcgtccagcggctcgaggttgagcacggtcgtgaccaagacgctacggaggtccccagggggatcgccgcggtcgccacagccctgcccatcttctggggcctgcggggacgacatctagttcaatgctgcaggccctgcacacccgctccgcggaagacgcggagacatacacagaacctgactcttccgcctcgtgccgaattcgccacccaggcctcgctaccta

SEQ ID NO: 432527 - DNA, 456 bp, Homo Sapiens
  misc_feature (64)..(64): n is a, c, g, or t
  misc_feature (78)..(78): n is a, c, g, or t
  misc_feature (409)..(409): n is a, c, g, or t
  misc_feature (415)..(415): n is a, c, g, or t
  misc_feature (423)..(423): n is a, c, g, or t
aacaaggttctctcaagttcaccaacttatatttgcttcaacttttgcaagaccttcgcaaccncggaaaggaaaggnaggaaaccaaaagcagagagaacagctctgttgggggcgagttctctcctaatcgtggcagagggtgcatcccacgcagagccatactagtcccggagccaggggccccgggcggcggcagtcaagatcaagtttctgccctaaaggaggggatgctgggcaggagctgccggctacctgaagagatcctcgtccagcggctcgaggttgagcacggtcgtgaccaagacgctacggaggtccccagggggatcgccgcggtcgccacagccctgcccatcttctggggctgcggggacgacatctagttcaatgctgcaggccctggaancaatcntccgcggnagacgcggaaacatacacagcctgcgttaccaa

SEQ ID NO: 432528 - DNA, 494 bp, Homo Sapiens
  misc_feature (98)..(98): n is a, c, g, or t
  misc_feature (164)..(164): n is a, c, g, or t
  misc_feature (341)..(341): n is a, c, g, or t
  misc_feature (406)..(406): n is a, c, g, or t
  misc_feature (428)..(428): n is a, c, g, or t
  misc_feature (434)..(434): n is a, c, g, or t
  misc_feature (473)..(473): n is a, c, g, or t
ggtatcagtctctttattggatgtgagggccaaaagggactgtaactcctgtctcaggaatggggatagatgggaggttcttgaagccccaggcatantggttacctctggctacagcttgctctctgagacctggggcttcactcggatcacgccctcctggnaccaggttcacagctaggactccatcctgacgccacagccgcccatggaccagcccccgagagccaccggcccaggggctctcgcattcatagagcatccagtgggtcagctcgggaagggggcgtgggaaccacatggaaatggtccagtgagaccatgaagtgcaccttgtctgnccactggtgaggcagcagtgcagtgcccaagaaggcatagttcggagatataggcggccacgagncagttgcatttttcatgttcgncttcgnttgcaacaggtccccttcagcctgggttcctggggtttncagttcaggaccattttagcc

SEQ ID NO: 432529 - DNA, 1349 bp, Homo Sapiens
ggggctttatttgtaacgtaaactatatataatccatacgtagccaaattagatttaaaatatacaattaatgaatagtactcaaagtgtttttgttgcactgttactctgaatatggactctctatatctggtatggcgtgactgggcataacttctgtaatgtatttcagttatatgtttttccttttattgccagcttctgataatgaaattttccaaagggatgagatataagaatcatcttttataaaaaccagtggggagtggggtattataatctagttctaaactgtccatttgctttatataaaggctttgatttcaataactgaccatttgatgaatatttaaattacacagaataatgtctacatagaataaacttaagtattcaagagccttaaagtgaaaaaatgaaccttttgactgccttaaaatactacttgctctgtaattcaggcatactagttactttccttggggtctgtttaaataatgccttaatagtgttctaatgtttctgaaatacagaactcaaagggtcttttagagcttttaattttacatagtgaatggaaatttaagtattacattttaaaacctgattgtacattggtaatttaaacatccaataacaggaaaatctagatacagtgatgtgttatacatacatgactgttaacatcagtaatattttatgatagtttaaggttttttattgttttctataacaagttatccaacaggttggactttgtaacatgatatccaaggaccaagttgcatatttaacatcgaatgaaaatgtagttgtacagttccaaaaataattaattttttaagggaatttttcaagacaaaaggcaaatattttgtttcaaacctacaagcaaattcattccaagaagtgaatatagtagtaaaacataaagactattgcaatatgtagtttgcaggccagtgacttgtttaattacattcacatttttacattcaactttgcctttcaaagcaggagtattttataaaagctgaaaataaaactttaaattgtcaagctggtgctttaagttatgtaaaagtctgatttaagatatatttcatttccaaggaaaggaaccctgaaaggaggggacagggagcttcctaggtctgttgataaactaactgatgctttgctcaagtcttccgagtttacactgtaaataatacaactaacaatgtaattctctgctgtgttctaatagagaatgaatgaaatattaatgtacttacatttgctttcactgataagcacacgcgtctcaactgatacatgtgaatccatttctctccgattctagacgt

SEQ ID NO: 432530 - DNA, 911 bp, Homo Sapiens
  misc_feature (51)..(51): n is a, c, g, or t
  misc_feature (178)..(212): n is a, c, g, or t
atttattggcgcgtggcattgggtggcgggcccggtagaggaggttttcgnaggacgggggttagtgggaggggggcgtcctcgggtcgggtgggaagggtagggtgggcgtgggcatctcggcgcgttaatttgggtggaatagcaggctcggggttcggtcgggacgctccgcttnnnnnnnnnnnnnnnnnnnnnnnnnnnnnnnnnnntgctcctgttcattgaaccctcctttcccgcccagtttcctagcgtttgccgagggaaaattgggggaggatgtattctgccgcacccccccagggcaaggttgtccaacccggcgcaaaagggggcccccggggaccgttttttttaaggtgcttggcgatgggaggcgctgatgctgttctttggcactgcggaggcggggtggagatggtgtctttcagctccgaaagcaatcttttgcggggggttactggagggcggggatcttttcctgcaggtggtccaagcctcggcaggccagctcattggcagctgtgaactgggtggacagcctgcggaccaccggctccatgctccaggcagccaagctactggcgctctgcacgcccttctcataggcattgcacacagaggccaccagggggtgggcttccttagtgctggtgtaggtcttctggaaagcattcgcaggtgccactcaccaccggcagctgcaggacccgctgcagcacattctcctgctcagggaggtctccatccagcaaggtgaggcctttgttgactgccatcctcgctcctcaagcttcaacttcttccctttaatgttcataaacaagccatgtaaggcaggtgccccaggaccccaacactcactccggctgaccgccacctcagtctcacagagcccagactccgct

SEQ ID NO: 432531 - DNA, 1036 bp, Homo Sapiens
  misc_feature (959)..(995): n is a, c, g, or t
cttaccttttgccacaactttcgaagcttggaggtagctgcaaaattagccaggtcttaataacattttttagaaatgtttcccaggaaccttgttcagcacttctttatatcaaccttacttttgcacaagagctgatgtcataaaaactttgtttttcctcactccctgggactgagaatctgtaatatgaaaagtaaaagatgaaggccgtacacgctttcttggaaaaccattacattctggttctgctgcttcatacagggtgtcttctgcaggtctcttaaaagtttgttctcccttttcaaaaacaaatatgggttgagcaatgacagatttttcttgctgtcgccggtcctcctgcagcttcagtttacaggtgtgcaaactgccaggcaggtggctgctgccttttcttggtatggtagtcatggtcctagcagtatggctgtgactcaaggatcactagggcacctccttctctggccagtcacctaaagtggccttcaccagacacccagaaatacatagattcatgcagatcttgtctttgcatgtacaacatatactcctctactaaacttccaagctttttccagtcatgattcttgaaataaataatcaccaatgttacttctcctaaatataaagatgccaattcatttggttaaaaacacaacttaattccttcatttcaaaacaaattgaaactaaacctccttatagagtaaaattctacaaattaactatttctaacagattacacttttgtcatttttaaattccttttggcgacatgaaatccaatgcctccagtatttagagaaggctgctaaaataatacagacacaaagaaaagaaaaagtgctgctgagttaagtcaagtgatttctaagcctgatctgagttaccctctgtccgctctcgacgaattcgagctcggccgatttggcctgatnnnnnnnnnnnnnnnnnnnnnnnnnnnnnnnnnnnnncgccgccaccgcggtgaagctccattcgcctataggttcat

SEQ ID NO: 432532 - DNA, 2285 bp, Homo Sapiens
  misc_feature (181)..(421): n is a, c, g, or t
  misc_feature (431)..(463): n is a, c, g, or t
  misc_feature (1096)..(1121): n is a, c, g, or t
cggtatttgtacactaagttgcaagctttgtgtattattttgggtataccaataggtgcttacagcctgtgaatcattcaacagtattcccaggttaaacattgctttttaacagctgtctacccctgttctgattttcctgaaagcttcacactatataggctgggcacaatggctcatnnnnnnnnnnnnnnnnnnnnnnnnnnnnnnnnnnnnnnnnnnnnnnnnnnnnnnnnnnnnnnnnnnnnnnnnnnnnnnnnnnnnnnnnnnnnnnnnnnnnnnnnnnnnnnnnnnnnnnnnnnnnnnnnnnnnnnnnnnnnnnnnnnnnnnnnnnnnnnnnnnnnnnnnnnnnnnnnnnnnnnnnnnnnnnnnnnnnnnnnnnnnnnnnnnnnnnnnnnnnnnnnnnnnnnnnnnnnnnnnntgacagagcnnnnnnnnnnnnnnnnnnnnnnnnnnnnnnnnngcttcacaatataaaccttaattttaatgacatattggctagtcaataaacaagtcttatctcatctcatctcttttctgataacaaacacccgatgtgttcaatttgctttcatatttaagtctttcctgaattgctgtcatcattcaacaacagttgcatgtcgccttgctagctgtcaaagtagacttcatccccaaatggatataaagctcgaaggagacttgaggctgtcgtttgtgctggtgttcctctagccacagggggctgctgaccggattcctgtcccacgtgttccagccacacctcttgcggggctgtatgtgctgccttggtctgggctgcctgcggcttcagacttgagctgggccttttccgctgcgggtgaaccttctgtattccctgatgtgtcttggccagagacaggcttggccgactggctgctttcagtactgctttctttcggtgtgccttcccccaggattccacctgtctccttgggctttgtatccaaaacaggtgatttatgactgggtaccaccgtgggatgctctcgtgcctctgcgtctggtacatcaaatgcccggagcacttcagggctcttgttgccagtctgaaatctcaagtcaacannnnnnnnnnnnnnnnnnnnnnnnnnaccctcatacgttttggcataagggccttgctcagtggggcccatttggcccctataatggaaatcggcatcacctgctccaccatcaggtctataatcaatttcctcctgccgtcttctatcccgtggtcgaagtgcctggggaggttcgctctcaggaccgcctatatgtctcagcacatgaactgattttccagcaccatagcagaaactcaggatggctaatgccataattatcagcactggaagatgaagcagcgctggaatttccttcatgagtgctttaataaattccccagttccttttccaatatgcttcaatggctccgttacaaatgtggtgaatgtaactgcaagtgcctttgttggtgggaccaaccaaatagggttgactagtaagagctcatagtatttttggcatgggtcatccttataggtccatgaacttctaaaccattcccagatacttccagtccagtgcatctttttggcacacacattgttttaatggctccatcttggcgacttcagcctgatgctgtgcataagctagaagtccaagctttccagcttcaattaaaatcttatctaagtatctcctaaaaacaggattgctttgactttcatagtcttccctctttttcttttcacactcatcaatcttataagttaaagaatcaagtttgtgataacattctgatatttcatcagcacatgacaagtcaggactgacatccttttcccctgaaataccatattttgcgtgagattttctcattgttcttgaagcagcatcatagttaagcatgtctgtggggtcaatccagtcatcatcatgagcataaccagctaccagcaacagtcattcacaaaggagcaaagatcacagcatcctgtataaggctggattagtagagtcaaatcctgttttagactagaagtaccagggtataagtcgggaggctgcaacttatttcgtatgcttatgcagtttcttggaaccatggctctcaaacttgtgaatttgcatttttaacaatttcccagatgacgataaagctagtgtccgggatcccctccctgcctctcgaggaagacacctgcccaggccggccgcagaagaggtcgcacagcttgccgccgcatcccgggaattccggaccg

SEQ ID NO: 432533 - DNA, 2914 bp, Homo Sapiens
  misc_feature (1129)..(1138): n is a, c, g, or t
ccagcacgaaacacacttgaaattgatctcttattaacacactggaaagtaagggtgatcaagctttaattcatgtatttgataagcataactgaatgtaaaatatccatctatgtgatactaaattgtgcctaagaagatgaaacctatttggtgcaaaagaaagaattcatataaacagtcgccaattatgggttaaaataataacttattcatggcaacttactcatactctagcacaaagaacaaaattttgacaagcactttctcccgaaggcttcctttttcaactgctggaatgatgttggatttcttcagcaatacccactcaagctgaaaatggtagagaaagcagccattcccaatgcaagcttcagaacgatcagagaggaagtagtgaggagaggggcagccacatttccacttatccaactttgcagcattttcagcacttctgaaagaacgatgttcaaaccgggccggttaaaactagttgctgcaggttcaaaagcaagcagctcggaggtgaattttatgactttttgcatttacacagatgtatttgaatgaacaaattctacactgctactgtcagattgtttttctgccccaaagaaatttgctttgcattttaacaggtgccatactaaaaggtatattttacagatccaaagatgtgaccaggatattcaaaatgtgtctttggggtaatttgtttcggaaaagtgttcagaaggaaaactttgaaccctatagcagcactttttgttccctaaaaatataaaacaatgtgtttattttacaggaaaccagacagttgaggcagaccatgatcatctgcctccacggcacttggttgttcccctctagggaatggcacattagggcgtacagatgggacagtgcactgcccagaggaggctccaggaaccacccagaaaccacccaacaccccggaggccgagtcggtggtaatggttctcagtagtaagtggatcttctgcaaccatctccttcagatttctcaaaaagagaaaagtccgagcacacatctgtacacacagaaactctacacagctcaaaagacctgaaactggtgtactgcagatggctggagtaagcaagtatnnnnnnnnnntggaaactgtagggggggaaaaataaaggaattggtgattaatgtagtccttgacatgctacgtggagtcatattttgtatttatttctggtagtgagtggaatttgaagagctgcctcctccccctcgaatggcatggacggccgttggagatgaggccgggtagtgtccggggcggatgggcttggcgatctgggctgaatgggcccttctggccatgttcttggcccgcacggcctccttgatacgatccacctcctgctggtagcgcttacggtcccgcatggcgttctccttggcctccttcagcgcgctctccagagccttgacgcgctccgccgtggcacgcagccgcttctccagcttgggcagttcacagcgcaggtctgcgttgtcccggaccagctgcttgtgaactttggtgagctgctccaggttattctccaagaaggaaattttctgcttctgggcagcactgccccctccatcatcgttgtccaactccacactttttttaactcgggtggtcagatcctggacaaagagtttccgaaggttgtgcagtgtctgcaattctctagacactgtctcctccagccctttgaggtcttctctggcttgttcccttttatcgttgagcaataagagcttttccagcttcatttctctctcttggtcctctattttcagcttgtataaatcagaactaagcttctcctgttccagttgcagtttctgattcaaatcccgaatctcatcaatgattttctgcttctcctcaatttcgtctcggagtctggacagctgcttctggtgagcttcccggtggctctccatctgctgctccagcgccttcttcatttcttcagcatcctgcaaccgcgtcagatgttccttctccttatcctggaagctgacttcgtgcattttttcctgggctcggagctttgccagctcttcgctgagcgagtcctgggactcttctagctgcctcctcttctgttccatgttctgcatgtagtctgtcagagacttgatcttggcttcgtgctgggagatgagcagctggcaggctgccagctcccgctcgctggcattcatcttcctgttggagtccatctgggcgctctcgagctgtttgctgcggttcaccagggacttgacctctgacttcatcttgctgatgtacaggcgggccatggtaaactcctcctcaatgactccattcacatctgccaaagttttcacatcattggtgccaataattccacctatctcccccagatctttcaacagcaaattcaggatctcagttgcccttttcttctggtggttgctaagctcttgtagctggctcagctctctctgtgtggttgtcaatgtagtcgttttctgggccagctcgtctgtcagctgctcattggcccgggtcttatcctccacttcctgtgatttctggtcataattgacagccagctcctccagggcctggagaacttctttcacctcatccttggctgcctcattttcaatctggagacgtgtcagctcctcctgtatcttctcacagtgtctatcatggtggaagcatagaagctaatcttgatccaacatctcattgcttcagcacttcagccagcagcctggcgtgcccaagttcactcagcgtgacacaccaggagtccgtagagaactggagatcacccgcaatcgtaattgtccatctcaccaccaagagacgtcagcaaacaaccaggacgcaacactgctagactg

SEQ ID NO: 432534 - DNA, 294 bp, Homo Sapiens
acactttccttatattttgataattttctatgaaatggcttcaatcttcttaaggcagaaatcagaaaactagcatttccagactgctaacagcaaggcaagtaccccatatcccagcaatgtaatccacagaatatgatttgaaattggaagcaaacgaactggggatgctaatcttcctgaggtatttgctttgcattttaacaggtgccatactaaaaggtatattttacagatccaaagatttgaccaggatattcaaaatgtgtctttggggtaatcatcttcgtttag

SEQ ID NO: 432535 - DNA, 2148 bp, Homo Sapiens
  misc_feature (146)..(163): n is a, c, g, or t
  misc_feature (1655)..(1723): n is a, c, g, or t
  misc_feature (1877)..(1886): n is a, c, g, or t
  misc_feature (2072)..(2084): n is a, c, g, or t
ggagccaaatttctgtgtatttcgtaaatggatttcgcgttaatggatatttatgtaataactagacttctcagattattgtgagaagggtcaggttggaaggggtgtaggaagaggggtgaggggtagtttttttctgttctagnnnnnnnnnnnnnnnnnngtcatctctgaggtggaccttgtcacctgtggttattggggccaaggcggactcagctccggggagaagggcctctctgccatttcggtcccaaggtgagctgacacaggcgttccttttgggactgtggaagcatcagatgccagcactgactcaggaacagcaagtcagggcagagaggaggagggaggctgtcaggatggaaatacctggacttttctttgcttccctcgcaaactggggtcttctctaccgaacttcccaggatttcatctcaccatatctgtgtgccgcccccagcaccccccacccacctctggggggcccgtgagcgtgtgtcttcattgcctctctccccttggcgtctgatgaccacagcaaagcactgggaatttctactcttcatgcctcatcctgcagcctcgggttcgcattctctctttcttttcctctttccctctttccctgggattgactctgagtggaataccttggcacatccactaggatctactgtctgcactgttttctttgcatgactttatacgcagtaagtatgttgaaaacaaacaaaaagaagaaaacactcaacaaaaccaatctacatgttttggactaaagaaaaaaatagaggttgtattctcagtgtccgactcggaattatgttgctgcctctctgtgcttttggcctctgtgtggccgtgttttgccagcatgagatactgtcccctctggaggattttaggggaggaagagccacgtccccagggattggaggaggctccggtacccttgaccctcctgggtgttggttggagcagaactggtgaggatgtttgatccgagattttctgagctctccccgatcaccagctgtctgctgggttcttttctcaagtcctgctgcccaggcccaggtgagacaggcaacgccaggtctgcaggccaggagagatgctgcccaggcctcctggtttccaagctggtccatcactggcctctgtccttggcagagaccttgctgcccaggcccaggggcaggctcttggcctgccccgggcccaagaggttttcccagtaaggcccagtgatcccattatcccaggggcaaaaccacctgtccccttttgagctgccagttccctacagccatccccagtcaagggtgagggtgtggccttcaccaggggctgctgtaattaccgagcaaggtctgagctcttcttcagcctcagttccctcattggttaaaagggttctttgttcccatccagccgatgaaggagcaaacgtctggctatgtgaagcctaatttacctgcaggaactggcagggatagtcactggctggactcctgtttacttctagacctggtcaggctccatcccctcccccacctgcccctgattcccctcgtcggtgcctgtcaactgcttttcagcagtggactgcaggggaaagagcagtgatttggggtgagtaggcttcaatnnnnnnnnnnnnnnnnnnnnnnnnnnnnnnnnnnnnnnnnnnnnnnnnnnnnnnnnnnnnnnnnnnnnnctgccagaggaaactgagctggaggagcctgaggtcctgcctttcattggctgacacacctcctgtccactgtgtcactctccaagtgtcagaacaagtggaggcagatcgctaccccaggctgagatgggccccaatgggaaggcacgccctnnnnnnnnnncacccacctggtggccaccccagggattattggatgatcctcgcccccccattccgcccgatatttcagaaaaaatttggccccaagccttattttgaccagaaaaaatccggagcctccccaaaacattcctttacatgttttaatcatcccctcccccgataaactacctgattttatcttttnnnnnnnnnnnnnatattcctggcgcctcccccgcgatatattttatgacccggaacaccccccttttgttgttatt

SEQ ID NO: 432536 - DNA, 863 bp, Homo Sapiens
  misc_feature (144)..(168): n is a, c, g, or t
  misc_feature (371)..(412): n is a, c, g, or t
ttttttttgcacagaagtttgtagctatttattgcactgaaaacaccaagaataaaacaaacgccccttcttcccatcccacgcccccctcaatagcagaaagtttgagcagtgttcattcaagttcacagccacatatttttnnnnnnnnnnnnnnnnnnnnnnnnngaactaaaacaaaccccaaacaaatagtaacaaagaaaccagcagggggagtttggcaagctcatcccccaaaagggtctccctttgaagggagacaggaggccttgggtcaggattcgcaccatggtgggcacaaacccaggagaacactttcctgtaaacgtgttttcatgctggagccaaggttttgacttgggtttggnnnnnnnnnnnnnnnnnnnnnnnnnnnnnnnnnnnnnnnnnngcatctaaaggatgttttggaggagcacagagtttgtctggtgagggtaggctctgggcagatttttctgtgagtctcccctgcctgccgcatcaggatcatccctggtgccctgtggtggcaccaggtggctgcccacccacaggcgtggccttcacagtgggggccatctcagcctggggtagcgatctgcctccacttctctggcacttggagagtgacacagtggacaggaggtgtgtcagccaatgaaaggcaggacctcaggctcctccagctcagtttcctctggcagggaaaccaagctccaaagagggaaaggaacttgcccaaggtcacacagcaagtctggtcagagctgggaattgaagcctactcacccccaaatcactgctcctttccagaccttgctgtgtgacctcgggctagttggggcttcgggctagtcggg

SEQ ID NO: 432537 - DNA, 3269 bp, Homo Sapiens
ttgctgctataaaacctccgccgcaggcaggagtttattgggaaccacgagtgtgcggtgctgggggcatctcttaggcgggcaggacggcccccccaggctcaactcaggacaaccccaacgggactgagcggccccatggccctcggcctgtggccactgagctccgccttccccgggctccctgaggaagcagagtcctgacttccaggaaggacaggacacagaggcaagaactcagcctgtgaggctctgggtggctcctgaggccagaggacgccttccgcgatccatggctcagcatcgtccttctggcttcccagccccgggccgaacgttcgggttaataagcagagcagttattcggctcctggcaggagctcccccgttagtttccacgttgtgagcacattcatacttaagactgtttctctttgtgttttaagcgtctgtctctgtagtaaactgaaatgttaacagaaatgcagctgggcccctcacagcatggggcaggaggtgggccccctggtgggtggggctagaaggtggccttggagtgtccgaagatgcagatggggaagtgcttcacgtgcgaggaccactgcgcggccagctggaagaacttgacgtcgctgcactccacgccgtcgatgaggacccgcagcatgttctgctgctgcctggcagtgcagatgagccggctgatgccctcaatgcactggctcttagactccacgtccttgtccttcgctttcttgggcagaaacatcaccttcttgttcttctccttggtgaccacggtcatggacatggtgggcgtggctgcagcctcgccgctgctgggcagcctgctgacctggagggaccggaaagtgcacttgagcgtgtttttggtgacaggcaggtccttcttctcggcgtccctcttcctgtccgcaggctgtgctgccgtccagtagtccacctgcagccccatcagctcggcgccgacaccctggctgggggaggacaggcctccgctcaccgacggggaggagggcggggtgggtgaggcctccttggccgcaggagatgcggacggcggggtggaggagagcgtgccagagcccgagggggccgcgtcgtccgagtcgcctgatgtggccgaggatggctccacaattccaaccttcacaaccccgacaaagggaatgaacttttgggaggactcttcgtcagggctcttctgcttgtaggtcagcatggcctctgcgatggggagctggtgggcacagttggcccctgcgatgtactgcgtgatgcgtgacacaatgtctggcgtgtcctgtaccgcactctgggcctccagcttgttgaacaggtctctccaggccaggtcctggaagaagttgttgtagcggtagtccacggagcctaggtacctggccacggggtgggagcccagtgggatgaccaggaagcgcatgtagccgagccagtcgggtgtcttgtgggacagctgctccacaaagagccgcaggatggcactgaggtaatgctgcgctcccgccacggcgatcttcacgggggtcgggggctgggaattgcagttgcagtatctctgtatccgtgagacgatggtgctgaaggccgcctggacgtccgcaggagagcacgtgcacaccacggggagcgtgtgcctctgcaggacgtcggagaggaactgcccctgccagtccgaggtgttgacaaggatgatgttttcgggaagctggtcatcggagatgaggatgtggttgagctggtcatacacagtcttcctggggatctgcagctgcacctgtagctggctccgggcgtccgggcagcgctcgttgtccaggctgttggcccgctcattctggggccgtgctgcctgccgctccttcaaggatgtgctccggccccgtcggccagcctgcttcccctcggacctggtggaggggatgacaagggactctgtcttggtgatcctcccgctgggcggcagcctctccgtgaacacatccagggtggaggcctcagcctcggggctgtcctcaggctgtccagggtgctccctcgggcctggcacaccgagggccaccgtgtcagagacactgtcgctcggctgcctgcctcccagggaccgcgtcttctcgggcacgtcagccgggcttgggggctccttgtggctgcgggcgctgtggatgctcccaatctccgtctgcgagctcgagtgcgacaggccttcaaagtatggccgcagcttcggcttgggggtgctgaggacgctgtcgtcatccctccatgtcggggccctgtcgctggggtgctccatgtccagggtgtcatacaggaggtccaggtcctcctctgcctcggggattgtgctccgcagggtcctgctccgagtccaggacctcgtcggacactttgaacctccgcagcagcgctaccactttctgcttgaagttctgttgcctggtcatggacgtcgttcttacaatcgatctccgctgcttcttcggcttccccacgtcaaagtcgtcctcgtccaagtcctgcccctgcacggcgtcgtcactggcctcctgctcggaggagaagctctcatactcctcctcggagtagttatccgtggacttggccttggggccggcctgcatggtgctgtcttcgtggtcaatgggctggctggacagggaggcgatccagatcttcggccgccttgacgggggcctccttgatgctgctgcagaggctcagcacctggccaccttcagacgggtgttgcatcacctcagccatgctgatggagcccgcggccagcgtcttgtagcccaggatggttctgttcttgtagcgctttctgcgctgcagcatgatctgaagcttgttgccttccctcttcaagaagtgaggatactgcaaggagaaggtcagggccaggtctgtctccacttgtccactggggggcagcacaatctcatgggaccgcaggattcgtttggagccctgcatcttgacagcgatcaccacggagatcagctccttctccagctccttgaagaccaccagcttcttcagagtcaggctgcacaacctgggcacgcagctggggctggagccgtccacctcccaggtggcgaacaggttcatgggcacgggcgtgttgagcgcgccgggcgcgccggggaggccgaggcggcctcgctcggccatggcgccggccccgccgctccctcggcggcctggggctacgacccgct

SEQ ID NO: 432538 - DNA, 824 bp, Homo Sapiens
  misc_feature (512)..(524): n is a, c, g, or t
aggttttatgtttgctggatgttcaatgttttatttagaagagattacagaataaaaggccacacatcacaaaaatggcaaaatacaacacccaaaactctaaatggactttggatatgtttagtgtttaactctgtaaactatcaaaatttgcaactttctactctactctatatggcaatgttatacatgccaagttaaaataacattaacagtaatggtataaaaccacctgaagagaaagaaaccagagtcataaacatgctatagcctatcgtgatacatatatagaaaagatgcattttcttgccatttggaactcacagctatgagagttagagaagtcagttcaattaaaacaaacaaaatccatgcagagttaacactcaattctatataggttggaggccaaaaaagagaaatcttagaagttaatgtctcaatactaacaatttttagaatctgtatagcttaaggacctgcacaaatggtatgttttaatgagaaaagcnnnnnnnnnnnnnaaagtttagagaagggtaattaataattaaaacgttcccaaaactcttcaaaccaaaagcaacacagacctgagaatcacaatctgattttccaaggtatagttcctgtcaaatgctgtatacaaccactccagctccatcaggtcctccactgaaaaaaattactcttacgatttttataggcagttaagtaaacacaaactagacaggaaaagcattaataggaaacaagctatggctcgaactataaagaatagagtatgaagtgcaatataaatacatctattttaaagctcgtgc

SEQ ID NO: 432539 - DNA, 744 bp, Homo Sapiens
  misc_feature (48)..(48): n is a, c, g, or t
tggcgactggctgaaggagctggttctgttgctggctgcggggtaagncgggaaagacaccacacattgcgcagtcgggaccatcgccggagcctgaggacacttctctgtcgtcacagttagttttacatgtggcacccataaaagatgaggctgagaacacggaaagcttctcagcagtcaaatcaaatccaaacacaacgcactgccagagcaaagaggaaatattcagaggttgatgatagcctgccttcaggaggagaaaaaccatcgaagaatgaaaccggcttgttgtcttcaattaaaaaatttattaaaggaagcacacctaaggaagagagagaaaatccttcaaaacggagtagaattgaacgtgatatagataacaatttgatcacgtcaacaccaagagcaggagaaaaacctaacaaacagatatctcgagtaagacggaaaagtcaagtaaatggagaagctggtagttatgaaatgacaaatcaacatgtaaaacaaaatggaaaattagaagataatccttcctctggcagtcctccaaggactactttgttggggaccatattttcacctgtcttccactttttttccccagtaaataaacatggaacgtcaggatccgattctccaggacaggctgtggaagctgaagaaatagtaaaacaacttgatatgaaaaaggtggatgagatcactaccagtactactacatcaactaatggagcggct

SEQ ID NO: 432540 - DNA, 982 bp, Homo Sapiens
aatttctaaaaacttagggaagaattcccggggggggctttcttgtttttccaccggaaagaagccgggtttccctatttaggtggttcttccgtccagggggcgggaacaggtttggatgaaataaataggggtccaaatacttccccagttcttctttcataggtgggccttcggcgttgggctgatgaaataccccctatctgggagttacctgggtgctgtaaagggggtggggatatcacgattaactgtttcttctgccttcttgtaaaaccagttgtttagtgatggtctcacttgaactgcttgatttgagtaagctgctccattagttgatgtagtagtactggtagtgatctcatccacctgttccatatcaagttgttttactatttcttcagcttccacagcctgtcctggagaatctgatcctgacgttccatttttatttgctggtgaaaaaaagttgaagacaggtgaaaatatggtccccaacaaagtagtccttggaggactgccagaggaaggattatcttctaattttccattttgttttacatgttgatttgtcatttcataactaccagcttctccatttacttgacttttccgtcttactcgagatatctgtttgttaggtttttctcctgctcttggtgttgacgtgatcaaattgttatctatatcacgttcaattctactccgttttgaaggatgtttctctctcttccttaggtgtgcttcctttaataaattttttagttgaagacaacaagccggtttcattcttcgatggtttttctcctcctgaaggcaggctatcatcaacctctgaatatttcctctttgctctggcagtgcgttgtgtttggatttgatttgactgctgagaagctttccgtgttctcagcctcatcttttatgggtgccacatgtaaaacccgcagcagcaacagaaccagctccttcagccagtcgc

SEQ ID NO: 432541 - DNA, 522 bp, Homo Sapiens
attgttgtttggaatgtgggtggggggaaaacgaattttggttctccattgtaatctgacacctacgaatgaccttgtcttcaatgtccacaacactagtaagcatgtaataatcacggacatcgcaagattaaaaattaagtagcaaattccactaaaacacttgtattcattctatacaatcgaatggaaatccgtgagtgctactgaaaaaggtgttcacatgcacatgtccaatatgtgcattccactgaaggctaaaagcttaaaattctatttccagtgtttatgaatagcttcaatatctacattcatagccagcattctgcttgagttacctcttactttaatacttcacaaatgagtaagtacgtcttgggagattaggaaggtacctgttgtcaataactttctcttatgcttagaatgtgctgcaattgtttttaaactatttaaaatgaacacccctataataatgaaacactttatgccaagaagaaaattgatttgtttttagccaat

SEQ ID NO: 432542 - DNA, 443 bp, Homo Sapiens
  misc_feature (48)..(48): n is a, c, g, or t
acaaaggagaaaaggggaagaataaaaacattctccatctttaaaagnaaaaatattaacaaccataaggtgccactgtattttagcaagctgtaaaaatggccttttaagaggaattttgcaatctttacctccctatcatttgggtattttgggaactgacccgaaagtcatggctgatgcttcacccatttcatgtcatggacgcctgggaagcaggtagttaaatacaaagcatattatgtgataacccttcataaatataatttgagacactgacactaggagaggatacttggcacagaaaagacatgttatggggcgggggacacattacttgaggcaacacttacagccaatcagtttcctaatcttaaggtttggatgaattccaatccttttacaaaaccgtgtgtgtgtacacacacatattttatttcctg

SEQ ID NO: 432543 - DNA, 477 bp, Homo Sapiens
caaaaccacaaagaaaaggaaagttttaattctgagaaacttcactgaggagcaattttttttgagcttctaaaaatagagaggaaatgagcctctttgggtcactctagttgccgcctcccctgccccatgcccacccccactgctcactcaaggctagcctctctcagtgggtgactgagctgtcttcagtggaagcccgaggcagatgccacgcaattctggagctggatacggctgcccacacggggaccccagcatgctggacagcagagagaccccacaggagagccggcaggacatgattgtgaggaccacccaagaaaaattgaaaaccagctcactgactgacaggcagccactctccaaagagtccctgaaccatgctctcgagctctcagtgccagagaaggtgaataatgcccagtgggatgctccagaggaggcgctgtggacgactcgggccgatgggcgggt

SEQ ID NO: 432544 - DNA, 1198 bp, Homo Sapiens
attgatagggtatagctttgctaaactcacctgttagtttcaagagtttctttaaagattctattgaattttcttcatagacaaacatgtcatctgcccatcaagacagtattattactatacttgttgctttttcttgccttactgccctggctagaatctccagaataacattgattagtagtagtgagaacatactcttggcttgttcttgatcttagaagaaatgcattcagaccttcattattaagtgtcatgttaattgtagggtttttgtagatgtcctttatcagcttgaggaagttttattctattaggctgtgagagtgttaatcaagtatacatgctggattttgtcaaatgctttttctgccactttagagattgttgtgtggtttttctttttagtttagaaatatgttgagttacattcattgcatttttggatgttaaaccaaccttacttaccttcctgggaaggacaatgtacttggccatgtgtgtctttcttttcatgtttttgttggacttgataggctaaacgtctgtttagaagttttatatctatgttcatgaggaacatttttctgtagacttttcttttagaatatctctgtctggttttggcctcagggtaacgatggcctcataaagtgagctggaagaggctttaagtagtttgattcccatgcctatgttgtattttcttacagacggtggtaataaaacacaccttagtaatgagccttttctcagttttcctaaagagatgttaagtcaactcttaatcttcaacaatctattaaatcaatcagaaggctgcgagtgccctctggcctacctatacaacaagattaaatcacttacctactatctttacagatcgtaaacctgtgtgttttcagtcatccaaacagactgttgactcttgtggtcgtgattgttgggaaagcattcgaaaacattttcataaagggctgggtaacagagtcttatgctttcttccactctggcccaacacagccagacagggagcagacttaccctggcatcctcatatttgccctccccagcgcccttcatgacacttctgaaaggcattctctttcagagaaatgtgaaaacacaatgttcacttggctcagttgtctactgactcggtgccattaagactggaagtcatacagaccttccgccg

SEQ ID NO: 432545 - DNA, 975 bp, Homo Sapiens
  misc_feature (595)..(605): n is a, c, g, or t
ttttttttctactacattaacaggactcaaattctggaggaacagaaagcagactatatgtgcaatgctagtatctgtacattacatagaaattgctcaacttctttttctgccattagttttatcatcagttaatacagcaaatcataaaatatgcatttagcatataattctagaattcccctccatttcattattaattttgttgttttattttgttttccacagctattccagctgtggtgaattcaggttgtgagtgaccaaaaaccctatgtgatacagttttgctttgctcttatgtttgtttgtgcagcactccaatctaggatgcaggcattgttactaatttcaggacaattgttctgggccttttaaaaagcaggtccttgtaattttaggtaacacagcatcagaggtgttaaaacatacacaacataattcaacaaggccacaatgagtgccattttcttcatatcttgttcattaacataatgaagtctccatctgaaggggaaaggacaagaaaggatggggtacaggggaattttagcagttatctttctcccctgggctgacctaaaaatcccatttnnnnnnnnnnngtctgagagtttgtgtttgtctttagaggacagcataaagatttaggagtacacacattattaccactgcttatatcaactcagaacagtcaacaaggtgttagcagttttgttggttccaatttctgtgtcatcttctatagactagtgaccaaatgagccggtccttttgaacttccctcgggaggggtcccatctttgtttggaggaactataaatccatcactgctgccgcgacctagctggtagtaagtatgcagctgatggacgtggtttctggagcctaggtttggcatgcttttgtagtaaacatcttcggcatcaccacatttgccgtgtggttaggtctgggggtcctctagagtcacct

SEQ ID NO: 432546 - DNA, 960 bp, Homo Sapiens
gtcgcacctagtacatttatttcctcacctgcagtgggtactcaaaaatatggctgttgattaccagagtccatccataaatgttttattgaaatagtaaatgcataacccaagtctgattagaattggatttccagaagcccaatccagtggtcactctacaataacacagggtctcttctttccaaactccaaaccatggtgtgcctgccgtggccacacctgtcaggctacacaagcagcaaggaccccctgagacctgaacatcagatgtctggctggaggcttcagcaggtcttcaacgccatggccggcagttcctcaaagctaaagctggtgcgtgaatgagctgatcatgatgacagctttataacatgcacctgacagatggcacgttgacagtgaggggagcttctctgggctgggacagagaatggcaaatcaaccatcaccggagcaaggctcttccagcagagctgtgaggcactggttagaaagctgatgaccggctgtaatcttgaacagttacattaattaaaagctgcatctttatcaagcaacacttcccagggagagagaggagtgagaaacacgcaagtggagagggaggctgcaggaaggggacccgctccccagaagcccagcgtgaccttcaggcctccagacaggacccaaagaaaccctgctgccctttatgtgccatgaaaaatcaacccccaccaaagaaaaccactttctcacactcgtggagaaatacttgcaaaatgtattaaagggcgttacgtgctagacacctgaaatgagccaagtagagggactgagaagagggtcttgggagagaggaaaattttcagtggggtgctcagcatcagccttgccttatggagaaggttctaattcagcaaagacctgaaagaggtgaggacttcagcctcatagataaccagggaggagcatttc

SEQ ID NO: 432547 - DNA, 448 bp, Homo Sapiens
atatcgcacctagtacatttatttcctcacctgcagtgggtactcaaaaatatggctgttgattaccagagtccatccataaatgttttattgaaatagtaaatgcataacccaagtctgattagaattggatttccagaagcccaatccagtggtcactctacaataacacagggtctcttctttccaaactccaaaccatgggtgtgcctgccgtggccacacctgttcagggctacacaaggcaggcaagggaccccctgaggacctggaacatcaggatgtctgggctgggagggtttcaggcagggtctttcaacggccatgggccgggcagtttccttcaaaggcttaaaggctggggtggcgttggaatggaggcttgatccatggatggaacaggctttttatttaaccattggcaccttggacaggatggggcacgttt

SEQ ID NO: 432548 - DNA, 881 bp, Homo Sapiens
aagggggagtgtgggccgagggtcacaggacgtccgaggcctcctctgcaactgcctcatcttacagtgcgggaaagccgaggctgagcgaggaagacaattcccagcatcttctatactaccaatcccaaagaaagacaaaagagacctggcaaaggaaatttgagtctccaaatcaccaccacaggcaggcaccagaacaaacgatactttaacgcagaactggaaatgcagctcactctttggtgacaggaaaccctagctcagggttccgtatctcttgtgcacactttttccccccacactcactcttgccaaaagtggctcccaggagatggagtgcacggtcaggttctagagagagccctctggccttgcaccacaagacgcaggcgtgggtcaaggctgcgtgctgccgcggcccttctcatccctgctcaagcatagcccactctggcctcggcggtccccactgtctcagcctgcgtgaccgggatcccatttcatcaaaggtccaggacagacaagcaggttttgaaggaaaagttcaatcagcccacttgcacctctgcctaatgcagatgttgtgtgtgccgcacaccagcggctgggaggaagccggtgtaggtgagtcggactccagcgtcccctgcatttagtttgccgtaaagccaacccaggaacactggggcatttcaccgcagccgctcagctgaggggacaactcccctccagctcttcgcccagcgtgaccatgacaaccatctggaaacaggcgtcccagccttcctcggttcaaaaaccccagcctgcaaaggcagggtaaatagtttttgccttttcccttctatccgtaacttccaccactccatagattctaa

SEQ ID NO: 432549 - DNA, 1081 bp, Homo Sapiens
  misc_feature (821)..(821): n is a, c, g, or t
  misc_feature (1000)..(1000): n is a, c, g, or t
  misc_feature (1036)..(1036): n is a, c, g, or t
cggtccggaattcccgggatttcttacgaaggcccccataggaccttggggactaagagaggccccgggaactctcaggtgcccacttcatcagccccagctgcgactccagccaggacagacggagggcgcacaaagaagaggctggatcctcggatctaccgggacgtcctcggggcttggggtctccgacaggggcaaggtctcttggggggatccccaggctgtggagcggccagagcaaggccagagcccggcaagggggtcgtggagaaaagcctggggctggctgctgctgacctgaacagtggtagcgacagccatccccaagccaaagctacagggagcgcaggcaccgagatagctcctgcggggtctgcaactgcggctccctgtgccccgcatcccgctcccagatccaggcaccacctcaagggctcgagggaagggaaagaaggagaacagatctggtttcccaaatgctggattccctcccctaaaaagcagccgccccgccatagccagacactccccagaccctgggctcccggaggcaccggatggagagaatctctgggtcttggagaagggggcaggaccggagaccctggaagggaaggaaggggaacccgcccaggcccacaccttggccccgcagattcccaggggccatgtcccgctggggcaaaagctccttataaccacataaccaaccacaagcgtaaacagaaacgaattccgcaaatagctcgcaaccctcaaccagcccacacacggggagcacctaatggacaccacagacagaaaaaaacaacatcatnacaacgattctcatctaacacaccttgcgaacaccccctcaaccgaacaagccccacacagacgaccatcacagtttcatacaccccctcacgctccggaacgcacatccaaaactatctctcacacgaacacgcatacacccccacgccacccccaatacaccgaacaccaccacgcnactaaacccccgatcggtcaccccgctctaacctancagtacaaccccacaaacacaccctcatacaccctcactatagtt

SEQ ID NO: 432550 - DNA, 233 bp, Homo Sapiens
ttttttttaaagggaagcttagatttattgagcgcctactgtgtgccaggcagtgtgcaaggcgctttacatacattatcgcattaaatcctcacaacaaccctgcgaggtaggtgtttataaacccccatttgacagatgaggaaactgaggctcagggaggtgaagtgatgtggccaagttcacatggctaataaatggcagacagaggaggtgtccaaggatcggagagg

SEQ ID NO: 432551 - DNA, 2938 bp, Homo Sapiens
ttttatattcataagtcagaatttatttcataccatctcacttatagcattttcaagtacaacattctgctcaacatcatttacacttgaaaacagaaaagcacaacttggtaaggcaccaggttacgatagtctggagagaaggccttgctcccattttggcttgtgtaatacctgggtagtttctcttgagtctgtcaagcagagaacaaggttataaaaggtccatttatacatacatggtaacaagagataacaaacagttttgaagtatgctgtatttataaattataatggtggcctacacttgtagttcagccaaagtggcattctctaaagcaaaattcttataaaatcttctctgcaataccaagctgcaagtttaacaattttttagctttgaagtgaaccaactttatatttaactcaaacacatactttaaaaacattttcggccccaaactctatgttcacgaagaaataaaaatggagggaaaatctcaagtataatcgtacctttactattctataaaatgcagcaatatattttaaaaactgttgcatttaaaggtcaacccactagatttttaacactaacagtccaaggtgttatcaaccccacttaaaattcaactgtataaagctttcagaactgggccacacaggtgtacttcactgagcactttccacccatggcctaaaggcaggaggtgtggaagtcccctccagggagaccaactgcagccccatacactgtcacacgcataaaacttctttcaagtttttgtgttctatcttaaaaatgaatttgcactatactccatgccatttactttaatataaaaatagtgtttcaaatcgcttaccagttaaataactcatcttccctcctacacctccaggcaccagacaggcagaggccagcctgggaagcctatctttccacagataggtaagccaggcgcggcaagatgagactgtattcagttaggtctattttaagcatttccacaaatcattttattccttcaggttgtaactaaatgcttcaggaaactatgaccgacatcaattccaatgtgttgaataatcaatcagtctatgtattttagtggtttaaagattaatcttttgttaaacaaagaaatttgttaattttatttactaacaggaataaatagaacccctaacctaaagtataacctgatcttttactttttctatagaaaaacacaaactggatttctttttaacataaaaaagacaacacaaaacccacagaaaaataaaattcttctatctaactggctttacagatttccctcattagttgtggatgtgactttggtggctctgggtcacccaccgcaagcccgaccctgcaactgagtgttcaggctgccttgtggtgtctcggaagcattcctaccagagtaaaagctattctcctgagatggcacctttttctccagaagattcagccctaacagctgccaccttgaaggatgtatttcactgtcacaggaagcagccaagtatgggggccatggtcccggcatgcacctggctgctacacgccccgcccctcaggagtcctcagagtccactggcctctgctgctactgccctgaaagccatctgtggctttaactggttgttttaacaggtttcaagagatgttcattttattttttgtttagatttaagatgtcctaaaaaatgtatatattaagatacacttaaaaacatactctgaatataataaaaaagatgttggttcaaaaaaagggtcaacaagaagaggaagccaagcttcctagcatctgtttttgtggccacgcttttccccattaatggtgtgaaagtctgaatcaacagcaaatacagccatacagacctatgtatctgtgtgcatgagtgtgcatgggtgtgcacacagagaagtacatcttggccgacttaagaaaaaattatctgtgttgtgtcccacaaacacttgctgttggcctttcaagagtattcacctccctgccgaagagacagcttgagtatggaggtttaaaaacaatccagacaggtgctccctgttgccctcgttacctaggattgaggcagtttggtgcacgtattacagtaccgaaagcaaatgtcactttctgatctccacaggaaccactccctaaaacatgaaactactgaccaacacttgctttcctccgcatagcactttgtctgtgttcatatgtgtcaacacaactggactaagaaagaaaagtcccaataaggaagtttccttttttgactacagagtgccatacagtcagtgggatgttttctgttggttgtttttaaatcataagtaactgggtattagcaattgacaaaagtgactggtttgaggttttgtaggcagaggtctctcactttttttctcagatttttgctccttaaaaaaaggcatggtttgcatggagtttcaaagctaagaactattgttaccatggttgacctgtgtacataatgcactgtgcattaagtagcccttaatcaagagagggttaaccatagtgttcctcccttttgctcttctgtacattataatgtagcagaacttcattcttaacatccagattagaggtgtcttcttcatattagatataaattaaccagaggtctagaactctaaatttccagagatgtgaaaaatgtttaatttacttcaaaaatatcttgcataagtatctcatccctaagctcaaacaaacaagaaaattaaaggcagaaagaatacataaaattgagagctcctcctataatacatatacacacactctcgatataggttctacgcagtaaaaggagttgtttcagctaatatagcttctaatatcgatttcatctgaaaatagcccttctgtcgtcttctcgcagccgtata

SEQ ID NO: 432552 - DNA, 778 bp, Homo Sapiens
aggagctgcagagatgtccggccagagcctgacggaccgaatcactgccgcccagcacagtgtcaccggctctgccgtatccaagacagtatgcaaggccacgacccacgagatcatggggcccaagaaaaagcacctggactacttaattcagtgcacaaatgagatgaatgtgaacatcccacagttggcagacagtttatttgaaagaactactaatagtagttgggtggtggtcttcaaatctctcattacaactcatcatttgatggtgtatggaaatgagcgttttattcagtatttggcttcaagaaacacgttgtttaacttaagcaattttttggataaaagtggattgcaaggatatgacatgtctacatttattaggcggtatagtagatatttaaatgagaaagcagtttcatacagacaagttgcatttgatttcacaaaagtgaagagaggggctgatggagttatgagaacaatgaacacagaaaaactcctaaaaactgtaccaattattcagaatcaaatggatgcacttcttgattttaatgttaatagcaatgaacttacaaatggggtaataaatgctgccttcatgctcctgttcaaagatgccattagactgtttgcagcatacaatgaaggaattattaatttgttggaaaaatattttgatatgaaaaagaaccaatgcaaagaaggtcttgacatctataagaagttcctaactaggatgacaagaatctcagagttcctcaaagttgcagag

SEQ ID NO: 432553 - DNA, 661 bp, Homo Sapiens
aaaaaaagtcaataacaaaaaacccagctcaagaacccattctacgccaaactggaaaggagaagagagcaacaggaagattccagaaacggggggccccagtttttgaagaactttatgaacttttcaaagattattttcatatggcagcaagtgatacggaagactgctgtcagggacacctgatatggaaatcaaatagatttttaattaattggaacataagatttagggatttttccagaactcgaaagggtcaacagccctccagaatgtcgggctgcagcctgaggaggctgatgtttggagctggtgtgggattggcgaagcccagtccgggctccctagtcaggaaagacggggtgacggccaggctgctggaaggcccccgggggcgcggggcgattttttctttttctgagcactctggataaatccctaagcaacgttgtttctcaaatgtcattaataatgtgtgttgcaaactttaggtttttttcttttctgaaaatgtattttctctttgaatccacccctagtcgcgtagcgtagggctagcggtcgtcacagacaccctagtagaatgtagcactcagcacccttgtctcctaccttgtgttcaactccaatgataccaatagaatattcctcaatgtattgc

SEQ ID NO: 432554 - DNA, 782 bp, Homo Sapiens
  misc_feature (161)..(161): n is a, c, g, or t
  misc_feature (209)..(209): n is a, c, g, or t
cccaatctcctcaccaggcctgtggcagccgatacagtcatgctccgtggtctctgagcctcttcagctgctgcagttggccgctgcggtagtgggtcctcccccgttgggctccggttctcgcttctctttgcggcgcctgcagggtgttcaccagagcntggtcatagggcccaggcttagcccagtcctgcttgggggcctctgcnggcatgggggatggtgacttggactggaaggcatcctgggatatgaatcctgagtcatgggaggacacgctggacagcctcacaggagcctgctgggccaggttggagctgcggtagcggtaatgtgagctgggggaatgcgagtgggagccgctggaccgggagtcactgctgttgacactgttcaggctgctgcagacactggactttctggacatggtggtgctgggggaagagggtggcgtctgatacgaccagctgtaatcagaacctttcaagtccagaatcacctgttcacttgaggagggcagtttgtgagggtccatggtcaggctttttagatcttccgagatggtctgaaggtgggttatttcccctagcattgagatttcttcttcaatcactggccgcagcatagagatgaaggtacagaatcggccacgttcttcaatcaaagccttccggacagcctgcttttctgtttcttccaataagagatacttatcattgacatcttggagagcactgtccaactgaggctggatatcacctctcccttctcacaccccgctc

SEQ ID NO: 432555 - DNA, 1683 bp, Homo Sapiens
tttttaatctagtggttctttatttataacgtaggctgaagcaattgttacaatgtaggagggagacacattacacaattgttatttatacaagtttagaacaaaaaactgcacagggagaggtcaactctcagtacaaactagcaactaaagcacaataatttactgttagaaacgatttctttctttttagctgtgacactgcttttacaatatgcaaaaacacaagcagaactacccaaggtgtgttgtcacattctttctacattgaatttggcaacattttatttattcagattatactaacgtttaaaaactaaacaagtgaaaagctgtaccaaggtacagttacatccatttatttcaaaggtttaaaataccacttttatctattgtgattaccttgcagcgatttctgcttttgcaaaaaccatctcaagcatcatatgcacaatgcatcagctacttttagtcatcaagattggtgggctaaaccacaggcactactgttgtttatattctgtaaaaggagcttgtttttcaaagaaaaaagcttaaatagtttctaataatcatgcctttgctttaaagccgtaacataaaatgtccttgagcaatcgcagcagtgttcaatgttaatatatagaacaatgaccatacggtacgttactctcacatccaatgcagttatgtgttaaagcataagattaggtaattgagggttagagccaacaggaatctgcagggtgtatgaaacccaccaaactcctcctctgccttgagagggttcggtcagaaatgtgccctgttatgacctgactgctaagggacttgcttgctttcttaaacactattgtcttcaaatgtgatccctttaaatctacaaatctctgttggctttaggggatgggcagtataacaaatttaacttccacttagaaaagacaaatcttttccaaaaaacatttacccagaatacaaaaaaaggacagtatagtggtcagattcccagtgacaataaacaaatcctcctctcttcaatgtttactgtaaagccagttaactgccatttatttgaaagaagaaaagaaaaacaagcccccagattggtaaacacattggcaagttgctagactccaagctggctacccttgtcaaatctgttcgagttttttcaaaatacttgggctttttaacgcacccagcctgctgggcacagttaagtaaaaggcatttactataatctaagaattccctgctattatcatttttaaatgttttcacatttttaaaactgccttacccttttggatgtatttggattccataaaggtgagtacaatcaacgagaaactgaagtgggagattctacgactgcccagaggcagcagcatgcatggggctggttgtgggtgctgtgtgcagtccagaggaatcatgggagaaaggaagtcaagtccttaaacaccctacagaaacaaacactgcaatccagtatggcttattcggatgcatttaccatgaagctaccagaagaaattcaacctacgaggctactcttaaatgtaacaggatcggctatgttgacgatgtacccctcccatggccctccccccaatcccaacacagtctaccatttccagatttacttcactctgaatattgctcatcaattgttactcc

SEQ ID NO: 432556 - DNA, 2019 bp, Homo Sapiens
  misc_feature (30)..(30): n is a, c, g, or t
  misc_feature (35)..(35): n is a, c, g, or t
  misc_feature (71)..(71): n is a, c, g, or t
  misc_feature (87)..(87): n is a, c, g, or t
attaagttaccctctataccaagatcccantgatnctatgaaagtgttagattgtttagaccagtgaaaangaagatctggataccnggtacaaccaaaaaccttgcatataaaacctttggaaaaccaaatatgtatacttccaggatatgaatatcaaattaactcactatgatctcccttttattctgacaccataaattttaggtaacatttgaatgaaactgaaatttcatcatggtcttaaattttgatggtgtcatgctgctcatccagagcaagaacctgtggtctcagctcgctttgtgtaaataaaactggacacagtggaggaaggagtgaaactgctgcacctccctggggttgccacaaagccaggacatcatgggaggtgcagcatcgctaggcatgggctgcacaaactccggcccaacagtccaagtgctatgatccagcacctggaatttcaacagatcttcctacaagaacacatctgagatgcaatattaacaacaagcccaacattaatcttttattatgaaatgggctggttctcaaattgtgcaacagcaaattcccattaaaaataactgtcttaaacggtgaaaacaatttgattactttatatgacaaacttggaaaaagccttcatatctactgcatgaatggaatgtactgttttagaaaagctacagagtgtgtgggcttaaagttgaaacagagacagttgtggcccgactgaggtgtctctaacaagtgttaatgggtagataaggtcctttgaaacaaaaggaggaagcaaagtctgcactggcctgttgtcagtcttctgtacatcttgaaagacatagtctgcttggggctcttctgctcttgcactctgcttccctggggacagcttaatctacacatggagactggtttctatattacatctcgattagtcacttcaattgaaagataatctcggtccataccaatcagccgttagaagtcttgctcccgttggggatcagtgggcttcctaggactactcttggggccatagaggaaggtcgtaaatgaatatccaggggcattagcccagccttcacgtgggcttctgacggtaatggagggtgaggtctccaccgctcttccatatgaagtgtttcactgttcgaagggtccatatttggttccaaaacctggtcctggcacaaaagttcaattttctcctctgccaacacagcaatatcttcttctttttcctgttctcctggtttttcattattagaagagctagtggtttgagactcattatccaagttgataattttttcataaacatgttccataacttttcggacttggagcatgtcactagcagagagtctatctttttttaaggtttttgctcctgaagatgcatgaggttggaggtagaaaggaattttgttgaatttgggcatatttttatccacagtgatgtcaattacccattgtggcactgtttcattaagaagcatagactcagtctcacccccggaatctcggcagagcagcctgaacagtgtgcgacctccagcttcaccaaagatcacgggtgtatgtgggggcacttgaaaatatccatttcccttctgcactcggttctcctgctccccatttacatggtttacttcattttcctcttcatccattggattcacatgtgttctaggccaatattccaggagtgcttggagtaaaagtcctcctaaattcaattttggatctgacccatcagggctgctgaaaccagcatcttttgcagaaacccaggcagcaaaacaatcactttcatccaaagtaatagttaacatccctgtttttaagtctactgagaaccaatttggcacatacaccattttaaatcttttcttaatttcatcttcaaaatccactttgcccagatcttcaactttacatgccttcaatacatcccaatatgccacattattattggtatctcctcgtgccgaattcgccacccaggcc

SEQ ID NO: 432557 - DNA, 324 bp, Homo Sapiens
aaaagggacattattcacattttattaaaccaaatattagaaaattgctgtcatttaaaaatatctgcaagcaatttgccatatcaataaagaaatgtctacagattcaagtctgaaagagaagaaggtaagtgatcagtaacccttacagacatggaaaccaaggaagcctcattcctgtgctgagaatattctagtagctcctgctgctgccacatggcagctgggaataccagtagtctcagcactcggtcagtaccgtgcaagctcccttgggaatgctgataaatcctggcatgatacagcagtatatatgtttttttt

SEQ ID NO: 432558 - DNA, 1146 bp, Homo Sapiens
  misc_feature (704)..(704): n is a, c, g, or t
  misc_feature (1063)..(1101): n is a, c, g, or t
gaagcacacagaagtagcgccaggcagagggtttgaaggatatgtattcatcaagaagtaaacgcaaatccaagatctcaaccacacttggctcttaaagatccaccaacttaacccttatggcatgcatatgtggcttcttgcaagaagcaacttgaaaacccaagaatgccttgctctaccacgtcccgcgactgcaaactcccttcctctgaaacaagcaagccacagctttataagaaacatgccggcatgtagtccatcctgggaggggagaaatcttcaccactggctgcctttcagcaagttccccttgaaatctgccggcagtggaacagatcccagatcccaacgctgtagcttgggcgtcctcccaccaggggttccttgttctgaaagctgccaccagtgttgttccgaaagatgcctctgcctttgtggggtcatcttccattatgcctcctaacaggaaacaggcttctatggaagagaagagtcccagccccctgacctttccgctttggtcttggaggatctgagtcacatctgccatgttgcctaaagaattagttgagtctcttatcacactgtcgacacatttaggggccattcagtggcacgtttcctgctaaaacaactctgctgaaaatgtctgaggtccttctcaaacagccactggctttgtgattgttaccaggtcccantaaagcgggatcacacctctgaaattttttacgaggtggcaggtgaagttaactcacacactatggatgcctgaatcagatcaaggataacagattggacttaggacactctctctccctctccctctcatttactggttacgatccccaggaatcccagtgtaaccctggataagcagggctggctggagacgatactgagcatttcccgaatggagattattgtgtggataactttttaccaaatgtcactgtcttttcctcccaaaccgacaccaagagctttctatttttctgacacctctttgtaagagcaagaaagacataaagagtacatacacattaggactctttaaaannnnnnnnnnnnnnnnnnnnnnnnnnnnnnnnnnnnnnnagccttctacaaccttcagctacacagaaacttttatcatgtgac

SEQ ID NO: 432559 - DNA, 1973 bp, Homo Sapiens
  misc_feature (1108)..(1108): n is a, c, g, or t
  misc_feature (1379)..(1379): n is a, c, g, or t
ccaaaaacctgagatcagttctgtgttctggaacagctctccttttccacaggaggagtccctcatggatcgcggtattggttggttgtggtgatttggggagcacgagggagagcaatgcaggtgggaggtgtgggggagccagcctccccgcccggccgcacgcccgtcactgctcgtctgacacactttgctgcgaggccgtgtcgtccaggcccatgtcctcctggcttgctctcctgcagacaaccccgagagtgtccgccacagcctcagccagacatcggtcatgaagctgcccctgctcggtggcatcagggggctcacatggctcggagaggtgccgagtggcctggctggcagccctggctgaggggcccatcacgatgttgacgctgctggatgactgggtgtcactggtattgcccccctccgcagcagagagtccggaaatgacgagcgcgctggaaaagctcctcttgccgaagaggaagctcagggtggagctggtggaggagcccaggctggacctgatgagcgcctcggcccgctcacggacactcaggtggccggtggtggtgacgggcgggggctgagagtgcagggacgtggccgaggcgtgcaaggagagccggctgcccgagagcctctgggccagctcgtgcactgaggtggacgtctggaggaatgtttggcggctctctaagatggggccagatgagctcagcatgggcggcctttggcttagcgctgagtgtgcctgcacggactggctcctgcctttcctcctgcctgttctctgtgtcccttcacaggatgacacccccgtgctgagcaccgccttttctgggctgttctgcgctgctctcctggctgccaccactcggggcattgttgccacctgtcgtcggggcccctcctccgtccacgtcttcaatgttgccgccactgtgctggcgggcattgcaatttcttccgcatccttacccacttggtccagaaccaggtcctaattctgtccaaagtgaatgggtccaccccagatgttcttcagctgcctgtgtgtccctaggtaggatgtggttagtggggagacatacatggggtnaccccaggggctgatcgcaggaggagttaatcaagttccgcaggacctgcttattgttctggaatactgccgcgctccggattgcggttgcgaagaaatataagctcctgctgctgcccggcccaaagtcctcggacgcattctttgttaaccttgatcaccttgaagctcaggaagcttctgtggagcatgatgaccttgtactcgtcggcaccctcgtccaccacgtgccgcagggtgagcagctcttccttgttggaacagccacctngccccgccaggccgggtcgccctcgtggcagatgaccaccttcttctcgaaggactggatggcctcgtagaggactgctgggtcttcatactcgtcagggcaagtgaactggtcctggtgaagtttcagggacatcctgatagctggagctacaactttatgcagtaggtccatgtcagcaaatacccactcgtcacgtgctgttattctgaagtcacctttgaagaggacatggaggccatacaggaaagaatccaggctgatggccatattgtgagcggctgttcccagagctctcctccccagggtgcacagggcgaaggacagagtcaccaagggagagtcctcgtcactgtccagggtcgttgaaggctcttgtcttttccgtgcacagtgttgaatccattctagataaacattgcagaagctagctcgtgtgatcccctggagacacgggacgtagtcatcatcaatgttaatgttgaacattgcaaggtcacgctcaatgtaatgccacttggcaaagggctgcagggacttcagaagtgattcatttttgatccaggagaggagtttgggagacgttaccatata

SEQ ID NO: 432560 - DNA, 515 bp, Homo Sapiens
cataaaagatatacttgtagaaatgagaagcttcagtataactcaaaacactggacgcagcaataactataaacattttaatttcaaaaacaaaggtgtgtgcgatgttgtgtgcacagtaagggttgcggggcttggagaacgagcacgcgtccctgtgaagcccgcagggtgctggcggcccaccaatcgcttggactacagtgaggagcattgtgtgactccgcggtggatttccatgcaccgaatggactcagtttctaaactcacatcctaacgtatcctggcttttcacagaatactggagacatgactgcatgcatgatcacggttcttgttgtgaagctgccaccatgttacgcttaacagctgcataaatattataaagaaatagggttttcttgacacttagatttaaccttaatgcatctgcccagctgatggtatcagacgtgaagctgtctcctttctttttccatggtaccagtacatagtataaaggtgccgattgatgt

SEQ ID NO: 432561 - DNA, 662 bp, Homo Sapiens
agcggttagttcattagactttaagtttaattagattttaatcggtttaattagactttaatttgttaacagtatgtagcatttccatccaacaggatgaaaagttgaacaatctcctcaaaaagcaactataaaggtgaatgaaagtgtcaaaacaattattttagcattctggaaattaaccaaagatatgcatgcaaatgaagagagaagtgttattcatgagaatcactgaagcatgggcagatatagggcaattttatagttttcttgatgaagaccattcctatgcctcacctgtagctctactgctagacagttcaacctggatgagacaggctatgaaaccaatagtcttagcgctggtaccaggggaaactcacttgatttagaatcttgtcagttccagaagtgctctcatgaacaagtaaataaggaggaccagcagttctgctagcctgaactagattctgtttggtgcaggtagcagactgtcagactagcagaggattttgtaggaaagaccaagaagttagggatacgaggaaagcttgttaagttcttcatgtatctcaggttgacaggagttgtagccatgcaaacaacgtagtgtagttagcccatgccaccccacattcctgggttgatgaagccaataacaa

SEQ ID NO: 432562 - DNA, 698 bp, Homo Sapiens
  misc_feature (57)..(57): n is a, c, g, or t
  misc_feature (70)..(70): n is a, c, g, or t
ttcaccccccttggtttttttcggacaaaggaggaaatgcaaagagaggagggttcnattcacagccttngtgtgagccccaaatttttctgtcagtttctttcagaggtgttcatattcccaagaccatctgacccagacgggcaaaactggggtcaccatgcccatgcagcatttcatgggcacaattgtacatgccaatgagtatcccgccgatcttcaatccgtgacagaagtaaaatgactgaggtgtaagttacaatcaagtccaggtaactccgagtgaaatcaaagttgagattgatatcaaaatggcactggcaggcatcaatggtgttgagaagttcatatacatgatcccgaaattccatgacatccacaaatgactggtagtagttggtgaggaatctaattatctcggctttttcacgatgtactggtcctaaatgttgcgtgctgtttcggacatctatgttgggaaatttcttgttgatatacttgagagatggttccatggacttttccagtaagaaaggtggcttagatttggggtctgaacaagtcttcttgatgttatacatacggatgagaaccccctgaccgcgatcattcaggatagtgagcttctctgctaatttatgctggtaagcagatgtcaaagacatgatggccactgagagaggagcaccagacagcaa

SEQ ID NO: 432563 - DNA, 506 bp, Homo Sapiens
  misc_feature (405)..(405): n is a, c, g, or t
  misc_feature (457)..(457): n is a, c, g, or t
  misc_feature (468)..(468): n is a, c, g, or t
  misc_feature (477)..(477): n is a, c, g, or t
  misc_feature (491)..(491): n is a, c, g, or t
ttttttttatgtttaaagctctttcttaaagtttatttgcaatatcattatgtataaataattattatttataaattttggctctaacattgagccaaaaacatccattcacatactcaacaatcagacttgacaaagatgacagctctcgaactttagaggttaagttaaagaaaaattagaaaaccattcgacatatttgtagttaaagcagagtaacgttggaaaggtggggggggtgatcccagtgactcctaaattgtcatgttccatcttagagcataattgttaaaatcttcctcttatttgtgagggatcataggatggcctgaagttctttgcatgtccaggaggaaatcccaaggaaatttacatttggctttgggggggtgatcccaatgactncctaaattgtcatggggccctcttatggggcataattggttaaaattttccncttattttttnagggggtcntaggggtgggcctnaaggttcttttgcat

SEQ ID NO: 432564 - DNA, 1435 bp, Homo Sapiens
ctgactctggaaaggctcatgttttacgataaatcagaattacaaagttccttcattcacaggtaacaaaggattattaaataatttcctgaactaagacaacagtctcaccatcaaagaaaattttcttctcatctgagtttttataaatgagattttacaatacccagcttttttagttaatatgaaaccatcggcgtacagagaacatcctcaaagctcaagatgagtaaagctaatattctcagattttccacactctacagagcagcaaatattttatcagaatatccatttaacacagttttaagtccataataaccaactatgtatttttcttattcaaagaagaccatgttttgataagaataatcccagtttgatgagtatcctattccccttgatgttgacaataaatgtcactgttgagtctctatatccttgactcttccagtcaaaggaaaatcctgtataaagctggaaaactgcaaactccagcggaagcactagtgttagtgctgaagtaaactttaggggaataaccacagtcgcttatcagactgtttacagcattgatagaagccctcctcttcttttatctctattatctctattttatctctaaacattctaatattttaaacatgggggttcactgatatcgataaaggtctagttcatgagtaaggttttggtctctggaatgatgtgtggctagccccaaaacactggctgatgttagctttaaacatgatcattcttcttcccaccacaatctgtcaaacccgcccatccgtcctgccactgtcactcccccagcccctcaggattgctgctcctctcttctgaatgttctactgcatgtatggtattcactgagacatcactttaatgtataggtcatttgcatttcatgccaccagctccccaaaagacatcaactgggaacaatttctaatagtaaaggcacgatttgccagaattttccctttataaaggaaatcaaaggacctgtctggaagctgaaagaacaccttgggtattcctgtaaagggaacgctgtatctgctaccaaaacccagagacactgactagatctaaagagcatatggattatgcaatagtgtgagatttggcagtttaagatctatttccaatattacattaagccatttgggtgaaagtgttgttagtatcacaggggcaaatgaaaagtgtccaatgacacccttttggctcaatttccttgtgcctctggttatacttccaccagctccagtgaagcctgtcccagggcacatcactcagctccacgcacagctgctcagagaggaaacaatgcacttcacctcaactagtccagcaactggcactcagatggtgaacgctgcagccaacggccttgggcagagcccatggaaagctttaaacaggc

SEQ ID NO: 432565 - DNA, 973 bp, Homo Sapiens
  misc_feature (894)..(930): n is a, c, g, or t
agagcccagagtccagagattttttccagtcatctctatggtttattgtcactgaaataagaacactgattggggggagggtgggtgttgcaaattgcaaacctcaggtaacctgacctccaactttagagcccagagtacagagaggtgggccttgaagccaataaatacaaagcttcctctgccttgtaacaaaggcaggttggcatagggccctggagcctgactgcccaggcccactttgggatggggagcagctatcactcctctgctggcttcacttgcgtggcggcctctagctggcaaagtagctcatcccactgcacgaattgcttggagagaagcattgtagtcttgttgtattcctccaggagagccttggactcctcagtgatttccacacactggtcctgctgctgaatgtggatctgggccaagcgctgcaggcgggcagcatgctcaggaacggctttgatgtgagcactgtccagcatgggcaccaaggcattcacctgctccaggagtgcaacctgggaaaggataaactgctcctctgctaggatgaattgcagcttagaggcatcaggtatggcaatgcggtcgatgtactcaggatccaggtacttgatcagatcttcaatctttttgtagagaatcttcaccctctccctcttgctggaaatgttccccaaagccacctgcaccttgaccaggccgtcagccaccttccgtgagccgcgcgccccgcccggcccgtacacccagcgctccagctcttccactcgggcctgtagccgctgcaagtcagtcagacccgccatcgctactaccgacccacctcggccaggaaaacccgctctcgacgaattcgagctcggccgatttggcctgatnnnnnnnnnnnnnnnnnnnnnnnnnnnnnnnnnnnnncgccgcccccggtgagctccagtgcctatagtgattatcatcc

SEQ ID NO: 432566 - DNA, 915 bp, Homo Sapiens
  misc_feature (45)..(81): n is a, c, g, or t
  misc_feature (789)..(789): n is a, c, g, or t
  misc_feature (821)..(821): n is a, c, g, or t
tgatgataatcactataggcgaacggagctcacgcggggcggcgnnnnnnnnnnnnnnnnnnnnnnnnnnnnnnnnnnnnnatcaggccaaatcggccgagctcgaattcgtcgagagcgggtcgttagtagcgatggcgggtctgactgacttgcagcggctacaggcccgagtggaagagctggagcgctgggtgtacgggccgggcggggcgcgcggctcacggaaggtggctgacggcctggtcaaggtgcaggtggctttggggaacatttccagcaagagggagagggtgaagattctctacaaaaagattgaagatctgatcaagtacctggatcctgagtacatcgaccgcattgccatacctgatgcctctaagctgcaattcatcctagcagaggagcagtttatcctttcccaggttgcactcctggagcaggtgaatgccttggtgcccatgctggacagtgctcacatcaaagccgttcctgagcatgctgcccgcctgcagcgcttggcccagatccacattcagcagcaggaccagtgtgtggaaatcactgaggagtccaaggctctcctggaggaatacaacaagactacaatgcttctctccaagcaattcgtgcagtgggatgagctactttgccagctagaggccgccacgcaagtgaagccagcagaggagtgatagctgctccccatcccaaagtgggcctgggcagtcaggctcccagggccctatgccaacctgcctttgttacaaggcagaggaagtttgtatntatggttcaaggcccacctctctgtactctgngctctaagttgcaggtcaggttacctgaggtttgcatttgcaacaccacctcccccaatcagtgtctattccgtgacataacccttaggtgttg

SEQ ID NO: 432567 - DNA, 1452 bp, Homo Sapiens
gattgaaattcttcaaggcactttctttttgccccttcctttgcacacaatatggaaatataggaggtatctggggagaggagaagtttaaaatgagagtatccaacaaaagctttcctaggatcccagtagcaaaatttcagataagaagtcactcaaagacatgcattgaggaccgaaggcaaatgggagataggaaatgacatgtcaaaatgacgctggggtacaatgaagttagatgagcaaaacataagtatcttttctccagcaacataactaagcatcaaagtttaaatgagtcaaaattcctatctgatgtcttcacaaatcttcattcctgagagtctatttggacttatgcttgaaagggaagggaaggtcgtatactcttcttccataattcacttcttcatttaaacataaaattcaccctcccacctcctgggtgggaggcacaggcctttgttttaaattaaagtcaattttcaaatgactgaccacagtgtccagaggccacatgatggcaaagtgagaaagaatgaagaacttcgaaggtcttcataacagttctgagattgctcctcctgctgtcaagggctggctgagttccgcctgcactgttacccttcgctgatccttccagaggtaaacctctgtcccctttgtagagtttcggtttaaatggagaatctttctctttaccttttgatcctttaggccggcctgcttgcttcttcttggatttgccatcccccttcacacccagtagtggatggacttcatcatttggtactccttgaagttctatattggttgttttgggtttcttcttaggtggctgggacccatctgctgaggactgcctcttcttctctgaactagccccttcatccatcaaggaggtttggactgcatccggtggggggccgtaaggattttcttctgggtcttctacctcaggggcaatgggtaaatacaatagagcctttgaatcttccagctcttcatcactgctacagaaggcagcaatagggtccacgctgggtgacatccacttcctcatcttctgcagcatcagcccctgtctgctcaggctcactcttatcttcatcttcaatatcaaacctctgattccctttcttcgtattctacattttcatccaattctttgaagtctggtgcaaatgcactccagttttctacttgattctgtgcccagatagataccactccactggaaatggatgctatgatgggtcgaacaggatgccaagctacatccaagaggagttctcctctcgtcccatggagaatcttcaccaggttgccaatactcttctcccagatgtacagggcatgctgccgggcagaacctgccacgatgtattccccatccccagagaaacaacatttcttccatggggtcctattcaccaaatcctgcaatttccc

SEQ ID NO: 432568 - DNA, 1290 bp, Homo Sapiens
  misc_feature (234)..(234): n is a, c, g, or t
  misc_feature (1147)..(1155): n is a, c, g, or t
  misc_feature (1255)..(1255): n is a, c, g, or t
gtccatccactactgggtgtgaagggggatggcaaatccaagaagaagcaagcaggccggcctaaaggatcaaaagcaggaggagcaatctcagaactgttatgaagaccttcgaagttcttcattctttctcactttgccatcatgtggcctctggacactgtggtcagtcatttgaaaattgactttaatttaaaacaaaggcctgtgcctcccacccaggaggtggagggntgaattttatgtttaaatgaagaagtgaattatggaagaagagtatacgaccttcccttccctttcaagcataagtccaaatagactctcaggaatgaagatttgtgaagacatcagataggaattttgactcatttaaactttgatgcttagttatgttgctggagaaaagatacttatgttttgctcatctaacttcattgtacccagcgtcattttgacatgtcatttcctatctcccatttgccttcggtcctcaatgcatgtctttgagtgacttcttatctgaaattttgctactggtatcctaggaaagcttttgttggatactctcattttaaacttctcctctccccagatacctcctatatttccatattgtgtgcaaaggatgggcagaaaagaaagtgcttgaaagatttcaaattttcagaaagggaacaacgaaggccctctcttcctctcataccacgttttgctcaagaagctgggctgtaacaattcagggttttcccttgttttcctctcattgcatgtttccctccaatattggttcattgtcatcaatcatggtttttgaagatagctagttttatccatctccagcaaagaatcatcaatagtttatattgctttacctgtgctggcttccagagatggaaacaaacccaggtgtctctcaacaagctacttttttactggggtgggggaatctatgcaaggagtaaagtaaaaccatccagaatcaaagcagcaaccacatagttcaaatcaaagatcaaggtgaattttttgtatcactgcctgtggaaatctatcctcatcagtcattgcatttttccctgcctatacctgtgctcctttttcttactgtgttttcagtcacttcctttctgtgaaaggttgcttagcnnnnnnnnngacatttgttgttctttataaaaataaacagattggatagatgtgtacattttggtgtttgaaatttctctgaaaaatccccatttagggaaaaccaggntgtggaaaaagggggcttcagtaagcctttcttca

SEQ ID NO: 432569 - DNA, 367 bp, Homo Sapiens
  misc_feature (181)..(209): n is a, c, g, or t
tttttccaaagaaaagtcacaaatacatatgtacacatgcacgccaaccccactggggacagacaccaggatgttgggatgtggggagtggggagtgggggttcccaagcacagcagggtggtgggtgggaccctccaaccccagcccgccccaccctctccacgtccccaccgatgaaannnnnnnnnnnnnnnnnnnnnnnnnnnnncagtgctcagctcaggccccactcccctgccttgcctccctccctgcctgctgtgcaacctggggagcatgagacagagaaggcagaggagcctggggaagctttttcgaaggatgggaggggcgcccacctcctgggacccttgggtcttcctttgg

SEQ ID NO: 432570 - DNA, 1989 bp, Homo Sapiens
ccttaattttaggataatttttaccattcttctttaagctaacccaagtgaaaaaatccaattttaccacaaatagggtactttcatcagtaccataaaacagccataggttagcaaaggttagaaatcagatcacaagtcaagttcaattgaataaatacaatactagtacagagacacccatttttaacccacaatgaaaaatctgagccatgaataggttttccattttgaatctaacttctagatgatctgtattttgaccttaaaggggccaaaatatttaatatgggtgaagctcatgttccattacctgtaaaggtctaatgcaacagaaaaatggtcattttacattggttagaatttttaactaggtctttcatattattttgtttaagcacatgacagacttatacacatattttaaaaaatcaaacatgggatttctatatacatcaaacctttaacaatgtctgtctctgaattgctattatagtgttcaaaattatacaaacaaacatccagtaaacagcattttattttatgacactctgtgttaatacaataaatatacaaaacttccaacccactgaaacatgcaacattagagggacacatggagggcatttctgtagaaccatgacagtcaccatgatggcagcgcagtattagttactgacaaaatatacaaacatctctagataaataatccaagtcccaaattacaaatcactgagtaatgactttccggtgttcaaactttagtttgaaataaaattgccataatttaatattacaaaatgataaatgacacggatgactgctgtgtgaagaccattttatgactatgatttcatgactgtgattttagtactaaatatagaacacttaacaaatgccaatcttttgctgagtgaaaatttaacaatttactgagagaaaagtaaatataagaatttaaagttcctttcatacttgatcatactataagcattgccatcatttcaatgcacatatatttttaaaaaacaattttctctctcaaactcatattaaataactggattttaaaacattttccccatccacacaaaaaaagatatgtgggttctaattattctttgctatttaataatgctacctttgaagatttctacataatataaacattccaattctgaagcaaagtatttcagcatttttcaaaagtctctaatatatcttttgtttgtagtgtacaggaaaaaatggacttgggatataagttaatggtgaatataggtgcacttgctgtattttgtggttaatgttttgaatgtatgcaaaatccacactcaataaagcacactgataaaatagatttccaataagactacaggctctgaaaaacaaactggctaagttggttgagaacataggtagaaattatcgctgattagaaatatttacaaaaaatagctttaaattcatacgctgaagaataaaagaaatgtcttccaagtatacctgatgtcaataagatcccaaataaatcaaatgtaaacaccatctggatggatctgtgttacctagtgacatgcagcgctgcttcatggatagtgaaaacttggcatcccacctctagcataaaactttttctgtaactacaggtttggggagaatgaaagtgatttaactatttatgcctatctgattttttaaaaaataaggatttccagcctctaatatcacaatccttacttaaaatctaattgaataatcactatcattctgcaatcttaatttagttaaagactttcaaaacacagcagcatgacttacagatgtctttgagtcatttatttaatcagtggtaaaattgattcaaaggttgaacccaagaatactataagaatgaagttctgtgctgcatagtaacaattttaacgtgattatcttaatgcagttaactgtatttatattttcttgcttggtgcaagttaaatgccc

SEQ ID NO: 432571 - DNA, 2112 bp, Homo Sapiens
attaccaaacccaacatttattgagaacaaaaggaaccagttggcatagaggcccgacttcaattcatcaaacttcaactgaggatggggaacacggggggtggccagccctgaagttgccctcccagggaggaaccagctctgggagggaggggctgtcagacctccagggcctggctgggatctctggtcaggaatgtgtgaaagggtggtggggagagaagatggcagcacccccaggcatgggctgcgagcagctggtggcagaggaggcggctgagctgtggccatccatgctggggagagagggtgtggtccgttctcatgtgttgacagggggcagggagccgagctcgggcagcagctcagggtgtgggtccaggcgggccagacggctctgctccagggcaatggcttcggctgagtgcttgcacttctcagagccacattggcaggtgaaatatttgcttttgatgtcccagaagcggtcgccatagtcaaaccctagctcctccccagtccggatgtctcgggaactgaagaaggcgatgcgtggaaatcgcaggtcttggtgcagcatgaagacccggacgggaatgatgttggggtcacacaggtggttgatgaagcggctgatgttgccatagtaacgggcatctatgcagtacacctctccatccttgttgtctaagtcgaagaggtaagaatcatcctctctcacatcagcctcagcatcagagatcagctccccgacatactcgcagatgaaggtcccctgtgggatggtctgcagggcgcggaccccccagcccatcttggctgttcggtagagctgtagccgcaccttgatgccactctgtacgacccggttcttgcagtttctccagcatgagcacgcctggttacactcgaaaatcagcggaggctcaatcttgttaaattcctggagcaatcgcccatccttgtcataccagcaccggatgctgagctggccgcacaggcagttggagctagagcagtcgtccacacacgtgcagtgctgcaggtgggtgatgttgcgatcgatgttcatggtggacgtctcgcagttctctgagatgtacttgtaatcctcagggcagggctccccatccacaccgttgacacagggaatgggcacgttctcatagccccgagccacgtcccggcagatgatcttctctgtgcggatggcccgatttcccaccccaagtcggagcttgcggttgagttgaagcgcaaaccacacgtcggagcgctcgggagtcaggtcccatgctgtgtccccctctttgttccgcagctcagggttggccccacgtgacaggaataacagcacgcagtcatggtagctctcccgagctgcgatgtgcaggggggtgtccccatggtagttgacagcatggaggtcacagcgcgcattcagaaggacttcggcgatggcggcgctgcccgtgaaggaggcccagtgcaggcagatgttctcctcgttgtcagtgagggtgacgtcggcgccccgcgtcagtagcatgcggatcacctcgatgtgcttgtgctctgcagcccagatgatgggcgtccaccccccactgtcctgggcgttgacgtccacctgtcctgtgctcagcagcaggctgaccatctccaagttcccgattttggctgcgtggtggaggcaggtggaaccgtcctcctccttgctatagacacagccaccacgctgcaccatgtaacgggctacctccaggtggttgttcaccacggcctccatcagtggcgtccgctgctgtttgtccactgcatttatgttggctccagcctgtgagggggcaggagggctggcaccagggacggcactgggcaggggacggggcctaagggcctggtgaatgaggcatggggccgggcccgtgctgacctgcagcagcacatggcagatctccacggagcccttctgggcggctgcatgcaggggcgtgcgcttgctctgctggtcgctctggaagttggggtccaggttgtccactagcggggagagcccgccctcgtgccgaattcgccacccagcctcgctaccaatacgcggatactgcc

SEQ ID NO: 432572 - DNA, 408 bp, Homo Sapiens
gtggtttcttctgcacacgagggcctgtggttctgtgaagtgcttatgtccgcatgagtttcatgctcctgagagctcatctccaagagtgatgatggctgggaagagtctgggcctgaagtgtatgagcctggcaagcaggcggccttctcacggggactggccaccgactctctcggagtgctgtattttaatgacagaactttggctgaggcaggacagatggcagcctgggtgggaagatgagcaggactcgagggtggattggggcagccacgtgtggaacaaatctcaatctgttcctcttctgactccgaaggatacttccttgtgcaaagacacacgggaacgaggaggggaccagccgtccctggcagaagctcgtggggcttcagtgagtgactcagg

SEQ ID NO: 432573 - DNA, 261 bp, Homo Sapiens
tattaaaaagttgcaaaatttcattaaaaacatttacatttgtatcctaatgccaatttatacatacaattcttttaagttagatttaatggaatatcttaacatatgaaaataatagaaataaatattaaatattcagaacatactcatgagtgaaaattcaattaattagtattcctaatttagatatttatttatgaatgaccaagggattttacagttcctttttaattttttgtacttgattcttggtcccttaac

SEQ ID NO: 432574 - DNA, 890 bp, Homo Sapiens
ctgtggcctgctcacctgtgccggggctcgtctcctgcttgtcgtgccggctgtgtggtgctcctctggtcccactccctcaattgtggctgcccatgacccccttccgtccggctctggctgggggtgtcgcgcgggctggaggtgacgtcctgctgatttccggctgcctcgccggtgattcttgcttgagggcaaatgtaggtagaccctttgcgaggctcagatgtcatccaggccatagaacccatggttctgtctggtggaatgacgatgaatgtacaacgggcaccggaggagtccagatcggcatccagattccccaggggtccactgtggctacatgggccctcggtatctgatatgccctgatgagcgatctgcactgccaggttgtcctccacgagcttgtccacgttgggctgtgctttctaccagggactgatgcattggccacagcagccagggagcctcggctcaggggaaggggactctggtaggcagtgcccggtggggctccggcattcgtgattgcgtataataatgtcccatgacttatgtacacttttggggttttccagccaagcacagtacatctcctccacatagttcgaactagtcccactgagaaagggctcagcagcaacaggtgcagaatagcaccgaatctgttgaaatgtcctagctgctgctggtctgttttgtgaaaatgtcttaacagtctgggaagccgtcaatggcctcaacttagcagcacaagtccttaaatgaaacatttttgtcctgaagtttttcacaactgcctgtctccggctcagctccacccgaatgaggcgccgacaccccactccggggctccaaactctcggccccgccccggcgcatccgct

SEQ ID NO: 432575 - DNA, 1141 bp, Homo Sapiens
  misc_feature (11)..(11): n is a, c, g, or t
  misc_feature (27)..(27): n is a, c, g, or t
  misc_feature (36)..(36): n is a, c, g, or t
  misc_feature (53)..(53): n is a, c, g, or t
  misc_feature (83)..(83): n is a, c, g, or t
  misc_feature (99)..(99): n is a, c, g, or t
  misc_feature (123)..(123): n is a, c, g, or t
  misc_feature (141)..(142): n is a, c, g, or t
  misc_feature (165)..(165): n is a, c, g, or t
  misc_feature (184)..(184): n is a, c, g, or t
  misc_feature (241)..(241): n is a, c, g, or t
aggttcctttncctgaatggaccattngccaagcancgttcagcccgcccttnggtgtggcatgccccatgatcaggtagttnccacgccatttctcantaagacttgtcaatgatgtctgangggcagggatcagtactnngcagcctttttagaccaaagcgncttctcagaggaccacttncggctgtaagaactcctcaaaccctgtgggacgcacaaagcctggccagcagggtcngtttctctcattttgtgaactgcatgatcccaggggtctcaaacttctgccggatccactggcactgctccaggtcattgatgaacatgaactccaccgcaatatgctggcagtaggccatctccagccgacggatgatctcccgcagaggaagtgctgattcctgtcccccgatgaaagtggtggtgggcaagtggaagaccttgtcgaggtcagactcatccaggccatagaacccaagtttgtctgtggatgagataatgtcagcgggcacggaggagtccagatcagcatccaaaatccccagggggtccagctgtgctacatggtgccctcgtatctgatatgccctgatgagcgactgcactgccaggtggtcctccacgagcttgtccacgttgggctgtgcttctaccagggactgtgcatgggccacagcagccagggagcctcggctcaggggaaggggactctggtaggcagtgcccggtggggctccggcattcgtgttgcgaaaaaaaatgtcccatgacttatgtacacttttggggttttccagccaagcacagtacatctcctccacatagttcgaactagtcccactgagaaagggctcagcagcaacaggtgcagaatagcaccgaatctgttgaaatgtcctagctgctgctggtctgttttgtgaaaatgtcttaacagtctgggaagccgtcaatggcctcaacttagcagcacaagtccttaaatgaaacatttttgtcctgaagtttttcacaactgccgcgatctccaaccccgggccgccaagcgccgcgacacccggcactgggacgggcgcggcgacagcgcacggttgcctgtctccggctcagccctcgtgccgaattcgccacccaggcc

SEQ ID NO: 432576 - DNA, 743 bp, Homo Sapiens
aaggaacctgttccagatagtagaaagatgcaaagtcttttgcctcacatgaatcacagccttccagaaatccttagcttctactctatggcaatctccacacatttgggactgaacaacataatccaccacaaacacttgttgaaggatagcaccattcatcacctctttctgaatagtcagtttaactttaagtctcttagaatgaggctcagtccaaacaaagcctgcatctccaagccgtaccttactcagaggggctttgatttttttcaagcacaaagcaagaagttccctggattctaaagcacactgtatccaagttcctggtggttgaaaatacctttgacattgtttgcagaacgaaatcgagacttgtttcggaataccttggctgatgtccactttacttcgcaaacaggccacacaaatattggcaggatttggacttatcggaacaccacactcacagcacaagatgtgtccagggctgcggtcggtggattctgccatatactccatcgttctgtatgccttaagttctccatctcacctgggctccaaccctggacgaccaagggcgaggtcagctcgggattgtggacgcccgggccctcccgctctccaccagcccagggaccgcaccggaccaccgcgcctcagacccacgccacaggagtctccggacggcgtcccggcgcccgagggccctcgtgccgaattcgggcagttcgggggaaccg

SEQ ID NO: 432577 - DNA, 770 bp, Homo Sapiens
gatattcttgagagatcagtcttttgtgatgctttgtatctacagggaacctgtacactgaaggaattcgaccatctttctgagcatgttgtcttgaggaataatgaaaatccagaccatcaggaatctctttgatacgaagtgtattctgatgcattccatatttcagaattaactgttccagatagtagaaagtttttttatgcaaagtcttttgcctcacttgaatcacagcctttccagaaatccttcagcttctcactctcatggccatctccacacatttgggactgcacaacataatccaccacaaacacttgttgaaggatagcaccattcatcacctctttctgaatagtcagtttaactttaagtctcttagaatgaggctcagtccaaacaaagcctgcatctacaagccgtaccttactcagaggggctttgatttttttcaagcacaaagcaagaagttccctggattctaaagcacactgtatccaagttcctggtggttgaaaatacctttgacattgtttgcagaacgaaatcgagacttgtttcggaataccttggctgatgtccactttacttcgcaaacaggccacacaaatattggcaggatttggacttatcggaacaccacactcacagcacaagatgtgtccagggctgcggtcggtggattctgccatatactccatcgttctgtatgccttaagttctggctgtctccgccacagagaagatctcgctagcgaaatactcccgct

SEQ ID NO: 432578 - DNA, 685 bp, Homo Sapiens
  misc_feature (416)..(429): n is a, c, g, or t
caatcaattcagaaattttattttgccaagcttaaggatatgcccggaagaaagaaacacaaatccacaggaacaatctatggttcatacctttttagaaagatgattttgagggcttcagtatttaaagggggaaagcaggctggaggggaaagagagaggatatggtcccgttgctgactccatgtgttgcaagagaaaaggagcaggctggggaatagtcaattaggtaatcctcttacgctcaataaattggcactttacataaggtgaacatagagtacctacctatggagatatctgaccttttatctgtaggctattagcttagggaacaaaagcgagcagtttcttgccatgactcagcgttcagcttactttcttccttttggctttgtgaattggggtaccgagannnnnnnnnnnnnnccacaatgggagaatcataatgacaaatttataaatataatatataatttttcttacccttggtggaaattcttcatttaaattcctaaaattttatgagatttaaatacatttagtaacaatcaactttttttatacaaagattctagaaaagcttaaggtacattattagctatggtcattcattctgtcttgaagtttaatagaaatgcttttttcagcaccgaactgtgatcttcaggaccatccttccctc

SEQ ID NO: 432579 - DNA, 849 bp, Homo Sapiens
tccgctgccggcctccctcccgtgtgtgtgtggcctcaggtccgtgtggaggatggcctgcgctgtgtgtttgtttctcgttcttgttgtggtgtcctgtggcgctggggtgctctgcagttccgctctttgggtgggctgcgcgggtgtgcgcggtctggggctgggtgggggcgcgcaccaggcgggcatccatgtccctcttggctcactgaagtccagttcttgtccacctgtagtgggcgagccttggatgttcgcctctcgtctgggttcgtctgcaggactccatcgtcattgccatgctcactctcctgtcctgtggtctggtttccctttgccctttgtccctcactatctcccaccagtccagctcccccctccaccgtgccttctctggcctttaaagagaagagatctctttggccttatccctgaccctttccttttccatgctctttacctctgtaccttttctttcctacttccttcgtatcagtctccctacttgcccaagctgagaccaccccttctcacaacatacaatatgggtacatcttttcttccaatggaaatttggcttcaggggtgctttctagaaaaataaaaagtgaggaagaatgccgattcctctggaatgcgcgtgcctccttaatttggtagccatgtatctagttttccaccccctcttctcttcctccactcccattatccctttactaggatcattccatcacttcactctccttcatttccacctttccctctcaatatcttccttcctaaacctcaagcttcctgaatcctcatctgccccagtccttctttacgcaactgctaacttctcat

SEQ ID NO: 432580 - DNA, 1066 bp, Homo Sapiens
  misc_feature (134)..(143): n is a, c, g, or t
tggggtccggcggagggctccgtgggaaaattagcaggggggccaagttgcaggcaagagggggtcccttcgcagggaccctcaagggccagcccacaagcaagctgggggtcgtagtccctccgcagcaagtnnnnnnnnnnctgggttccacacaggaagcggccggggctgcctcccgcaggggaggaaggcagcttcaaggcgggggttcaaatacgatcgagcaaggtcttcctggggtggggcaccaaggggggccaagtcctggaggatcggattcacatcaggaaagtggctctccatggccaggatggcctcctcccgcagcggaatggcctccaggtcctctttagtgatgtccgggagcagcgcgtgctcctggccgtgccacaggtggtcactcccgttaaaggccttctcatcatcagccagctcggcaaacggggcctggggactctgctgtttactgcccctatgcgccatgggaagcagcgctctggacttttctgcaattttcttctgcaccactccatagcactgaatggcatctgagagctgggttttcagccggtccagctgaggacgctcctgctgcagacgctccgggcaggagctgcgcagcagctcggccatctgcttcacggagctggcgctggctgcaatggtcttgttggtctcctgctgtgccgtgtgcaggctgtcccgaagctcctgcgtgtcactcggtgtccctaaggactgaaggctccgctccaaggaggtcacactggagttgattcggaagacgttggccgacatctcctggaacagctcctggaggttgcacggatcgacctgggtggctaggggctgacagccttgtctcgaaggtccccccgaaagggccacggctccccaggccacctccacgggccgatggatccgtcatgacatcttcttacagctggcagggccagcagcctccacactgagctgggcctcggtggctcgcggaccgctccgggcgctcacggcgggcgaggcgggcggggcgggcacccaaacatcacgtgacggcccctac

SEQ ID NO: 432581 - DNA, 893 bp, Homo Sapiens
  misc_feature (878)..(878): n is a, c, g, or t
ataggcatatatatatatatatatatttatgtatttataacagaaaattggatagaaattattccaggcatatgggatgtggttcccctgggccagaaccacgtagggcagaggagccctgccctccaagtgtgcatgcccaccaaagggacaggggctttcaggagtcacaccagatcacgcttgggacctttttagagcctggctgagccaccctttccagagttccagtgagcagggggcccctcagtgcatcttccccacctcccctgcttccagggacgctgggctgcagacttcgcagctgctgccacatggggttggagcctccaacagcatcatccctgagtagacctggtccactgagtcccacaggtcggctctctgcagcctttccctgcaggtcaccaccctctacaggcaatggcaaggacgcgacatcacaggtagacagcccacatcctctcatccttccggtctcctggactggagttgtcccggtgccctggagacccagtcactgccacctcgtcccctggctggactcagcaggggaaagactggaggccctgctcctgccctttggctctgccagcacccccgaccagccctatatctcctcctccaccttcaagatcatccctgagaagacctcgagccccgagtgggtgcccttggggctgtcctgggcgcctccagcaggcccctgggccactccactggcaggactaccgtcctggagtgagggtgaggcttcccgggtagggcgtgcttccaccagcctctcgagggtccggttgaaagcctccacgccatcggccagtctggaaggattccggaccgtacgcaatacccatttttgcggtgttggcgttggnccggtggggacgagg

SEQ ID NO: 432582 - DNA, 1113 bp, Homo Sapiens
  misc_feature (796)..(851): n is a, c, g, or t
  misc_feature (929)..(929): n is a, c, g, or t
  misc_feature (967)..(967): n is a, c, g, or t
  misc_feature (1004)..(1004): n is a, c, g, or t
  misc_feature (1007)..(1007): n is a, c, g, or t
  misc_feature (1041)..(1041): n is a, c, g, or t
  misc_feature (1054)..(1054): n is a, c, g, or t
  misc_feature (1058)..(1058): n is a, c, g, or t
  misc_feature (1060)..(1060): n is a, c, g, or t
  misc_feature (1062)..(1062): n is a, c, g, or t
  misc_feature (1070)..(1070): n is a, c, g, or t
  misc_feature (1077)..(1077): n is a, c, g, or t
  misc_feature (1079)..(1079): n is a, c, g, or t
  misc_feature (1083)..(1083): n is a, c, g, or t
  misc_feature (1088)..(1088): n is a, c, g, or t
  misc_feature (1097)..(1097): n is a, c, g, or t
  misc_feature (1105)..(1105): n is a, c, g, or t
tcacctattattggaacatttattaatatttgtaaggtgcagactatgatacacaaaaagacagtgatgtgaaataacaggcatcttcatcagaggtctgctttgcagcctgtgagtttagttgtcagcagtacactcaaggctgaggacttggcgccttgggttcctttgcctctgacacaaagcaaggaccttcagtactagctgatgctccaatcagttttttgttcatacacactgttggccattgtgaatctttcttatcatgccttccaaggaaaccaatacctacctccaccaccatcacattgcaaacgaccaaaagcacatatgttcatgatgctttgttcagagctggcccgaaaatgaatccatatgagagtcacgtgacaggagctggctatgagacttacttaagacagcaatgggaatgtccccaggttaataaactagagcatgttcaaaacagagcagggaactaccaacctcttccttctaagaagatctgacaggctctttggctgatttgaaagcagtccccctgaagctgacccggttctaaagttgagaatgctaagtttaccttgccatgtcctctgacattttgataggcggtttattttatgctgggggttgctgattcttccaaaatctgggtttctgggatttgctttattcagcaggaacctacaaagtctgtgtttattcttgactgaaagaattgaatccacagcatctttcatcataaatataatgccctgggagaagatacagcagcaaaccagacagacaaggnnnnnnnnnnnnnnnnnnnnnnnnnnnnnnnnnnnnnnnnnnnnnnnnnnnnnnnncagatatatgaatgatatctgggctgagatggtcgaggtcacattggtgtttttactacaatgctttgcatctccganatcacagacttccatttcacaagttagcaatggtattnattttccttggccaatgttatgcttgagtttgattcntanataaaaagtatggacattatattatcttagattnctctctgggaacntttncngncaatcttntactaangncgtnagccnctgctttcnctactgcngcaagatt

SEQ ID NO: 432583 - DNA, 914 bp, Homo Sapiens
  misc_feature (17)..(17): n is a, c, g, or t
  misc_feature (20)..(21): n is a, c, g, or t
  misc_feature (28)..(28): n is a, c, g, or t
  misc_feature (30)..(30): n is a, c, g, or t
  misc_feature (41)..(41): n is a, c, g, or t
  misc_feature (44)..(44): n is a, c, g, or t
  misc_feature (46)..(46): n is a, c, g, or t
  misc_feature (50)..(50): n is a, c, g, or t
  misc_feature (55)..(55): n is a, c, g, or t
  misc_feature (99)..(99): n is a, c, g, or t
  misc_feature (405)..(405): n is a, c, g, or t
  misc_feature (451)..(451): n is a, c, g, or t
  misc_feature (623)..(623): n is a, c, g, or t
  misc_feature (759)..(759): n is a, c, g, or t
  misc_feature (761)..(761): n is a, c, g, or t
  misc_feature (772)..(772): n is a, c, g, or t
ctccacatccacaatgntgnnggggtgngngggtgtgagcnagngnactntgagnactccaggacccctccatgcccagctggtggtgtccagactgtntgggtagcggatgaggacaggctgcacaggcacccctgcgatgaaggctcctggtttgaacttaagcaaagccttcttgttggaacaggtgccctcaggaaagaatagcactgcggccacttgcctcctgaggtggcccgccttcggacctcctccaccactctgcgtcgagaagccggttcatgccgggataccaggatggcttggttgaatcgaagaagggctccaataacaggaacggaaaggttctcagctcgggacacaactttgggcaggtcacagggcagcagaacaatggggtcaaanaaagtggagtgtggggcagcaacaagaacaggggcttgaaggcaanaggctcgctggccacgaacgcgaatccggaggaagcccagcagaaaaaacagcaggcggctcaggcctagcaccccgttgtggcacacagtcttcctccatcctgtaattggctcctgaagctgctcctcactaaaaccggccacttgaagccaggcaaagggccagagganaaagaggacgataaaggccagaagcactcggatgggggccagcaatgcccccaggaggcagaacttaaccctctggaggcgagagagatgtaactcatgcacgaaggggttgggggatgctgggggtccggacccngnctctaggggcncccagtcccccggacttccctggctcatggcgggagaaggtgggagggagggcaccccggccctggccccggccaccactctgcagagcagctgctgctgcagcagcggcggcggcggcgctctggcccgggccccgcccgg

SEQ ID NO: 432584 - DNA, 788 bp, Homo Sapiens
  misc_feature (24)..(24): n is a, c, g, or t
  misc_feature (49)..(49): n is a, c, g, or t
  misc_feature (63)..(63): n is a, c, g, or t
  misc_feature (69)..(69): n is a, c, g, or t
  misc_feature (77)..(77): n is a, c, g, or t
  misc_feature (83)..(83): n is a, c, g, or t
  misc_feature (130)..(130): n is a, c, g, or t
  misc_feature (144)..(144): n is a, c, g, or t
  misc_feature (617)..(660): n is a, c, g, or t
cccccctgtttttaaactttaaanaaaacccttccttttttgaaaacantttccccttcaagnaaaaanaaataacnaccttnggcccaacttgccttccttgaagttggcccccgccttcgaaccttcntccaaccaactctncctccaaaaacccgggttcatcccgggaatacccaggatggcttggttgaatcgaagaagggctcccaatgacaggaccggaagaggttctcagctaggggacacaactttgggcaggtcacagggcagcagaacaatggggtcaaagaaagtggagtgtggggcagcatcaaggacaggggcttggagtgcgagaggctcgctggccacgagcgcgaatccggaggaagcccagcaggaaaaacagcaggcggctcaggcctagcaccccgttgtggcacacagtcttcctccatcctgtaattggctcctgaagctgctcctcactaagaccggccgcttgaagccaggcaaagggccagaggagaaagaggacgataaaggccagaagcactcggatgggggccagcaatgcccccaggaggcagaacttaaccctctggaggcgagagagatgtaactcatgcacgaannnnnnnnnnnnnnnnnnnnnnnnnnnnnnnnnnnnnnnnnnnncccagtcccccggacttccctggctcatggcgggagaaggtgggagggagggcaccccggccctggccccggccaccactctgcagagcagctgctgctgcagcagcgatcccgggaattccggaccc

SEQ ID NO: 432585 - DNA, 2119 bp, Homo Sapiens
  misc_feature (242)..(242): n is a, c, g, or t
  misc_feature (1973)..(2017): n is a, c, g, or t
atataaaagagcgagggcgggcacagaggccccagaaaggtataaaaaagaggggccggcgccatggtagggggcccccctcttgttcgtaaaaagaaaaatgtgggtaggcgcgatataaactttgggcgcccccccgagggggtaattttttataacgggcccgcccccctgggaggtgggcttaagattgggtggaaagcttcgggaggggtgatatgaggagccgcggaggggtggtnttgcagggccttcattttgtttaaaggagtatgggatttgggtttatatttaaataaaaaaatagtttgttacaaaaaagtcgaccaagcaagaaaattaaagtcagcgtaaaaaaacagcaaccaagcaacattgcaaaatttcaaacaggagcagagatggggctgaggcataggggaggcccctagcgctgccctgaggaggagggggtgagaggctgaggcactcagtctcccttctgcttgggtgcttgcacagtcccattggccagagcagtggggttgcctggggatgaggcatttggtgtctgggaggtgcctcgagaggtgtgtggggggcgcaggtaggtgctgaagagtttcccatagagtgggtcatggagggagaagttctggaactgacagagggagaggccttggctggatcctgcctggcacagctcagcatgcaaagctgtggcagcagggtggggtgaacccagcagcaggtgcaggatggtgctgaagccgtctttgtacagcaggcggttgggaccctctgcttgctcttcagcaaagagctcaaaggccagacgagttagctcttccaggctcctgcccccatccagagctgctagtgcaagggccacatctcggaagtccaccaaacccttggtatcctgctggaagtagccaaaggcaccagccaccgtctgaggatcagagagctgtagctgcctggcaaactcttcctggctgatcattcgactccggcctggctctgccccagcgtccacatagccagcggacagcccagccttccgaagcacttttcccagttcccagagctgtggttccaacgccaccttcagccggcccaccacaatcacaggtaagctccctacaaactcacattcggtggctggaatgcccagagcctgtgccatgaccctctgaacattgttggcatagagggtggggtccctgctctcctcagggctggggtgatacacaggaaggaactccacatccacaatgctgcagggctgagaggctgtgagccagaggactttgagtactccaggacccctccatgcccagctggtggtgtccagactgttggggtagcggatgaggacaggctgcacaggcacccctgcgatgaaggctcctggtttgaacttaagcaaagccttcttgttggaacaggtgccctcaggaaagaatagcacctgcggccacttgcctcctgaggtggcccgccttcggacctcctccaccactctgcgtcgagaagccgggtcatgccgggataccaggatggcttggttgaatcgaagaagggctccaatgacaggaacggaaaggttctcagctcgggacacaactttgggcaggtcacagggcagcagaacaatggggtcaaagaaagtggagtgtggggcagcaacaaggacaggggcttgaaggcgagaggctcgctggccacgaacgcgaatccggaggaagcccagcaggaaaaacagcaggcggctcaggcctagcaccccgttgtggcacacagtcttcctccatcctgtaattggctcctgaagctgctcctcactaagaccggccacttgaagccaggcaaagggccagaggagaaagaggacgataaaggccagaagcactcggatgggggccagcaatgcccccaggaggcagaacttaaccctctggaggcgagagagatgtaactcatgcacgaannnnnnnnnnnnnnnnnnnnnnnnnnnnnnnnnnnnnnnnnnnnnccagtcccccggacttccctggctcatggcgggagaaggtgggagggagggcaccccggccctggccccggccaccactctgcagagcagctgctgctgcag

SEQ ID NO: 432586 - DNA, 3754 bp, Homo Sapiens
  misc_feature (462)..(505): n is a, c, g, or t
aagtccccatctaacgggaggggggtccaactgctgaccaggggaggtcttgtggctattggaggcactttcatcttaagcgcccagccaaatggggaaattttccccaaggttgaaataaaatttgggggcattgtttaaaaaaaacagagtcaggggaaaattacccaacctttttgcttttttaaggaagattctgaccaggggctctttgggacggatttgaaaagccagtcccccctgaaggttaaccccggttttaaaagttgaaaaaaggctaagtttaccctgcccatgtcctcagacattttgataggggtttattttatgctggggttgctgattcttccaaaatcggggttttctgggattggctttattcagcagggaacctacaaagtctgtgtttattcttgactgaaagaaattgaatccacagcatctttcatcataaatataatnnnnnnnnnnnnnnnnnnnnnnnnnnnnnnnnnnnnnnnnnnnncagtatccagtacagtgcctagcacacagtaggcaccttaatagtcattgaacagatatatgaatgatatctgggctgagatggtcgaggtcacattggtgtttttactacaatgctttgcatctccgaaatcacagacttccatttcacaagttagcaatggtatttaattttccttggccaatgttatgcttgagtttgattcatacaataaaaagtatggaccattataattatcttagatttcctctctgggtatctttttctggccaaatcttcatactaaagagacgttaagccacactgcattttctctaacttgcctgcaaagatttactaaaataaaacagattgatcttatccaagtaacaaaaacaaaaaagttatgaaattattttgctgcacaaatctaaaatactattattaaccataatgtcagcttacttaggtcaattcttcaattgcactattgctttgaactttcacaaactgtcattttccttccattctaaatatgacagttcagttactaaggaattgtttttagttaacaattacttcaatttcatatgaaacaggagctaacactctcatcaatttttattcacaattaccattgcttaagagttcctactttcaaaagaaaatttgtaatagcacagtggaaaacaaaaatctcattttataggtaaataagtatcagataagtgagtagcttatacattgtatcctattactatcattctcagtgcctgaatactaatcagtttaactgctttcaagctatatatttttaaatgcaattaaaacatacagtctcacagtaaatttcaatgacttattaaaggcctttacatggcatcagtatcatatgttagagatgaatggtgtttctaatttgctagccacctgggtcaagtttaagcaggaagtgtatttatacaagtaatggtaatacaaatggtctcctgggaaaagctgttggtaagggtttaacatttttgaagtatgtttttgtatatcttcgaaatgggcattttataggcattgggccaaagcctcttaaaatcatgctccttagtacaggcataactattgtcagtgctgcctgaatgctcaggtagactcatgaggtgtgcatttttaagggttagttgaggtcaggtgaggttcggggcgtcgaaccaccttcatttgaataactctttaggaccaggaccctgctccttaatgtatggcgggtaaggcagcagtattgtcagcacctgcacctgggggggacctgatggaactgcagaaactctgcccccaacccactgaatcagaatctccattcaaaccaggtccccagatgatctgcaagcacttcagtgttggagaagcactgggctaggaccccaaagcctctgcttaccaggggccaagcacaatgtgtggcattactttctttttccttctccttctgaaatcatcctctttttatggtatcccctcagccagtttccctttctttctctgcactcccacactcagtccccagatccacatgaatttcccagctctgatatccttgcttgttatcaggaaaccacttctagtgctctccacctgaagtcacccagggctctctgctgctgagtaaccttgggaaggtcaaggcgtggtaatgactcccaaggatttattctgccttcctgcggctgggcctccctttcttcatttattctacatggagatgccatccttctaagttacccaccaaaatccaatctctcttttccattttaaatgcctctgttctgaaggggggatttctttgtccctgtttctggtcatggaatgctgccttcctaacctggcatgaagcttctttgctaatatttgcagggcacaggaaggacaaaagggagccatgccagatgtttgggggaatcacagatagggtttactcagtagagggaaatagtgtgcagttactaatgtcccacttagccgaccccttaacacacttcatttagccccacttttgcattgagggactcagcctgcaagaggcaattggagatccaaacccagacccagactggccagccagttgactcctagaagcaatttggtccctctgttctaaactgtgcaggggtaaaaggctctgcaaagaagtgaactgggcatttagaagcaagttgcttacaaattcaggctctgtgggctgggggttagcgcagccaatggtcaagggaacatttttgggtcaaccaggtgaggacccctcgaaacttctctggagtggtcaacacccagaacagatctctttaatcagaagagactggcagggggagaaacaagattgctttctggccatagtgagtccgaggaccgcgtttgcagctcccattcttcttgaggccaacaaaccaattcttctctgcatgcttcttggatatataggtgttgtaatggttctcctccagcctttccaggaacaaacattcctcatttggtgtctgtgagccgtataaaagcccgtcggtgtccatggccaagtactggccagtctcggtactctttatatacacctcccccacgctttccgcactgagctgcagctgaatgtgctggtcgctcctgtcccttgtcccatccactgtgccatccggaaggatcctcaggaagtggcccccgttgctacagtagaggagtttgggcttcttgtaattccctggaggcagattaaacttctcggtcagggctgtgaaggtggtgatttccccttcagccatggctcagcagctgctgcttgtggcgctttcaagactaaagagcttgtaggccgagggctgtacctctctccacactcgctcagtgctgtcccaggggaagcagaatccacttggtgtcttcttctcagagtagcccggctctctgaacctccaggctactgcagctctgagtggggagagggacggccgtggcatgcacatcaggttgctggcctgcctccagataccatgccacagagctggctacccgtccctagggctctgtgggaaatcgaggtgggggaggtgtaggctgggggagccaagaatgtcagcctctaggtctatctccggtccttgtttatcagtagaggggacctgcctttagacaaccgcccactcccacaccacccgcagggatgcacacagctctaagcaacccctactctggacagccagcagcaggcccaggaacacagagcccgct

SEQ ID NO: 432587 - DNA, 694 bp, Homo Sapiens
  misc_feature (128)..(128): n is a, c, g, or t
  misc_feature (521)..(564): n is a, c, g, or t
tgtcatcacactgtggccatgtgaatcttcttatcatgcctccaaagaaacccataccctaactccacaccatcacatgcaaacgaccaaaagcacatatgttcatgatgcttgttcagagctgaccngaaaatgaatccatatgagagtcacgtgacaggagctggctatgagacttacttaagacagcaatgggaatgtccccaggttaataaactagagcatgttcaaaacagagcagggacctaccaacctcttccttctaagaagatctgacaggctctttggctgatttgaaagcagtccccctgaagctgacccggttctaaagttgaaaatgctaagtttaccttgccatgtcctctgacattttgataggggtttattttatgctggggttgctgattcttccaaaatctgggtttctgggatttgctttattcagcaggaacctacaaagtctgtgtttattcttgactgaaagaattgaatccacagcatctttcatcataaatataatnnnnnnnnnnnnnnnnnnnnnnnnnnnnnnnnnnnnnnnnnnnncagtatccagtacagtgcctagcacacagtaggcaccttaatagtcattgaacagatatatgaatgatatctgggctgagatggtcgaggtcacattggtgtttttactacaatgctttgcatctccgcc

SEQ ID NO: 432588 - DNA, 800 bp, Homo Sapiens
aaccctgcaaagaggccaattgaagaatccaaaaccccagaccccagaatggcccagcccagttggactccctagaagcaatttggtcccctctgttcctaaactgtgcaggggtaaaaggctctgccaaagaagtgaactgggcatttagaagcaagttgcttacaaattcaggctctgtgggctgggggttagcgcagccaatggtcaagggaacatttttgggtcaaccaggtgaggacccctcgaaacttctctggagtggtcaacacccagaacagatctctttaatcagaagagactggcagggggagaaacaagattgctttctggccatagtgagtccgaggaccgcgtttgcagctcccattcttcttgaggccaacaaaccaattcttctctgcatgcttcttggatatataggtgttgtaatggttctcctccagcctttccaggaacaaacattcctcatttggtgtctgtgtgctggtcgctcctgtcccttgtcccatccactgtgccatccggaaggatcctcaggaagtggcccccgttgctacagtagaggagtttgggcttcttgtaattccctggaggcagattaaacttctcggtcagggctgtgaaggtggtgatttccccttcagccatggctcagcagctgctgcttgtggcgctttcaagactaaagagcttgtaggccgagggctgtacctctctccacactcgctcagtgctgtcccaggggaagcagaatccacttggtgtcttcttctcagagtagcccggctctctccgct

SEQ ID NO: 432589 - DNA, 460 bp, Homo Sapiens
  misc_feature (47)..(124): n is a, c, g, or t
  misc_feature (439)..(439): n is a, c, g, or t
aatagatatagatatagatttatatttatatataaaatagttttttnnnnnnnnnnnnnnnnnnnnnnnnnnnnnnnnnnnnnnnnnnnnnnnnnnnnnnnnnnnnnnnnnnnnnnnnnnnnnnggagcagagatggggctgaggcataggggaggcccctagcgctgccctgaggaggagggggtgagaggctgaggcactcagtctcccttctgcttgggtgcttgccagttcccattggccagagcagtggggttgcctgggggatgaggcatttggtgtctgggaggtgcctcgagaggtgtgtggggggcgcaggtaggtgctgaagagtttcccatagagtggggtcatgggaggggagaagttctgggaactgacagaggggagaggccttggctggtttcccgcctgggcacagttcagcttgcaaagttnttggccagcagggttggggtt

SEQ ID NO: 432590 - DNA, 1835 bp, Homo Sapiens
cactctgatgcaagtgtctgcatctgaatagcggagcctactatttcttccactagaggacaccatttctccactactaagtctgtagtcgtttatcatcaatgaaaaaccaaaaacctccacagcaaaggaaagtcaaagcatatgcttattgtacactcctcagattttatttttaaaaggagttttcattttccttatggaaactcaggattttacaagcaatgctctcctcagtttcaccagtactgtgtccagtactatattgctatattcacagtaaaacggactttaatttctgagtgatcagtctatgttttaagtttctgatgaaactaacatacaccttagtcaaaaaccacaacaatccctcaatctgtttgctgtgttattgttcttgtgtgtttttctgaggcttgggtaatgaaagtacttccccactccattgtaatctgcgtttgcatctaaagtaattcattaatgtacaggagtagatgaggcctggcacacatagcagaaggtaatggttctataggtgtatcttctgtaatgcactttgggctagagaaatagaaaaatcacacgtaacaaaaacaaataacttttttgagcacacgggtgtcgcgtgagtaggaccggcatacatgtagctatcatccttccccattttaacatgctcagctgctgctgcattctggggatttagcttcatcccaataatctacaactgacacttgcatctttatttaaaaacaagtggtcttgatagcaaagatgttggctaatcatgtatatattggcattagatgttttgtgtcctttcaaaattcagcattatccttattagagtgtaatattatcagagtatctgtattagtatatgaaggcattcataagcaatgcacattatgttttgaagcagctaattgtcgaacaatcactaaataaaaaacatccagattttttaaaagcacagctgaaacatttgtacaaatatacaaagagagaaaacaatcattcagacaccatgaaacttttgtaataaataggtttgtctgaaatcagtctctatcaccctggacaagcctccccaacgaggctgggagagttctacaggggagtggtgtttgaaatctattgaggaatatctttggggccaaggtcaattttgcctccaggaatttcaacagagctatggtgtattgactcacaatagtgaatatacccagacttgttgagctggaatattctgatcattttcctaatctagataggacatggctggatgctgacaatctgtgagttataagatatcctcaaataatgaaaataaatgctggtgatcatgcatgtcctgggaatgttgggatgcagaggactgagtgagaccagatagggatatctcatgcagtcaaagtcaagtttacatatggtcctatttaagtggccaggagagaacaacgcacacacatcaggactgggactgaaacagctcacaaacaacacaggtgctatttgttactgatgtctctggcttggatcaacatgagagaacaaagatataggctgtgctgattgtttaataagaaaatactacttttttccctagaaccttctaaataatgggttatacttaatgggtatgatatgatcaggagacatatcaccttttcctagcccttttgtccgagaggcttgatgcgaagggaggggtctcaaacggccaaacacccaggaatttaaaggcaattttttttgcccaaccgcaggggtaaaaagcatctaaagcggagccggctattatcgagaaggagcaggcagctcagtggacacgg

SEQ ID NO: 432591 - DNA, 220 bp, Homo Sapiens
ctaccactgacacttgcatctttatttaaaaaccagtggtcttgatagccaagatgttggctaatcatgtatatattggccttagatgttttgtgtcctttccaaattcagccttatccttattagagtgtaatattatcagagtatctgtattagtatatgaaggcattcataagcatgcaccttatgttttgaagggtaccggctcgatcgatctgcc

SEQ ID NO: 432592 - DNA, 893 bp, Homo Sapiens
tcagggccgctttcgctttgctttccttttgcttgtctttgcttctgggggtggatgccttgagacccaggaggtgtgcggatgggtcccttgacagacaggacacagagaaggctgtgggatccaaagggtcagcctcagggtacagtgggggttcctgaggcagcctgcagccggccccggggtgtcccgaaccccgcagagcaccgaggctgtgcgcaggagcctgggaccctcaagtaggtcgccgcgaactatcgggggaagcacgcagagagggtcacgccttttatttttggcttgagatttaaaattataactgataagtgaagctctttctgatttagttgaaaatttcgtaccatgtgctcgctttggttggctcaactccaaaaagagtaatttaataagcattaaaggtaaaatctttgattaccagtaaggtttcttgttcaatatgcattggaagtatttccttccccacaccattgctactcaaactcacatgcctagagcagctccgtctcactgttggaccgagggggctttcatattttcagttgaaaggatgttaactgatgtagcgatgatttaccattatttaaattttaagtcttcagtggctaaatgtgaccaaacagcacatcataagtaggaaaaacttaccagggtgcttgtctatttaaaaagcaatttttgttagtccactctgtatgcccagccgctttcataatcttggaacgagaataaaatattcctaaaaagcggggaaaatcattttgctttgacagttctttaaaaaatagggttggcacattttaaaccccatggattatgagtttcaaatgtgggaacgggcagcttctgttgagggaagataatcttgtacaatc

SEQ ID NO: 432593 - DNA, 906 bp, Homo Sapiens
ggggctttgtgcagagaatctgggtgccctcacttccccgtggggtcccccatcttccagggaccccgcctgcagtgccaaggcctgggtcattctctcaagacgggcagagcgggagtgggtggtggggtgtctcctgggatggccggcccctcccctcgtggagctccagcttcctccttagggacatgattagccttgtcggtgccctcacgggcagggctagggggtgccaggcggggtgttgagtggccagagctgggaggggaggggctggcaagggtagaggtggtgagggaggggggcagggagcagctgctgcggtagcggcccaacgagtccaagccagagctggacacccgactctccagctcctctgccctctgttctgttgtctccttctcctcttggatcagcttgatctccttgttgatggcctccagctgctcctgaagcatgatggccagcgtctgcacgtcagcctgcccactgggggacagcatgctcggccccaaacatcccctctgcctcctcctcatcggagccgtccagttccccagggaatgggggtggtatggagcccgcaggtgcagaccgctcccaatccttggagggctcctccttgacccctgaccagcggcccctcttgcctgcccgaccactgccagccacatagggatccaggtgggcaccagaaggtaaagtgggtgcctgagagtaacggagctccagggcactgccagggagagacctggagtaggaggatggtggcctcccccgcagctggtcgatctccatctgcatccgctccatttcggccaagagctgctccttgtttagcagcaactcatcctgaagcttcttcatgttggctatctcctcgctcagggagttcttctcctccag

SEQ ID NO: 432594 - DNA, 1211 bp, Homo Sapiens
tttcaaagccacagaaggcctggcccatcaggtctccgcaggaacatggctcataaaatgggtttgctcctcacttggaaccacagctggcaatcctagacagagcaggtgaaggccgcagtaagctggggggtggcgtggaactctgcaaagactcctcccttgtgccattctgggccagaacagagatttcgcattttgctggcttagggtggggacatggcattgtcctcacaggctgaaatcatcacatttgaaagctggaacgagcatcttttggttgggcataacgcaactgctgggccaatttctgcagaacggagtgacaggtcactgtgccctcctggatgcagtctgtctgccaccttcctgcagcatccccctgcttcctggggccctcccggatgcaggctttgtgccgccttcctgcagcatccccacttcctggggccctcctggatgcaggctgtctgccaccttcctgcagcatccgcctgcttcctggggaccagggcactcacgctcagttcagccttcaagtgccgggaagcctgtggttccctggagcactcctgggagaacgaacgcagatgaatttttaaacagcagaatgagtgtgtgtttgtgtgtgtttgataatggtccaagctttaatagcatggtaaaatatttattttactttttatagctagcatgtaatcaatctctaacacactgaaagaagttagaaacaccaacgtctactcagccacagctagaaggaaccattcaacatttataaacataagtatttatatttatgtacatgtcacatatatgttcgtgggaaatgcagagccatcacctcgccaggtgagctgcccctccgtaccatccctcctgacaaacagaagtgggcgccccagggggcatcatcgctcattcctctgatgctgggtttctttttcaagccacagaggacagggctgtgggcttctctctggttttggtttttaagacattaattatctagcaaattggcccattcaagttaatctctctcttgaccctgaatagccttgattcacttcaccaaaattcccagtcccctattggataaatgatgccaagtgtgtgccagggacagggttggaggtggggaaattgataataaatattaagtaaatatccattatgtgaagacaagtgagtcgtgatcctggcttctggga

SEQ ID NO: 432595 - DNA, 1578 bp, Homo Sapiens
aaaacacacaacataatcttctttatttaattgtttaatcagtttacattccacaactgacagattatttattttttccatgaacaagtcatttaattaattaccagacacttgtttttcttcaatcgatggaaatacaatatttctgccaattcgaaaaagaaaattgcaagatgcagtcagtttcagtgaagtccccaaatgctctctgcttcctcagtcctttcaaagtcacaggaacctggcaatttcccttttcatcccccctcccacttccctgttaaatttacctctcagaacatcacaatagtttcaagatctggtttgaatcgcctttcctgtaattaattaattatgagaaggaacagacagtacaatagatctgataagatgtagcattcttgttaagattaaacaacacatttattcacatcatatcagaacaaattaacataatattttatcttattttagcaccaataaccacaggaattgctgcctccaagggcagaggcattgttagaatcctgcagtacacaccactccttggtctgaccaatcagaaagcactatgcaaattaaaataaaggtaaataaatttatattgactgagcaataatctggtgggccataaacactccaggcgtttgagagttttgtcagttatggtccctgtctaatgaccatatataaaacatactcaccaaatcagctcatttttgctcagtaacacagggctcagaatgttatattttaaatcaatcaaaccttgttatactgaccgttgaaatgctttgagaatacccaggggttggctccttgcattttattctgttctctccattaagatctcgatacctatctttttcacaaacaaaagaggtttcttcaatcctaaggaaggtctccaggcagggaagagaggtaggcaatggtgggttgagtcccagtccaagtagaacttgtcaccaacaccaccacctcctaggagacccagtctgcctgtggccactgcccttcccagggtatctcctttatagcatttgactttaagataaatatttaagaaaattaagggattcagaaaacagctccaaatattggtgagatgatattagcaggtgactggcccaggtgacgaaatgttgtagagatctttgttcttgacagagagaaggcctgcctgccccttccccactatatgataaggggatcaggttaaggggtgggaggcagtagctgacattcctgcagctgaagaatatgacctgctttggcctctaggacttggacaggtcataagggacatgactggggcagcgccgaccacctctgggggcagatgggacatgcagtccacaggagtggtcatctcctcttactaagcaggtgaagcagaacttccagaggctgagacagcagcctcgacatagctctgtgctttctactctaggccaacataataagactcactcctgccttcatcagctatgacaagagctatggcagtgagtgacccaccaggaaggaccccccccatcagtctcctaatgaagaacctaagtccgtgctgtccta

SEQ ID NO: 432596 - DNA, 441 bp, Homo Sapiens
ttttttttaaaacacacaacataatcttctttatttaattgtttaatcagtttacattccacaactgacagattatttattttttccatgaacaagtcatttaattaattaccagacacttgtttttcttcaatcgatggaaatacaatatttctgccaattcgaaaaagaaaattgcaagatgcagtcagtttcagtgaagtccccaaatgctctctgcttcctcagtcctttcaaagtcacaggaacctgggcaatttcccttttcatcccccctcccacttccctgttaaatttacctctcaggaacatcacaatagtttcaaggatctgggtttgaatcgcctttcctgttaattaattaattatgaggaagggaacagtacagtacaatagtttctggataaggatgtaggcattcttgttaaggtttaaacaaca

SEQ ID NO: 432597 - DNA, 2370 bp, Homo Sapiens
  misc_feature (1876)..(1876): n is a, c, g, or t
  misc_feature (1894)..(1894): n is a, c, g, or t
  misc_feature (1907)..(1907): n is a, c, g, or t
  misc_feature (1909)..(1909): n is a, c, g, or t
  misc_feature (1920)..(1920): n is a, c, g, or t
  misc_feature (1927)..(1927): n is a, c, g, or t
  misc_feature (1933)..(1933): n is a, c, g, or t
  misc_feature (2085)..(2085): n is a, c, g, or t
  misc_feature (2159)..(2159): n is a, c, g, or t
  misc_feature (2164)..(2164): n is a, c, g, or t
  misc_feature (2167)..(2191): n is a, c, g, or t
  misc_feature (2224)..(2224): n is a, c, g, or t
  misc_feature (2229)..(2229): n is a, c, g, or t
  misc_feature (2239)..(2239): n is a, c, g, or t
  misc_feature (2269)..(2269): n is a, c, g, or t
  misc_feature (2283)..(2283): n is a, c, g, or t
  misc_feature (2296)..(2296): n is a, c, g, or t
  misc_feature (2300)..(2300): n is a, c, g, or t
  misc_feature (2310)..(2310): n is a, c, g, or t
  misc_feature (2349)..(2349): n is a, c, g, or t
atgcatagtgaattggcttactcgattcttgatgcatagtgccaatgactgtacgtgatgtgtgttgcgcatggcgtacgttcgtaccataattggcctcatagtgcttggttccggggcctcttcttgcggagccacgcatatacatggttctgtttattcagaccgtttgaaatgtgttctccgatatgctagcttgcgtcttgcacgcctcgcgtgacggcccaccggcttgccgacgactgggctgagtggggatactcttgcagttatgtgttcctgatgcgactggtcccaggtaacttgatgtcccgtttgtggttcctgcctcagtcgaaacggagccaatcgtcgaaggccgtctgccatagcagttcacctcccctctgttgggggatctagcgtgggaagggtacttcatgcaagaaagaccatctgccaggtccagggagcggaaaaaggggctctctttcacctccctgagcccctcggccccaggcagcccaatctccggttgacatccctctgcagcaacccctccagcagggagcgtagttcaggggagaaggagtcgggcagctccacggccatcgtcagcgtcatgcggtcgatctcatgcttgtctttggtcttgtgctgccggaaggggctgtgcccccgcagcaacttgaagagcatgcaccccagagagaaccagtcggcactgctgtcgtaggccacgcccttctgcaggacctccggagccatgtacccgtgggtgcccacgctggcatggggcttcttcttggagaagtcacaggccaggcccaggtccgagatccgcacgtggccatgctcgtccagaaggatgttggctggcttcaggtcccggtagaccacgaagcggttgtgcatgtgctccaggcccaggatgatctcggccgcatagaagcgcatgtcagcctctgagaagaccccgtgctgggagaggtggtagtgcaggtccccaccgttcatgaggtccaggatgaagctgagcttgtctggcgtgtggaacgcgtatgacatgcagacaatgaatgggcagtccccagtgctgacgagcgagagcatgatgcgctcgttcagggccagggtctccccctgcttcatcttgatgcgctttttgtccaggcacttcatggcgtacatcttgcctgtgtcagccttccggcacccatagacctcgccaaagcccccgcgcccaatgatgcgatgcacgctgaagtcattcatggtcaggtggatgttgagctccacattcttccactggcaaaaccgtgtgaacttatcgctctcaatgaatttctggaacacgtcccctcggaggttttgacaaatctcttcgatgtatggctggaagagatccggaggcacctgcttcttccccaggtggccttggacatgctcagtggcactcttcgagaagggatgcgagcaggccagcagctccttcatgatgtatgagtcgaagatctcccggctgcgggccacacgctcctcctccgtctccagcttctcgtacttcttgatctcctcatagaattccacccaggcctggcctcgtggatggttgagctccacattcttccactggcaaaaccgtgtgaacttatcgctctcaatggatttctggaacacgtccccctcggagcttttgacaaatctcttcgatgtatggctggaagagattccggaggcacctgcttcttcccccaggtggccttggacatgctcagtggcactcttcgagaagggatgcgagcaggccagcagctccttcatgatgtatgagtcgaagatctcccggctgcgggccacacgctcctcctccgtctccagcttctcgtacttcttnatctcctcatagaattcnaccaagggcctgncntcctccaggtngttaagncagaantctcggaagagcaggtatccccagcttctgggaaaagatcttctcaaaggtcacctcaccccggtcctccaggtacttctgcatgacactgcggatgctgggctcgggcagcaggatcttcttgctggcgcgcgcggccggcgtggccttgntcttctccatggccatcaggtagctcacgtcggccagcaccgcctccaggtccgccatcttggcggcggcgctncctcntcnnnnnnnnnnnnnnnnnnnnnnnnntcctgctcgctcggcgctcggcccggcccggcngctgntcgctcggcntcgggcgccgactcttccctcctggccctnctcggcgcccgcgntctgctcgccgcngctnacaggcggcnccgccccatggcgccggctcgggcccggcgcccggctcncgctccgctcccgccgggact

SEQ ID NO: 432598 - DNA, 1194 bp, Homo Sapiens
  misc_feature (15)..(15): n is a, c, g, or t
  misc_feature (26)..(26): n is a, c, g, or t
  misc_feature (42)..(42): n is a, c, g, or t
  misc_feature (46)..(46): n is a, c, g, or t
  misc_feature (51)..(51): n is a, c, g, or t
  misc_feature (55)..(55): n is a, c, g, or t
  misc_feature (69)..(69): n is a, c, g, or t
  misc_feature (87)..(87): n is a, c, g, or t
  misc_feature (95)..(95): n is a, c, g, or t
  misc_feature (97)..(97): n is a, c, g, or t
  misc_feature (107)..(107): n is a, c, g, or t
  misc_feature (124)..(124): n is a, c, g, or t
  misc_feature (126)..(126): n is a, c, g, or t
  misc_feature (184)..(184): n is a, c, g, or t
  misc_feature (421)..(421): n is a, c, g, or t
ttccgggatgccagnttccaggttanatttttggctgtcagnagtngccgnccanggctcaggttgccnaggaccccgctcaccatncgcagctnantttttaagcntcccccagccgggcccncntcagccgggaggcccgtgtggggcgaggggtggacaggctgttggagcgggttcaaantgcggccccttctgggagctggctgagctacggctctgctcctcccgggcagctggggatggcggtggggccgctggtttccggcgagaacctagccgtcctgccccggtggcctcaggggtttcgtggttggaggccatcacatctgagctgggtaggtgggcgaggacagggccacgctcctcactgggccaatccagggaccctcggggcctgtggccacgccttatggctgangcgcgtaccggctctccacggcccatgtccgtcgggccaagtgggtgatgctgcctctctgaggactgctcacgggcactgaccagggcggtgcctcccgggtcctgtgcagctggcggggatggcgacatctccttctgtgcccgcagaggctggggggttgtggggctgggcccgctcttgccactacgcaggctgacggtgctggctgtgtccacgtccgagtccccagacagggcgtcctccggcggcctcggggtgctgcccccctcacactcggcatccacagaattagagaggagtcgggcctccagggccgccagggccgtctccgtctccttcaagatcaggtgggtgtcctgggagtggaagtccatgcgtgcggcccgggtagcggccaggtcctgtagaagcgggtggctggagatgtgggggggcttgccgggcgctgggggaccactggctggctccttagtgaagctctcttgccggagaaaggctggggcagggccgtcgggttctggggaccgtccaggccgtagctggatgaccattctcccattggcactgacatagacgccatcccgtgctggggggctgggctgggctgtctgccctaggccctccccatcccctggagcgcaagcggtttcctagataacacagcgtccccattctggtccccaatgaagaaagaggcgggagttggctccccgggggcccttggtgagcgccgacccctgctccacgtgggcccctcctgggggctcctg

SEQ ID NO: 432599 - DNA, 1218 bp, Homo Sapiens
ccctctgccttcttaggctgtttctccttcttggtggtggtgtgaggaaggtctgggttccactcctcaaactggggccagttcatgggcatgccggggccactggtgctgcggaaccatctgaggtcttccctgggcatcagccccccggatggcctgctccagctcacggtacacatggatgtagctgctgttctcagccaggttgaggtgccgtttgatgtccagcagcacctccttgaggaagaccagccgcttttcctcaaattgctggcattgctcaaacacctgctccatgttctccatgtactggggtgtggtcttgcccacatcttccagcactttctcatacttctcctgtgtcttctgcacatcctgcttgcacttgtccactttgtcctgcagcttcttttgctgctcaggtgtgaccgattgctccgtcttgctgttcatctcccgtgtcatggccagcttttcctctttgcaagccaaatggtaggccttcttggctgcctccagctccttcatcttcttggcccaaggcttctgggccttgcggaagccatcttcagcctccttcgtctccttgaagccacccatgatctgcttgtgataggcgtccttctgccagttcttcaccttctccaggtcctcattcagcagattgttcttcacctcctggtgcagctcgctcaccttgtctgcctctgtcattatggcaccccaggcccgctccaggctgccatactgtgggcctttctcgatgagctggcgccaacgcttggcccagtcggtgagctgctgcccgtacgccttctcgatcttggcgcgctcctgcacgcagttcatcaggtcgttgcatagacggtggccgtcatcgatgcgcttcacggtccgcttgtagttccccacctcccagaagctgtcggtggtctcctctggcgccagtgaggcctcatcgtaggagctggacatggtgtagccgcagggggatggacaagtgcggagctgcggttagcaggctcggctgctcatgcactgggcccgtgtgggcaccaagctgggggcaagtaggagcttactgcccccgctgggccaggccagggctggaggggctggctgtcctccttctcctccgtggtgacgggcggagagggggcctgctgccgggctgggggctctgtcctctaggttccctccaccgctcactcaggaagc

SEQ ID NO: 432600 - DNA, 1178 bp, Homo Sapiens
  misc_feature (153)..(154): n is a, c, g, or t
  misc_feature (163)..(173): n is a, c, g, or t
  misc_feature (180)..(180): n is a, c, g, or t
  misc_feature (402)..(453): n is a, c, g, or t
  misc_feature (484)..(484): n is a, c, g, or t
  misc_feature (491)..(500): n is a, c, g, or t
  misc_feature (732)..(732): n is a, c, g, or t
aaataggattgtgtctgacggcggcgcaaatcggtttttacgtggggttgtggagtacacccttttggcgcgccataaagaatagtttgtatttattccccctcgaaggagctcgtaaaatatcttttcgggaggaggatttttccccccacnntggtgcctnnnnnnnnnnnaatagtntgggtgttttctcttccaaaaaagtcctcccaaaatgtaggccggttttcttcacgtcccccggcagtttgtaaaaacgcgcgcacccggggcctcggttttattaataagcaccccccttttgtggggcccccttttttccaaaaaaaggagggttgggggtaaatgtggggcccccctggggaggtttttttaagagcggcgcgcccaaagggaataaannnnnnnnnnnnnnnnnnnnnnnnnnnnnnnnnnnnnnnnnnnnnnnnnnnnatgaggaagggtaggtggataggttatgganggatggnnnnnnnnnnaattcaacgtaaaattgtacaaaatagagatgaacaggtaggcctggtttgatctaggagggaacagcgcctgaaaatgtcctgtgtctggtagatggagggcatggtgcatgcaagtagccggggctcctaggacccagacctagggggctcgtgacggcctgggggcgcgcacgatgtgagcctgggggagcacctttctcgatgagctggcgccaacgcttggcccagntcggtgagctgctgcccgtacgccttctcgatcttggcgcgctcctgcacgcagttcatcaggtcgttgcatagacggtggccgtcatcgatgcgcttcacggtccgcttgtagttccccacctcccagaagctgtcggtggtctcctctggcgccagtgaggcctcatcgtaggagctggacatggtgtagccgcagggggatggacaagtgcggagctgcggttagcaggctcggctgctcatgcactgggcccgtgtgggcaccaagctgggggcaagtaggagcttactgcccccgctgggccaggccagggctggaggggctggctgtcctccttctcctccgtggtggcgggcggagagggggcctgctgccgggctgggggctctgtcctctagggttccctccaccgctcactcaggaatcccggaaattccggacgg

SEQ ID NO: 432601 - DNA, 731 bp, Homo Sapiens
  misc_feature (272)..(349): n is a, c, g, or t
aggcacgtatgatgcatttctcatgcaggatcctttctttactcttgacttttgggagtttgattattaaatgtcattaatttttgggagtttgattattatttgggtttacccttctttgtgttctataaccttcctgtacttgaatattgatatctttctctagctttgggaagttctgttattatccctttgaataaactttctacctctatctctctacctcctcattggggccaataactcttatcttttgtctcctctgtgtattnnnnnnnnnnnnnnnnnnnnnnnnnnnnnnnnnnnnnnnnnnnnnnnnnnnnnnnnnnnnnnnnnnnnnnnnnnnnnncttcagtacatcaattgcatttttcacttccagaatttctgtttgattctttttaattatttaaatctctttgttaaatttatctgatataattctgaattccttctctgtgttatcttgattttcactgagtttcctcaaaacagctattctaaattctctgtctgaaaggtcacatgtctctgcctctccaggattggtccctggtgccttatttagttcatttggtgaagtcatgatttcctggatggttttgatgcttgtggacgtttattgatgtctggccattgaagaattaggtatttattctttccggcccgtctttgggagacgagacgtgcggggcgtgcggcggtcggggcgcgggtcgggggtgtgaccg

SEQ ID NO: 432602 - DNA, 1392 bp, Homo Sapiens
  misc_feature (92)..(100): n is a, c, g, or t
  misc_feature (124)..(124): n is a, c, g, or t
  misc_feature (417)..(417): n is a, c, g, or t
aagtatttttccatttatttttaaaatgcaaattacactagtaagtcaaaaaaatcattctgttaaaaatacattcagaattaacaaatgcnnnnnnnnnggacacatcaggatcataaccctngccttctgaatattaagtttataacaaaagctcagcctagaaaaatagcattcttcaccggattttgaggaggatacagctgtacaactgtagatgttttcccagatataatcacactactgtgcttactgatcccattaatgacctgtccactgattactttttagtagtcaactactggttttttaaaattttggtggtgatgataagttgtgatttggtgaaaacttgggctggtaacttaaaagcaggaatatgagggtttattttctgtaccccatatacatggtacntataaggtgaaatcgcatcacagcatgaatggacagtgaacctcatttttaataggcacattaaaagtcacattagaatagtttctggcatgtatagtatttatattttaggactcaaaggacaatacattggtaaatatttttctcatacattaaacatgcatgtcactataaaagcgtcatatgaggtttcactgacatgtttgcaattgtttattttatacatgtatgtatggacaaacatacaacccactgaggaaattcaagcatgagtgctggaatctttttttatagtttatgttccaatgataactctttgttcctctatcattttcaaatgtatatgtgtgtgtatattacagacatccatgcaaacacagtaatggaactggtgtatgtagatccgaatgggctaaggtctaaagtagtttaatccaataactgaaacgttcatagaaatcaaagaaaaaacttgctccatgccaatttataacttttgaatttcactgcactaaagaatggtgtgttagttttaaaaaattgagtttaatgtctcaggtgtatccaagaaaaaatatgactcatctgagttcctgataagcctgagctaattatgttttccactaatgaaaaccaaataatgctttaaaatatagaacaaaatttcctaggagttcagaatattccataaacacattgacctactattaagtttccaaaggcatcttgttgccaactacgttaacagcacagtttttctgccacaataatacaggagggttgaaatacactctaacacacaacagatcccccaaataccacaaaagatctcaaatatttcaccaaggtaactattgctccccccacccacccaaaataatcttgtacactgaagttagaaaaaaaagttcacctacgtagagtcttcaatttgaattagatataaaagagtaaacatagctaatacatattcag

SEQ ID NO: 432603 - DNA, 1170 bp, Homo Sapiens
  misc_feature (795)..(803): n is a, c, g, or t
gcttctcaaaggcagccacttcatgctgctatgtcgaaagggccattattattattatattttaatggtaaaagagaaaaggagagaggttgagcgagcgagagagaagctaggtgtgatgatgacagactagcttttctgagaggaaaaggaaaagggaagggagagaacaaggagagcctctgagctcaacggaggattgtgcctgagaagaacccacagagctggtcctatagtacccctcctcaggaatgtctccccagtgcaaggacaaagactgaatgagactgctatattgactggactctcaagccaactatgaagttgaaacaaagaaagtgatcacctgaagacacctcctctgctaagaaacacccccaaatgtgtgcagcttctgccactagaactctcagaacaagagacaatcttttcaagaaacagaaaaactcaataatgacatctagattttcatgagccaagaactttcccttcctcatgtgtattcctctgtttgtacttaaattcatgtgacattcatttttttcctagtatggatatgcttattaatgcacttgtttcaaaatcccaaattgcacaaatgtgttaatattttaagaaacaaaatgaatcctacaaggagaatgatttttagccacacatagggttggatcttgagaagtgacctacagaattaccagtacttttaaaattaaagtagtcagaggctattccaaaggggtaaaataatcagtaggtaccacattgggtccactttgacactaaccaatcgatcannnnnnnnnaatcaagaaagctagattctatcagataaaatcactgcttctaaagagtttaaatctagttaggaaaagttatagaaatgtttgcaaagataagtaacagatagagtcagtagaggataagatcaaaaacaaaaccaagcaaaagatgagttcaggggagtttgccatcaagttggcaaaactgacttacttagggaagaaagttataaaacaggaaaatatgagatgaaccttgagtgatgtggaagatttagataaatggaaaggaaggagaaaatggagttctttaggtggttgtaattggagggggaaatgaatacacacatcttggttgacttaaacccagacattcagcagctctctatac

SEQ ID NO: 432604 - DNA, 923 bp, Homo Sapiens
  misc_feature (268)..(268): n is a, c, g, or t
atgcaaaaaatttattttcatcagtgaaatacaacccccatgaaagctcccacacaatctcagtaggctggtggtacagtgccttggaaagagaaatcaggagtgacattcaatagccagcaaccccagaaaaccctctatcttgatggaaagggctacttgttttctgtctcctcatcctcacatgtacattccatctgcctaatgctttcctctcttaattgaaaaacaaacaggacatgacacacacaaaaaaggcatttcttgnccccatttcttagcaagcaaggtcaacttatgccgcactcaggctgtgtagtaggtgcaggaaaatgtttttgtgatttcttgaagcacagcttttacacagtgtggcatagatatgaagtcctgcagacagcagctgcaggcagagtgggctggtatgcagcaggggaatgcatgggagggctttctgagcagtctttgagcagatggcgagtctaggcatccgggtgcaaatcactccagtcacatctctggagagtagacatgaccttggactaggaagttctctttggcagagagcaattttcatggaaggctcagctgtgtgaggttagcagccaaattcctggcagctggagtgccttggtcctcaaggaggtggtgccccacagcatccactctgtgggttcttctcaggcacaatcctccgttgagctcagaggctctcctttttctctcccttcccttttccttttcctctcagaaaagctagtctgtcatcatcacacctagcttctctctcgctcgctcaacctctctccttttctcttttaccattaaaatataataataataatggccctttcgacatagcagcatgaagtggctgcctttgagaagcacatttaatctttactggctcccctaggcttcag

SEQ ID NO: 432605 - DNA, 425 bp, Homo Sapiens
gatctcttgtaggctctctgtgttccattatttttttgactatcataccaggaaaaaaccaacaactctattcattcccaaacaaaatctcttcccccttagtcaatagcttgcgaaagacatcttaactcacccttgcagataagtcttggagtgaaacaaataaatagcattgtattcctggccatttgcctggctagttgctgtctacaagggagcatcaaaacatcactacttcttatgtaacttcttccagccagtgcttttattgttcgttttagtttactggggacacacaggagtctttctgtaatgacttatgtggtaaaatgtttgagagtttgcactcaattttaaaggattttgcagtttctaacaaggtgaagaacagctataggatctaaagttccattacagcttactgt

SEQ ID NO: 432606 - DNA, 1317 bp, Homo Sapiens
  misc_feature (1273)..(1273): n is a, c, g, or t
  misc_feature (1303)..(1303): n is a, c, g, or t
  misc_feature (1311)..(1311): n is a, c, g, or t
agcggagtccttttgtgtgagtgcctggcaagggtgacgtggggctgtttctgcgggcacagctgcagcaattaccggagtggaggcagggcccaggcagcactgccctccaagatcttcccttgggcttttcagcagtaaggggacatgcaccccaagggcctccacttggcctgaccttgctgcgggggctctctgtccccaggaacagtagagatggcaagcttatcgagaccctctctgcccagctgcctctgctccttcctcctcctcctcctcctccaagtgtcttccagctatgcagggcagttcagagtgataggaccaagacaccctatccgggctctggtcggggatgaagtggaattgccatgtcgcatatctcctgggaagaacgctacaggcatggaggtggggtggtaccgcccccccttctctagggtggttcatctctacagaaatggcaaggaccaagatggagaccaggcacctgaatatcggggccggacagagctgctgaaagatgctattggtgagggaaaggtgactctcaggatccggaatgtaaggttctcagatgaaggaggtttcacctgcttcttccgagatcattcttaccaagaggaggcagcaatggaattgaaagtagaagatcctttctactgggtgagccctggagtgctggttctcctcgcggtgctgcctgtgctcctcctgcagatcactgttggcctcgtcttcctctgcctgcagtacagactgagaggaaaacttcgagcagagatagagaatctccaccggacttttgatccccactttctgagggtgccctgctggaagataaccctgtttgtaattgtgccggttcttggacccttggttgccttgatcatctgctacaactggctacatcgaagactagcagggcaattccttgaagagctacgaaatcccttctgagtgatgtcacatcttggcaggggtggaggagagcctggttgcccagggatttgtccttggggacatctcatccatcaagttgcacactcactggcatctttgctatggggacattccaatttgcactttcaggaacactctggattccaagtagaattgatttcccttcttctgtcatctaccttttctcttcattttcccatttttattacccttctttccatttctctctccagtcttccacctggaagccctctctggctaaggacaggcaggtgcccctctctccatcagaggacacctgtactggagngccacacaggatggtctctgccatgaactngaggccangaatct

SEQ ID NO: 432607 - DNA, 1476 bp, Homo Sapiens
attagcacctagcttgtttgtttgtgtctgaccatcaagtagtagttgttgaataaacagtggatactctgatagatatgaagataggagaaaaggatgagaggaaggaaagattctgagacctgtggaagatgtgtaagtagaaggaaaacattctaaagcaggcatgttgcccagctttcgtttttgcttccccaggtccctagtaggctgccaagacaaggaggagctctggctagtattctgtaggtttctccccatctccaggtttgggttggggctactcatatcctcactcttcagctcactcagctctctcttcaatgttttgcactcttcctcttccttcccttcacatgcctttcagttttgcgcaatcagggctggagtcttggaagaaacaaccaccatttgcaaagttaccatactgtaattttcagtgaggagattcctggcctccagttcatggcagagaccatcctgtgttgctctccagtacaggtgtcctctgatggagagaggggcacctgcctgtccttagccagagagggcttccaggtggaagactggagagagaaatggaaagaagggtaataaaaatgggaaaatgaagagaaaaggtagatgacagaagaagggaaatcaattctacttggaattcagagtgttcctgaaagtgcaaattggaatgtccccatagcaaagatgccagtgagtgtgcaacttgatggatgagatgtccccaaggacaaatccctgggcaaccaggctctcctccacccctgccaagatgtgacatcactcagaagggatttcctagaagaaggagaaaataacttgaaaaacgtatgtcagtagtttgtatcataaaaccattgaactagggagaagaaaagcccttggggtcatcttgtctccattcctgcctcaatggttgatctgagaggtgaggcactgggcagttgctgtggaatgggcaatgagaccagctagggttggattcctgcttaggggcagtgaaggaggaatggatcaggtggcagataggagtgcctccagcttctctgccacctgtaaatgtgtctctaacagctggcttctttgccctctacctcccaggaggagtcttccccttccaccaggctctccagctccctccttcctctggatgtgatcctcaatagccgctcttctctggttgcttctgtctcccttactgggcttttaattcctctgctttaccggaggaaggaagttcgtagccctcaaggaatgccggtatttcaggttgcgttttgcaatacgggccgggtccgaaccgcgcttcaaccggggttttctccgggccccgaaaggggcaacgggggagtctctgcgcagtccccctgtggcgagaaggcccactggggaggccggactcggtgcaaggttttagctggagtagaggatctcgaccatctgcgttgctcgccgctg

SEQ ID NO: 432608 - DNA, 1605 bp, Homo Sapiens
  misc_feature (1476)..(1476): n is a, c, g, or t
  misc_feature (1516)..(1516): n is a, c, g, or t
  misc_feature (1558)..(1558): n is a, c, g, or t
  misc_feature (1590)..(1590): n is a, c, g, or t
agagagagagagaaaaagaaatgctgtgtttaatcttcttaaaatgtatcttgtcctacatagttctcagaatacatatggggtatagttaggagataacaataacaagacctaaacaaattgcttatgggagatagcactgtaattagagaatttatttcatataaaataataatataaagtttgaactgattagaatgttccttaaatcatggtttcgtttgttgcagctgtcagctaacatttggttgagctcatataatccaaacctaattgtccaactattgtattgccactattgttaatttgttccttccttactttcttattgttggatcttatatgactgtatgactgtagataatagacagctagctaaatgtagagcaccatttttctcaatgagtttgttttcaaaggctttgcactggagaagatatgtgtagaatttttgttttatttttaaaatgtgtaaaacatcttttgttttatatgcttttaagaatgtagattgtaatttaggaaatggcatatattctgcaaagtggtataatgttgtatatatgaaaaacaggtatatttggtttagttctgtgtttcagtgactgataaacaaaaatgaagctaaaatgaatcaacggctcattcatagttactaaagccatgtcatgactgtcattctattatgaagaaaacagttttatttgagtgctttaatataatgcaacatttaagtcatcttaaggtgaaaagttattgaagtgttcttctctcaagttaacaaaattttacaaatgttcctgaagtgtatcgattgagggaattattttattctagcctgtcatgagtctgtctgagcatgatacttaacatgaacttgatgtagtaggtgcacatttgcctaacaggataaattcagtgatagcccaagctggtcaggagagacagaagtgctggctaggaggtctcagcctcgggcactacaatgtttatctttttctttttgaacaatattgtgaaaatgattgcattctcattgagcatgaaagtcaaaactggaattttctaaagctttggagaaaaggagagaattagtagggcaagatcaaagcatacattggaaataaacagtagaaataagcaaacaatataaagagacacgggaaatgcttctcgtgaagggcaaatgtaacaccataacagtagggaataaactgtgtcccacctgtttacttgtgtttatttgttgttatgatgagtatgcacctaccattttcctttattgtgatcactaaaatgaggccaaggtttaggaggtgagaaaaagtatcccttttacggattcagttcctgctaggatgttgtatcagaatcatgtgagaactcaggaagaggtagagcagaaataaaaaggaagaaaatgtagattagaaaataagacttctgagaaaaagttcaaggaataaagattgtttnactctggagaggagaaagctgttgagatagtttgctaagnttgctaataaagctttattgagtcttttattgaagggttcanagtaagaaatactatgccctagtgttctccanctctagtgaagacag

SEQ ID NO: 432609 - DNA, 975 bp, Homo Sapiens
  misc_feature (43)..(79): n is a, c, g, or t
tactcactatagggcgcctcggattttaccgcggtggcggcgnnnnnnnnnnnnnnnnnnnnnnnnnnnnnnnnnnnnnatcaggccaaatcggccgagctcgaattcgtcgagagcgggcagccgcgctggtcgccaggcgtccgggaggagcggggtccgcgcggcggacgaggcgggggcggaggcgcaggcagagcgagcgcgggaggtcgccgcagccagggacaccgcgcgccgccgctcaacatggtcgctgcgcacgctgcccattcttcctcctctgccgagtggatcgcctgcctggataaaagaccactggagcgatccagcgaagatgtggatataatcttcactcgactgaaagaagttaaagcttttgagaaatttcacccaaatctccttcatcagatttgcttatgtggttattatgagaatctggaaaagggaataacattatttcgccagggtgatattggaacaaactggtatgctgtcctggcagggtctttggatgttaaagtatctgagaccagcagtcaccaggatgctgtgaccatctgtaccctgggaattgggacggcctttggagagtccattctggacaacacaccccgccatgcaaccatcgttaccagggagagcagtgaactgctccgcatcgagcagaaggacttcaaggcactatgggagaaatatcgacagtatatggcaggacttctggctcctccttatggtgttatggaaacgggctctaacaatgacaggattcctgacaaggagaacacacctctcattgaacctcacgttcctcttcgtcctgctaacaccattaccaaggtcccttcagagaagatcctcagagctggcacaattttacgacatgccattctctctcgagcacctcacatgataagagatagacaatacacctacagcacatacagacaagcctgtgtgggacctgaactggtg

SEQ ID NO: 432610 - DNA, 1224 bp, Homo Sapiens
  misc_feature (937)..(937): n is a, c, g, or t
  misc_feature (1072)..(1080): n is a, c, g, or t
  misc_feature (1185)..(1185): n is a, c, g, or t
gcagaggctggcggggagcagccggggttatgctgggcaaggattacatgctggccatcattctggtcaactgcgatgatgacttgtggggggaccacagtctggaggtggaggctggcctgcctcctggctggaggaagatccacgatgctgcaggtacttactactggcatgtacccagcggtagcacccagtggcagcgcccaacctgggaactagtgagatgcagaggacccaggcacgtgctttgcagtccgctctctgggctgggtagaggtacctgaagaggacctggcaccggggaagagcagtattgcagtcaataactgtatccagcagctggcccagacccgcagccggagccagcctccagatggtgcctggggtgagggccagaacatgctgatgatcctgaagaaggatgccatgagcctagtgaatcccctggaccacagtctgatccactgccagcctctggtgcacatccgtgtgtggggcgtggggagctccaagggccgtgacagggacttcgcattttgtggcaagtgacaaagatagctgtatgctcaagtgccatgtgtttcgctgtgatgtccctgccaaggccattgccagtgccctacatgggctttgtgcccagatcttgtcagagcgagtagaggtcagtggtgatgcctcttgctgcttcccagaccccatctctcctgaagaccttgcacggaaagtggagctgctggatgcggtaagccagctggtcagaagtacgaggcactgtatatggggacactggcagtcacccaggccttgggcatggaattgcctgaacgaagccattggtaccccttactggcaggggggaccggaatggcctgggtcccaccatgctcagaggggctgactttcttttgactgcacatccctttcaagcagaagcccntccagaggaagagccattggtggaagggccctttgccgcctttggaaatttattgggggtgggcgcgacccccacaccctttggccttaatgttacccgtggccgcaaaagtttcaatggccaacccttttgggnnnnnnnnnaagcgaggggactctttttaaacctttccaggctcctttatgtgttaaaacccaaaggtctcttgggtctcttcatctcaggagagagcctggagttgccagagnccggtcccgcttgtggtttagagggccactcttaggatt

SEQ ID NO: 432611 - DNA, 1256 bp, Homo Sapiens
ctgcatgggggtcccagggcctcgttcagcacatccaggtccaggccttggtgacggcagtgcccccaatatccaggccctcgaacttcgtgagcagcttggcttacccgcatccagcagctccacttgccgttgcaggtcttcaggagagatgcgttctgggagcaagcaagaggcatcaccactgacctctactcgctctgacaagatctgggcacaaagcccaatgtagggcactggcaatggcccttggcagggacatcacagcgatacacatggcacttgagcatacagctatctttgtcacttgccacaaaagcgaagtcccggcccttggagctccccacgccccacacacggatgtgcaccagaggctggcagtggatcagactgtggtccaggggattcactaggctcatggcatccttcttcaggatcatcagcatgttctggccctcaccccaggcaccatctggaggctggctccggctgcgggtctgggccagctgctggatacagttattgactgcaatactgcgtcttccccggtgccaggtcctcttcaggtacctctacccagcccagagagcggactgcaaagcacttagccctggctccatgctctggatgtaggattccccaccataccaggacagagagttactccggtccagtgaactctccaggctggagaaggatctccctttggtgggccgcagtccccagatcccctccgttcccgtgcctgggtcctctgcatctcctagttcccaggttgggcgctgccactgggtgctaccgctgggtacatgccagtagtaagtacctgcagcatcgtggatcttcctccagccaggaggcaggccagcctccacctccagactgtggtccccccacaagtcatcatcgcagttgaccagaatgatggccagcatgtaatccttgcccagcataaccccggctgctccccgccagcctctgccaggcccgcactctcagcccagcgcgacctttggagcatactgcgcctgcaagcccagcctctcctgcgccgcaggtctgctggggccagctggcgccgcacaaatacggggcgggacacggggcgggacacgggccaggtcccgggggagggcctgagccgcacagcccgcccaggggatggtgcgtgtaaacgggcgtcatggatccccgaatggttgcgtgtttccgctgtgtgggtccgggggaggcccacgaacgccagcgaaaccgct

SEQ ID NO: 432612 - DNA, 671 bp, Homo Sapiens
ccaaaatggctcctcctctgtactggcctctgcctgaatgggatgtgcagtcatgagagagtcagacacactgagcatggtggggacccaggcattccggtcccccctggcggtgagggtaccaatggcctcgttcagcacatccatgcccatggccttggtgactggcagtgtccccatatacagtgcctcgtacttctgagcagcttggcttaccgcatccagcagctccacttgccgtggcaggtcttcaggagagatggggtctggggagcagcaagaggcatcaccactgacctctactcgctctgacaagatctgggcacaaagcccatgtagggcactggcaatggccttggcagggacatcacagcgaaacacatggcacttgagcatacagctatctttgtcacttgccacaaaagcgaagtccctagcaggggcagagatggggctggggtagaagctggttagaggcaggagcctgcaggaggctggaaagtcaggctagggatatagcagggatggagtagggacatcagggatggggctcaggatacctggttttcactcacctgtcactgttccggaagcatgtgggagcacagaagggaatcagcccagcctctcggactctccccaaactgtccctgctgagctgggcccaacct

SEQ ID NO: 432613 - DNA, 717 bp, Homo Sapiens
gtttaggcgattcctgaggaatattatggtcctttcttcctttatgtgaagaagcaacatgggcaaggtactgaataactttctttgtattttctgtcttcccagcacctgactcacccgtgcaaagaattgactggtcctcacgatcttgaagcatgcatctgtaagcagattcagatatagcatagatgtgtggaggcatctcatgacgcttcttccctctgtacatttcaataatattctcagagtaaattggaagattcttgtaagggtttataactacacagaagagtccagaataagtatagattagtcctgaatagtagcgatccttcagattatgtaaaacggaagcttcattcaagcatgtcaattctgccatatcctccaccttggaaaacttaggtgggttcatcttctgaatatcatctttgttgaccattgctttctttccattctctgccaactccaccataacttcatctccccgttcttctttgatactagctgcctcaaaaccatggcgttctgatggaatccacactagctttttagctgtccaatcagcttgagtggcagggttgtagatgacagccctgtccacaaagagatacctctctggatcctcgagtccagttctctgcgccattgtaaatggaacgatccaaaagcaattgcctcttcagccgaagatggtggcgcgggcgcaggtcccca

SEQ ID NO: 432614 - DNA, 516 bp, Homo Sapiens
  misc_feature (21)..(21): n is a, c, g, or t
  misc_feature (47)..(47): n is a, c, g, or t
ctttaaagcattggacagaanctcctccaggggaagaaagccccatnatgtgcattgcctccccagggtccccccggaaattacctttgtcttggctgtcccggaataggaatatagccattggagagaaacctgtagttattaaacccttcaagaagcaaatcagactttaggtgttctcctgctcccagataacaactggtaaaagatatgaaaagtacgttcatcttttgcttgacgaacagcacgagacttttccagaaggtatgtttcaatgttggccccaacgatatagccagttacatcaaagttgatccgaataaatttgccaaaacgagatgagttatcatttttcacagtcttcgcatttccaaatgattccagaattggatttgcttgcaaaagctgccgttcaaggttccccctggtgttcactggtttaggcgattcctgaggaatattatggtcctttcttcctttatgtgaagaagcaacatgggcaaggtactgaataac

SEQ ID NO: 432615 - DNA, 352 bp, Homo Sapiens
  misc_feature (135)..(135): n is a, c, g, or t
ctcgacccccttttatgctagcctcagctgaccatcctgctcactagtacactgtgggtcatagggggccaaaaacatgaggctggtaacattccatccctgttattcatagatgatatttaagttaatggttgnttttttattgaatacatttcaatgccaggtattaagatggtattatccccatgttgggagattaggaaactaaagtgcagagagtttgaataacatgccccgagactataaagcaagaattgggaagcctggttctccctgtctctaaaggcttctactttttggtggtattggaaaggaaccacttaatgatgggggcacttggttggccaagaat

SEQ ID NO: 432616 - DNA, 682 bp, Homo Sapiens
acaaagccttcccacatttgtaacagcaaaaggcctctctctaagtgtgagttatttgaatgtttatggaaattttgaccctgccgttgaaggccttcccacattcagtgcaccacatagggtttctcacccgtgtgaattcgctgatgctctttgaattgagacttagaagtgaaggctttcccaccattcactgcatttgtaaggcttctctccggtgtgaattttctgatgcatgctgagtattgacttctggttgaaggctttcccgcattcactgcatacatggtgtctttctccagtatgaattttctggtgtatattcaggtgtgacttttgggtgaaggtttttccacagtcactgcattcataaggtttctcccctgtatgaattcgatgatgtatatcaagctgtgacttggaaatgaaggatttcccacagttgtggcactgataaggtttttctcctgtgtggcttctttgatggacaatcaggtgtgccttctggatgaaggcctgcccgcattcgatacacacataggacttctgccctgagtggattctctggtgcaagctgagtgttgacttctgggtaaaggctttcccacattcactgcatgcatactgtctctcaccagtatgaattttctgatgtataatgagggttgagttttgggagaag

SEQ ID NO: 432617 - DNA, 733 bp, Homo Sapiens
  misc_feature (110)..(143): n is a, c, g, or t
  misc_feature (379)..(456): n is a, c, g, or t
cccggttatatgagggataaaagaattactgggtaatttgtttagctgtgataaataatttttttaaaaagagaatatttacatttcagaaaatatgtgtgtctgtatgnnnnnnnnnnnnnnnnnnnnnnnnnnnnnnnnnngtcagcttcctatgtccatgggttcaactgaccttggaatgaaaatattccacacacaaaaaaaattgcgtctgtactgaacatgtacatttttcttgttgttattccttaatacagtataacagttatttacatggcatttacattgtattacgtattataagtgatctagggatgatttaaataatacgggatgtacacaggttatatgcaaatagtccaccattttatatcannnnnnnnnnnnnnnnnnnnnnnnnnnnnnnnnnnnnnnnnnnnnnnnnnnnnnnnnnnnnnnnnnnnnnnnnnnnnntgcatgtgtgtaaacgattggtcacaatttggtaattgttgaagctggtttatgggacactgaagtcaattataacattttattttcatatatatatttttgatttccacaataaaaaatgtagaagttagtaatttacttctacaactaataatatctcttccctaaccccagaaaataaatagctaattattcctccataattcctatagcatttattgtctcatgtcatcatttggttgtcttatataacaatccttcccacatttgagatccc

SEQ ID NO: 432618 - DNA, 780 bp, Homo Sapiens
  misc_feature (604)..(644): n is a, c, g, or t
aaggatctgtgggcaggaacaggatggcgactggacagaaggtttgccttctctgaatagattttattgtgttttgctgatctgaatttggaaatttataaacattttacatgattataaaattaaatcaaaattttaagaggtaattctaaaaaacaacatatcaaaagcaaaatgaaacaaatgatccaagttgatgatctaaagttgatgatctaaagagagaaaatctgaatttaatcaagcttctagatctaactaccaactcacaggaaataagaggacactggaacatgtgaaacaatactacataattcagactacaggaaattctagaagacaatctatttagtacaacaaattacaaggaatttaataaagaagaggtaaaagagaacctataaagggtacttaagttatcaaacattacagtacatgaattgaatcagattcaaataatctgtaaaaaaattaggagccaatctagaaaatctgaacaccgggtatatgaggataaaagaattactggtaatttgtttagctgtgataataatttttttaaaaagagaatatttacatttcagaaatatgtgtgtctgtatgnnnnnnnnnnnnnnnnnnnnnnnnnnnnnnnnnnnnnnnnngcagtcagcctcctatgtccatgggttcaactgaccttggaatgaaaatattccacacacaaaaaaaattgcgtctgtactgaacatgtacatttttcttgttgttattccttaatacagtataacagttatttac

SEQ ID NO: 432619 - DNA, 643 bp, Homo Sapiens
  misc_feature (304)..(589): n is a, c, g, or t
taaaagatgtgttcttcccaaaggcaccactgcctggcttaggtgtaacccctggccctgatccccgtgagggcctgtaggaaagacctctgagcttgcagtgggcggggctgggtcccactggccacgtgaccgtggacagaccgcgccttttccattgccaccagcttttgttggttaaatgagtcagtggcatcatctgtcttccaagtacctttcagctctttaacaaaaaaaagtatcggtggtgatcagaaatatttcattccataggtaatttttagttatttatgcatttgtctannnnnnnnnnnnnnnnnnnnnnnnnnnnnnnnnnnnnnnnnnnnnnnnnnnnnnnnnnnnnnnnnnnnnnnnnnnnnnnnnnnnnnnnnnnnnnnnnnnnnnnnnnnnnnnnnnnnnnnnnnnnnnnnnnnnnnnnnnnnnnnnnnnnnnnnnnnnnnnnnnnnnnnnnnnnnnnnnnnnnnnnnnnnnnnnnnnnnnnnnnnnnnnnnnnnnnnnnnnnnnnnnnnnnnnnnnnnnnnnnnnnnnnnnnnnnnnnnnnnnnnnnnnnnnnnnnnnnnnnnnnnnnccataggtaacattttaaggtactccaagtctataggccatggaaacagacttt

SEQ ID NO: 432620 - DNA, 741 bp, Homo Sapiens
  misc_feature (269)..(269): n is a, c, g, or t
  misc_feature (335)..(335): n is a, c, g, or t
  misc_feature (404)..(404): n is a, c, g, or t
  misc_feature (721)..(721): n is a, c, g, or t
aggacctgtgccgaattaaaattcgacaatgtataggccttcaaaacctaaagctacttgatgaactaccaattgccaaggtcatgaaagactacttaaaacacaaatttgatgatatctgatatgccagaactgtgagcaagattaggagttctattctagatacttaaaaggctttttgccttgcacaaagtatatcctatgcaatttctgatttgctgtgaaatcagaaagcaggtatacacttttgggttttctgtttgtttggntggttttcattgtaggggagggattttttatatatatataaaaacacacaccacatgcttgaaggncttaatttggtttcttggtccaagtttaagaggtccaagctttgtatacaatactgcatttagaaaaantgtcttttcttaaatgacacaagcaggtttagagtggagaatttaccctttccaaatttatggttccttggtaagcacggtattctaaaccagcagagcacttgttaacgtttggaggcacagtttcacccagggcgaccctgggttcttttggaaaatgccctaagaaatgtttgaagtaacgctgtcacctcattcatttttaatgagtacaaactgggcgtttcaaactgttctttttcctaattaatgtagctttcggatgacataaatccagtatctctgcttatgacataaatccagtacctctgcttttnttttgctgtgctctggtttt

SEQ ID NO: 432621 - DNA, 573 bp, Homo Sapiens
gtgtgagccaccacacccagcccattctgcatcttttaagaggagcatttaggccatttatattcattttattattgagatgtgaggtactattttattcttcatgctagttgttgcctgaataccttgtttgtttttcattgttttataggccctgtgaaatgtatgctttaaggagtttctattttggtatattttgaggttttgtttcaagatttagaactctttttagcatttcttgtagtgctggcttagtattggcaaattctctcagcatttgtttgtctgaaaaaaggctttatctctccttcatttattaaacttagtttcactgaatacaaaatccttggctgacaattattttatttcaggagggtgaatatgggaccccgatccctaatgacttgtaaggtttctgttgagaaatctgctgttcatctgatgggtttttcctttataggctacctgatacttttgtctcacagctcttaagattcttcctttcatcttgactttatatagcttgatgaatatgtgcctaggttataatctttttgcaatgagttttccagg

SEQ ID NO: 432622 - DNA, 1213 bp, Homo Sapiens
  misc_feature (1049)..(1068): n is a, c, g, or t
  misc_feature (1201)..(1201): n is a, c, g, or t
ctgctgtcgtgttttattaagttttggccccgcagacgagatgccagaaaagcagctgtagttttaagtggtctggacatttactcatttgaacataaacaacgatcagctcattcagatggctggttccctactcagctgttgagaagagggcaggcatgggtcaatctaggccaaacataaaaggagtgaactggggtgaaagacccggggctgtgatggattccctgagtcaccaggaccctcaggggcttaaggccctaagcagaagattccactgtcagccttagcaccattgcagtgacctccatggtactccactgccaataaatccataaccactgtgaccataaccacagtgtacattctcttagtgactgcatttttagaccacacataaaattattaatgtaaaccaaaccactacacttagtgataaacatgtacttcataaatagcagggaatgaaagtatcccaaatagttggaaacaactgaacaaataaaggatcctacccctaagtttaaaacaaaaacatttaaaagaaatactgcaactattaactaaaagataagatttaataacacagtaagacactcagttggggagggattaattgcaaaatatatcattatttcacagtgaggtttaagtactcataacaatcttctggttttagtagaacagatacccactggtgtatttttttcacatttgttttctataatttcttcccctctactatttcatataaagacactaatgtggtcaaacattaaactatcaattgacaatcaccttttgcttccctattaggaaataaccttcattgcttaactgcaactcaagagaattagggcacagtcaaccatgtcactgataaaaacataagaagtaatgcatcacatttattccaatctaaacacactgtcacagatgtggtaagtgaactggaacactggtgttccccagtgggtcatcagctacatatacatcacattcttttatcaaatctggcattgaaatttccttttccatatataggtttnnnnnnnnnnnnnnnnnnnngccacaggagcaaccctgacagagaagtcttgcatgcagccttctcctgagaaagtatgtaatcttagttatcctcgaagtcagcaagcgctcttgtacttgtaatattaaaaggaacataatatggcccagntcctcgttcttg

SEQ ID NO: 432623 - DNA, 851 bp, Homo Sapiens
  misc_feature (814)..(814): n is a, c, g, or t
aatctctattagtgggtttattgacataactggacataacaatgtataacatttattcatctcccactgaaagacttcccagtgaaactaaagtagaacacagatccaggcattaggcattttcagtgatgttctatggctgaaaaggtgggtggtgaggagaaccagaggccttgtccatacttgcaatgggactcaatattaccctgctgggcaaaagaaatagctaggagatgcaatagtgctatgattgaaaaaagccaggagcacaaaaggtgccagatagctccctggttgaaaataagagcaaacaacactactgctctcatgtaccagtatgctctcaatctaaaataagccctgggcagccaaactaagaatgacagtctatttcctgtggtttattaagttttggccccgcagacgagactgccagaaaagcagctgtagttttaagtggtctggacatttactcatttgaacataaacaacgatcagctcattcagatggctggttccctactcagctgttgagaagagggcaggcatgggtcaatctaggccaaacataaaaggagtgaactggggtgaaagacccggggctgtgatggattccctgagtcaccaggaccctcaggggcttaaggccctaaacagaagattccactgtcagccttagcaccattgcagtgactcggctgcccaatggcagccgctactagcaactgtaacacaatccttatctatagtgttaagagaattaaaagccatggactgaactaggctttgttacatggtgcattactatattagntcctatatatatcatatttatatttatttgaaaacca

SEQ ID NO: 432624 - DNA, 1678 bp, Homo Sapiens
  misc_feature (621)..(632): n is a, c, g, or t
  misc_feature (767)..(803): n is a, c, g, or t
  misc_feature (1446)..(1446): n is a, c, g, or t
  misc_feature (1538)..(1538): n is a, c, g, or t
attctatttttcttggttgaaagacaaaactagagtacctcggaacaagataccaggaaagcacagaacacaattttcccctaaatgcagggtggtaaccccaacattcataaccaaaaatagagaaacaaggaggacaggtactgactggcaacattcatgggcagaaaaaaatccaggtgacaccatgtctgcatttttctctgatccgaggaatggactgttctaccattcctttatggttagaggttccccccatttcgggaatcagaggaaagtgagcctgacatcttcctgccgctactagcaactgtaacacaatccttatctatagtgttaagagaattaaaagccatggactgaactaggctttgttacatggtgcattactatattagttcctatatatatcatatttatatttatttgaaaaccaaaacaaacaaaaagttgcaagtttccagagtgtgtgacttgactagtattcatgattcggcacaaaaccatctgctccataaccttgtattgctttaaaatgaaggaaatgaaacataaaattacacccagccctttgcaatgacccgcttttccttaaaaacaaaaacaacttgatttctattnnnnnnnnnnnntcccaaaccgaacttagaagttaacatctgacaaggttttgacctttagtattttcagatatttgattgaacgtcagtcctttagaaagatacattcattagaatatttgttgtatttttgtgtgtgtgttgtannnnnnnnnnnnnnnnnnnnnnnnnnnnnnnnnnnnnaaatcaagggagctacatggtgctcactgcattggccgggggtttgacggaggcgagcagggtggcgggctgggtcccggcaaaggagtctggttgaaaacgtatagctgccagggcttcccccttaattcttgttattggtgtaaaaacagaggggctgtgcgagaggtggtgggtggccaaggagggagccaagagaccaagttccggccaaagggtcagcgccatgcagctattctggttacacagttgtcactggccaccaggaaatgcagccacaacaggttctagcagcaaagctataagtgagctggctctcactgagaactgaccaggtttgcagctgttactcctcagggatttgggatgccccttgggggattcttgggaatgacccatcacaattcctcaatctgcacttttgtgcggagattcccttggtcacttttgaaatgaactcagatgtgtttggagatagctgtgccgtttttgccttctttccctcttgtagggaaaccttcgcttattcccccaagttgctggcaggtgtgctgaaaatttggcaatggactcaaggctgagctagaagaggaatttctcatttttgtggttgacaattagggggtggaaaggcaaggcaaanccatctgcagctggcaggagaaggaagctgtgggttcctcccctgtcctcagggttttagggttggtagagagtgaggaggggctcacagtnacagcatggcctagcagggcagtaactaggtctatttagctgagttccccccaccccctgactggcctttgggtctttctcaaggtgaattcaggacccatcagtgcattaatcatttcagtaacaaatgcagcttaagg

SEQ ID NO: 432625 - DNA, 1793 bp, Homo Sapiens
  misc_feature (1591)..(1621): n is a, c, g, or t
  misc_feature (1683)..(1725): n is a, c, g, or t
  misc_feature (1727)..(1727): n is a, c, g, or t
  misc_feature (1736)..(1736): n is a, c, g, or t
ctctaaaatctctttcaactctaacctttattctgaataagaatttaatattcacttagtgctgtgcccagcactgtttgtaaacagcagctgtttgttatctctagtttggtctctgtattctcatcacttctcagaactatcattctaccgtcttcatttctaaacccaaaactgctagaatacagggactctggactgggtctgtaaatttttttctgatcaaaactttatagcagtgtagagaagggacacattcaaattacactaaggacattgacatagctggggttgtttccttgtttatattataaaacctaaatgtggaactatattctaataatctttcataggaaggaaaatagccagactgggtattatgcatgtaacaaatgaggacattgtgcataagaaaggaaacattagttttctgtcatcctgggccaagtacctcattacagtaaatgtgtgtctttggaaactctttgcttgtgctgatggcggtaagcatggggtcccaggcaggttcaaaggctgaactgtaagaaatgggcaagacaatacattttgttttggaaggaatttctcatgggataagtttcccaaagcttgaattataggctatgaaataaagcaaatagatggagagaaaacaagtattgttttcaaaaagtacaagtcaattctatttaaagaagacaagctgaaaataaaacaaaaataaacacaatttaggaggttacagagttgaagacagtatgaattgttgtgaaggccaaaatcaaatgtgaaagttaggttctctgagaaaagggtaagcagaaaggatgatttctcaagcaattaataaggaatatattttcttgtgccatgttctagatgcattgagcacagatcctcttgtcctaagctgtcctagaggctcaggttagcatctatccaaagttgtcctttgattttattgtctgaaagaacagaaggcatcagagtttccagtcactgaagagtagggtttgttcatcacttcccagcaatcacatcactttgtgtaggtaaggatatatgatgtgcttagattacttatgaagctctctctaagtgggagaatgacctgtccatgggacaactccccgttttcatggtcatttcagaagtacctctttttgggcagtgctcctggatctacttctacagccacattctactctgcacaatcctccctatgtaaagccaggcacagtacaaatatgcttcttgcaagtgaagaaaacccatggaagtcctagcttcatggcacgctgcagcaatcccaagctaccaggagcctcttttgaacccacttccctaagtctttgctcttcaccagagaatggaaattgttcatcctggtgaactgtggccaagttctgctccctaagtatttacttggagtagggaggttaaagggaagaaattcagggggagagaagcaaaagagaacacttccaactccctcccccatctcccaatgctccccaccttccttatcactgctctactgaagggtgtataaatcctgctcttggttagaattctccttattaacagtgtnnnnnnnnnnnnnnnnnnnnnnnnnnnnnnntccttttttcagccctgtagacatgaactgatcttcccttgaagatacaaacacatggccannnnnnnnnnnnnnnnnnnnnnnnnnnnnnnnnnnnnnnnnnngnttattaggnggatttttttccctgggtactagctctgtgaaggagataaaaagcgcaatgtgtgtt

SEQ ID NO: 432626 - DNA, 700 bp, Homo Sapiens
  misc_feature (478)..(573): n is a, c, g, or t
tctgacttaggatgagcttaagagacaatgaatagagaaatgatcgaaagatgttcccaagcctaggtaaactacaggacaggcaaaggagtattttgttggaggataagatgcttgatattatgaaacatacatttggtcttaattgccatctcctggcatacaactcctaaaatccttggaatcttcgaagaggttaagtgtctttttatatgctactgtttgttgtctggtaacttcaggatggggctggtccacagaaagaccaaagcatagtaatagggttgggactttctgccccaccccccagcctcgggaactgggaggggctgaaggttaagttggtcaccagtgcccagtgatgtagttaatcgcacctacatcatgaaacctccattaaaacccccaaaattgatgggatttggagagcttccagatagctgatgaacacatggttttcccggagggtggtgctccnnnnnnnnnnnnnnnnnnnnnnnnnnnnnnnnnnnnnnnnnnnnnnnnnnnnnnnnnnnnnnnnnnnnnnnnnnnnnnnnnnnnnnnnnnnnnnnnagagccaggcacgctgcagcaatcccaagctaccaggagcctcttttgaacccacttccctaagtctttgctcttcaccagagaatggaaattgttcatcctgtgaactgtggccaagttctgtccc

SEQ ID NO: 432627 - DNA, 495 bp, Homo Sapiens
  misc_feature (470)..(470): n is a, c, g, or t
actgggtattatgcatgtaacaaatgaggacattgtgcataagaaaggaaacattagttttctgtcatcctgggccaagtacctcattacagtaaatgtgtgtctttggaaactctttgcttgtgctgatggcggtaagatggggtcccaggcaggttcaaaggctgaactgtaagaaatgggcaagacaatacattttgttttggaaggaatttctcatgggataagtttcccaaagcttgaattataggctatgaaataaagcaaatagatggagagaaaacaagtattgttttcaaaaagtacaagtcaattctattttaaaggaaggacaagctggaaaattaaaaccaaaattaaacaccattttagggaggttaccgggtttgaaggaccgttttggatttgtttgttgaagggcccaaattccaaatgtggaagtttgggttctcctgaggaaaaggggttangccggaagggtggttttctccaggc

SEQ ID NO: 432628 - DNA, 1574 bp, Homo Sapiens
  misc_feature (50)..(58): n is a, c, g, or t
  misc_feature (324)..(347): n is a, c, g, or t
cgggaagcggcacccactggggggtgcccccatacctgagagcacgtagnnnnnnnnngtcaagaagggccccctgagggaaccgagggcttcaacacaatggggccaaacgcactttggtcaaggtcaacatggcgttccgtcttgtgccacttgggatccccttcccgtgtcctatccccgagtacttgctttttgaaatctggtccgttaccccatcgtggaccgttctctctccttccaggatcccggaaagggatgaaatactgggttaaaccaatccccctgttgcatgtacgccctggaaataaccccttttggttnnnnnnnnnnnnnnnnnnnnnnnntccaagaagagctcaaaccctctttgtgctccagggagcttggatttacctgccaaaagtaaaaagtaaactcaggtccgtggatgtgtctttaaaaaacagccaaactggctgggctgtcagcagaaaggagcgtcctggacaggatgaggccctggtggacgcccaaagccacgtgtccaagagccgaggcctctccagcaagccctgcagtgggagaccttgcctagcgggccctgcccccaaggatggtgaggggcgctcccgacaccgatcagcctgggcctctgggcacaggtgacatctgggggttcctcaggccagaggtggcgggcttgggctctcccacctagccctgtggagagccgagcaggggcctggtgccatgccccccgtgcaccaggcctcacgtggactccagcgtattgagtgggaacaggttgtggttggtgggcgtggaaaagtagagctgctcactcgacgcgtggttgtcgcacgggctgcttagccccagcgtccgctcaaagtccagcagctgccccatgaagttgaagttgggcgagatgttggactttttcctcttgacaaagtcgtaggcgtcgttgagtgacaggttcatcttctgcatcagataggccacagtgaccgtcactgagcggctgatgcctgccaggcagtgcaccaggacaccacacttcttggagcgggcttcgtcaatgaagctgatggcctcagggaagaactgggagaggttctggctccagtggtcagagatggggatctgcttgtaggtgaactcgccgccgtgctcgaaggcgttgggtaggttgggtgtgacattgaggatatacttgatgccatacttgccgagcacgtccaggttggtggagtccttggcgcagccgaggtagaggtagggcaggatctggacagggaaggctggttggctggatggcacagggctgccgtctgactcggtggcactgctgggcagctctcggtccgactcgccgtcggagcagtcagagctgatgcgcaggccccccaggcccagcactgaggtgggtggcgagctgctcggcgaggaagagctgtccacgttggtctcgcagtgctcagagtactctgtttgaaacttgttgaaaccaccttggaggtagtaggcctggcagccgtcgtcgcgcagcttctgtaggagcaggccgagcacggaggcgggatcccggg

SEQ ID NO: 432629 - DNA, 727 bp, Homo Sapiens
  misc_feature (688)..(688): n is a, c, g, or t
caggatccccagccaagcctgaagccccatagaagcagcgctccccagccccaccggaagagctggtgaccccaggctccaccggcccgaagtcagatctcactaggagagcagcagtccaagtcaccagtccctggtgtgaagcaggaggcaggagctgccaaggtccagctgacccccgtggaagaggcccaccagcggctggagaggatcttcacagcttctctggactctgaggccgcctctcatgcccacagccaggcgaaaacagaagaacagattgcagcagaagaggcctggaatgagacggagaaggtgtggctggtccatagggacggcttctcactggccagtcaactcaaatctgaggagctcaacttgcctgaggggaaggtgcgtgtgaagctggaccacgatggggccatcctggatgtggatgaggatgacgttgagaaggctaatgctccctcctgcgaccgtctggaggatctggcctcactggtgtacctcaatgagtccagcgtcctgcacaccttgcgccagcgctatggcgctagcctgctgcacacgtatgctggccccagcctgctggttcttggcccccgtggggcccctgctgtgtacttcttaaaaaggggatgcacatgttcaaagggttgtcggcggggaggacattggaccccacatnttttcaatgggccaagaccccatacaaggcgaatgcttg

SEQ ID NO: 432630 - DNA, 396 bp, Homo Sapiens
  misc_feature (320)..(320): n is a, c, g, or t
  misc_feature (327)..(327): n is a, c, g, or t
  misc_feature (373)..(373): n is a, c, g, or t
  misc_feature (385)..(385): n is a, c, g, or t
gtggcggcaaccggcacctcagtccccgccgcgcttctcctcgccgcccacgccgtggggtcaggaacgcggcgtctggcgctgcagacgcccgctgagttgcagaagcccacggagcggcgcccggcgcgccacggcccgtagcagtccggtgctgctcttcgcccgcgtccggctcgtggccccctacttcgggcaccatggacacctcccggctcggtgtgctcctgtccttgcctgtgctgctgcagctggcgaccgggggcagctctcccaggtctggtgtgttgctgaggggctgccccacacactgtcattgngagcccnacggcaggatgttgctcagggtggactgctccgacctggggctctnggagctgccttncaacctcagcg

SEQ ID NO: 432631 - DNA, 603 bp, Homo Sapiens
  misc_feature (558)..(558): n is a, c, g, or t
gaatccaaatgatttatttcagttttggctcttaagccacttccattgggaagaagaaactcccaggagtgacctttgagagctgagggttctcggggtggggcagtgtgaggggctgggccagtgtgaggggcaaagtccaacgggcatcccactcctgcggcctgggctttcccagctgatggggtgggggacacccatttctttagtcccagcccccagggaacggagcagagggcagagggagtgggctgcacccaccaggaagcctggttccttggccccaaaaacagtcttggccagctcccaggggttgctgggacggaagacatccacacaggtcacaggcacttgtggggacctccctgtccccagggagacaacgatggagagtttcttcaccttgttggcctgacccttgcggatcaggtcctgattgtactcatggatctcggtcatgtgcattcagcggtggggtgtttgcccgcagcccacccgtccaggaagcgcccatttgggtcgaaggtaagtaggagctggcccgttgtttcgggccgnccggcccaccagctggtctgagggctgagctggaggcctgaggtt

SEQ ID NO: 432632 - DNA, 1072 bp, Homo Sapiens
ggccagtggtgggcttggccttggcgggggctgaatggacgaggttcagctgggggccggtgagaggtctggggaccctcccgggtgaaaagcagcaactgaatgagcttctgaaacttcttggcggtgctcatagatgtagacttgggtctcccaagagggcgttgaccagcactgtgtcactgacctcatccagcatgatgtccgtccccagctgggggttcaatctgaagtactggatgccgaccatctcgcaccaggcccgtgcccggtccacagcccgcccgtctggatccgtgcaacagtccaccaccatcttgcccagttccttggccccaaaaacagtcttggccagctcccaggggttgctgggacggaagacatccacacaggtcacaggcacttgtggggacctccctgtccccagggagacaacgatggagagtttcttcaccttgttggcctgacccttgcggatcaggtcctgattgtactcatggatctcggtcatggcatccagcgtggggttgttggccagcagcccaccgtccaggaagcgcccattgggtcggaagtaagtaggagctgccccgctgcttcgggccgcccgccacaccagctggtctgagggctgagctggaggcctgaggttaacgttctggttgaaacgaggctcccggacagtttctggagcatcgtagttccggaagaggtggagttcagccggctgccggtcagacagtgtccctgtcagcatcaccttgggtttcctgacgtccgtcatcttggtgtgctccccaaactcccgcttcaggaactcctccaggggccccgactcgtagggcctggagccccggaacacctcatccttcatgcgaaagtacatgccgcgcatgtaggccatggacttactgtgcagaatggccagggccaggatgcctccagtgctggtgcccgccacccagtcaaacaggtccttggtggccacacccgaggccttctcgatggcgatgaggagctggatgatgatgaggcctttcactcctcctccatccaggcacagcaggtgtcg

SEQ ID NO: 432633 - DNA, 423 bp, Homo Sapiens
gttgtctttctttctgaaccttgaatccaaatgatttatttcagttttggctcttaagccacttccattgggaagaagaaactcccaggagtgacctttgagagctgagggttctcggggtggggcagtgtgaggggctgggccagtgtgaggggcaaagtccaacgggcatcccactcctgcggcctgggctttcccagctgatggggtgggggacacccatttctttagtcccagcccccagggaacggagcagagggcagagggagtgggctgcacccacccggaagcctgggagtgcccttgcttggggctggggcagaggcagcccggcaggccctcagggaggctggggctgggggcaggggtacggttgtgcccgggtacccttaatgtttgagctgatgggggagtcagttgtcc

SEQ ID NO: 432634 - DNA, 1418 bp, Homo Sapiens
  misc_feature (11)..(11): n is a, c, g, or t
  misc_feature (31)..(31): n is a, c, g, or t
  misc_feature (53)..(53): n is a, c, g, or t
  misc_feature (80)..(80): n is a, c, g, or t
  misc_feature (140)..(140): n is a, c, g, or t
  misc_feature (1337)..(1337): n is a, c, g, or t
aaccttcccgntccaaaaaccgcccttctgnaatccttgcaaacaatccaacnaccatcttgcccaattccttggccccnaaaaaacaatcttggccaactccccagggttgctgggaacggaaaaacatcccacaacangtcaacaggcaacttgtggggaacctccctgtcccccagggagacaacgaatggagagtttcttcaccttgttggccctgacccttgcggatcaggtcctgattgtactcatggatctcggtcatggcatccagcgtggggttgttggccagcagcccaccgtcccaggaagcgcccattgggtcggaagtaagtaggagctgccccgctgcttcgggccgcccgccacaccagctggtctaggggcggggaaggagggcggcccagtggcacaagggactggcataaaacccatgcactccagatctcagggtgtgcgtgttgggggctgggggtgcgggaagaggggaggctgggaactcttcagaagcaggaccccacgaagccacactctctggctagttcgtcctgagggctgagctggaggccctgaggttaacgttctggttgaaacgaggctcccggacagtttctggagcatcgtagttccggaagaggtggagttcagccggctgccggtcagacagtgtccctgtcagcatcactttgggtttcctgacgtccgtcatcttggtgtgctccccaaactcccgcttcaggaactcctccaggggccccgactcgtagggcctggagccccggaacacctcatccttcatgcgaaagtacatgccgcgcatgtaggccatggacttactgtgcagaatggccagggccaggatgcctccagtgctggtgcccgccacccagtcaaacaggtccttggtggccacacccgaggccttctcgatggcgatgaggagctggatgatgatgaggcctttcactcctcctccatccaggcacagcaggtggtcgtggtccgtgtgaccttgagcaagtcacttcacctctcaggggctcaggttctgcatgtccgcttctcgtccctcatggagcccaggatgaacgctggcttccgggcccgtgagatgtgcatgagatcctgtagttctaggttgtttaggctgatcggtgggggctgagctctttccagggagaagggatgatgtggcgctgcagagccctgctccgcggggaccccgtggatgggtgggaagcagtattcggcccccacggttctcagcagagtcaagatcgccttcctggtgacaagtctgccgattttggaggctaggaatgtaggagtctccccanaagtcattcggggtgtccacttctgctccgaacacgatgagggccttgatcatctcatcccgggaattccggaccggtcca

SEQ ID NO: 432635 - DNA, 595 bp, Homo Sapiens
tttacagggtaatctggaatattattttcaaacctttccatggggcctgggtactggacttttttcaaaggaacatattggcttgggtccttccattcacaggacacagggaaacaaatcttttttgggctgcctggttgagccggatgttctccccttccttggtttggggggtctgaagcagttttcctgtcacctggcagccaatgaggaggcttttgcgcatattggcaactcggatcatgaggcagggcttgccattgggggaggccacaactgcatgctggctgaaacgaatggtctcagcccgcttcttgggccgggcaatcttcgccaggaaggtacctgtgatgaaaatttccaggatggtggtgagcaccagctgggcaataaaaagcacaatggccagtggacattcctcactgatgtagcggaagccatagccaatggtggtttgggattcaagggagaagaggaaggctccagtgagtgtgtgcacctgtaccacacagggggtgtgggttggccgggggtccagctccagcaggtccccatgtgccacagctaccagataccacaccacgccaaagaggaa

SEQ ID NO: 432636 - DNA, 2376 bp, Homo Sapiens
  misc_feature (648)..(648): n is a, c, g, or t
  misc_feature (2291)..(2327): n is a, c, g, or t
acgatgcgtttacgatgagcaggcaaaggaagaagagaagccaggtacagtgtaatctggaatattattttcagacctttccatggggcctgggtactggactcttttcaaaggaacatattggcttgggtccttccattcacaggacacagggaaacagatcttctctgggctgcctggaagataggtttaaaggtttagataacaacttgtgttagtcactccaaattgaagagttcagaatccaggatagatatgggtggttatatgtttatgtttcttgggccaactccaattctctgagaacagaggctatgagggaactgggtatcctgagagtgttcacttgagaaactacagagggaaaacagtggcgaccatggttctagcttatggtcagaagtcaccagcagaaatcaagcttcacagtggcaaaccctggcttctttcaacagagattggtagataccctaggatatgttgatatcagattcctgtatttctgaaagcacagaccacaaagtgaccatcagagagagtcttgcctttgggaacttgctagatggaaaggtaacagagggagctccagcctcaagtcaccaaacttcatggtggtggtgggaggtagggggcagtctatccttccanaccacatggtcctcctaatgtgagtatccaagcatggctgaggccttttaagccacttcagcctaatcccactttttcccccatcctggcttaagggaggtatgtgtattggggcagaagctggggaagtggaaaggggacagtgggaggcgaacctggactccagttggcctaagctaccaacaggccactgggttaaagaagagggagtggaggatgggtgcttcgggggatctccagtaaacccgggtagtattccttaccagggcattggaagagaggaaaagagaccagaggaatgggggagtgggaacaggtcatcagacattgctgatgcgcacactaagggcactgccctccttctcagcttgctcccttaatgactcctccaacttgagcttttcagggtctccgtagcgtacagtgctgtcacggaggccactaggagaggccactttcacaacttggtcaaaaaggctaaagtcagctatgtatttaccactggctgacagtgagatggcaggtgtgaactcgtagccccaaaggatctcctctggcaggtaggaagtgcgcacctgacaggtggcactggtggactccactgtcccacttaggatcagcaccagctcaaagtcaccctcaccactgcgaagagggagatctttcaagggacgtgtctcatctaccacatgatagaaggtaaggggtagaataaggaaggggctgtcagaggctgtgtctacttggaaagtcacattgacctggttgagccggatgttctccccttccttggtttggtgggtctgaagcagttttcctgtcacctggcagccaatgaggaggcttttgcgcatattggcaactcggatcatgaggcagggcttgccattgtgggaggccacaactgcatgctggctgaaacgaatggtctcagcccgcttcttgggccgggcaatcttcgccaggaaggtacctgtgatgaagatttccaggatggtggtgagcaccagctgggcaataagaagcacaatggccagtggacattcctcactgatgtagcggaagccatagccaatggtggtttgggattcaagggagaagaggaaggctccagtgagtgtgtgcacctgtaccacacagggggtgtggttggccggggggtccagctccagcaggtccccatgtgccacagctaccagataccacaccacgccaaagaggaaccatgtgcctgcaaaggtcgcagagaagagcagaagcttgtagcgccactgcatgtcaatgaaggttgtccacaggtccttgaggtagaggaagcgcttgtcggcaatgtgctccattctcacgttgctgcgaccatcttttgtcaggactctccgccgtcgtatccctgggcccattaggggccggctttctgtctgagtggtctgactgtaatacaccttggcaactgacgtcatcttgggtccgaggtggagtggccccttggatgggccgcggggcagcgggacagatggacggacggggcgggcaggagttaggagcagagctgtgcgacgggccgggccaggactcttaaacccggagctgggatcagaaaagccgctctcgacgaattcgagctcggccgatttggcctgatnnnnnnnnnnnnnnnnnnnnnnnnnnnnnnnnnnnnncgccgccaccgcggtaagctccaattcgccctatagtgagtctatcatt

SEQ ID NO: 432637 - DNA, 2409 bp, Homo Sapiens
  misc_feature (723)..(735): n is a, c, g, or t
  misc_feature (2330)..(2366): n is a, c, g, or t
tttttctttaaatttggatgtctctacaccactcctgatttgtaggactaaatagatctatttattccaatgcaaattgtgtaacatttatttcttccttgatttttaaaaatactttagtattcttaactatgtatgtgccttctcttacactgagttcttttttgctcctttcagctgctcacacaatcctgtctgttggagtcatagctgctaattccatattatttctctacacaccttgaacatttagtgtattactggtacccttctgtgttctaggaaacaaatgaattgcaaactggacttgtaacaggatcatacatagagcaacaaattagctactggctttgtaagatagtaagttaggaatttcacagtcatgtctccaaatttcatggcagagtttaaaaaacaatgtaagactgtggtaaggtacaaaggcaaatgcaatttgcgttgactaatttcctaggacttatttccttatgtaaaacccctgttctttctttcctgccacaagacagggtacaaagctttctaaaacatgctctcaggtgtccacacctgagacattgctttgtggatactctcaaaggtgtccacaaagcaaaaaaatcagaccaaatgctaagagcaagtaacttatacctcaccacctggacatggcactggcaaaagtcacttcagcattagaacagtaatgtttttgctaaattactnnnnnnnnnnnnnaaagaaagaaagaagaactccggaaataatatttttgataaaaatgttatactctaggataatttgaaatcatttttgtgaaagaattaaattcattaaggctattcgatgccatacaagattttccttttacataaaacaatcttaaattacatctcaaaaataatttcttacacttttcttgatgataaatggttcctggctatatattttataggtattaacatagtttataatttggaaatgttcaatttcatggttacaaaaaaaatcctgcaaacagaatgtaatggtgtgtcaattccagatgcccaaataaaatacaaaatcaagcaaaaccacacatcgcagcattatcatgagtttaagctattgagtatataacatcagtttgtgagttcaattctccaaatcctttcctttaaagtaataagtttatttcatctttattaatgtcttcattacaattagccttctactaataacaatacagtttagtttaatatttatggagttctgatttattttttcctttgcttttaagtgtgctaatctttgtgcacgtgaattttctaccacattgcaacaagcaagctttggttcaattttcttgtcctacacaaaggaagattttgagtgcagaatcttagccactaggtcttgcgttgtcattttattttcctctccttgggtggatttactggaaggaaatgggtaaatgggaaggaagggaaggggaagggatgagagagggaagaaggggagagttctcagctatgttgaatcttgattcacaactttgcctccattcatggttggtgttccagaacttttccttgaacgcccttgtttttctccaatttcatgtagcgatggttctctgtacatacacacttcaataggtttcggtacaaaatgtgatgagggcttggttttcttcactctgttccccttcataatttgaccttctttattgagtcccagaaaccaagctcggcctgattcttgctggcggtacagtgtggaagaatagatcacatagtagttttcaaacacagattccttgaatttgcattctggagtgaaaacatctgaactgtagagatagccttcaccattcatggccacatagaggctagccttcactccttggatggccactacacgcaggcccacgggaattagattgaagagagtgtagtcgctgttttcgtccttggtcccatcaatggtaccatctgggtgcatctgcaggaagtatccctgctggctgaataaccttgtcacaatccctttgagctggggttctttgctctccatttcggtccctttcgagtgctgggaagttcaatggaagttggccggaagatgtgggcccgcttcagattcccaaatctgggaagccaatctgatgatttcgcccgtacttccttccttcccctcaggcttcctgggtctggaagctgcaggcaggagctgtcctccgagcgtggtgctgcaggtgtagtgacagatcatcccactttgctctctggatgcacagcagatttccatccgctctcgacgaattcgagctcggccgatttggcctgatnnnnnnnnnnnnnnnnnnnnnnnnnnnnnnnnnnnnncgccgccaccgcgatcactccggtcccctatagtgatctatcc

SEQ ID NO: 432638 - DNA, 1106 bp, Homo Sapiens
  misc_feature (972)..(972): n is a, c, g, or t
  misc_feature (1021)..(1021): n is a, c, g, or t
ggggtgggagcccgtggcctttaaagtgccgttcagccttttcctccaggggtgctttgtaaacacggctgtgctcagggctcgcgggtgaccgaaaggatcatgaactagtgacctggaaagggtactagatggaaacttgagaaaggactgcttattgataacagctaaggtattcctggaagcagagtaaataaagctcatggcccaccagctagaaagtattcttgccatgagaaaaagaatgtgataagttattcaacttatgaaattcaagttacatgtgaattctgccaggcaatacaaggacctgtggaatatgagtgatgacaaaccctttctatgtactgcgcctggatgtggccagatcagaccccaacaccaacaagattcttgaaaaactgtgaagaagtgggtttgtttaatgagttggcgagtccatttgagaatgaattcaagaaagcttcagaagatgacattaaaaaaatgcctctagatttatcccctcttgcaacacctatcataagaagcaaaattgaggagccttctgttgtagaaacaactcaccaggatagtcctttacctcacccagagtctactaccagtgatgagaaggaagtaccattggcacaaactgcacagcccacatcagctattgttcgtccagcatcattacaggttcccaatgtgctgcttacaagttctgactcaagtgtaattattcagcaggcagtaccttcaccaacctcaagtactgtaaatcacccaggcaccatcctctaacaggccaattggttcctgttcccaggcccatttcctcttctgttacatcttccttaatggacaaaccatgcctgttgctattcctgcctcaattaccagttctaatgtggctgttccagctgcagtcccactcgttcggaccagtcaccatggtgcctaagtgttccagggaatcccaggtcctttctnttcccaaccagtacaggtcagaagccaaaaatggagaattaaaagctgnttttgacccagcaacatcctccaggtaccaatgggggatactgtcaaagggcatggtagccggattgggttaggactcaatcaga

SEQ ID NO: 432639 - DNA, 834 bp, Homo Sapiens
tagttcagaacttgtaaccagcacattgggaacctgtaagatgctggacgaacatacctgattgggctgtgcaagtttggtgccaatggtacttccttcctcatcactggttagtagactctgggttgaggtaaaggactatcctggtgagttgtttctacacagaaggctcctcaattttgcttcttatgataggtgttgcaagaggggataaatctagaggcatttttttaatgtcatcttctgaagcttttcttgaaattcattctcaaatggactcgccaaactcattaaaccaaacccacttcttcacagtttttcaagattcttgttggtgtttggggtctgatcagccacaatgacactgtcattacgtgctggaccaaatttcagtgtcatctcatgtttatgtttatggacagccaaatgatcctcgttggtaaaacgctggccacatccaggcgcagtacatagaaagggtttgtcatcactcatattccacaggtccttgtattgcctggcagaattcacatgtaacttgaatttcataagttgaataacttatcacattctttttctcatggcaagaatactttctagctggtgggccatgagctttatttactctgcttccaggaataccttagctgttatcaataagcagtcctttctcaagtttccatctagtaccctttccaggtcactagttcatgatcctttcggtcacccgcgagccctgagcacagccgtgtttacaaagcacccctggaggaaaaggctgaacggcactttaaaggccacgggctcccacaggcttccgtcctctctcgcgag

SEQ ID NO: 432640 - DNA, 1672 bp, Homo Sapiens
  misc_feature (73)..(73): n is a, c, g, or t
  misc_feature (148)..(148): n is a, c, g, or t
  misc_feature (352)..(414): n is a, c, g, or t
  misc_feature (486)..(496): n is a, c, g, or t
  misc_feature (498)..(795): n is a, c, g, or t
  misc_feature (963)..(1054): n is a, c, g, or t
atacaactggccaatcactttgggagttgtcatcagaaagctatcttttgtttccaacaaattaatttgtcancatttctcaatgctaatagcatgtaatactttttcatttctctctgcaactgtaaagtgtttaggttcactctangcagtctcagccattaaaatgcatgggctctgctatcttgtgccacttgagaattaaactctagaaagcccagcactacttcacaggaaaggagaagcccaagtacagttatattctagcaagtgtgacagtgtgtttctgttgtagtggcaaatactggccacagcttaatgaaaaccagactttacatacagactgtatggnnnnnnnnnnnnnnnnnnnnnnnnnnnnnnnnnnnnnnnnnnnnnnnnnnnnnnnnnnnnnnntgtaaatgaattggaaggctgccacaagttttatcaacatcccctattattatgaacttcatttgcttgagnnnnnnnnnnngnnnnnnnnnnnnnnnnnnnnnnnnnnnnnnnnnnnnnnnnnnnnnnnnnnnnnnnnnnnnnnnnnnnnnnnnnnnnnnnnnnnnnnnnnnnnnnnnnnnnnnnnnnnnnnnnnnnnnnnnnnnnnnnnnnnnnnnnnnnnnnnnnnnnnnnnnnnnnnnnnnnnnnnnnnnnnnnnnnnnnnnnnnnnnnnnnnnnnnnnnnnnnnnnnnnnnnnnnnnnnnnnnnnnnnnnnnnnnnnnnnnnnnnnnnnnnnnnnnnnnnnnnnnnnnnnnnnnnnnnnnnnnnnnnnnnnnnnnnaaaaatcatcttacatagttcttttatttaactgcaacataagagactcaggcttaaacgtgatatttgccatcactatagcaggctgaatttgcaaggcaacctataatgccatagaatgttagacttttggaaagaccctaaggatcatctagtccaatacacttnnnnnnnnnnnnnnnnnnnnnnnnnnnnnnnnnnnnnnnnnnnnnnnnnnnnnnnnnnnnnnnnnnnnnnnnnnnnnnnnnnnnnnnnnnnncgctccttcttcctaggctagtatttatcccactacatctgactcattctctactatcgctgttgatttcctcttgggtactaaatctgttgaacatgttgccaggcttactgctggtattatgggatagcatttgcctgatggcagcttctaaaggagactccgttggcactaagcagtttccaaaagtttatcttgcaagttcaacccaattaagtggcagtaaatgctacaagttgtatagaatactcgtacacacaggtgtgcacatggaggtgatatctcagttcccgcatttgcagattcagttagacattgtttaatattaaacacattcccaatgcatgttgggttatattcatttggtcacttaaaggagtgtggatcagaaaaggaatggaaacactaaaagctaaccaacagaaagattatatcaaaaacaaatcttctacgaaaaattctttcataggagaaatattccattatttccaagttcccatttatttccttcccagtccacatgcaaatacacgttcagaattgtgtgctgagttcacttcaaatcccaggcccatcaaactgtcagtttacaaatgctgaatttcagtcctcttgatc

SEQ ID NO: 432641 - DNA, 1172 bp, Homo Sapiens
  misc_feature (595)..(617): n is a, c, g, or t
ggcaagcaaatgaagttcataataataggggatgttgataaaacttgtggcagccttccaattcatttacagttgtttcgttttgtttttgttttaatgtccattttctgttgactgttcccagttttcattttccatacagtctgtatgtaaagtctggttttcattaagctgtggccagtatttgccactacaacagaaacacactgtcacacttgctagaatataactgtacttgggcttctcctttcctgtgaagtagtgctgggctttctagagtttaattctcaagtggcacaagatagcagagcccatgcattttaatggctgagactgctaagagtgaacctaaacacttacaagttgcagagagaaatgaaaaagtaattacatgctattagcattgagaaatgttgacaaattaatttgttgggaaccaaagatagcatttctgatgacaactcccacagtgattggccagttgtatgatgagtacactgctggaaagagggtaaactgggagttagtggatggtcccaatgccctgcctacagcagagtgccaaccagccctgagtgcaaaattcaagttcaannnnnnnnnnnnnnnnnnnnnnnctttatggacccgcaaataccatattcattattgatgataagatcttcacagaatcctgtagctactaatgcattgagtttttaatctcagtacatcagccaggaggagccagatcacagggtagtgatgtctactgggattatactcataacatctacacaaaacaagttgagaaggatccacgttttcattgtttatcagaattgtatctcatttggctgagcattacttttgtcagaatgtgttatctgtaaaccatgtgtagtgaaattcttctgtaactttggattaaaggtatttatggtctttttgtttgtttgatttttaagtaagttatttcttttgtagacctgctgatggtatggttccatccttctgacctcagcatccaatctttttaaggatttttgttttcaatattgttattttaaattgtggttgaagcaatagaaaattgaaatatggattgtgcatgactgtgtcttgagtgtaaaaatattgcagtttgaaacttggacctaaagtattgcaaataaaaatgacaaacatcaatg

SEQ ID NO: 432642 - DNA, 797 bp, Homo Sapiens
  misc_feature (579)..(579): n is a, c, g, or t
  misc_feature (688)..(688): n is a, c, g, or t
  misc_feature (698)..(698): n is a, c, g, or t
  misc_feature (724)..(724): n is a, c, g, or t
  misc_feature (728)..(728): n is a, c, g, or t
  misc_feature (777)..(777): n is a, c, g, or t
aaatgctttgtaacaaacagttaacaggtaagattgtcttgctctctaggaaatgttacatgaaatagtttttactccttttatttattctttcttaacttctgatagaacacatctggaaattccttttgcagcttctcttccaacatacccttaccatccatcattctctaaagcaggggtttcttacctggggtccctgagtttcccagtgctactcaaagaagtctgttttttaaaacagatcaaaaacgctgttcaaaggggcattctctgtcacaccaacacaagattttttaaagacctgcattgagatgacaaataggtttgaaaagtagccacatagtattgggttttaccttggcgtctctgacattccatgatgacgtctgtccctgggattgttcagcaatccccctctccatcacactttagtaaatgaagacggtgacatttcccgggactgtatctaatgggacaacagttaacattgttcagaacccatataatagaactcacaaattttaatattatgcgtcattatttctgattattaatttcctaagtgctgaatttaangaaacaaaaacctttctgttatgaaagccaaagcatgaggtgaaccctaaattgtagcagtaaattctatttaattctatttgcacaatttcagagtatttaaacttantttatattcntgtgtatggtgttgcaatatgattgnttgntttaattttccaatgtatgtttaagttcaaagcagtaaatcccaagatnagcaatcctactgctgcaac

SEQ ID NO: 432643 - DNA, 832 bp, Homo Sapiens
  misc_feature (311)..(311): n is a, c, g, or t
tgtgtcttgctggtgaagcagtctgtgtgggtcttggagggacagggggagagataagtttcccactatccgacatgttcttggcttccttccccctgtccaggctccagctgctaggggtggggttcacagctttttcaggtgcagagagatttgggtccctgcgtggcaaggccccgtctcccatatgattaaacagcatcctctgcgaaggctccaccggtgatggatagatggcactgcatggttctctcttttggtgacaggccagagttttctcggagaatgtttgtgtttgtcagaccaccaanggagaagctgggaagagaaggagagagaggttcctcagcatggtagtggtgcctgcccctgtttggaggcgaagagcctgaacgtgtggcagctggcccccgttccccggactagaaggttctctgggcaccctcagtcttccccacactctggcactgacctctggcactcgatggagcagaacttgtcacattaggtgaagccgagtgagtagaactcaagcttgaggtagatggacttggctggaaacacacagggagctattatcataccctgattaaaggcttcccgcgacactgacgtatttgaaacaaaatcatcaactttttttcaaattagcaaaaaaaagtccgtttaacaatatagaaaatcttaataacttagattgacaaagaagtctgcatgaattaatgaaaagtctgagattttgactcctgccaaaggaatgccttcgtgttagattcagctatacactgtgacttcgtaccagttagcagtgcattccttcacggacgcgtgg

SEQ ID NO: 432644 - DNA, 1248 bp, Homo Sapiens
ttaaaagccaggctttattaatagaaatcttgtagtcagtgggtttttcagtgtatgtcacatgtatattttctatcattttatgaaaaccagggagaagagttggcatgcagatagatttttaccacagctgtcaaaaccagcatttaaccatgcccttatatgcttggaagttatctgttttatgtcaagttttctgatgcaaacacattttgatggtttgacttgttaagttggctctggttaggccaatgaatggtcagccaaccaggtaaatgttaccctttctatgggatattaacccatactgtttgttacctttctggtgattgttccctatggcataagtgagccgtagtgagtgtgaaatgcatctacgtggcaggacaacacaaacaggatctatctaaaaagaagtctggaaatctcactataataagatcaagagccgcttctattacaagtaaagacatgctgatgataggagtaaagacagaaatattaagattaatctggtaattttatttaatatttaccattcagcagcaaccaacatgaacatgtgggctaacagaatctcttaaaatgttctgctatgtagctgcttcagaaatacacacacatgataaattcaagataaattcaactgctcactgccaaaattttttttaaaaaatggctccaagagcaaataacactgatttataatgtgcccaagcactagtcaacaaatctattaaattacacaggaaaaggaaatcaaggaagctttgttatcttatgcatgtcatcttatttaaatggaaggttttacttctttaaagcaacagaaatatggagcttcacatatatatgtatatatgtatgaatgtggttacaaacacgaagtgttatcaaaagcaaaagctagttcaaaaaatttctgactgcaaaacttgcaagatacaaagctaaaatgcatatgttccttttctcaattatgaacactttcactaaacataaatatttaacatatattaatttttccgacattcaaaattgtaaagtcaatatggcagaattgttaaaagcacatatgtacaaatattctttttccatacgtaaagtatttggcataattataacaatcatactgcatcaacaactgtttgcgtttattttctcaattatgaacactttcactaaacataaatatttaacatatattaatcggacgcgtgggtcgacccgggaattccggaccggtac

SEQ ID NO: 432645 - DNA, 976 bp, Homo Sapiens
caggggcgcctggcacccatgaacagcagattctcggtatcacccaatcctggagggtatctgcccaaaggaatttcagctggcagacgtagttctacactggggcttgaccaaactatggagacttcccttggctcacctggaaggcttggcggcaatcacggtagtgaataaattgccagccaggccatgagcagccctttacattatattccctggtaccattcatacatcagtggagactttgccgtgaagtttctcttcctagctaggttttctccagaggttaaaattgtttcacaaatctgctgaatatggctttgaggaatcttgttccactccaaagttcttattgacaaaaagaagagcatagatgtagcctattcgcccatagagcatttcatttggagcatgaggatcaatcttatttaggtgaattagccgtgtgatgcaatcttctgcctgcttctcattgttcatcttgtgatatagcacagcggccactgccagggggcctgcatccccacaaaggaaggtgatggagcgcttggttaagcagttcagactttgctttacatagccatgtgctaactgtaggtaggcagggtccccaaatacatcataaagatgtaagtaaagcacagcaatacctgcccagccagtgtaaccggtgccatcccgagggtctgctgatttcaggcctctctccatttgctgaagaagctcccgaatcttattggtcaagcgttgtgagaactcaggagtcagcctcccggcagcatcaaagtagccttcggccagggatttgttataatcagcataaggattcgggaaggccctttgagccatgacgccggaagcaagcccggacaaagaggccccgttttgcaaccccgttcccacgcccgcgacttgaagcaagtgcgcctcccgcgtcctgaagcccttctcggccctggtcctctcaccccgcagc

SEQ ID NO: 432646 - DNA, 1044 bp, Homo Sapiens
  misc_feature (417)..(426): n is a, c, g, or t
  misc_feature (757)..(773): n is a, c, g, or t
  misc_feature (862)..(862): n is a, c, g, or t
  misc_feature (914)..(914): n is a, c, g, or t
  misc_feature (955)..(955): n is a, c, g, or t
  misc_feature (969)..(969): n is a, c, g, or t
  misc_feature (975)..(975): n is a, c, g, or t
  misc_feature (994)..(994): n is a, c, g, or t
  misc_feature (1018)..(1018): n is a, c, g, or t
  misc_feature (1026)..(1026): n is a, c, g, or t
ggctggtacgggtcgggatgttagggattgcttcaagagaccaacagaacacagggatcaaaaacaaggaaaatttagcaacttcattaccttctaataagtaattcctgttagccactgcatcccaccaaaactagtttatttttcccctcaaattcatgatttttacgtctgttacaaagggaattttgctgatagctctttgggtcccactgttccattttatgctaatagattccattctagggcccagccgtctcttgactgatggtgttccctttaacccttggcatgtataatagaattttggtgaatgaaagaacccaaataggccagatagtccccccaggccctgatatccataaaaggcttgggaatgcattatgtaattgtccttagtctttttgttgttttagnnnnnnnnnncaagatgggctcagatggatgcctacgtaaaaatggttcctagctgtgtactcataacttttctttgaattgagtagtgaaaggaaggaggaggaaaggaaattaaatgtccttctagtattctctggactcaagtctgacatatgagataataacctatattgaaatgccaagaattgtatctgaaacaagagaacagtttgacacatttatcatgccttcatattacatattaactgaaaccaattaataaactatatgaaatatccattgcacaaggcaaaggcacctaaacctttgtgttctctttttctacatagcagaaattgannnnnnnnnnnnnnnnnaggggaacctatataattatgacccagtgatgtcttttggtgacttaagcttatgaattcaggttacaattgagttgattctagatggntactaccttgaaaaggatgttggtgccttatgtgacacgagccagagcctgntgggaataaacaaagcagattcatgcccacacccactcganctttagtggcagangggagnggcccagactccaaaaagngggcttggattcccccatccacgngggggatnttcttttacctttgagga

SEQ ID NO: 432647 - DNA, 344 bp, Homo Sapiens
tgcctggcctcagactgctcattagaggaggcctgtgtcgggcagaaatggcctagcaccctgaccttcactgtgcttggtgacagccaggaccagcatgccctgggcaggaacatggcggcaggtccccaatgccaggagcttttgtaattgaactccttgaagctgctttcttgaagggaggactgagcagtgctccttcacaacctccagaggcccaggaccaaacacctgggaatgttaacagttaagacatttgggtggaggagaaaagaggaaagaagggaagatgcatgaaaaagaattaagttcaagtaaagaagatgaagatgggctgggcacgg

SEQ ID NO: 432648 - DNA, 610 bp, Homo Sapiens
agagatttttaaatagaaattttattgaaagaattttgataccagttcatgattctttttaaatacatatgaagtttaccaaaatatatacatgaatgtgttcaagtagaaaatgtgaaatatacattatagatttgttgtattgcacttgggcaaatcataattgctcacttcagcatattcaaaccgaatcacaacatagtctttgaaagttgacattataacttagccttgtactcaaacattttaagaaatgttttgatgccttaatcttcaccaaaggaatcaaacccaaatactaacttggccatatgtttaaataccactaaaggcagggaggtaaagtgttgtagggtgcttaaaatatactaagaagggatttggcaattttccattcacagtatttccaatataaaagactcatcctatttatcaaactcacaaaagttgggggaaaatatcacttgggaaaaaatttcactgaattgctatcaaaggaagcaatgaagttacttgacaaactattgacaggatgtctagttcaaaatagaatcttcattgaggctaactgtagcacagtatgtgatacataaacaaaattcaaatatta

SEQ ID NO: 432649 - DNA, 571 bp, Homo Sapiens
ttgtggagcgccagagctgctaagtgcgtcagttgtggagtggcgtagacgagttaagtcctggtctgcgtggaggtcgacgactccgtcgcagactacggacctgtctgggtctcagccgccaaagaccccgtccggtaggtgagtggctcactttgagggcaagccttctcggatcgaggcttcttcatggccgctcagatcgtgagcggccggggctgctctctttgcggaggatggcgtctaatgagcgcagttgattcgaggtgggcgctggggcacgtctcccttttggcatactgtttgaggggtactgaggtgaaagggcggtcactgttcgggtcgtttttacacagcggttgtgcgcccgtccctgccagtcttaatgtcttcatctcctggacacgtagaatagtgggccgggatctccctgactttgctggcgatgcggctgggccttttgtagggcggccgcagtgacccccgagaagggggttgctgggaggagaagggaagagggaatttggcacgcgcagctctgctgcctttgattccaccgccgccattttgt

SEQ ID NO: 432650 - DNA, 1240 bp, Homo Sapiens
  misc_feature (57)..(75): n is a, c, g, or t
  misc_feature (1156)..(1192): n is a, c, g, or t
tcaatccaccccccaaaaagcacatattaccaaatttttagcaagtaggtttgggannnnnnnnnnnnnnnnnnnaaaaaaaggcccccagggcaagttatttacagtttaattgccactgtcaactgatctggaccttgatcgggaccgggacctctggcgatccacagatgctggagacttagatctacttgaagaaccacgtttctggctcttctcaggcacgggagacctactaacagaacgggacttgctccggctccggctcctgctcctgcttcttgaccggctgtaagatttgcgactacgggaacgggatcggctacgagacctagaggaacttctggtccgggatcgagacctgcttcttgacctactgtgccttttgctgccttcaattaattttatttttctcccatttatttcctttccagaaagtttttcaatagcattctttaagtcaccataagaggcaaactcaaccaccccttcatttaatttaggtcggtgtgcatccgcaaacgttacttccccagcttgtctcatgaaatctttgagatcctgccagctgactcttgaggataaattctcaactataagacgattttctgttcttacaggtggagcatttcgtctatcatttcgaggtctgcgactactaaaacggtcagagtatcgtcctctacctcttccacctcgtgaccgagccctagcatgttcaatagtaaccctttcactacagagttcttttccatcaagctcatacacagcatcatctgcatcccttggatcctcaaattccacaaaaccaaagcctcttttcagatcaatatctcttatccgtccatatcccttgaagaatctttccacgtccttctccctggccgctggatttagtctcccgatgaatacccgacagccactcatgatgtccggctagtacttcctaccggacggggtctttggcggctgagacccagacaggtccgtagtctgcgacggagtcgtcgacctccacgcagaccaggacttaactcgtctacgccactccacaactgacgcacttagcagctctggcgctccacaaaatggagggcgcgtcctacgtcacttccccgctctcgacgaattcgagctcggccgatttggcctgatnnnnnnnnnnnnnnnnnnnnnnnnnnnnnnnnnnnnncgccgccaccgcggtgaactccagtcgccctatagtgagtctatcatc

SEQ ID NO: 432651 - DNA, 2740 bp, Homo Sapiens
  misc_feature (33)..(33): n is a, c, g, or t
  misc_feature (1505)..(1540): n is a, c, g, or t
  misc_feature (2294)..(2314): n is a, c, g, or t
  misc_feature (2326)..(2326): n is a, c, g, or t
  misc_feature (2397)..(2397): n is a, c, g, or t
  misc_feature (2402)..(2402): n is a, c, g, or t
  misc_feature (2423)..(2423): n is a, c, g, or t
  misc_feature (2431)..(2432): n is a, c, g, or t
  misc_feature (2436)..(2509): n is a, c, g, or t
  misc_feature (2516)..(2516): n is a, c, g, or t
  misc_feature (2520)..(2520): n is a, c, g, or t
  misc_feature (2528)..(2528): n is a, c, g, or t
  misc_feature (2531)..(2531): n is a, c, g, or t
  misc_feature (2536)..(2577): n is a, c, g, or t
  misc_feature (2580)..(2580): n is a, c, g, or t
  misc_feature (2583)..(2583): n is a, c, g, or t
  misc_feature (2588)..(2588): n is a, c, g, or t
  misc_feature (2603)..(2603): n is a, c, g, or t
  misc_feature (2605)..(2605): n is a, c, g, or t
  misc_feature (2614)..(2614): n is a, c, g, or t
  misc_feature (2627)..(2627): n is a, c, g, or t
  misc_feature (2648)..(2648): n is a, c, g, or t
  misc_feature (2658)..(2658): n is a, c, g, or t
  misc_feature (2663)..(2663): n is a, c, g, or t
  misc_feature (2672)..(2673): n is a, c, g, or t
  misc_feature (2675)..(2675): n is a, c, g, or t
  misc_feature (2678)..(2679): n is a, c, g, or t
  misc_feature (2719)..(2719): n is a, c, g, or t
  misc_feature (2732)..(2732): n is a, c, g, or t
  misc_feature (2734)..(2734): n is a, c, g, or t
gtcctggtctgcgtggaggtcgacgactccgtncagatacggacctgtctgggtctcagccgccaaagaccccgtccggtaggtgagtggctcactttgagggcaagccttctcggatcgaggcttcttcatggccgctcagatcgtgagcggccggggctgctctctttgcggaggatggcgtctaatgagcgcagttgattcgaggaagtactagccggacatcatgagtggctgtcgggtattcatcgggagactaaatccagcggccagggagaaggacgtggaaagattcttcaagggatatggacggataagagatattgatctgaaaagaggctttggttttgtggaatttgaggatccaagggatgcagatgatgctgtgtatgagcttgatggaaaagaactctgtagtgaaagggttactattgaacatgctagggctcggtcacgaggtggaagaggtagaggacgatactctgaccgttttagtagtcgcagacctcgaaatgatagacgaaatgctccacctgtaagaacagaaaatcgtcttatagttgagaatttatcctcaagagtcagctggcaggtttgttgaaatacagttttgagttattttgatgtggctttttaaaaaagttaatgggtagctaatgttgtattgttttattaaaagtagttttaaattaatggatttaatggaattgtaattttaaacatttaattaaatgtaatttgggggatattttgaactttaatattagtgatcaaatgtaaatgttttgaggatatttttcttgttttttaaaatcaatttttaaccaaatattaaaccctttatttgccagcctgtctgtgtcgttggccttatgacgaggagtgcctgtgggttatcctaatcgttgtcttggtcactcttggttgggcctggttgactttgccagtcagctcctacagtgatcagttggccacctctagatctgtgtttgccggtctagacgttatcggtgcacttccttgaagtgccaggttgcagcgatcccagagcgttgataacgtgatctgatccctaagttgagacctgtcttcctgtaacgcttccgaataagaggtccggtcgaaaagagttgaaagatacgaaattaggtggtcgttggaatcctgatcgcagtaaagtggtccttggtaactgctcgagtagaacatgtctgcatccgccaatagtccgctaatagggagggctgtgcgattaaaggcttccatcgattgggtagtgtccttcaagtgggtggcgaagagccagtcgggcatatgtcatgaaggtttctccgaccgattaatggtttgctgcttgactagcctagggaaataataataaaggtaaagtaaacttttttaatgacatatggggcacaaaataactggtgtcttgtaaatgttctgtttttttaaataaaacttctctactttagtctttactttaaaaatatgtactgtttccnnnnnnnnnnnnnnnnnnnnnnnnnnnnnnnnnnnngtactgagctcagcatagactaatactaccttaatgttaaaatctgaatttcttttagcattttgcttaaaagcaatatgctatttgcttattccgtgccctgacatagataatttttgaattctgatagaatacaagtgtggtaaatgccatgtttgtactttatctaacatcttctctttcagtagtcttgttttttttatatcatgtgattgtttgtgtgtcccctttcctcttctttgcttaacacaattatcttgtgttaaggatctcaaagatttcatgagacaagctggggaagtaacgtttgcggatgcacaccgacctaaattaaatgaaggggtggttgagtttgcctcttatggtgacttaaagaatgctattgaaaaactttctggaaaggaaataaatgggagaaaaataaaattaattgaaggcagcaaaaggcacagtaggtcaagaagcaggtctcgatcccggaccagaagttcctctaggtctcgtagccgatcccgttcccgtagtcgcaaatcttacagccggtcaagaagcaggagcaggagccggagccggagcaagtcccgttctgttagtaggtctcccgtgcctgagaagagccagaaacgtggttcttcaagtagatctaagtctccagcatctgtggatcgccagaggtcccggtcccgatcaaggtccagatcagttgacagtggcaattaaactgtaaataacttgccctgggggcctttttttnnnnnnnnnnnnnnnnnnnnnttcccaaaccanacttgctaaaaattctggtaagtatgtgcttttctgtgggggtgggatttggaaggggggttgggatgggnagganatctttgtagatgtggaccancaaggggnngaannnnnnnnnnnnnnnnnnnnnnnnnnnnnnnnnnnnnnnnnnnnnnnnnnnnnnnnnnnnnnnnnnnnnnnnnntgagaanaatnaaagaganaanaaatnnnnnnnnnnnnnnnnnnnnnnnnnnnnnnnnnnnnnnnnnnaanaanaaagntcttggttaaaaaancnccaacccanaattagtttaatnccttaattaaaccccccaatngctttggacncttanaagagcccnncntcnnctcctacataaatgcttaatttgttttccttgttaggganaagggtgaccacnanacctcc

SEQ ID NO: 432652 - DNA, 1054 bp, Homo Sapiens
cagacaggcggccaataaaggtttaaaattgggtaaaaattgtttttaaaaagcaagaaaaatatcctcaaaacatttacatttgatcactaatattaaagttcaaaatatcccccaaattacatttaattaaatgtttaaaattacaattccattaaatccattaatttaaaactacttttaataaaacaatacaacattagctacccattaacttttttaaaaagccacatcaaaataactcaaaactgtatttcaacaaacctgccagctgactcttgaggataaattctcaactataagacgattttctgttcttacaggtggagcatttctgaggaagaaaattcgtattcacaatggaagaaatgcaatgacagcacttgtgttcaactgtgggcaagttcaagccatcagatatcacaagccattctaatgacttccgtcaatagatttgtgttctatgactcatatagattcatcaagaacaactggctaacgtgggaatagaagaacagattatacggcaggacccaaaatcatcactgctaatgactcctgaatcttaaatgctacccctacaataattgttcaatgcagccatccacccttcacataccgtctatcatttcgaggtctgcgactactaaaacggtcagagtatcgtcctctacctcttccacctcgtgaccgagccctagcatgttcaatagtaaccctttcactacagagttcttttccatcaagctcatacacagcatcatctgcatcccttggatcctcaaattccacaaaaccaaagcctcttttcagatcaatatctcttatccgtccatatcccttgaagaatctttccacgtccttctccctggccgctggatttagtctcccgatgaatacccgacagccactcatgatgtccggctagtacttcctaccggacggggtctttggcggctgagacccagacaggtccgtagtctgcgacggagtcgtcgacctccacgcagaccaggacttaactcgtctacgccactccacaaccgacccgctc

SEQ ID NO: 432653 - DNA, 676 bp, Homo Sapiens
gtttagttttataatattttattatcaataacaaaccgctggtctaatgtgtctgtccagcagctgttaaagagtggaggacacccttgaccctaacaaggaaaacaaattaagcctttatgtacaagcaaatttagagctcttttaagtgtccaaagctattaattagtttaattaaggcattaaactaattctgaattaacatttttataaccaagaactaaaatgttcaaatttttttctagtacaaaaaaattaaatttgctttagttataaaagagctctgtcaatatacacaaactatatacttcagacattcacaaaaatgtgagcagaaggcttatcaaaagacatttaatacaattagttttcaacaaccccttggtggtccacatctacaaagatattcaggccaacccaaccccccttgcaaaatccaccctcacggaaaaggacatacttaccagaatttttagcaggtatggtttgggaatttttggggtttttggtttttaaagggccccaaggcaagttaattacaggttaaattgcactgtcaactgatcctggaccttgatcgggaaccggaccttttgccgaccacagatgcttgagacctagatctactttgagaaccacgttctggctttttctgcacgggagacctactaccggg

SEQ ID NO: 432654 - DNA, 2590 bp, Homo Sapiens
  misc_feature (43)..(43): n is a, c, g, or t
  misc_feature (47)..(47): n is a, c, g, or t
  misc_feature (430)..(430): n is a, c, g, or t
  misc_feature (585)..(656): n is a, c, g, or t
  misc_feature (763)..(805): n is a, c, g, or t
gggacaacagggcggcggaaagaggggaaaaatatgcgggcgntagncagggaggcggggcggttagagtacggggtgggatatccggcgcacgacacggggcgtatcaacagaggtgaagcggtaaataggtaaatataggcggagacatagcgccgcgtggcggtatggaataacgccgcgtaagcgggaaacgagagcgcttggcagagtggtttatataggggcgggacagccagaggaaggtgagattggtggcacatgtagggcgggacaaagagaaggggtggggatagggggagataaagaggatgcgcgcggtacgaacagcgtggcatgagggtataaatgggtgatgaatagggcgggcgcggataaggcggtggagggcgcggcggtcaaacaagagggcgggcgcgcgggcaggganttaacggggatggaaagggcgataaaccgaacgcggcgggagaatagggaatgtggggcgggcgcggcgaggtcgtagcggaaaacgggtatgcgcaatacgagacaggagagaatagggcgcgagggggggagcggtcggggaaattcgtcaannnnnnnnnnnnnnnnnnnnnnnnnnnnnnnnnnnnnnnnnnnnnnnnnnnnnnnnnnnnnnnnnnnnnnnncataacgcgcgcgggcaagctgcggtgggtatggcaaggacggggagatggtcgcggagaggggaagaagcggaggggcgtgggggggttgtgatagggaagccgannnnnnnnnnnnnnnnnnnnnnnnnnnnnnnnnnnnnnnnnnngtacgggctggggtcgcgtggcgcgaatagggtatcagaggccggaatgcgtgggtgtgaaggagtgtttgcgggatgcggatggtggacgggtttattttgtggtttgatgcgtttgtttgttttttttcctaggtgtataatattttattatcaataacaaacagctgctctaatgtgtctgtccagcagctgttaaagagtggaggacacccttgaccctaacaaggaaaacaaattaagcctttatgtacaagcaaatttagagctcttttaagtgtccaaagctattaattagtttaattaaggcattaaactaattctgaattaacatttttataaccaagaactaaaatgttcaaatttttttctagtacaaaaaaattaaatttgctttagttataaaagagctctgtcaatatacacaaactatatacttcagacattcacaaaaatgtgagcagaaggcttatcaaaagacatttaatacaattagttttcaacaaccccttggtggtccacatctacaaagatatccagcccaacccaaccccccttccaaatcccacccccacagaaaagcacatacttaccagaatttttagcaagtatggtttgggaatttttgtggtttttgttttttaaaaaaaggcccccagggcaagttatttacagtttaattgccactgtcaactgatctggaccttgatcgggaccgggacctctggcgatccacagatgctggagacttagatctacttgaagaaccacgtttctggctcttctcaggcacgggagacctactaacagaacgggacttgctccggctccggctcctgctcctgcttcttgaccggctgtaagatttgcgactacgggaacgggatcggctacgagacctagaggaacttctggtccgggatcgagacctgcttcttgacctactgtgccttttgctgccttcaattaattttatttttctcccatttatttcctttccagaaagtttttcaatagcattctttaagtcaccataagaggcaaactcaaccaccccttcatttaatttaggtcggtgtgcatccgcaaacgttactcccccagcttgtctcatgaaatctttgagatcctgccagctgactcttgaggataattctcaactataagacgattttctgttcttacaggtggagcatttcgtctatcatttcgaggtctgcgactactaaaacggtcagagtatcgtcctctacctcttccacctcgtgaccgagccctagcatgttcaatagtaaccctttcactacagagttcttttccatcaagctcatacacagcatcatctgcatcccttggatcctcaaattccacaaaaccaaagcctcttttcagatcaatatctcttatccgtccatatcccttgaagaatctttccacgtccttctccctggccgctggatttagtctcccgatgaatacccgacagccactcatgatgtccggctagtacttcctcgaatcaactgcgctcattagacgccatcctccgcaaagagagcagccccggccgctcacgatctgagcggccatgaagaagcctcgatccgagaaggcttgccctcaaagtgagccactcacctaccggacggggtctttggcggctgagacccagacaggtccgtagtctgcgacggagtcgtcgacctccacgcagaccaggacttaactcgtctacgccactccacaactgacgcacttagcagctctggcgctccacaaaatccc

SEQ ID NO: 432655 - DNA, 838 bp, Homo Sapiens
cttcaaagcccacgaccagacagctgccaaataaaggtttaatatttggttaaaaattgatttttaaaaaacaggaaaatatcctcaaaacattttacatttgatcactaatattaaagttcaaatatcccccaaattacatttaattaaatgtttaaaattacaattccattaaatccattaatttaaaactacttttaataaaacgatacaacattagctacccattaacttttttaaaaagccacatcaaaataactcaaaactgtatttcaacaaacctgccagctgactcttgaggataaattctcaactataagacgattttctgttcttacaggtggagcatttcgtctatcatttcgaggtctgcgactactaaaacggtcagagtatcgtcctctacctcttccacctcgtgaccgagccctagcatgttcaatagtaaccctttcactacagagttcttttccatcaagctcatacacagcatcatctgcatcccttggatcctcaaattccacaaaaccaaagcctcttttcagatcaatatctcttatccgtccatatcccttgaagaatctttccacgtccttctccctggccgctggatttagtctcccgatgaatacccgacagccactcatgatgtccggctagtacttcctaccggacggggtctttggcggctgagacccagacaggtccgtagtctgcgacggagtcgtcgacctccacgcagaccaggacttaactcgtctacgccactccacaactgccgctcttagcagctctggcgctccacaaaatggcgtgctcgtcctacgtcactaccgct

SEQ ID NO: 432656 - DNA, 493 bp, Homo Sapiens
gtaaagttatccttggtaactgctcgagtagaacatgtctgcatccgccaatagtccgctaatagggagggcctgtgcgattagaggcttccatcgattgggtagtgtccttcaagtgggtggcgaagagcctgtcgggcatatgtcgtgactgtttctccgctcgcttagtggtttgctgcttgactggcctagggaaataataataaaggtgaagtgaacttttttaatgacatatggggcacaaaataactggtgtcttgtatatgttctgtttttttacataatacttctctactttagtctttactttaaaaatatgtactgtttccttttttgttgtatacttgtttgtctctttttcttttgtactgagctcagcatagactactactaccttaatgtttaaatctgaatttcttttagcattttgcttaaaagccatatgctatttgcttattccgtgccctgacatagatcgttacaggagtac

SEQ ID NO: 432657 - DNA, 549 bp, Homo Sapiens
  misc_feature (391)..(426): n is a, c, g, or t
ttccgttcgaaaagagttgaaagatacgaaattaggtggtcgttggaatcctgatcgcagtaaagtggtccttggtaactgctcgagtagaacatgtctgcatccgccagtagtccgctaatagggagggctgtgcgattaaaggcttccatcgattgggtagtgtccttcaagtgggtggcggagagccagtcgggcatatgtcatgaaggtttctccgaccgattaatggtttgctgcttgactagcctagggaaataataataaaggtaaagtaaacttttttaatgacatatggggcacaaaataactggtgtcttgtaaatgttctgtttttttaaataaaacttctctgctttagtctttactttaaaaatatgtactgtttccnnnnnnnnnnnnnnnnnnnnnnnnnnnnnnnnnnnngtactgagctcagcatagactaatactaccttaatgttaaaatctgaatttcttttagcattttgcttaaaagcaatgctatttgcctattccgtgcctcgacatagatgttacaggaccgcc

SEQ ID NO: 432658 - DNA, 727 bp, Homo Sapiens
  misc_feature (39)..(39): n is a, c, g, or t
  misc_feature (45)..(45): n is a, c, g, or t
  misc_feature (63)..(63): n is a, c, g, or t
  misc_feature (72)..(72): n is a, c, g, or t
  misc_feature (97)..(97): n is a, c, g, or t
  misc_feature (102)..(102): n is a, c, g, or t
  misc_feature (117)..(117): n is a, c, g, or t
  misc_feature (139)..(139): n is a, c, g, or t
  misc_feature (703)..(703): n is a, c, g, or t
caaagccacttggtaaaaatccaagaatttttatttaangccggngcaaaccaccataatttntcttttttnaccaggtcctcccaaaaagcaaagnattcncatccttaaatactngtattaccatattggttggatncccccttataactttaaaaatgcatgtttatagcacaaaaatgggccaaaagtttaggccaatggcttctcattcacaatatttggaataaaaataaaactgagtttgagatacatgtgaacatctatcaatttttaaaacttaaaagtggtaatgtaccattctatttcagataggaactcacattattcttgccaactgttcaagcttaacaaaaaagcttaaatatacttcaaggttctactgcattaggtataaaatctagaagtccctctaaatattaacactttgaactgcagtgctacaaacaacttaaaagatgtcccaaaatgtaaaccattgagtggcaacatcctaggctttgtagactgtgcctctgcaagtcgactgcctcaggataaactaaattatcaatgactggtatgatttttaagattacaatcttgacaatggtggacaaaaccccatctgagtaccacatcttcaaatgccaaaactgtagccaataaatgaagttacacagaaatctcctggcagtaacatgaccaattctgtgtaaggtanccctggtctaaaattttgaaacag

SEQ ID NO: 432659 - DNA, 3065 bp, Homo Sapiens
  misc_feature (75)..(158): n is a, c, g, or t
  misc_feature (167)..(197): n is a, c, g, or t
  misc_feature (297)..(337): n is a, c, g, or t
tctgtgctctgtcctttcactctctcaaaagaaaaaaataaataaattgcagaaggcggcagcatttccagtctnnnnnnnnnnnnnnnnnnnnnnnnnnnnnnnnnnnnnnnnnnnnnnnnnnnnnnnnnnnnnnnnnnnnnnnnnnnnnnnnnnnnttttccccnnnnnnnnnnnnnnnnnnnnnnnnnnnnnnngccacatttagaccttccactcatgcaaaccggcaaagaaaaatggtgggggcatgtggaaggcaggggcccgctgcggagtcccctgcttctccccccnnnnnnnnnnnnnnnnnnnnnnnnnnnnnnnnnnnnnnnnntgagaaatcaaggaacatggggaattacgatgagggcaggggtgaccccagaccctgccttaggagagagcggaggcctgtggccctgcatccctgcagcgggtgctcctcgagggggccctgacttctggaatgtgtgtgggagaggatgggggagggcaggtggcccccggtgggtctgtgtgtgcattgggggcaggtgggggcggggatcctaaggagcaagggctcggaacaaggagcccagctcccccccagaccccaggttcctggcgttcaggagcccagttctggggtgcggggatacatgcagaggagtgtcccccctccaacaggctggatccagttagaaaggaaataaataagaaggggtgggagggaggccggggggagccaagggcttgggcaattcagtccagaccaagggcccaggtgatggaggcagggcgagtccaggccaagccagggcaggaatcagagtctctctcgggctggaacccagatgtaggggcctgagaggtcctcgatgacacgcttcaccttgtggtagatctcctcaaagctgtcaccctccacgatggctgagaagcactctgtgaactcctgctccagcttggtggctctgtcgaaggctttgcgggcttgctcctctgtgatccgcttgttaatctctagcacattctccagggagcgggggcggatgaagatggcgatggggtgcaggtgggccgcctgcagccgccgcacggcattggccgagacatcgaggatgcagtgcttcccctgctctgccacctctcgcacggactggacgctggtcccatagaggtggctgttgtactggccggcctcaatgaacttgtgcgcctgaatgtccttctccattttctcccgggacgacacaaagtggtaatcccggccatctatctcatactcccgcttgggccgtgtcgtatggggaacacaggatccaaacttgtcggggaactcggagagaagatcatcgttggcgcggtccttggtgggcccaaggatgatgatggggcgagcatagtgcacttccatctgcgtcactgtctcgtagctcagaaccgagtcttctcgaccctgcgatccagagctggagccccagtccttggcctttaaccttgaccactctcgtcgctcaacccgccgtttgctggggatgaacccaatgtcgtcggtctcactgtcagagtggacccgccgtgcctgccaccactcctcatcactagcatcgatgacatgcagcacatccccaaagcggaagctcagggcctggctcaggaagccgcagtccttggtcttgtcgtaatcaaacagggccctgatgtagaaaccccttttggggttgctccgcaggacgcagtccctgagcccaggctgctgttcatgagctgttcccgaaggtcgtggatcttggcctcgaatcggctgtactcttctggtttatactgagcgatgatcgtgaccgtctgacccgcattcttcagggcaatggcagcctgctcatggctggcatttcggaggtccacaccgttgaccgacaggatctggtcccccttccgcagctccccactgaggtctgcagggcccccggccaggataaaggagatgaagatgccttcaccgtcctcgccacccacgatgttgaagcccaggcccgtggagccccggtggatcacaattcgcctcggttctcggggaatgtcttcctccccgagcaggtccttggccactggagagtagcgccgaggggaagtgggggtcatggctgtggggtagtcggtgcccaggtagctgctgtgactgatctcattgtccaggtgctgggaataagaggttgtgatgtctgggggagcatagctgtcactcaggtaggcattgctgggcttggccacctttaggtagacaacatcatacgtgttcttcagggctgccacagcatcttcatgcatgacgtcctctagccccacactgttgaccgccaggatcttgtctccaatctgcaacctcccatccttgtgggcagcacccccttcgatgatctttgttacatagatgctattatctcctgggatgtgctggttccctacgccccctgcgatgctgaagccaagacctttaggccccttgatgagcttgatctccatgaccttctcagccgggggcttccggcgcatgacatagaggcgaacgatggagcctgcctctttgagggcttccaccgccgctgagtgggtcacctcgcgcacgtccacttcatttacaaacaggatgctgtcgttgaccctgaggcggccatcctgggccgcagccccaccaggaatgatcttggtgatgaaaatggatgggtcgtcaccgatgtgtgggttgtcagtgccacctgcgatgctgaagcccagacctgagttacccctttccaatgtgatttcctcgtattccatctccccctcggtcccgttcacctgcaactcatatcctggggcttctagggtatctgtgttgacaatcactgggggagaattggcctggttggggaggtgggccgggctgtgctccagagggggcgtgtcttcatcttggtagcggtatttcttggttgtcactatacagagacagtccatgttggggggcctggccgcggcggcgggtaaggggctctgacttcatcggagtttcgttcctcccctccgtgggttctcac

SEQ ID NO: 432660 - DNA, 924 bp, Homo Sapiens
cgtttttcatcaaggccagttttgaatttgtgttgatgagaaactgatgggagactccaggatgatcaacgtcatggatggcagttgcaaaaatggcagccaggatttccaaatctgtgaagacagcgtctaatgctggtgtagaaaggagaacatgggtcgactgggctacatcagcagcgtgcaggctgttgtgatatgccacgtcagaatggtaatggtcttctaaagtcatcatgtaggttataaatgtgtcagatgagattctgaatgtctttaggaggtctctttcctggaatatagcatacatgatgcatgttaggggtctattgtgagaatatccagccacattaaagatgttaagaccccatttgttcaggtcttccagctccttggccaggtgatcttcattttcagtgttgactccaaagcgtgagatgcttgtattgtttaggcttgaactatgcattaatttcttcactccacttatctgggtcatgagctgctgctttttctttttctccctgtctttctgggtaggagatgggatctccacatcattctgcttgtctaagaaagtatttgaaatgtattcagacacctggttccctgatcggctcatctctgagaggtgtgtcagctcccggttcagcattcttttgaacttgttagaagccatctcactgacagaccggtaggtctgtatggtctctagctggtctaaacaccagtctaattcctccagcgtttccattgctaatttttgataagattcttctgcaaacaaacacacaggcatgtagttaggctggagcggctgcaggctgtccatagcagagtcaccgctaccaccgctgattccggtgctactgaaggtgcccccgtgctccttcattatttgcacgctggctccttccttccagc

SEQ ID NO: 432661 - DNA, 1402 bp, Homo Sapiens
  misc_feature (47)..(47): n is a, c, g, or t
  misc_feature (748)..(770): n is a, c, g, or t
ctgtttgttttttattgaggctcattgaccagggaaacataaatgtnccactcatctgcttttaaagtagagaacaaggcccacaaactctatttaataaatacaaattactaaaaatgcgcttagtgttgtattgtggccagttaagaacaggagatgctgggacagagcctacagaaagggcgggagaagaaaggaaatcaaaatgaagcagctgacagggacgtcagggagacacacaggtgcagtgacagccacactgcagcagaagctcagcttggaagacagaggctgcagaaagtcggtccctctaggatgccaccagggaaaagtcttcaaaatgttgttgttactgtgaccaagggcagaagtctaggcatcttaattattggatttgcactaagtgcaagacgagaccaagttgagccactcctgccctcggctcggagtcagtgcactcttgctccaccctctcagctccagaccgtgtgccctgcccaggacggcgcactcagagaccatctgggtgggggtggaacaagagcagcaccgtcacttgcataagcattgctagttttgcccctctagaattaatatattcattttaagtaaaagaaaacttatctccaaattcaaagaagttattcaatgggtaggtttttttctgtttttgcaactcatctggcagctgacctagctcccaatgaattaaatgcttcacatctaactaaatgtgtgcctagaattnnnnnnnnnnnnnnnnnnnnnnncagtgtgtgtgtgttattagagcaaagccttccacaagaaaaatacaaaatctgttttaaaaatgtaaggcttcaatttaaaatacaattaagacttgatacatttaaagtctatcaagataaacattaaaccagttattggcttttacaaagtcagtcaaaaattgaggtaatacattactcttttataaccagccttatctgattataacattttatttccttctcatccttctagttagatattctcagatacatggaagaaatatgtagaaatcagcctccagttagcgggggaaaggatatggttacgaaacagcggaggagctttactctctattcaaataatacacagaaaaaatgtaatcagccgagcggtttccatggaagcgctcattgaccagggctcaccagcgcctggcgatgcctacccttccgctttggagactggaaattcggttaactgagtttcagggatgtctaataccctcaacatttttctgacttgggagaaaacaaaatcacgaatgtaggaccgggtcccagctctgcaggaggccaccgtcgcggccacccacctgggccatcgcccaccgcactgtccagggtgcccggcgccggctgagggtgac

SEQ ID NO: 432662 - DNA, 1589 bp, Homo Sapiens
  misc_feature (466)..(499): n is a, c, g, or t
tatgtttcctgaagtgttgagccacacaattgcagatacattcccaactgggtcaaaaatgagtggagacaatgacatagtcatggaatcctgcctatcaggagcctgaccctgcagcatgccacaggttgtcagagcagtcacacctgttgggggacaggctcctgtgactcactcccctccctcagcaccccccgccactacacacacacgctaccaggttctagaaaattgtcaagttcatcgttcttatagtatctaagaccgattacagactaaaagatgtctggtcatatgttgtgtaggaaaattaactctcggctttaaataacattccaaaggccacttcatcctgtagggaagagattctgagttgggtcagctgctctgagctgggatagaaggggacaggtggtctgcttggaggcgaggaccagttgaaaggaagtctgatagagatccagcnnnnnnnnnnnnnnnnnnnnnnnnnnnnnnnnnnggtatgttttaagaaaagcaaacccagtaaaatgcatgtccctttatgaaatttcttaaaagagttcttttaaaatagttgtttctgttcttaaaaaaacaaaacaggtaggcatggccacattcaccctgtggcctggagcacggagtatcctcactttcagctcccagggagctgaggacaggcaggtcccctgaggccagaggttccagagtgcacaggcgggaggcaggcagaggccagggctacctattgcagagtctgtgcagcatgctgtacacgtcgtcctcccggctcaggccctcaaagaaggggatgaggtccagcagctccgtgtccgtcatgtcatcgaaccaggactgcacaggcactgcattctcaggatggaagatgtatgaggcaggggaattgtcaacaatgatcactttgctcagctcccgcccaaggcgactcaggtccttcacgtagttcccacgatgaaaaacacatgattctctgaagagccgggcccggaacacaccccagcggtctaggaggtcagccacagggtctgcatacttggccaagctggcagtaaagagcacacattcaaaaagctgccccatcctctggaggaactcgtccacatgtggccgcttcagcacatacacctgatgtatagttccatcgatttcaaccggaacaataaaatcagcattactaataggcttaaacgaactgtgcaccaatgtttcatctaaatcaatgaccacacatttctttccatagtcaagcaccgtcacctctggaagaaggtacttagctggtggacttggtatgggaatgacctgcctctggtcacccttctgaagcccaccattctcctccaccagtggcggaagcacactggggctgctgggtggaggggcctccacattgtaatcacggaagcagcagaagaaggagctaaggatgctgcggctcctctgcttctttaagctgacgttgcactgggaggctttctcgcccgcgcccggcaaccggccctcgtcctccttggggttggtcacctgggtgatgatggccgggccgtccatgggtgcgcggcgcg

SEQ ID NO: 432663 - DNA, 541 bp, Homo Sapiens
gcggtctaggaggtcagccacagggtctgcatacttggccaagctggcagtaaagagcacacattcaaaaagctgccccatcctctggaggaactcgtccacatgtggccgcttcagcacatacacctgatgtatagttccatcgatttcaaccggaacaataaaatcagcattactaataggcttaaacgaactgtgcaccaatgtttcatctaaatcaatgaccacacatttctttccatagtcaagcaccgtcacctctggaagaaggtacttagctggtggcttctgaagcccaccattctcctccaccagtggcggaagcacactggggctgctgggtggaggggcctccacattgtaatcacggaagcagcagaagaaggagctaaggatgctgcggctcctctgcttctttaagctgacgttgcactgggaggctttctcgcccgcgcccggcaaccggccctcgtcctccttggggttggtcacctgggtgatgatggccgggccgtccatgggtgcgcggcgcggcggccgc

SEQ ID NO: 432664 - DNA, 1005 bp, Homo Sapiens
cggttaattcccgtgaagggtttcccccgggtccccctgaaaagggaaccggtttcggtctttggttccaacccggggggaatttcaagaaaccccggtggaagccgggttcggtcccttaagccagggaagttccctggccccagcgggttctttccgggtgaatgtcaagtttctcggtaagggatcccttcaaggggttcccgggatggggtccccagtgaaaagaaggggtacgggaagcgctctccgcccgggagggggctgatgcccatgaagggggtcatcatgcgagtcctgtccaggctgctgatgctgttcatggggtgaatgcccgtcacccccaccgtcatgggcatcgaggccaggggccccgggtgcacgctggacgaggagttgggaggcggcggctccgaggcccggtgggtctgcggggcctctggaggcaggtcatggtcttccttccgctcctccttcaccttgacctcggagctcttcttggggttctcgtaggccggctcacccttgcgcggctcggcctcccggctcgaggtgctgttgggcctggcactctccaccaccggggtccgcacgtagggagacggcacccgggccagctgcttggcctcttcgcccgcggcgcgcccctcgtggccgtgcccgtccttctcgggcaggtggccctctttcgccttgtgctcgtcggcggccaggtccttgcgggattccgagtggtctctctccctctctttgggtttgtccttctcccgagcctcagtgttcagatgagcccggatctgttcagtggagctgcgggtatgtcccagggcattcaccgggaggacaggtgctggtgaagggtggctggagtgtctcttctcgacgctttccctttctttgtcatctttactaacagatgagtctcgtttatctacatctctatctctgtcatgagctgcagcggacgccctcgtgccgaattcgccacccaggcctcgcttcctt

SEQ ID NO: 432665 - DNA, 848 bp, Homo Sapiens
atcctgtgtcccaattcatgtatcagtatagtttcttgggattggatcttgacaccagcttttagcacctcctatcggcacatcaacccctgcacacttgtatgtcatcagagaagccaaagcttttacttcatctacactcacatcagtgctgttatcggatacctcccttgcagtgcgttcggtgctggctgtgctgggcccggttagccttcgatgacctccctggagccgtcgtcgcgccggatggggaaggagagactcagcacatggttgcagggcttgatgatccgcaggatgccgcgcacccggttccgcttctgctcctcgctctcccgggtcctcaggtcctccaccagcttgtcctccacgatgctggcgccgcgatcgaagaagccctccagccatgcttgtaagaagttggggtcgtccctcgcggtcggccaccgcctcgctgtagtggcgccgggcggccaatgccagccccggctgcggggcggcggcgggctgtccccgggcccagcccagcaacgcggccgagtcggcggacgccgagcccagggcagcgggcccggcccgggacagcaacagcgcttcgccacaggtagctggtacatggccacaagcggaggggaggtgcgtgatggtcgcgaaacaggcgcgctttctcagactccccgcgactagggaggaagggtcccgcgcgggttgcccttttaagccgcagcttcctgcttgcccggctgtcccctcccctcgggcgctcgccacctaacggggaggacggacttcggggacagggcgccgcccagggcgccgggcctccgcctccgccgccggacgcgtgg

SEQ ID NO: 432666 - DNA, 728 bp, Homo Sapiens
ccacatatgtggcaatattagagctaggtatatcactcagtctagaggagtgaatcttctgggatttctatacttctgtgtttccagaaccagcacgttacaaagtcatctgttcacatgaacatgtctattcatacagtttgctaagcaaatgaccactaagatctggagaacccatagattctgggactttaataagttttcaagatttttgtgctgtttcttcatccttcagatatcaagcatggttgactgtataaaagctgaattctctgtttccaggggtcagccacagacacttaaagaagctgtgtcttctgatactgtgattttcagtggagcaattggagcaccccaacaaatgtggacttgagatcctccactcatgatttcttaatcttttgaccatcaaggaaaattcaggattcaggtcagagtacatttttcactcccctccgcttgtggccatgtaccgctacctgggcgaagcgcttgttgctgtcccgggccgggcccgctgcctgggctccggcgtccgccgactcggccgcgttgctgggctgggcccggggacagcccgccgccgccccgcagccggggctggcattggccgcccggcgccactacagcgaggcggtggccgaccgcgaggacgaccccaacttcttcaagatggtggagggcttcttcgatcgcggcgccagcatcgtggagacaagctggtggag

SEQ ID NO: 432667 - DNA, 1023 bp, Homo Sapiens
  misc_feature (684)..(684): n is a, c, g, or t
taagctaaatatcaacctatagataaagaattgatcttgacagtctgacctatgacttagaaaactttggtgctgggctcatggggccagcgcctgcaccttgggagagtgtatcaacctgaaagacactacacagagtgctgagcactgagagggaagcaggcagggtccactggcagagaggctgtgtgagagaagcagattatgctccttggtctattttgtttcctttgggatctgtgttttgggaaggtccctttcctgaggttggaggttacgatcaggaaggctagctggggcgcgggcctccaagttgcccaattacttcttctcttcctctcttggaggacaaaagtcaatgctgagatttggcctgccctcccgtctgtgtttaaaggcagtgaggtgcaaaggtgacagatttctctctttggagcaaaggagaattgtctttctgtcacttcaggagtgatcttgcctcctgtcacccttgattctaatcttgcattaccactagttgaagaaaggaaagctagacagaagggcatctattatcactcctccttttcactctacaaataggagtcagcaattctgctcattctctcctcccacttgacagtagttgcttgatgtctgtgacattcccaatatttgtatttcaagtaaggagcaagagaatgncagtcttttctaaggtctggtggtaggcaatctgttccagggaattctggatgttactaagagtaaaacaaggaaggggatgggagacagttctcttttttatagttcatgcaccagacattctgaccatgttaaagcccagttagcttactctacccttgtacttctttgagtgggcagatagtaaatgaattctattcaattaattgcaaattctgagaatcttaattgatgatggaagctgacaagtcaaggtttgttggtacctgtagagaaaaaagatgttgcctcacctgggcctcttggttcctaaactgaaccattccacccacgcgtccg

SEQ ID NO: 432668 - DNA, 449 bp, Homo Sapiens
  misc_feature (432)..(432): n is a, c, g, or t
ttttttttaagctaaatatcaacctatagataaagaaatgatcttgacagtctgacctatgacttagtaaaactttggtgctgggctcatggggccagcgcctggcaccttgggagagtgtatcaacctgaaagacactacacagagtgctgagcctgaggagggaagcaggcagggtccactgggcagagaggctgtgtgagagaagcaggattatgctccttgggtctattttgtttcctttgggatctgtgttttgggaaggtccctttcctgaggttgggaggttacgatcagggaagggctagctggggcgtgggcctccaagttgcccaattacttcttctcttcctctcttgggagggacaaaagtcaatggctgaggatttgggcctgcccttcccgtctgtgtttaaaagggcagttgaggtngcaaaggttacaggttt

SEQ ID NO: 432669 - DNA, 469 bp, Homo Sapiens
  misc_feature (459)..(459): n is a, c, g, or t
atagaaaataaaaactttatttttttcaagtttataagatagttcccattacatataacattacggtcacggattctacagccacaaatgcccgcagtcacataaatatatccaatccaatcaatgccttttcctgctaacagaggcatctgaagttcagagggagagtcgcattttgagtagaagtcgtccttaatgggagggctcctgtcagtgcattaggaactagccaaggagccttgcttgccagagctgtctgactcagagggagagggaaggggacagatgggcctgctggactggggggctgagggcaggaactaggattttctctcttgtgggttttaaggatattttttaggaattcttcggggaatttcaggatccctattaggttgttggaatattctgggggggagtttcttaactttcttggggatggaaaaaaaggggaaaccntttttaggtg

SEQ ID NO: 432670 - DNA, 2946 bp, Homo Sapiens
  misc_feature (204)..(223): n is a, c, g, or t
  misc_feature (1446)..(1454): n is a, c, g, or t
gtgggatgtccagatcgcttacaccgccagtgccatttgtgcgttcgatttccactgctgtttgttccaaggccggcccatcagggcatttcgtgaatgagcgatgctccacgcacgctccataccaatgtccccccaaccagggcacccctcgtccatttgggggtcctcctccagagcgacctcctctggcgcctcggaatnnnnnnnnnnnnnnnnnnnnttcgtttcctcctcggccacctcggcctctatggtatggtccaggacctggtcctggacccccccgcattgggccaccccgcatagggtcgcccgggccatcccagaagggatcacctccccggggagggggtggaggaccacagaagacgtggacccactggcccaccagggcctccatggggaacctggcataggtccccccaggtccaggggggaaagtgctgcatgcccttggggcccccaggacccccctggtgggaaaccattgggtattgggccagggcttaggagtccatgtggcaccagcatctgcttgatcttgtccgaatagtctgtttgtttcagtagttcctctgaagggatgactgtttgggctacccatgatggaggtgaggatctcttggacattaatgcctcctcctccagggcttggggggccctttccagcacccatgcttcccataagattggccagaactggaggcaacttggagcctcctgccccatcaggtgagccacctgaccccccaggttccagagtctcaacatacggagtctcatccatggaacactcctcatctagggggatgagtttagggggtatgggctcgtagggctcaggatcaggctcatgaaggactctccttggttcaggaagagctccttgaaaggattcccttctcccgctcagcctggatatatcgctcctgactattgcttccaggggtgacaagaggtgagggcagaaccaggggccgggggcacacccagggcaccttctcctccatgttatcatggctcagacgccgcgctgtctcaaatgcatgtcggtctgacagtatctctcgcttagccgcctcaccaaagtccttgatcttattcacatttactcgttcagtttcatccaattcaaaatagaaatattctctcagtttgccttcctcaggccatgtcacacttttcctcttcctgcctttccgggtcagttggttaggatctccaggactctccactggcttggcatccagagctcctggctccaaagaggctgtatccatgagctccgggacttcaacagggggaaccggggtgcctggacggtctgcgtccattgcctcagaaggtggtgctggttctggggaagaaggtttggctgtgcttggttctgtgctcgttttcccttcaaaggggcttggcttggcagccgtaggtgacagtacnnnnnnnnncttcttaattttgatgcctggaacaggggctgaattaagagcatccagaaagcccaggccctccataggctgtggcgggatgatcttcactttgatctctttggtggcattaggtgttgtgttgagtggcttgtatttcttctctgcagggggagtggcatctcctggagcagctacgttgctctgacgtttgagggggatgggtttaaggttgtacttgtcagaaaccaccactgtgctggcattcttcttcacaggcaccaaggatggtgtctccagctctagtccagtggaacggaacttggcatgactgggtgctgtggtgcgaagagacttgggcttctccctcttcttctctggggcctcctcagcccgggtctcagccttcacctctgtcaaaggtcgctcaggaagggtagttcgactttttccttcatctttacgtttcttcttatctttctcagcaggctgggtactgctctgagagcggatgacagccatccagtcgctgacaaggactgaggccaatttccggagctcttcatcctcacttgacttgctcagctgcttcaccagtttagctgtgttgttctgcttgagatggtctacagtgagcggtagatgctgcagggtcagtagaatttgctggaggaggggaatgttgttggttgtctttgaatacgtcagccaattgttaagaagtttgtagccgccaacgtcaataaatttgaccaatatttctggtgaacgggtctgcaggagaatgttcaagtaagtgcatcgactcaccatctttcgtgcttccttcatcaaactgaagatcttggaaatcccatccacacttttgacttccccatctcggttaaggaagctgtccaggcccttgagaagttctttggggtctatgggacccgaacccatgatggtggttttatccaatttttttgcgacgtcagcacctcgggctcaggggggagggggtaaaattttggaggaaaaaaattaaaacaaccaaccaggacccaaaactcaattatttagggggcctcattggatcaaaaagtcttttaaaaaataaaggccaactcagtattcatttcccccccacccaactccatttagggaggggggtcgcagaaaaaagttctgagtggattcaaaaaagtaaacgctggatgagtgaatttgggtggtttgggaagggagggtggttgattatttttgaagttatgtagtgacggtccttcggccacagatttcaagtcccaagcagcgtgggctggtggggtgggcaagataggtgggaaggggcagaagacacaagtggttgggctggtggctgctgttttccctttcccccctctctcaggatcctttcaagggcttagatgttgctgcggcttgtttctgttttcctcgtggccggcctgtctttctccgagaaaattcaaacctctaaacatcccgggaattccggaccggtaccagccgt

SEQ ID NO: 432671 - DNA, 502 bp, Homo Sapiens
agggcattcaaaagcccacccgtgcagggccacgccatccacagtaagccaacaggagggcagctgctctcacccacgctcatctcgggtcttgggtccaggacaggttaccggtagggaaggtgccctccagtcctgcattgaccccatatgttgagagatgttatatgagccacagacaaagcaagtcattctctacccaccccacccccgggacaggtgcatggcagccccaccaatagggaggagctaactgtgactacttgggggcttccccctgagtctggaggaacacagtccaaggctgtgcaggggaggtggaagtagggggtttctgcctggatggcggctgcaggcctgtcaagcgtctgtgccaagcccactgaggtcaatggtgagcggtgtccacatctgtgtgtggtggcggtggcctgaggcagccacacaggctgtgcactgatgttggtggctctcactaggtgcgagtggggtgtattttgtc

SEQ ID NO: 432672 - DNA, 1132 bp, Homo Sapiens
  misc_feature (92)..(100): n is a, c, g, or t
ttttatttgtcccaccacagggccgcctttgtttggagggaggctgtctccgagagattttgccaagagagggttttcgagacccggagggnnnnnnnnntcgggtaggaatgtccttcccctgggcggatccggccatcttttttcccagggtttgggaagtcccttcataatcgggtctgggagttttccctgaatgggtgcccgtcccttcttccttggcaactggtgtttccaggtttccaggatccttctggctttcagcccgggttaatgaccccaactggcattggggccttttctcttcccagagtccggaacaaaaatcccgtgccgcgggctggggatcccaggagctgctttatcttcgggtcctttccttctgttttcctccctccagggcgccggagtttcgttctcctcaggttccacgtcgctcttctgcacgtgcaatgacttctttaactcaataatctcgtcatacatatcttctttttctctgtagacaggagtcccagggacatgaccgttgctggcagagcgcctgagatgtggcctcttcactctgaaggtgtctgtcagacagtcaggagtgccgccggggacgccagtccacgcatgctcccaggtgaggggtgagttcagggcctgggtcagacttcctggctttgcggttcccagccacagcttctgcggggtcagggacgctcggccgcccagaggcatgctccctgccgtcctgagggacctccaggaggccacttttctcggcttagagagataaggtgactttggcgatgtgggtggaggtttgtggaaagctttcctttttgctttcgtctccacatcagagtcaaaggtgactgcagacagactgtcatctcccgtgtccaaggccggctccccggtgcccaggaacatggtggcggcgctgcccggccgcccctcagggttgctggctcgggcgtccgggtctgggaatccgcgggcagccctggccgcccgcagcctcggggccttccctggcgccggcccgcgaccccgctgccatggcaaccaggccgccgacctacccagccgggtaagcgacctgcgttccccctggcctcgtgccgaattcgccacccaggcc

SEQ ID NO: 432673 - DNA, 1442 bp, Homo Sapiens
  misc_feature (27)..(27): n is a, c, g, or t
  misc_feature (44)..(44): n is a, c, g, or t
  misc_feature (60)..(60): n is a, c, g, or t
  misc_feature (72)..(72): n is a, c, g, or t
  misc_feature (121)..(121): n is a, c, g, or t
  misc_feature (139)..(139): n is a, c, g, or t
gttttggggcccaagttctcctctggnaaatttggaacccgtcnccaaccagtggggtanaatgtagtggcntgaaaaaccagtaaaagggggcatataccttcatcaaattttggggaancaccagtggaagctgacntcccatttcttgtgagcagaaattccagggtgctgaagttaaaggtgtccaggaaaaagttactgaaagatttaaagccctggctgtgtagtagaatcctgcaaaagccacaaatggccctttaatctttggctgataaaccccatcaaaagaacaggtttcttgatcatggcaagctttgaagtcaaatatggaagccaccttctccttacacagagatgggtccccagttccttcaaaagtgatgacatcattggggttataactttctggcctctggtccacagtgcacaggctatcaaatacatggcccatggtgaagctgatgctataatcccgagggtaacagggattggtgagatggtttttggtaggagaattctgcaggagcattgccagaaacttttttctcaggcctcatttcggccaatagcactggaagcctgtgtgtgtagagcgtgtatacgtaggcatacagggacacctgcatgatgtcgctggtgttcagatccatcttctctcctgccacgaaggatatttgggtggaggcaccacctaagtccagggcacccgtggtttccactccatgcgggtgcacccacatgtgccacaggttcttctccaggaaatttcccattaaatagttggctgtaatccatccatataccccttcttcttgcccagaaatgatttgagcacccctaaagtcaaagggctgggacttgaagtagctttggatgctttcaaggacttcattagctgctgtttcattttgcaacctcagcaagcgcatcccagccgtggctcccaggtgaatgggggtggatccgtggaggtgggatggaacctgccccttgactttttgcatacactcctcaaaggctctggggacatcttgggggttatttccatagctggagattccagagcctttcacactacatttgaaggtttgactgaccactccggtattattctctttttctgctggccattgatacacgtagactgtggttcttgaagacccggcatccagcacaataccatacttcagtcctggagggaggacctcttgcttgtggatctggatgacagtgatactcacaagtaccacaatactcacaagcaagaccaccaaggcaatgatggttggagttcggtagagggccttgaggcctgcttgctcacatggttggcgggtcagcacagtgaacatcttttctcctagctgtgcggagccgattcggagaaggcgactagcgctgccgcagaggcggcccgcggccagcgctaaggaggtgtc

SEQ ID NO: 432674 - DNA, 795 bp, Homo Sapiens
  misc_feature (151)..(180): n is a, c, g, or t
  misc_feature (728)..(728): n is a, c, g, or t
  misc_feature (756)..(756): n is a, c, g, or t
  misc_feature (763)..(763): n is a, c, g, or t
actcgttttgacttgaacgtgttacaagcaggctgtacggtccggaatctcgggatatcgtcgacccacgcgtcgctttcaggtctctctggaggactgacagggcatgagggcaacgagaagggggctgggccggagtccccagtgctcnnnnnnnnnnnnnnnnnnnnnnnnnnnnnncctggcggtggcggatcagtgtagccgactttgccagctccctgctgggcgccctccactgctggcactatcgggccaacgctttacttttctcccggggcgctatgggaaaggggcgcagggagtctgaaagctccaggagcagcagaaggcccagtggccggtctccaaccagtactgagaagcagcatgagcttcgagtccatttcttccctgccagaggttgagccggaccctgaggctgggagtgagcaagaggtattttctgctgtggaagggcccagtgccgaggagacgccttcagacacagaatctccagaagtcctggagaacacaggcttgatgcccaccaggggccttctggtggatggaccccccaggtgacatggtggacttcgtggcagctgagagcactgaggaccttaaggccctgagcagcgaggaggaagaagaaatgggaggtgcccgccaggaacctgagagccttctgccacccttcgtgctggaccaagccagcgtcattgcggagcgatttgtcaagcagcttnttttgggcggagcagcgtggcacaagangacagcnagtccagtggcttttggagcccgcggctgtta

SEQ ID NO: 432675 - DNA, 682 bp, Homo Sapiens
  misc_feature (554)..(554): n is a, c, g, or t
  misc_feature (604)..(604): n is a, c, g, or t
  misc_feature (614)..(614): n is a, c, g, or t
ctggttttctgtgtggagggggagcagggatatctaagctgtggtgtgaagttcagtatgttatgatggaccaataattctgccacttcgggtttctccctacattcctgctccccagttttcatgtggggtactcaactgacattcccatggggtttccctcccatctgcctgatccacctcctcctcccaccaggagagttgggggttggccacaattgatctcttgtgagaggggtggctaccagtgtgtgtgtgggggtcatcactgccttggggaggagtggggcagggcagagaatccccccaattcctgcctgaaatctctggcctcacccctgctgggggttggactgaaaaccctcctccccaatttggggggtgttgccccatcactgcccagctcctctgactgccccccctgaatttagggtgggggtactagtcactgccaatgtgtgtatgggacttgctggaaaacggggatgcttgcccctctcaggactattgagcccagaagagagctgtcctctcatttgggtgaactgattgangaagggtctattgtctttttaaatggcaccaatttttaaggggttttgangggtacagtncctttaacctggccacggggaggggggcccccaaactttttttcccccacaactttctgggtttttgg

SEQ ID NO: 432676 - DNA, 1242 bp, Homo Sapiens
  misc_feature (56)..(111): n is a, c, g, or t
ggttactcattacacatttattgtacattttcacaatctggatgcgccacaaaatnnnnnnnnnnnnnnnnnnnnnnnnnnnnnnnnnnnnnnnnnnnnnnnnnnnnnnnntctagaacacagcacccccacctccagcatctctcctaccctttcacaccacagcttagatatccctgctccccctccacacagaaaaccagaagtgtggggggaagaaagtttgggggccccctcccgtggcaggttaagggactgtaccctcaaacccttaaaattgtgccatttaaaaagacaatagacccttcctcaatcagttcacccaatgagaggacagctctctctgggctcaatagtcctggagaggggcaagcatccccgttttccagcaagtcccatacacacattggcagtgactagtacccccaccctaaattcagggggggcagtcagaggagctgggcagtgatggggcaacaccccccaaattggggaggagggttttcagtccaacccccagcaggggtgaggccagagatttcaggcaggaattggggggattctctgccctgccccactcctccccaaggcagtgatgacccccacacacacactggtagccacccctctcacaagagatcaattgtggccaacccccaactctcctggtgggaggaggaggtggatcaggcagatgggagggaaaccccatgggaatgtcagttgagtaccccacatgaaaactggggagcaggaatgtagggagaaacccgaagtggcagaattattggtccatcataacatactgaacttcaagacacttacataccagctgggggagggagaggagggtacaagaggtttggaaaatgagggtaagggaggcaaactggactagaggggctaggaggaggcaatgctggggaccagagcagcctggttccccaaaagcccaggctccccaccacctgcgagtaatgtcgtgcaaatgaaaatgtgatacaagaactaatggggactaactcctcagtaaaaaaagaaacacaggttgagagaagagtgatggaacaaaaagaaatggaaagggatagcagtatgtaatgatacgctaattaacatgctggacgctcccaaagaccttgggattcttaggaccaagtggggccagtctcagagcctcccaatggatacaaagaagatgtacctaaggaagcctggacaggtagtccagactagccccga

SEQ ID NO: 432677 - DNA, 363 bp, Homo Sapiens
  misc_feature (312)..(312): n is a, c, g, or t
tagaggtttggaaaatgagggtaagggaggcaaactggactagaggggctaggaggaggcaatgctgggaaccaggtctccccaccacctgcgagtaatgtcgtgcaaatgaaaatgtgatacaagaactaatggggactaactcctcagtaaaaaaagaaacacaggttgagagaagagtgatggaacaaaaagaaatggaaagggatagcagtatgtaatgatacgctaattaacatgctgggacgctcccaaagaccttgggattcttagggaccaagtgggggccagtctcagagcctcccaatgggntacaaaggaaggatgttaccctaagggaagcctgggacaggtgcttgttgt

SEQ ID NO: 432678 - DNA, 1509 bp, Homo Sapiens
  misc_feature (29)..(29): n is a, c, g, or t
  misc_feature (1432)..(1468): n is a, c, g, or t
ggggcctaacccccaggaaactaccctantccccccccatttattgcctttggaaacctgtaaatataaattctgacagaacaatccagatttcctaagatggaaagcacagtgtttgtgccactttgaagttgaaaaagaaggtgcactcttgatcactgggaggagagctgctgagactctcctctccacaactcatatcttcacaagagtcctcactttcactttcatcaaaacaacccccctcaggtatcgttggcagctcaggaacactatagtagctgttgtggaggttctgggctgtgcgccttgaaacgatccaaaccaacttcttaagatctggtttgcaacattcaggagaagaatactcggctaggcatttagaaaccaactctctccagtagaagaactcagtgtcattaatcttggaatgttttttaactagcaagagaatttccagtaattcaacagatttcaaagtttccacttccaaattgagaaggcacaaggctaatacagatggttttgcttttgaaaagatgagtcggcagttgcaagctttcagctgagcttctagtttatcaaggctcagtatttctttcctttctgaagtatgacaaagtataatagtatggtataagtgcaaaaagtttaaggcagtagtagcttccaattcatagtgcaatttttctgaaattattttttccatccgttttatgtcagaagcagtacatttacactgactaatccggatcacatcatgagtggatggaatattgcagtcttcttcaactattctagcagccagcaaaaaagaacagactccaatgcaagacaaatgtttaggtttcaccttcataagagccaagaacctgtccaaaatattgacagccaggacaaaagtttcagtgcaagatccaaaaaagttggctaaactccttaaatcttcaactttggcatttctcaatcctggacacaaagtgttatcattctccggggtagcctcaatcaaactcagccctttttctcgaggttggaatctctcttcttgttccaggtagacgttcaacaacccgagaagttggaccccttcatgacctgccaagtgctctgcccccaaatccttcatcgtgccggagacgcgcctccacccgcccgcggcctcgcggtccgcacggactgggcgcagcgggggcttccaaacctgtctcgcaggtcggggacccaccgcctacagcggtgcccccggtccggcatccgacccttcctcccaggcaccgccgcctcggcctcacagccccggctccatcccgctccccgcgcgcccaccctccgccgcggcgcaacgccggccgcggaagaccagcccaccgccgcacccccgccgccccccgctctcgacgaattcgagctcggccgatttggcctgatnnnnnnnnnnnnnnnnnnnnnnnnnnnnnnnnnnnnncgccgccaccgcggtgaactccagtcgcccatagagtatca

SEQ ID NO: 432679 - DNA, 1099 bp, Homo Sapiens
  misc_feature (172)..(172): n is a, c, g, or t
cagtattccaagtttctaaaaaatatattaatagagaaggttactgatgacttaacctgggttttaccatcatcttgggaaagctataacatctccatattttaaaatttctgtcaaattttacttgcttgatgcctctatatcatgtacaaggcattgtgtaatcaacccnccttatggctctgagccaccagtggatgagagttgacaaaacaagccagacaccaaaggaagatgcccagggctgtcccctatgccaggggcctccattggggaacagtatgtaagaggaaggtgtgactgggggttagggatgcttaatgagaggagaaccagatgatcagggtctagcaaggcctgtgatcacaacggacacagactggcaccgcaccactgttcatgtactgactagctctgagtgtggcctgcatgatacaaagtgtgcgtgccgtgagtgcagacagttgtctgaagtgtggagaataggttgatatagtcccaaatacaccatgcatgatttccagacacctctcacacaggtctagctgggaagcaaacagtgctgtcaggatttaggaggtggtggttggtgggggcggtgacacaaaaggtttaacttgaaacattgtgttaaggaatgaactttttaatgtttttctgtttccattctaacaaacatgcatttttgccttcagaaaataatagagtcaatagctgtgcagagttgaagaaaaacgtcctctggtgttccctctgcatttatcttgtgtagctgtgtttttgtctcgtagtaggcgatcacggggatggacgctcggtagtaggcttctaggcgcttggcgatggtcttggtggtgtcgtccacaggcaggctgctccggctcctttggagaaggcggttggtcatggtgtctgccgagcagtccatacagatcaccaactgtgggtctccaatcctgcgtccgaactcttccccttgcttcacctcccgaggatagccgtcaatcaggaagcgcctggtgtccccgaggctggccaccatggcctccttcaggagctccaaaacgatgcctgagggacaaggactgtttgatctgga

SEQ ID NO: 432680 - DNA, 1357 bp, Homo Sapiens
  misc_feature (218)..(331): n is a, c, g, or t
  misc_feature (451)..(463): n is a, c, g, or t
gctcccttcctattgtggagtctcttgtttgttctctgtcgcgcttctggtttgtcctctttttcttcttctctacctgtcgctgtatttatcgtgcgtccttgcttgttcgttttggttttttgtttcttggtgttccttttctatgtgggctcgcctgttgttgtggcgtcttgctgcctgttggttttctttgtttattttgtgtctggtcgccnnnnnnnnnnnnnnnnnnnnnnnnnnnnnnnnnnnnnnnnnnnnnnnnnnnnnnnnnnnnnnnnnnnnnnnnnnnnnnnnnnnnnnnnnnnnnnnnnnnnnnnnnnnnnnnnnngttctgtctgtccccgttattgttaatttgtacactatccacttttcacagtgaatataaatcgactttcaataccattctatccccgaaatggatccttatctgcacaacccttgaagnnnnnnnnnnnnnttcatgcaaactgaaactatgcttttttgtagtgactgagtggaagatgcagttattccagtagaatatataagaagctctgattttacaactgattgatagcacaaaagagaacccaaacttcactggtttaatgcaaggaaacacagttttgcatatgggtatgacaaggtttgcaaactcctggaaagggcccatatgaaacaaacacattgaacacaccacttactgacatgcccctcccacccacatcaggtttgttagggtatttttttacttgcttggcaacaaatacatgggtgaccatttaaaatcaaaattataatttgatatgtgcccaatgaatgaaatagcaaatatctcatgcttttaagttacttttggtcatttatattaatttataattgctgaaatgcatcaccatgtagagaagagactaggttacacaatttatcagatttgttctcttagccataatgacagtattccaagtttctaaaaaataataataatagagaaggttactgatgactaacctgggttttaccatcatcttgggaaagctatacatcttcatattttaaaatttctgtcaaattttacttgcttgatgcctctatatcatgtacaaggcattgtgtaatcaacccaccttatggctctgagccaccagtggatgagagttgacaaaacagccagacaccaaaggaagatgcccagggctgtcccctatgccaggggcctccattggggaacagtatgtaagaggaaggtgtgactgggggttagggatgcttaatgagaggagaataggttgatatagtcccaaatacaccatgcatgatttccagacacctctcacacaggtctagctgggaagcaaacagtgctgcc

SEQ ID NO: 432681 - DNA, 454 bp, Homo Sapiens
tttaaggaatgaactttttaatgtttttctgtttccattctaacaaacatgcatttttgccttcagaaaataatagagtcaatagctgtgcagagttgaagaaaaacgtcctctggtgttccctctgcatttatcttgtgtagctgtgtttttgtctcgtagtaggcgatcacggggatggacgctcggtagtaggcttctaggcgcttggcgatggtcttggtggtgtcgtccacaggcaggctgctccggctcctttggagaaggcggttggtcatggtgtctgccgagcagtccatacagatcaccaactgtgggtctccaatctggagatgggagtgggagcacaacacagtcagaaacctcaccctgcttgatgttctgggaaaggcccagggctcctggttttttcctttcttgggcctttggttcctttcaaggtcccagcattaca

SEQ ID NO: 432682 - DNA, 937 bp, Homo Sapiens
  misc_feature (537)..(635): n is a, c, g, or t
agaaattggcatgtattctgcaaagacttgttttaggccagttttaccccatctgctaaacgcaatgcatagtctgtatcaaccagaagaacccatctctaaaaacatcaatgttgatagtcaaagaccactgtgttagaaccaaaatcaggtcttgtatgattacatacatcagacagagcaatggtggcacaggctgagcatgacaatggctcatatgtttgacgcaaaagtaaacaaattcatggatgcattcaggaggaatgccttgcatggacaagggtaaagttcaatttaaaataaaagctccctaatattctcatagggcaccagctctaaaccggtctgtagaagagcttttgggctgaaacatctgccaggaacattgccaatcccatcactaccttcatttcctagtgcaaatggaaggtgcagctgtttgaaggtgctttttaaaagatcaaaagatgacttgaagagataaaaatgttttaaaaatgaacaaatctggcatggtggctccatattggataatcnnnnnnnnnnnnnnnnnnnnnnnnnnnnnnnnnnnnnnnnnnnnnnnnnnnnnnnnnnnnnnnnnnnnnnnnnnnnnnnnnnnnnnnnnnnnnnnnnnnatataaataaatacacttggagagtttttggttttcagaaattaaagtcaggaatttcattagtacagaaattaaaaataaaaacctactaccaaaccaaaagaccactcatataagcaatctggccataaaatacctagaaagtaatattgaggactgatgtatcaaggagccaaatgaattccttgaccatttctagttggaccaggtgccatgagatacagcattcagaggaagtgtccatttttagaggatcatatgaagaatgaagcctggcagtgatttattttttaataaagcta

SEQ ID NO: 432683 - DNA, 747 bp, Homo Sapiens
agcgtggtggctccaggttgtttttctccggtacagcctggtagggagggctcccggcatctccctgcttcggggcagaggatgccgggggtagagtacgggagggctggagcgagggtggactggaggtgccgcttgtcctggaggtgggagagagggagcggctttgccgcctggcctgcgtcctaatcctgtcctggttcttctgctcccgaagggaacgtaggtcccgcgcctgtgataagtaaggttggattttctcttccctgaggtgaaggatgcccggaggcctcggcaggaccgcgcggaaacgggccttctgcccaaaagatgctgcttctctccttattctttcccctcagaatctcgctgtctccttccaaccacctgtggtcggcatccccgcgttgtcactgcgacgcagaggcgagcgaggtggcgggaagcacccgcggggcggggagggaccctgcgggcgcggactccacaccaagcctctgctcagcgtcaccccgcttgctgtgtcctcgcaggtcgcagcttcatggcctgatgccttcaggaagtattttgaaagtcatcgtggctgtggattgggggatttcttgtttccactgacctgtgaggccgcgcacgtggagggaggcacccccgggtcctccggcactgtccggctcgcctgtgtccctaggtagcagtggggcatttcgagacggtgcagcttgtggtaaagtgaccggaagatgt

SEQ ID NO: 432684 - DNA, 470 bp, Homo Sapiens
tgagccaatgtgcccggcctatttgaattttttaatcatatactttcttttgctatctgttaagttttcccctggactgcacatgaattactcactttgttgtactacttttttaagtacctgcaagactgtcatcagaagtttcacaatgtcacctaataaagcccaccgacaaactgttttatgttccagtttcacaactgtaagatcacaagatctgcattcacctatatgacatttttgtcttactcttcatcaactctctatcagaaatcagcaaacattttcttgtaaagagtcacacagtaaatattttaggcttgtaggccattacagtctctgctgcaaccagtcaactctgcctttgtagtgtgaaagtaccaacaggcaatacataaatacatgagtatagctgagtcccaataaaaattcatagacaatgaagtctgaatttcatacaatttccaagc

SEQ ID NO: 432685 - DNA, 552 bp, Homo Sapiens
tgaatgaattcatccatttattcaactttccggtatgcaagaacttcttttcatggagtgtcacggaggccctgagggaggaacggtaaactggggcaggggtgtgcatagctctaggaacaggtttaaggtctaggctttagagttggggaaaggggagctattacagatttcaaaaaggccataactggccttaacctgtgcaaaatcttgggggtgaaagggcagacagggagtcaggctggaggtgatggagaagtgaggaatatggggaggtcgtggtagtagagttcacattgagtggatgtgggttctgagtcagggaaggtggtggcactttgtgtgttgagactgggttggtagaagaacagagctcaccacatctctggtgtggagggagaggggaaaagagcagtatgtgagggcaggtgctcagctactgcttccttcttggagcaggtgaccaaggagtttggctatcactccctgcccatcccaggctccctgcttggggaggggcctccactaacctccagtgttttatgtttttag

SEQ ID NO: 432686 - DNA, 1105 bp, Homo Sapiens
  misc_feature (19)..(19): n is a, c, g, or t
  misc_feature (50)..(50): n is a, c, g, or t
  misc_feature (599)..(607): n is a, c, g, or t
  misc_feature (625)..(634): n is a, c, g, or t
  misc_feature (897)..(897): n is a, c, g, or t
  misc_feature (1015)..(1015): n is a, c, g, or t
  misc_feature (1054)..(1054): n is a, c, g, or t
  misc_feature (1062)..(1062): n is a, c, g, or t
  misc_feature (1082)..(1082): n is a, c, g, or t
  misc_feature (1088)..(1088): n is a, c, g, or t
agaaggcctgacgctggcnggaccctgcctgcttgcccttccctcctcantccctttggaaagaaagcttgccccccagaacagcagagcttccacagggttaccctggagcacagaggtggctaagtgtttgtcttccaaagagcggttggttcctcaaggagtcaagagaggaagctgaaatattagcagagcaagcaattaaggagcctggccagaggctgcctagacaaaaccaaaccccaaaacaatctgtctgtagataaagcaggtaatctgccaatgaatttcgtgcttataattgtaaatcttttcacttcctttctctgggtaacaagttccatagcaatgttcttgtttcctttttcccagaagccagtacaattgctttcatgcattgaatatttaattccccgctcccagataatttccaatcatacttggaattttcagtgctgttcctcttctttttccaaggcctctaaatggttgactagtattgtgtcaaattattatttcgagccaataacaaatttacgttccttaactgttaagtgggccatacttcttgtctaataaagttaggaatttaagtgttnnnnnnnnntaattaaaggaaccagannnnnnnnnnccccttgaaattcagacaatattaagggcaggaagggttttagagatcatgacttattcaccaggtaagaaaaccaagacctagaattacaaatctaccagttgacagagcacgaactagaactcaggcacccagacttctgggccagttatgctccaccaaacttacaaaaagcatctacttggtttccatagtgactttccttcctttgtttttaggtaaatctcactgatatgggcttattttcccaatatttccagggntaagggcagtaaaagggtagggcaaagggaatagtttatatcttactatggccagtgggaggaatggaggattacatttcaatttggcatggggtacatttcttatggcccatttttnctggacgcttgaaggaggatggaagttgttcaccgtttngttttttntgggggcacaaggttttttntaggcnggggggcctttgggggg

SEQ ID NO: 432687 - DNA, 857 bp, Homo Sapiens
ttagtcatttcagtaggtcaggtaacaaagtccagtctgttttatttttaacccaaatattccaaatatacagaaaattaccagtacaaagttaaacacattcagatttatttacacaatgctaaagaaatttgagttttatttccattttgtggaattttatcatggggtctggctttaatgtgtaactgacgtgggtcactgaaactcgattatcccacctcacatgcaattttctgtcctaagggaatagaaaacttgggtttttagggcacatgcagtaatgatcttaatactgctttacactttcgtgggaaggcagctgtcccacagcctggggaaggaccacatgctcagaaagggaacaagagagagggctgaacaacaggcacatggggaccctgagcatttctgtgcacgaggataaggagagtatgaccaaaaccctcctccctagaggtccaaacacaggaggtgggccaaatcatcagggaacagtcagtcacccgcttgtggctgagggcatgcggaggatgagaactacattaaggatctggggcatagcaataaatcattaccatgtacactatacagtttatatatgtatatatgtacacacacatatatataaaggtacagattagtttatgttattccttataaacaagtacacttaagaatgtactggtgtgaagaaatgcatactgcaagttgtttcgacttagtgttctgactcttgttattatcatgcaacctaaccaagaaatcaacatgctcctgctatttccatgatgcttcctgagggcaaggccgggctccgccagggcagatggtgctcctagagctactgagttgac

SEQ ID NO: 432688 - DNA, 2544 bp, Homo Sapiens
  misc_feature (72)..(85): n is a, c, g, or t
  misc_feature (2384)..(2384): n is a, c, g, or t
  misc_feature (2442)..(2450): n is a, c, g, or t
gctggaccggtccggaattcccgggatatttgctactagtttattttgtggctagaaagcagttttgtgtgnnnnnnnnnnnnnnatttgaagtgccaaattaactttagtcagaatgtgagcagatggctaagttctctcctccccagaatggattaacagctgcgtggaaagtgggggagagagtggatggagacttttagagatgttaaaactgcagtagaatgaaatgagtcagggagcttcagttagaaaataaagttgaggcagtttttgtgaagataatatggttagggctggagtgcactagtctttttgcttattcattttgcatggttttaaaattaaaaataattccgaagatacaccagctcacaaatgaaaacgtcagcctctgccccaccctccctcctgcccaaagtgaatttggtactcagaaaagaactgtttataccactcacctttctcccagcatgtactcactgtgggcagatgcaccaatacatggtaatcctcttactcattttaagacgtaggaaactcaatattcttctctaaccatatacgatagggctcttcgcttttaatgatatctgggatttctgtggaacttggcaaattttcagagcaccttcactcacataatgtcatttgaacctcacaatgttcttgggatggagtcagttgttcagggtccccgtgtgtgtgataagcagtgctggctggctgtcttcagaactcttggaaatctttacacatgcgagtgctaaccactttgagcaaggctgccttcttgtagatgacttgctgttctttatgacagggatcagtggcatttgtttcctagcagtatttagcacctttttgccaccttggtgaacagaaaattgtattttcctgtctttcatggctgaaaacaaaagtaatgggaattttaaatacgtttgcagaaactgcccctcccctcattgagggtcactgctcaagagtgcaggagtggactctccactgatgggtctccctccccatcctggtttccaccccgggctggctagctctgttggtttgaagactgacagccagcctggctcattctcattattggctagttagctttctttatcaacctgctcactcacaaatgtgtgccctcagccagagagtaagaaagcccaaatctgttacagcttctaaaaaaatagatttctaatttgtcctactcatgttaggagcattatctttgaaggtaaaacatagtgtatcattgtgtaaactcccaggcttgatgtagcagaagagatcatttctggaggcttcagcaatggaatttagcattataagagagattggacaaaccagtccaaagtggtccgagttcttaaatccaggtagggaactcactcttctttcttctctgggacctaattggggcattggggctttagtgagaccacagaccaggcccgtctctcctgtaggcttttaattcaatggcaactctatttcaaagaataaaagccttttggacgagtttgcggcagttctgggggcgggctctggagagtccatagatcagccgtaactggaacgtagaatctacgtctgcctctgaatggacttcccacctcctctctcttgctctgatgcttgcctctgggcctctccatgcccaaggtggtctttcatccttgacaggctggtaatgtgctggccacctccagctcctgcatcgagtctgtaaaccagagctggttctcatggccttcgtcacgataccaggatacggaggggagcccagggccatccatacccaccccagggtaacggggctggcctggcattagtcattatttagtttccaggccaaccatccagatagagattccctctttcctttgagcagtgctctcaagagctccgtgcctgtccacaatgacctagagtgcatcctgctcattgtcagtgtagcccctcgcccctatattcatccaggatacttggaagtgctaaaataggaagggattcggctttcaactttgctaccatcttccctgaagcaggaaaatgaacatggacttaaatgttctttgaaaaaaccaaagttttaagatttgctgtgtgatgaagtgacagggagggccggagtcagcaggtgccagactttctgttctgtctgccatgggtttgtccagctcaggtagctctaggagcaccatcctgccctagcagagcccaggccttgcccctcatgaagcatcattgaaatagcaggagcatgttgatttcttgggttaagttgcctttataataccaagagtccgaaactttaatttcgaaacaacttgcagaattgcattttcttcccaccagtaacattccttaanggaactttgtttataagggaataacctaaacctattctggtacctttaaaataaaaannnnnnnnnaaccttttataccttattttaaacctggataagggaacatgggaaaaggaatttaattggcctaagccccccaaatcccttaaagggaagttcc

SEQ ID NO: 432689 - DNA, 429 bp, Homo Sapiens
tttacagatgaagaaacagttccacacactaagagacttaacgagggtacagctctcctcaaactaattgattattgaggtgtgtttcttttccttccctggtgatgtgcaaagagattgaaaagggaaaaggggccaggaaggagatgttttttctccttcattcattcaacagctaatcttgagtaccaactgtgtacaaggcactaacctagatgcctgggacacataaagaacaagtagacaaagactcctacccttaatcattgagttttattctagatgggggagagggtgacagataataaacaatagaattcataatatgaattcattggagagtacaagaaaggtgaactgtagggggaagagagcaaggtaagggggtgaaggagtgttggggagattgggattgcaatttcagaaatt

SEQ ID NO: 432690 - DNA, 1046 bp, Homo Sapiens
  misc_feature (388)..(388): n is a, c, g, or t
  misc_feature (1036)..(1036): n is a, c, g, or t
agagggggcagcggaggcatgatgtacagctggctttgaggatgtagtcgctgaccggctgggacaggtaatccacaacatggccgtccccatgctgcagggccagcctgctcttggttgagctgacaacagacatgggatggttgatgtcatccttcaccaccatgatgttgtttttgtatttgcggagtattgaggagtgattcatgattcggtctgtgtcggctgcatcccgggcaccaccacaatcccaaagtcaccaacaatcacctccatatctgcctcgttccagagccctgggatgcagaaggactccagcaggtcactaccacacagcagcagaatccgtagctcaatctcttcataccgcatcaccgtgcccagattngcattctcatctacaaaggtgaaacgctccaccgggggggggacacagcagatccggctgaggttttctcccaccttccccaagatcttggctgcagtgggcttggtggccacgttgcttgttctggtaaatgggctggggggtctcgttttgtggctgtcccgatcacaggtgtcatggaaggtgtgttgaccattggagaggatgcagccagtcaccctcttcatgaggtcccggtggtgttccaacacgctgcaggtcgtctgccaggtgtcctggtagcactcccaagggtccaccctgatccaatcagaattctggacggccagctgacacatgatgagacggtgccggcttgacacgaggccctgttttccataggagtcgtggacaggggagacaatcccgccaatcacaataaaccttccagttttgtgcagataatccctggctctttcaaacatctgaatgtgccctttggtgatgggattgaagctgccgcaggcgagcaagataacgtgggtcttggtggtctcggtcatggtgcagatgggtccttcgcggtggtctaggggttgcctctctttttgtgtctcgttgtcggacgcgtgggtcgacccgggaattccggaccgggcctgcaagcgnacggtttcaa

SEQ ID NO: 432691 - DNA, 977 bp, Homo Sapiens
tggtatgggttggcaggcacccttcacactagacaggaagtgccttagcttctgtctcaagcttgcaagggatgttttggaggtggctttcagtcccgctctgctgttttcttcatctacaagcactgaatgaggaaggccggggtgctctttcttgcctcattgtgtgtgcagtgtctgtgccctaaagaaggtctttccagctggtgccaaagctcaactttcatgttttttagaggagggagtggaggctctgaaggaaaaatcaccaaatgatccagtcctatctccttgggagttggctggagtccagttaagagatgttaaagggagctaactacgaatgcaatcttagcctgggaacgatccctcttccgagaggagaccctgctgcaaaacagtccctgggttttcaagcctctctgctccccatgttgcctgtcgtgaaggcagggagctccaaatgtccccattttccgcactttcgcagtcccactcaccaatctcttcataccgcatcaccgtgcccagattggcattctcatctacaaaggtgaaacgctccaccggcgggcggacacagcagatccggctgaggctttctcccaccttccccaagatcttggctgcagtgggcttggtggccacgttgctgttctggtaaatgggctggggggtctcgttttgtggctgtccgatcacaggtgtcatggaaggtgtgttgacattggagaggatgcagccagtcaccctcttcatgaggtcccggtggtgttccaacacgctgcaggtcgtctgccaggtgtcctggtagcactcccaagggtccaccctgcaaaataaaccctcctttggacccttgaggattgtgacaaggattagctgagccaggcctttgtcaagtggtggcccaggttatccttgccaggctgcaaaccctcgagatccatactctcggggccgtaccagcctgcatg

SEQ ID NO: 432692 - DNA, 1665 bp, Homo Sapiens
  misc_feature (1415)..(1416): n is a, c, g, or t
taagaataatagtaagttttaatattcttactgagttaggctattatatgcaattgaattgttaatttgagggtattttataattctttttattaggaaccagttacctaaacaatgtaaatgcattagaccaggagcatactagatccccgatctagttactgaagcacaaattctattggcaaaacatgcataaacatacacattctagatgcaacacagcaaaatgctgatgtatagtaaacccattcaagaaaatattgtaaatatacaaaactgattataaaactccaaactacctttgaaataatctactccaaagccttcattccataaaggaaactaaagcttaaaacagtagagttttctaatgtcacagagtgggcttaataacaattggattagttcagcccaatgtactttccattccataacaatgatagtgaaaatttaaaagatttcaaggcagtttctaaatccactctgattcttcagtacttaacaaaaggacaaactaaagtaaatatctcccctaaatttatgatgttcctagaattgtcatatgccaggatgcagtctctgatgtttgttgagagcagagcgatatctgaaggattttccacaatcattacatccaaaaggcttctctcctgaatgaattctctggtgctgaatgagatatgtgctctggctaaaagtctttctgcattcattacagttataaggtttctctccagtatgagtattctgatgttcagtcagatgagtgctccggctaaaggctttgtcacattcattgcacttatagggcttctccccagtgtgaattcgttgatgctgagttagatgggagctctggctaaaggtcttttcacatttattacactggtagggtttttcttctgtgtgagttttttgatgttgagcaagagatgaacaatgtcgaaaggctttaccacactcagcacactcataaggcttggctcctgtatgaattctcttatgctgtgtaaggtgtatgttctggttgaatgctctcccacactcattacacttgtaaggtcgttctccagtatggatccttcttatgctgaataagggatgacccataactgaaggttttccccacattcatgacactgatagggtttctctccagtatgaattctttcatgcttagcaagagatgaactccgaataaaagctttcccacattctttacattcataagctttctcttgagtatgagttttctgatgcttgattaaggtttgagagataactgaaagcctttccacattcactgcattcaaagggcttttctctcggtgtgaattctccgatgttgagtaagggatgagcagtaactgaaggcctttccacattcattgcatttgtaaggtttttctccagtnngaatttccagggtgttgaccaagggatgcccagtaactaaaagattttccacattctgcacaatcatagggtttctccccagtatgagttttttgatgctgagtgaggtttgagtgctggctgaaggctttcccacattcattgcattcgtacggtttttcaccagtatgaatcatatgatgacggataaaagttgagggcccgttgaaggcctttccacattcattacatttataggttttttctcca

SEQ ID NO: 432693 - DNA, 1842 bp, Homo Sapiens
cagcttccccaacaggttgagaaaccatctttatttaagaactgcctgctaccagagtcaataaataactatcattacaagaagtacaggagagaaacagtaggccaacgggagtggttccattttaacaaacactgagtcaagtcagtggtctgatgaagccctagcatttgccaagctgtgagcctctctaagctgtgcaggccctggatgggacgggtaagttggaggagtcttggggccgaggcaagatgtatcccatctaagggcactaagtgtcataggccccaaaggctgcctggggctgtggccaaagctatctgacccattttgtttctctcattttcctttacgtcctgtcttcccaaagcctatgaccatatacacaagtccacgggtgttccgcagctaccaggtgcctgtttccatggagctttttgggggcacacagaaaaatgcccacctaatgccttttatgctaagagcctctctggcaatccccatcacatccaggaggaagcctagggtgggtgtcacccagggagacagagcaccactgtcatgccagtggccacaggtttgaggatactgtgtctcccaccaatgagccagttggcagtcccattctgagaccaggcagagaaaagattcctctgtagctggggaagagattaagggagtcaaacattcctagccatttttggctcttgcccagagtacaggctggctggcccttggggctgccctaaagaggcagcatacgctgggatgagcactgggctgtaaccagaattcctagatgagcccccttaatggcttcccataaggtgcagggccacagaaggtgggatctccaagacttcctgggctgaacactttgattctaagagtctcatctctggatggacacttggaccatctcctgcccctccagtcacagcttcacctttcccaaatcccatgtcaacagctgtcaaaattcctcaaagctccctcagaaagaagcctcttccttattccagggcctcctggaatgaggaaggtcattccagaggtttttttctgatgtttaacctcagtctcgtctgttgttactttatgaaaagaaaaagacacccccacctacccccatggccttgccactccctggcaccatttgtatcatttgttgccctgaatgaaagcagataacctgaccttgctgggccctgagactctgtctggagagagctgccttccccctgaggctgggtgtacatctggactgttagagcaacaaggaccagagagccagggcaaagggctctgtaaggggagcccaaatgtatgcagaagagaggacacttgtctccctaggccctggagaggtgcctacagttggttccttttcctagtccccagggtgtttactggccactaagctgtggggtaaagtacttgtttgtggctgttcctcttgccgcctcctctggggcttgatgtatgagaggagataacccagaactgtggtctcatgatcgcagtgaaaataagcacactctcaactcccccagcccatctgggcagagaacacgaaaatcagagaacccctgcgcaggaggggatcctgagaaacatctaatctagtcttctgcaagcaagctcatgtacaagtcactctagcaggaggctgttgcattttacaagcttgcatgtcctcaggtcacctattgtcttattaaaccttagtcagtactctacctgaaatctcaggctgcaggaacatttattttgttgtcgttctatccctcaaacaaattctgcctgcccagtggttaggttttccacgggctcagttttcct

SEQ ID NO: 432694 - DNA, 452 bp, Homo Sapiens
agacataaagctgggcatcagcaactggcctgtggtgatgcaaagctgctttgctctgtatctggctggactgatctgtctcacaagaagccatgaggccatagggagaagctccctctccccttcatcttctgctccaaaggtggtagcaagaggagtacccagttaggggttggagcccccatataacatcttcctgtcagaagactgatggatctttttcattccaaccatctccctttcccccgatgaatgcaataaaactctgtgacaccagcaaccattgctctttagaaatgggttttctgatcatatggctgatgtgttatgggcagtatggatgtcttcatttgttgcttctgtttttcatcttttttgttttattaataaaaatttatgtatttgctcctgttactataataatacagggaagtaaattattcaatccaaaa

SEQ ID NO: 432695 - DNA, 2055 bp, Homo Sapiens
  misc_feature (1779)..(1804): n is a, c, g, or t
  misc_feature (1969)..(2005): n is a, c, g, or t
cccagaaaggtatatatagccaaagtcagtcacaaaaactcaagggaaatataggcatccccactgttttaagaacagtcagaaatgtattaaggtgtcaaatgaagattgttactaacgaacaaaaaaggagagtcatttgaactgtcagtaagatggcaacgtggggaagggtgtcctaagtgcctggaaacacgcacagcaatgctaaggacatgggagggtagagtgatgctgaaacacagtctacaccataccagtaaggacgggaatgtctgtgaggctgctgtaaagagaccccctacgctaatgtgccttatgggtccatgggcagacgctgaacgctggcaaaaccgggtggccgttcttgcactactcgggttctgactgcaggaggggcagagggtggtcgatgtcctagtccctgtgtctaaaaagtcatgaggggacagagtacaacaggcagcacgttaagtccctgggctcttttccaaagccaagaggaggctccctggagaagcgagctttgcgaatgctcaggcccggagccgcacactaacgcggcgtgcagcaggtgtggctgggtgtgcacagctggcgtccagcgacagccatgccgggcctatgcctatagcgagtgtacaccccatgcacggccatcccccaggatgctgctgcttctctggccagatgggttctggaatgaggcttctgctactgctccatattcaccttcaatctggcctggccactcccatggcatccgtattactgaagatgagacttgccaactttaagttgctagtaccaatatttcagcagggatatgaatgaaagaaataacaacttagctcatggtcataaaatatacgtatgggtaaataaagtatacacacatactagagattcatcaatggagaaattctatcatcacatgacattgtcatgaaaattatatcattccctccctggaaaactgtgactattatcctgggtagaaatgttattttgctatatggaaatactgcaatattcatgcataaaccaaggttgtcatcatgaaagtcggtattctacagtataaagcaaaacctctgtgcgaatttgttaccatgaaaacgggaaaccatcaggacccatgatgcttcattctggctggcatggttaaagccacttctcttgccttgatcaatcccaagaaactaaaagttagcatttgaaatcctcttgaggattctgaaagtaaatgtatctgtgaatctacatttaacttcctaatgagaatgaaaattgcttacaaagactagagtcacttcccattattttgtgaagcaggggtgggggccctccatcccccactgtgaatatggcatcacctcctgtccgtattcacgctgtctacatttcatgttgggattgcccacacaaatgctttctttcagggaccaggcaggtgacctgggaaggtggtgggtaggtggtctctgtggaaactggagactaaccggcctgcaaggacattcacatccaaaatattttacaacactctacaggcaaaacaaagtacggggtggtggttcaaagccccagcaacgcaggccaatgatgtgaatgggaagtgtcatgacacagaccgcgagtggccaccgtgtcccccaatatctccccttcaggtgtgtgcttaaacccaagaagcagatgaatacattctttttctttcaattacaaactttcattctgtagcatattttccagtaggagaaccacttcctaaaatgnnnnnnnnnnnnnnnnnnnnnnnnnntacatgttcaagtttattagtcattaggggactccagtcactcaaggctgtgcagaaagtaccagattcagcaggggcatctagtcaggctgccctctttgctccccacctcctattcccttacccgctctcgacgaattcgagctcggccgatttggcctgatnnnnnnnnnnnnnnnnnnnnnnnnnnnnnnnnnnnnncgccgccaccgcgataagctgccattcgccctatagtgatcgtatacatc

SEQ ID NO: 432696 - DNA, 310 bp, Homo Sapiens
ctgccaagctgttctttatttcagggagagggcaggggaggtcgatgtcctagtccctgtgtctaaaaagtcatgaggggacagagtacaacaggcagcacgttaagtccctgggctcttttccaaagccaagaggaggctccctggaaaagcgagctttgcgaatgctcaggcccggagccgcacactaacccggggtgcagcaggtgtggctgggtgtgcacagctggcgtccagcgacagccatgccgggcctatgcctatagcgagtgtacaccccatgcacggccatcccccaggatgctgctgc

SEQ ID NO: 432697 - DNA, 1031 bp, Homo Sapiens
attcttcgatacgcggcggagatgagcaggtccgcgacgctgctgctgtgcctgctgggctgccacgtctggaaggcggtgaccaagacgctgcgggagcccggcgccggagcccaagaggtgacgttaaaggtgcacatcagcgacgccagcacccaccagcccgtagcagatgcgctcatcgagatcttcaccaaccaggcctccatagcctctggcacctcggggactgatggcgtcgcctttatcaagttccagtataagctgggcagtcagttgattgtcaccgcctcgaagcatgcctacgtgccaaactctgccccatggaagccaatccggttacctgtattttcctctctgagccttggcctgcttccagaacgctctgccactctaatggtatatgaagatgtcgtccaaatagtatcaggattccaaggtgcccggccacagcctcgcgttcatttccagagaagggctctgaggttgcctgagaacaccagctacagtgacctgaccgcgtttctcacggccgccagctccccttcggaggtggacagttttccttatttgcgaggattagacggaaatggaacaggaaacagcaccaggcatgacctgacccccgtcacagccgtcagcgtccacttgctgagcagtaatggaacgccggtgctggtggatggtcccatctatgtcactgtgcccctggccacgcagagcagcctgaggcacaatgcctatgtctcggcgtggcggtttgaccagaagctgggaacgtggctgaagagcggtctggggcttgtggccccagaaaggagccagctgacgggggacatacattgcccccccaattggggtactgggggggccgccatgttccctctccattcacgggtcccgtttgtaacacagggaatttacccccgtatccaccgggggtttcctttcgggcgatcttcagaaaggaaggcgtcatccacaccatgcgacgtgtgacggggagcacccgcattacgcacgcgctccct

SEQ ID NO: 432698 - DNA, 1499 bp, Homo Sapiens
gggtccggaattccttggattgaattttaaaatgtcagtgctagtgtcaagtgttgtcctaggattgcatgttagtacccctaagcctgagtgtggggagtgagttatgcaagggtagcgtgcactgcccagactgactcatggagccttgtgcaaggagagccagagaggttcactataccatgactccaaaattgtctctattgctaatagatacgtatagtatacagggaaaacagcttataaatccaaatatcaatttaaattttaatattctacatgaaaacttacattgggaaatatgcagacaagtgattatattccaaattttacccttattttaatatctaaaatattgggtatgatgcaaattatactatagaatatttatctgaaatatgacttactggggtattctgttaatactatatataaatattcagaatttttttcaaaagtagaaaaattcccctctaaaagtacagccagatagattttcatccatattgaggaacttagctttttcaacaagcttcagaatctgaagtctgtagaatctaaaatacagaaatatccagaaatcagacaataaattgaaagtttagacatcatgagtattaaatagctttaaaaatatatttttagtcatattatttctaatgtaactttctttgggtaatttctggtaaggaaaaacatcttttggctgctagaattagttatagattttcaatatgtgtgtgtgtttgcacacattatcattagtgaaggaattccctagccagctttaaagaaggaaaaaatggatagtcccaaattaggtgtataaagccagtagagtccacgacacttggactggaggtatcttggagtcctgagacttagaatcagttcagctgcagaaaacccaccttttgagttcacaccattagtgaatagcaccatgctgaaacatttcacagcttccaactctgggaaataatggagagagtttaaaaatgtaaaacttcagttagtttggggctgaacttgcttacttgaaaaatctggtgctaggcacatatatctgcctctcctttgtaaataccactccaatattattctttactattcagatccaagcttcatgttctacttgttcttcatgttctttaaatcatttgaaagttgtcaactgagagaaacatttcagaggggggaggcttttggcactggtgataaacatccctccaagagaaccgtctggggttctcttctatttggtggttggtggtttttattcttttaaaaacagctttcattgttgtttactttttgtgtaatacaaacaaaatgtaggaatcatagtttattgatttcaaatggctgacagagaatgagtaaaaccattctttatggttttacgattcagactcatttcgaaaaagcgactgtaatttttacctcctctttccccccaagtttgtttctgctttggaaaggttgatttcccctcttta

SEQ ID NO: 432699 - DNA, 749 bp, Homo Sapiens
ggtatcattttctcttctcacaaaatgttcctattatatagcattttctgtattcacctcaacattacttctaactatgataacatcttttgaaaacatacaaatttttcagaatggatactaagtggaaatagcagtctttcattttcacctttcaactgaatccttttttcccctaccgaattggtatttaaaaaaaatcacagtcagcaatatgtatcctttctctcaagctcagaaaaattatgtagccacctgctaatatccagcaagctatcaagtctgcattttgggaataaagtagtttttcacatttttgttcagtttatggtattataaaggaaaaaatctctatgcgtcagtggattttaatttctttagaatcattatgctgttaagagtatgccagcaaacgtttctagagctatttaatataccttctgctatttaatataccaaatgcttttcagagaaatgcaatttaaatactgtgcttaacatattttactaagaagcagaaatattgaattattgttctataacgtaattgtgtgttgtgtgttttatatctatacaatatatacccctgtattaatggagaccattgctacactagggagaggcatggcctcttcagagcccacagcaggtggccgggatgtccagttccaatgttgttcccgactctgtgactcaaagcggagcccctcactgcttggcctcgggcttctcttggtaatgtagacggt

SEQ ID NO: 432700 - DNA, 433 bp, Homo Sapiens
  misc_feature (225)..(225): n is a, c, g, or t
  misc_feature (370)..(370): n is a, c, g, or t
  misc_feature (405)..(405): n is a, c, g, or t
  misc_feature (410)..(410): n is a, c, g, or t
aaggtcctagtggatggtgagttctggagccaggttgagtctctgaggaagcacttggggacactgggaggagaggcagtcggtgcctcaggagacgggcagcaaagcatcccacagggcctggcccccatcctggccaatgccacatgggtcagggcagagcttagctttgccacacagtcagtgagggagtcgttccaccgcaggctacagagcatccaggangaccctgcggggcacccagacggccctgcggcagcacaaatgcctgctgagggaaatcctgggagcctaccaaaccccagactttgaaagagtgatgcagcaggtcttggaagccctcaggctttcagcgggccatgaaaatggngttcaagctgtcctgggaccctgagccccttaagnaaaanttctgggcccgagacttcaaaca

SEQ ID NO: 432701 - DNA, 1402 bp, Homo Sapiens
  misc_feature (203)..(211): n is a, c, g, or t
  misc_feature (414)..(422): n is a, c, g, or t
  misc_feature (1025)..(1025): n is a, c, g, or t
  misc_feature (1044)..(1058): n is a, c, g, or t
gttatttggggtatataatgaatttggcattaaggctggccccggcaatgcagagacccccgaaaggaataacccaggtttcaaaatggataaaccttcatgtttgtgttaaaaatgcccccagagcctgtgcacataaactgaaagtattgttctatcaagtcatgaatcttgagaagaaggtacatatcccatttcagggnnnnnnnnntacagtttcttaccaattatccaggtgtatatgactggttagaattttaagttttgatttttactgaaattcagagtatgggatgcaaacattcaggataaaatgaattcataattacacgcagttatatcaacttgcaacaaagcagcaaatatgagggcctaacacacatctcgactctccccttcccttctgatccctcnnnnnnnnngtgcaaaatcaaagagtcactgcttggtccaaaaaataaaatacattgtgtataaacatttgaaatctgatggaatccagcttctattccacaggttgtcttcagtaagaatcaacgtccgaagatggaactcagttccagaagaattaattctacaatctgattctggtacacagtatgaactgctatattaccagtctctttttctggttttaatagagtgggaccaaaaacaattgctatactctgataggtcattcgatttttctctccattttctataactcttctgagatgtcggaaaagaatctgcattgtgtcttggtttggctttggcaactgtctgattaggtccttaacagcagcgactcgctgtcttggttcttgcttaattgcattaacaaaatcattaaaatgattaaatgtaaaaagagtttctggtaattctcgaaaaaacattttgagggctccagtaatgacatgaatatcttcccatttactgtcattcaagtccaatttctcatcatgattgactgcaaaccttagtttctggatcactgcgaggttgccacttactctgtatatcccatcaatatccaaacntaagagacaataataattnnnnnnnnnnnnnnnttaaagtacttctttgcctcttctgaacacgtttgcatgtgtcagaattcccactcatttgcattagcctaaaatcaaatgggcaaatattctttttctctaaatggcttctggtagatgcttggcaggggagagagatggagattcgctctgaattctgtttaataaacagcagtaattctactctgctcatcatatagactgtgaatcagctcaaggaaatggtttcattaatcttaaaacactaacaatttcaaatttctgaaaacatctggggataattcaaaattaaaggaagtcagcaggtaaaatcagcccatgcatattttgcataccattttata

SEQ ID NO: 432702 - DNA, 345 bp, Homo Sapiens
ctatgctacttgctgtctttgtaacttgaaaaagttactcaactccttttagtatcaagtctgtcatgggtaaatgatttgctatgaagaatacagtaaaagttatagaaaatggagagaaaaatcgaatgacctatcagagtatagcaattgtttttggtcccactctattaaaaccagaaaaagagactggtaatatagcagttcatactgtgtaccagaatcagattgtagaattaattcttctggaactgagttccatcttcggacgttgattcttactgaagacaacctgtggaatagaagctggattccatcagatttcaaatgtttatacacaatgta

SEQ ID NO: 432703 - DNA, 525 bp, Homo Sapiens
  misc_feature (23)..(23): n is a, c, g, or t
  misc_feature (28)..(28): n is a, c, g, or t
  misc_feature (37)..(37): n is a, c, g, or t
  misc_feature (54)..(54): n is a, c, g, or t
  misc_feature (70)..(70): n is a, c, g, or t
  misc_feature (82)..(82): n is a, c, g, or t
  misc_feature (118)..(126): n is a, c, g, or t
cgggataaatgaatcccaaattnacccngcggttatnccacctggcaaacaagncggcaaatttgggggnccctaacacacncctggaactctcccccctccccctctggacccctcnnnnnnnnngtgccaaaatccaaagagtccactgcctgggccccaaaaaataaaatacattgtgtaataaacatttggaaatcctgatggaatcccagccttcctattcccacaggttgtccttcagtaagaatcaacgtccgaagatggaactcagttcccagaagaattaattcctacaatctgattctggtacacagtatgaactgctatattaccagtctctttttctggttttaatagagtgggaccaaaaacaattgctatactctgataggtcattcgatttttctctccattttctataacttttactgtattcttcatagcaaatcatttacccatgacagactgatactaaaaggagttgagtaactttttcaagttacaaagacagcaagtagcata

SEQ ID NO: 432704 - DNA, 545 bp, Homo Sapiens
caaagaaggcacttagctcaggaaactgggtggtaccattggctgagatggagccgagtgccagtctaggagagtccgtagaattcagatgtgcataccgtgagttaaatgagatgccggtgatacggctggaaccccgaccaaggaggctgttggataaatcaccggcatttccaacttaaggtcgtataaaggggattcttcagttgaccgtgattctggaattcagagacgtcccggctagcaacggaaattttgtgtttttaagcattatgagtgctatttaagtcacttacggatgatgctatctagggagtacacatagacacagaagagttccaagaatccaaccctaaggaactcccacatttggagggtggatccagaaagagaaggcaggagagaggagagaaagccagtgcctgaggggagccaggaaggactcacaagacaaacacagcctagaactgtgcttacattgtgcttggcaaaagaaatagacaccagatccctgcttcctgtttccttatgtgaacccaaagtat

SEQ ID NO: 432705 - DNA, 618 bp, Homo Sapiens
  misc_feature (26)..(26): n is a, c, g, or t
  misc_feature (53)..(53): n is a, c, g, or t
atagccaaaaaggcttgttgtccaangcaaaagaataggcttttaaaagtccntggctggttaaaaagctggttgcgtagattcctgtcaatgctcaggatcctctgccttgtgatatctggagataagtcaacgccttgcaggacgcttacatgctcgggcagtacctcttttcagcaacacctccatgcattggtatacaaagtcccccctcaccccagccgcgacccttcaaggccaagaggcggcagagcccgagtcctgcacgagcagctctctcttcaggagtgaagtaggccacgggcaagtcgtcctgacgcagacgctccaccagggccgcgcgctcgccgtccgccacataccgctcgtagtattcgtgctcagcctcgtagtggcgcctgacgtcgcgttcgcgggtagctacgatgaggcggcgacagaccaggcaccaggtccccatcgcccttcggaggctccaccaccaaataacgctgggtccactcgggccggaaaactagagcctcgtcgacttccatcttgcttcttttgggcgtcatccacattctgcgggaggccacaagagcagggccaacgttagaaaggccgcaaggggagagg

SEQ ID NO: 432706 - DNA, 530 bp, Homo Sapiens
  misc_feature (353)..(353): n is a, c, g, or t
tttggttttataagaaaaaagtattttgaagtaggacagaggggtttacatgacaccaataagtatttactgtataaattgcaccactagacaaatacagctacaagaaaatcatttgaataagtcacacagctatcaaagcatctcacacattcattataattcactctttcatactagtttatatacactgagtgagtcattaaatattgcacttattggcccatgaaccctcaattctgaggtgttgaaaatagaaaacaaatctatttttataccatatttcatgccaccatttaagacatatcagttctacaaacaccattaaattgttgtacatttggacagtctancggtatcacatcacgtctgacattaacaatatattaacaggaattacaggacagttttcctttagcacgtatcctagggataatgagacaatgcatggaaagccatcatattgatacagcaaacaatacccaaactttacttttacaagaagtatggaaccacttgacagatgtaag

SEQ ID NO: 432707 - DNA, 2993 bp, Homo Sapiens
agcggaggggacgctgctttccgcgctggacggaccaagcgagggagggtgcgaggggaaaccggaaggaagaggcggcggttccagccttcctcggccggaggcggaggcgagaccccagtgcgaggccgcggcgggagggccactgcccccgcctgccgcgccggaggggcccagtgtggacggggccaccggctggagcggatcccacacctccggaccgagggacgcggttactccacaggatccgctgaacataggatgttgccacaaaatctacctcgtgtatttttctctttcactcatgagctgcacaattgcagatttgagcacaatgtctgcagactgtgttgaaaaactctgaagaacctaattaacacaggatgacctaggagtgattctaagtctgtgtaacaagatattactcattagtgaatgtgtcagtcttggtactgaatgctgcagataacagcaagtaggttctcctttatttctgaagtattcacttgaccttccatcagtaagacggacttttctaatctgttcctggagatattaatggaatacagtcatgtccactcaagacgagaggcagatcaatactgaatatgctgtgtcattgttggaacagttgaaactgttttatgaacagcagttgtttactgacatagtgttaattgttgagggcactgaattcccttgtcataagatggttcttgcaacatgtagctcttatttcagggccatgtttatgagtggactaagtgaaagcaaacaaacccatgtacacctgaggaatgtcgatgctgccaccttacagataataataacttatgcatacacgggtaacttggcaatgaatgacagcactgtagaacagctttatgcaaacagcttgcttcctacaggtcagaagatgtggttacaacgttgtcgagaatatttaattaaaaaaataaatgcagagaattgtgtacgattgttgagttttgctgatctcttcagttgtgaggaattaaaacagagtgctaaaagaatggtggagcacaagttcactgctgtgtatcatcaggacgcgttcatgcagctgtcccatgacctactgatagatattctcagtagtgacaatttaaatgtagaaaaggaagaaaccgttcgagaagctgctatgctgtggctagagtataacacagaatcacgatcccagtatttgtcttctgtttttagccaaatcagaattgatgcactttcagaagtaacacagagagcttggtttcaaggtctgccacccaatgataagtcagtggtggttcaaggtctgtataagtccatgcccaagtttttcaaaccaagacttgggatgactaaagaggaaatgatgattttcattgaagcatcttcagaaaatccttgtagtctttactcttctgtctgttacagcccccaagcagaaaaagtttacaagttatgtagcccaccagctgatttgcataaggttgggaccgttgtaactcctgataatgatatctacatagcagggggtcaagttcctctgaaaaacacaaaaacaaatcacagtaaaacaagcaaacttcagactgccttcagaactgtgaattgcttttattggtttgatgcacagcaaaatacctggtttccaaagaccccaatgctttttgtccgcataaagccatctttggtttgctgtgaaggctatatctatgcaattggaggagatagcgtatgtggagaacttaatcggaggaccgtagaaagatacgacactgagaaagatgagtggacgatggtaagccctttaccttgtgcttggcaatggagtgcagcagttgtggttcatgactgcatttatgtgatgacactgaacctcatgtactgttattttccaaggtctgactcatgggtagaaatggccatgagacagactagtaggtcctttgcttcagctgcagcttttggtgataaaattttctatattggagggttgcatattgctaccaattccggcataagactccccctctggcactgtagatgggtcttcagtaactgtggaaatttatgatgtgtaataaaaatgagtggaaaatggcagccaacatccctgctaagaggtactctgacccctgtgttagagctgttgtgatctcaaattctctatgtgtgtttatgcgagaaacccacttaaatgagcgagctaaatacgtcacctaccaatatgacctggaacttgaccggtggtctctgcggcagcatatatctgaacgtgtactgtgggacttggggagagattttcgatgcactgtggggaaactctatccatcctgccttgaagagtctccatggaaaccactaacttatcttttttcaacggatgggacagaagagtttgaactggatggagaaatggttgcactaccacctgtatagtggggaagttcggggagtgcacgcctgagttatgtgctttgtcattttctttgctaaacaaaagaggctatgaaagaactaaatatgagtacataaaattctatctttgataaattttatttttatgccctacttaatatttgcatcagtataatatatatcagtgagtcttacagaaagatatgcttccataatatgaaatagattattcaataattgagaaactttatgtgtaatcatgagagtataagagtctggattatctaacattgttagccctgtgtatgtacagttcaaaaagttcatttataaaagtagtttcctgttcctagtgtgatgtatcacaaattgtgctgaggttattttaggtatgtgtgtttcattcccgtggcttctgttctgaagtcctggaatacagttttcagtgtaattaattcaactgcacttaacactaatgtccgtgttggtatagaaatgtctaaaatcctatacctctagttgaagaaagatcttccataaattttatgggtatttacacaggggaa

SEQ ID NO: 432708 - DNA, 687 bp, Homo Sapiens
  misc_feature (46)..(46): n is a, c, g, or t
  misc_feature (48)..(48): n is a, c, g, or t
  misc_feature (62)..(62): n is a, c, g, or t
  misc_feature (86)..(86): n is a, c, g, or t
tcgccagccttcaaacttggagcctctagctctttttggggaaacncnttttactattctgnatggtgccccatgaggcacagccnagggggcgggaaggtgtgctgggcttaaaggaagctccctgtaggacccttcctagctagtgtgggctgagttccatgctcattttaccagccgcaggtgaaatgcagccctgtgagagcaagatttgaaaactgaagaaggaacatcatggagaaaaatatttagaactttctttgtttttaaattaagtttgaaagtattagggtgtcatctaatattcttttgccttcaattaactcagtattttcaaatgaggtttaaataggaccttgtttccttacgtgcaaattttctctaagttagatattccttcttcaaatatatagcttctaccaatgtgtgtcaatgaggcctgcatgtactgaaaagtaataactttcatagtgaactttgtttccccttagagaatagagtttagtaaagtatccagttaaaaaaaattcagtcattttaagtatatttcaaactggagaggctagccataaaaagcaaacaaaatgaaagagcaaactttagaaacttggccgtgtgcggtggtgcgcacctgtcgtcccagctactcaggtggctgaagcatgagaactgagaactgcttgtacc

SEQ ID NO: 432709 - DNA, 927 bp, Homo Sapiens
ggagaagtcctgttcactctcatgttgactttcctggtcttctgtgtccttcttgaagtctaaagtttcactcagctctttccttctgaagtattctgtccctgcagcagggaatcgatgctgagctcattcgatgccccagtactggatctcctgcaggaaggagagcgcgcacagctgctccatgacatgcaggcggccgggtgcggtagtagtgcaggacatatcggaacgcctgcgagctgcggtcgaagaagtactcgttgtccacggggttggcatcgtcgcaaagctccagagggctgggcacggcggccagggccccggggcggcggtaggaagccaccaccacggccagcttgccaaggcgcgtgtgcgggaagcaggacagcgcctgctgcgagagcacgaagcggctgccgcccacgttgaccgtgaagcagtccccgagcgccaagggctccccttcaccctcgctgcagaagacactagagtccagggaggtcagggagccgctgtccagcggcgagtccagcagcgctctgccgctggaaggcatctctaacccagtcgccgcggcttgagggcgccacaaagttggggacacgccggaagctttggtcccgcgagggcggtggcacggcccctggtggcggccgggattccctgggctcccgaaggggttacctctccttggcgcaccctctccacccgctgtgcgccttcctcctcctgccgttagggagccgggagtgcgcggaagcagcgcacaagtggcagaaagaggagacagggagcagaggaagggtcgcgctaagagagaggatcaggtgaggtccaagcccgacacagtccctgtgcacactgccggtcgccctggcccttcccaaacgttgtcaccccgcctcccaacttcgcaattgcgat

SEQ ID NO: 432710 - DNA, 2048 bp, Homo Sapiens
agctttagaggttttggctttaattatataatacaatgtctaggaattgtgttgttatgatgaatgtcaaaatgcctgcaaagtttgaacatttgctatttaccccaacaatcagaaagctgtccatagtatttttttgttaacaagtaaaagatcttcaagttcatccagtgatgtcatttaacatatatttcccattttatgaaataagattatttagtaattccagtgtagaaatttaggatgttcactacctcacttttacatattcattattttaaagccataatgtgaacaatacatccataaagagacatttaaagaccatctgatattcatgaaatactaagaaatatgctgttttatgctccacatactacactcagttgggagaatgaagatgtgcaattgttgaagtctttgtgtagactcatgtactgcaatctaagcagttttgggattcccacctcttatagtaataatgggatacagagatcagttcatttgtgaccagtggtttacatgaaaaagaagatagggatataatctctgcccatcaaatatgggttttctcttgtaaagctaagtattatattcaatagctttaactgatagagaatggagtaatttatgtacttggataatatctttaaatagcaaagttgttcaatatgttcttaaatatttacttatctttctctgggctatgcagtttaccttccatttttaaaaaattagtggtgcaaaaaacttctaatgttagtgatacataaaatctttaacttttttgtatgtattgcaataacattattttatatttgacaattcaaacatgtttatattggcccagttgtatttggttgtgttaattggctattttggacactcaaatgtgtcagaacactgtgcagttgttataggtgatgtgaaatattctagtagatgaagcaatatatcagcaaaaattaattaagatgagcagtactctgaagagactcatcatcagaatacagaaatccacatcactgctttatcattttagttaattgtacatagcttttgtaaataaattgaaaattaattcaaaaccagaaatcatctcccccgctgctcctagtacttgctctttctctgcctttcagtcgcagcatctccatgatactccgggcatagacatctctcaagttaacactgatatatgagtcagtggctatattcttggtaagcttctttagggcttcacgctgtctaacagctgcttccttgagtttcaaggtgaagtagcaagcagagaagcgatcgttaataatagcaataggcaaggccaagacaagaattcccgataatatacacatgaaggccacgattttgcctgtggtggtgtctggtctaatgtccccatatcccacagtagtcatagaggtggtggcccaccaccatgcacaagggacacttgtgaaggttgtgtcaggaatgctttgctcagcaaagtattctacagttgaaaatatagagattcccacggatagaaataggagcagtaggccgacttcttcgtaacactgggtgattgtcatcccaagggagcgtaatcctgtggaatgtctgcccagctttagcatgcgcagagccctgagcagcctcaacacctggacaatgcgccccacgttctcccagctcctgcgtggtctggctcccacttaggctctctaccagaagagtgatgtagaagggcaagatggcaaggaggtctatgatgtttggcacctttcttaggaagcgacacctgtcccgcacacacaggaagcggaggacaaactccccggtgaaccagctaatgcacacatactccaggatttccagcagctgcaggtccagccagcttaactcagctgacatcagggccatgttaatgatggacaccaccacgaagataatggagatgacgccaaagatacgggcagctgtggaagatccaggtttctccaggatattccagagcttctggcgaacagtgggacaaggtccttgggagaagtcctgttcac

SEQ ID NO: 432711 - DNA, 1184 bp, Homo Sapiens
  misc_feature (15)..(16): n is a, c, g, or t
  misc_feature (21)..(21): n is a, c, g, or t
  misc_feature (43)..(43): n is a, c, g, or t
  misc_feature (70)..(70): n is a, c, g, or t
  misc_feature (72)..(72): n is a, c, g, or t
  misc_feature (77)..(77): n is a, c, g, or t
  misc_feature (80)..(80): n is a, c, g, or t
  misc_feature (90)..(90): n is a, c, g, or t
  misc_feature (97)..(97): n is a, c, g, or t
  misc_feature (104)..(104): n is a, c, g, or t
  misc_feature (108)..(108): n is a, c, g, or t
  misc_feature (115)..(115): n is a, c, g, or t
  misc_feature (118)..(118): n is a, c, g, or t
  misc_feature (120)..(120): n is a, c, g, or t
  misc_feature (125)..(125): n is a, c, g, or t
gcctggccctggcannattgnatttgtttcattgccggacctnatgcacctccgaccctaaccctctctngnccgcnggngctgccaggnttggttntgatatntganggcaagnggncncaganactcagagacagaattgggcccctgtggcaccttctgcccttggatttttgggcctgatagccactactgaggcctcaatctgcctggtagcgcgtcagtgacatttagagcctctatatgctcagtgtcaagtatttatgaccttagcaattgtcttcctggctttggaggctttcttggttcggatggaggctgctgtggtgtggatactggctgtctcattggtaatttggccttgggtggtagctgtatgggtggcagttgcagccagcgagacctcggtggcactagctatggccttatttgcagccttcttagccttggaagctttcttaggcttgatagaggttatcaaggcttgggaactggctgactcattggcaattggagcgtgaatattctgtgagatgactggtagctttaggacctgcaagggtgacttcagctgtatagtgccaccctcatggccagttggggattgggagccttgggctgccttggcagtaactctcttcatcttgttggctttcttaggctgagcagtgactgaagaagcctgagtattggttacctcagtggtaggtaaagcctggctgatctgggtaatgactggcaggtttaaagcctgccaagttattttgggcttgttggtggcaatctcattggcagctgggactggaggggcagcaggtgcagccttagtaatagtctttataggggccttcttggtcttgcttttcttaggccggttgacaactggtgggtccatggccagggagtccttggttgccgccaacagggtatgcatcagcaggacactgtcctcttctgtggtctcagtctgtatatctggagggaagggaagccccaggctccccgggggaggcagagggccctgaaatagaggcaccctatatccgtagtcatttctcctatccatctttctgggaggccgagtaacaggtgagcctcgtcttcttgaatccagaaggcgtctgctctctccaagcctctccttgtgtctgagcctatccccctccctggccggaagtggtcct

SEQ ID NO: 432712 - DNA, 905 bp, Homo Sapiens
cccccccactcctctttttatgtgagcctttctgagctccatccttccagctggcaccggtccggaattcccgggatcttggagagagcagacgccttctggattcaagaagacgagggccctctgcctcccccggggagcctggggcttcccttccctccagatatacagactgagaccacagaagaggacagtgtcctgctgatgcataccctgttggcggcaaccaaggactccctggccatggacccaccagttgtcaaccggcctaagaaaagcaagaccaacgaaggcccctataaagactattactaaggctgcacctgctgcccctccagtcccagctgccaatgagattgccaccaacaagcccaaaataacttggcaggctttaaacctgccagtcattacccagatcagccaggctttacctaccactgaggtaaccaatactcaggcttcttcagtcactgctcagcctaagaaagccaacaagatgaagagagttactgccaaggcagcccaaggctcccaatccccaactggccatgagggtggcactatacagctgaagtccccccttgcaggtggtaaagctaccagtcatctcacggaatattcccgctccaattgccaatgagtcagcccagttcccaagcccttgatcacctctatcaagcctaagatagcttccaaggctaagaaggctgcaaataacggccatagctagtgccaccgaggtctcgctggctgcaactgccacccatacagctaccaccaaggtcaaattaacaatgagacagccagtatccacaccacagacagcctccataccgaaccaagaaagcctccaaagccacgaagacaattgctaacggtcataattactgacacctgagcatatg

SEQ ID NO: 432713 - DNA, 614 bp, Homo Sapiens
ccacagaaaacaaagcggtggataagaagggcctactataatggcttgtcatccatgaataattaagaagcatgtgagaatcaatgtttaaaatagaaacctgtattcatacctaaatatgagacaactcgatatcccaaggtcaaactgtaaatgagatatatatgaggtgcaaatacttctaacagtaataatacatgagatttttataattgagaaatttagtttctcaggtggtaagaaaacagccagttgagaattctaaggcatgaagctaagaggtgacttgtgttgaccccaagcaactccatgacgctgggatttctaagtccttagaaattcctggctggcccttgtcagaatgtttaaaaaactattctcctaaaagcctccatctgccagcatgttcaaagattatagaatgtggtctggctgcttctcagcgctcgctctattagggggcagcctccccaccagtacaccaggacatttgagaaggctggccctccaagctgcacctgggccatatactcaactggccttccttatctcctcaaaatgagttcgcctgtggagaggttactttgatacggacgcgtgggtcgacccgggac

SEQ ID NO: 432714 - DNA, 1190 bp, Homo Sapiens
  misc_feature (1148)..(1148): n is a, c, g, or t
  misc_feature (1169)..(1169): n is a, c, g, or t
ccaggattgaaataaacagtcaatgtgacttttaacatgtgtttttttgaaataaaggacacgtactcttcaattaaaaagttccttatagggactctggcaaatgctaacacagttgctttacaatgtttacaattcagacaatacgacttataatagaaaatcctcattcatttagcattgaaaagctggaagttgcttctttaatgttgaatagtatacagtggtattgagcatggactttctaaatgttttatatatacatataaaaatatattggtgtctcacacccagaaagatgttatattgtagatattattaggaaaacagtgtttctcaggaacgttgtaaattttaaatgatatatgtacttcccgtcctcccacctccactctgtgctctaatgtgagactgcttcagcagtgttgctaagttaatggaaaactttttctaatcaagtcaggtgaatgtgtattctgctaaataatgttagccatttacatgaattgtatggtcattaaatggaatcagtgattcctctttaatttccagaggggaaatgaattatggaaatcagtcagcattctgatcattaaattttatactttaattttgccgttcagcattctaaatatccaatgtgaaagtcacatgataatttgttttgcattgcgtgcactgtacaacacttacaacttgtcatttaaaatgttttctcgggaaatgaatgctagtcagaaagtaatagattgtattattcatagttttaaaattatgacaatgtcataattactacaaagctaaataatcgtgtttatttttgtgcagttgccctttgatagttcctggttttaaaacctattaagtgtataatcttacaaatagtcatctacaaaatttatggagaaagtgcccagcccattcacatcacatggaccaggaattcttttgtaaatgacttaaggtaacatcatgcagttcagtgcctaataaatgctttttaatgatgagcatttctataatgactcgtaagataccatagtctgatttttctcacattaaaataactggaagtcacttgtgtaacgtagttatactttgctgcattttaattaaccttcaacagctatttaaagtgggatgtaggntaaattttggaggggaggggnataaatgttttccctatttcg

SEQ ID NO: 432715 - DNA, 1081 bp, Homo Sapiens
  misc_feature (925)..(925): n is a, c, g, or t
  misc_feature (1035)..(1035): n is a, c, g, or t
  misc_feature (1038)..(1038): n is a, c, g, or t
agcgtgtgtgctctttctctgtgatcagaagtagatatctgcaatcagaaccctgatatttggaggaagtggctattattgtccaccctggctgcagcaagctgacccagaaatgtggggttgtgtctccacagctgcctgccatggagtgggtggggatgggtagctgctacttcactgaaggctgaaatccaccaatgttaactgcaatttaccactcagaatttcccctagaagctacaagtgttcagatggactcatgtgctcccaaaataatcactttaggaactttctgccgatgtaattattatctaggtggagaggtggattcctgggccactctatccatgtctttgatttttcctgctttcttgaagatttcttcaactttatcttccagctctactattaaatgttgtgaatgtttttatctctgctgtcatatttttatttccaagtgcattatctgattctttcttccttttttctaattggttttgtttcataggtgaaatattttttctctgagcatgttaattatagtgtctttctgtgttattctgctccctgcattatccctgtttcctttgagttgttttcacctgttttctgtctctcacactggaggctttcctgaagcctctgatgatctttgactatttatatttaagagcagggctctaaaaaagctgattggaacaggtgttttaggtacttcagcaccatccaacagtaatataatgtgagccacatacataatttcaaattttctagtagccacttttagaaaataaaacaggtaaaattaaaaatgtattttacttcacccaatatatccataatattatttcatcatgtaatcaatgtaaaaaagtattgagacattttgttttttgcactatttttgaaatctggtatgtaatgngttaatctacacacaaaattttcatttgtaatacataactcacatttagatttataaaacgtagagttgataagtagattcacatagttcttccaaacatactttgttgntgntctaaatatacttaattttccaataactgaatcaaggatccag

SEQ ID NO: 432716 - DNA, 465 bp, Homo Sapiens
gtccattcatgaaagggtaggatttatttacaaagttggcgggcgtcatagagaaaggtcttgagaggtcaccagaatcatttggagaataaaaggcttgcgttggtctgctccagctgccgtaatgaaataccaatggctgagtagtttaaacaacagacattcacagttctgaggctggaagtccaagtcagggtgccggcagcttctgttcctgcagagagctcacttcctggcttgtggatggctcccttctcactgagtctgttcctgctgctgcacggatttccccgaagcgcttggctccttggctgtggtcatggtctgtccaggcgctttccaccaccggggcaggtggggtctgacggcgagttgggagccaccagagtccaagcggtaaggtaaggaggagtgtgattttagtccatacttccgaaatcacaaggctattttggggaggatggg

SEQ ID NO: 432717 - DNA, 894 bp, Homo Sapiens
  misc_feature (251)..(251): n is a, c, g, or t
  misc_feature (254)..(254): n is a, c, g, or t
  misc_feature (436)..(436): n is a, c, g, or t
ggggcgggaggggtttctcacattaatttcgggggtcccctctctgggaccctttccaagccccagggaacctggaggtccaattttttatcccataaggtggaaggaaggcctcctttccatttttcttgcaccttgggtttcctgcccgggtttttaatcaaacttgtggcccatgttcggaggccacctctagggtgtttcttttccttggtaatatagattccacaagtttcttgcagacatcacanccnctctgcttgtcaacactctcataaagatccaggagcttttggtaaacaccaggcaagtcatccttagcatttatgtgattatatttctcatacaagtttgctaccccctgccaagctagtaattggtctggctctaattcagcagcttttttataggcactctgggcctgatcaggttgttntagttcagctgcagcaacgccaataaaaacccaggcattatagttatttttctcttgctttaacactgtcttacagtgtttcaaagcttctttgtattctttgtttctgattgcatctctagcactttttagagcagtcttcacttccttgctggacattcttatctgaaattatcttggtatatatttataggtgaaagcttcagaatgatttttttgtagtttgcaaatcttgattggagtaggtaacaaatttcaatgctgatttcacaattttctcaaaccagtttcctttggttaaaaaaaaccctgcagacttttaccaattattaccacctctatattcttcccgaattgaatttgattgttccttacccattttccatctggagcagatgctcctcttctacaaacgccgaggctgcaatgagagcgcatgcgcctttcccaggactcat

SEQ ID NO: 432718 - DNA, 751 bp, Homo Sapiens
ctatggggctctttgcattgtgctcacctggagccctttacacacttaactaatttataaattttttacaaatgtattttggtcagtatgtttttgttacagttatatatccaggaagaaattacagcttgtggtattttgctgtgtcatcttgcttacgtagtttgtataattttataggttagatttgtgaagtatatttatctgagtctagcaattgaaggcatgtgtttttattgtttctttcagttatgtattctcattttgcccaagacctttggtcagagcagagcataaaagattctttccaaaaagtgatcctaagaagatatgaaaaatgtagacatgacaatttacagttaaaaaaaggctgtgaaagtgtagatgagtgtccagtgcacaaaagaggttataatggacttaaacaatgtttggcaactacccagagaaaaatatttcaatgtgatgaatatgtgaaattcttgcataaattttcaaattcaaacaaacataagataagagatgctggaaaaaaatcttttaaatgtatagaatatgggaaaacttttaaccagtcttcaacccgtactacatataagaaaattgatgctggagagaaacgctataaatgtgaagaatgtggtaaagcctataagcagtcctgtaaccttactacacataagataattcatactggagagaaaccctacagatgtagagaatgtggcaaagcttttaaccaccctgcaac

SEQ ID NO: 432719 - DNA, 3074 bp, Homo Sapiens
  misc_feature (39)..(40): n is a, c, g, or t
  misc_feature (56)..(56): n is a, c, g, or t
  misc_feature (59)..(62): n is a, c, g, or t
  misc_feature (70)..(70): n is a, c, g, or t
  misc_feature (100)..(100): n is a, c, g, or t
  misc_feature (104)..(104): n is a, c, g, or t
  misc_feature (148)..(148): n is a, c, g, or t
  misc_feature (155)..(155): n is a, c, g, or t
  misc_feature (436)..(436): n is a, c, g, or t
  misc_feature (1412)..(1412): n is a, c, g, or t
tttcacagcggtgaaagtgggggagtggttggggggtgnnactgtacatatcatcnttnnnngactgggntcaagacctgatcctagtccacaaaggtgncaanaagaaggtggaggctaagaacacagaaaacacacaaaagaaagnaaaactnccttggcaaaagagatagaagtggtgagcttgccgagggatggtgggaagggggctccctgttggggccgaaccaggagtcccaagtcagctctcctgccttacttagctcctggcagagggtgagtgggggacctacgaggttccaaaatcaaaatggcatttggccagcctggctttactaacaggtttcccagagtgcctctgttggctgagctcttcctgggctcactccatttcattgaagagtccaaaatgattcattttcctacccacaacttnttcattattcttctggaaacccatttctgttgagtccatctgacttaagtcctctctccctccactagttggggccactgcactgaggggggtcccaccaattctctctagagaagagacactccagaggcccctgcaactttgcggatttccagaaggtgataaaaagagcactcttgagtgggtgcccaggaatgtttaaaatctatcaggcacactataaagctggtggtttcttcctaccaagtggattcggcatatgaaccacctactcaatactttatattttgtctgtttaaacactgaactctggtgttgacaggtacaaaggagaagagatggggactatgaagaggggagggcttccctcatcttcctcaagatctttgtttccacaaactatgcagtcataattgagaaaaagcaatagatggggcttcctaccatttgttggttattgctggggttagccaggagcagtgtggatggcaaagtaggagagaggcccagaggaaagcccatctccctccagctttggggtctccagaaagaggctggatttctgggatgaagcctagaaggcagagcaagaactgttccaccaggtgaacagtcctacctgcttggtaccatagtccctcaataagattcagaggaagaagcttatgaaactgaaaatcaaatcaaggtattgggaagaataatttcccctcgattccacaggagggaagaccacacaatatcattgtgctggggctccccaaggccctgccacctggctttacaaatcatcaggggttgcctgcttggcagtcacatgcttccctggttttagcacacatacaaggagttttcaggaactctatcaagccataccaaaatcaggggtcacatggtgggttttccccttttcctttgcctcttcataaaagaacaactttggcttttgaggatgggtggtctttttgcttgcagntttggctgaccctgacaaagcccccagtttcctgtggcaggttctgggagaggatgcattcaagcttctgcagcctaggggacagggctgcttgttcagttattactgcctcggagctccaaatcccaccaaagtcctgactccaggtctttcctaatgcacagtagtcagtctcagcttcggcagtattctcggctgtatgttctctggcagagagaggcagatgaacatagttttagggagaaagctgatgggaaacctgtgagttaagccacatgtctcaccaggaataatttatgccaggaaaccaggaagtcattcaagttgttctctgaggccaaagacactgagcacagcccagagccaataaaagatctttgagtctctggtgaattcacgaagtgaccccagctttagctactgcaattatgatttttatgggacagcaatttcttgcatctctacagaggaagaagagggggagtgggaggggaaggaaagagaacagagcggcactgggatttgaaaggggaacctctctatctgaggagcccccactggcttcagaagcaacttaccaaggggtatttaaagacatgaaaatttccagaaataccatttggtgcatccctttgtttctgtaatattaaactcaggtgaaattatactctgacagtttctctctttctgcctcttccctctgcagagtcaggacctgcagaactggctgaaacaagatttcatggtgtcacccatgagagatgactcaatgccaaggcctgaagttatagagtgtttacagcggtggcgatattcaggggtcatcgccaactggtctcgagttccaaagctctgatgaagaaacaagactccttgatgtgttactgatcccactgattccaggagtcaagattagccaggaagccaaacaccaggagttggggtggcacgtcaccagtccagagccctgccacggatgtaggcaggagcccagcattaggcaatcaggagccagaacatgatcaccagggccacaaataggaagaggcgtgacaggaactgctcgtccacatactggggtgtcccagggacagctggaggaggccgcccatcatttatattaaatgctgtggcaaatatcccaaagggaaatgccccaattccaaaagacatctggaagccaccatctccaaatccaaatccttgaaatccctctggattggtgtggttataagtgatttttttccccctcttttcctttctgtattttacaagttttcctttacttttataatcaaggagaaaaattgtaaggctaagaaggaaacttctaaagccatcagctcatttgtagaagcttctcctagaatgttcctcacccctctattctccggctctggcctctgtccttgaggacgaggaggggtcttctctctggggtcctgttgcccagtgctgccccttccatagagggggatgaccttgtctcggctgatgccagctttgcaaacaggacacacctgtctgttaggtctggtctccaaccactgatgtaaacacggcccactgcctccgcacagttaacgccagcccagtcaatcagtttttcgggtacacggccaatactaacgccgcgtcaatctgttgggtaagacctccgac

SEQ ID NO: 432720 - DNA, 1450 bp, Homo Sapiens
  misc_feature (1140)..(1140): n is a, c, g, or t
  misc_feature (1285)..(1285): n is a, c, g, or t
  misc_feature (1293)..(1293): n is a, c, g, or t
  misc_feature (1432)..(1432): n is a, c, g, or t
ttttttttaatgtaaaaccatttgtttaattctaaatcaaatcactttcacaacagtgaaaattagtgactggttaaggtgtgccactgtacatatcatcattttctgactggggtcaggacctggtcctagtccacaagggtggcaggaggagggtggaggctaagaacacagaaaacacacaaaagaaaggaaagctgccttggcagaaggatgaggtggtgagcttgccgaaggatggtgggaagggggctccctgttggggccgagccaggagtcccaagtcagctctcctgccttacttagctcctggcagagggtgagtggggacctacgaggttcaaaatcaaatggcatttggccagcctggctttactaacaggttcccagagtgcctctgttggctgagctctcctgggctcactccatttcattgaagagtccaaatgattcattttcctacccacaacttttcattattcttctggaaacccatttctgttgagtccatctgacttaagtcctctctccctccactagttggggccactgcactgaggggggtcccaccaattctctctagagaagagacactccagaggcccctgcaactttgcggatttccagaaggtgataaaaagagcactcttgagtgggtgcccaggaatgtttaaaatctatcaggcacactataaagctggtggtttcttcctaccaagtggattcggcatatgaaccacctactcaatactttatattttgtctgtttaaacactgaactctggtgttgacaggtacaaaggagaagagatggggactatgaagaggggagggcttcctcatcttcctcaagatctttgtttccacaaactatgcagtcataattgagaaaaagcaatagatggggcttcctaccatttgttggttattgctggggttagccaggagcagtgtggatggcaaagtaggagagaggcccagaggaaagcccatctccctccagctttggagtctccagaaagaggctggatttctgggatgaagcctataagcagagcaagactgttccaccagtgaacagtcctacctgctagtaccatagtccctaaataagattcagagaagaagcttatgaaactngaaatcaaatcaggtatttggaatgataatttcccctcgattcccaggatggaagacccacaatatcattgtgctgggcttcccaagcccttgcaccctgccttacaaatcataaagggttggctgcctggcagtcaccatgctnccctggtntagccccatacaaggagttttcagggactctataagcctacccaaatagggcccatgagggttcccctccctgcccttcataagacaatagcctttaagatggagcctttgctcccgtggctgaccgacaaccccattnctggagaggtctggagag

SEQ ID NO: 432721 - DNA, 1055 bp, Homo Sapiens
  misc_feature (159)..(159): n is a, c, g, or t
caaggacccttgccaggaaattggggttggaaaaccaagaattttcatgggtgttcacccccatgagaagagtgacttcaaatgcccaaggccctgaagtttatagagttgtttacagccgggtggggatattccgggggtcatcgcccaactggtctngagttccaaagcttctgatgaagaaacaagactcccttgatgtgttactgatcccactgattccaggagtcaagattagccaggaagccaaacaccaggagtttggggtggcacgtcaccagttccagagccctgccaccggatgtaggcaggagccccagcattaggcaatcaggagccagaacatgatcaccagggccacaaataggaagaggcgtgacaggaactgctcgtccacatactggggtgtcccagggacagctggaggaggccgcccatcatttatattaaatgctgtggcaaatatcccaaagggaaatgccccaattccaaaagacatctggaagccaccatctccaaatccaaatccttgaaatccccctctattctccggctctggcctctgtccttgaggacgaggaggggtcttctctctggggtcctgttgcccagtgctgccccttccatagagggggatgaccttgtctcggctgatgccagctttgcaaacaggacacacctgtctgttaggtctggtctccaaccactgatgtaaacacggccaacagaagaggtggccacacaggctgatgacggcatccttggctgtgtccaagcagatgttgcactcgaaagtgctgtcctgccctccgctctcgccagcgccattgctgctcccactgggcccccctgcactggagttctcaggagatgcagaggccgagggccccttgcttgccatccttggctgtcagcgaagctctgagtgaagactttccccagggaaatcctgcctccgcacagttaacgccagcccagtcaatcagtttttcgggtacacggccaatactaacgccgccctcgtgccgaattcgccacccaggcctcgctaccta

SEQ ID NO: 432722 - DNA, 2404 bp, Homo Sapiens
ttttttttacagatataacttttcctttattgcacattaagctgtacaagagtcacaaaagagaggtacttcaatcatacttccagcattggctgaggttctcccagttggatcagtacaaaaaaaggggacaacgtcaggaaagaaataggtacaaaacacctgaatggcaatcctatactgtgacacagatgtcccccaggccacagagttgtccctaagcatgctgcctgagggcacataacagtcaggttatgctatctgcttgcatttggcagtgggagccctaaccaatttctcccccacctgaaagaccttgactgacaccaccctgtagcctgactgaattcaaatggcaactttgcatttgtggctcacaaatgacacatgaaaagcaccagatgtacacactgataacatgcagagaagcaataccaccgtcagctcatcgcttggacaaaaatatacgataaaataatgtattcctccattctgggaaatgttactttattctatcgtttcatcagattgggaggtatttaaggacctgattcttatgcaacccatctggaagtgcaaatatgcatatatgtatatatttacaacagatcaactaccattatcagctgagggagggattacagatgacaacattcacactcaatgcatttctctgtggcctcagaatttaccagcaatcaaaggagaaaccaaggcacaagcccctggatacgtaactcttgttacataccaccaacactagttccttctcagatctgggagttcagaacggtgacatgacagtatagaggtggaagggaatgtaaaaatagagccagcagcatttcttctcaaaggcaagctgctggcatgaacttccacggaccatggtgtttgttagaggcggctgcttggtgcccgttcccagcctggccgggagatggcaagatgaggcactgaagctgaggcctggtttaatgaactgcctcagcatctgctcaggtgctgcttgtcagagggaagagaacaaactggtgaggattcctcaagagccaccgctgtggagcctctgtccaaaacacacacaagctaaatctgagacagttcctcccaggaaagagaaagctcctcaatctttggaccctggagggctgtggtaaacagctgagaactgaagcaggagtcaacctcaaggttctgtaggcagtgtacccactcaagtgacatgggacatttttgatttggtctcccattatgaggcctcaggagaggccaagagcagaatggacaaatccctgacagaccttcagtagctccctgcattctatgtccaacattgccaaggaattatctctgtacacaggtcaagctttgggaacagaaagcagcctcaggtccacacaagcgcacacatggctggatccagaaacagcaacaatgaagaaacaactgagatcaacacacacaaaatactcacaagttcactttgatattgcacatcagcggccccattttttaaaaatctcatagttaattagttaataataaaataaagggtacactgggatgtaaaatacagaacacattcctggaaatagcttgttctttgtatttcatgtcatcactaaaaacacaagagctctacaggcacagccagcctattcacataaactcaaactgcaccaaattttagcaaatggagaaaaaggtggatgccttcaaattcagtggatgaagctatggaagtttgatcttgaaaatctcttaatgttctatctagttacaatagtcatgcagaaagaaagcgaaaagcacagttcattgaagatcccaagcacactggtggagggaaagttggaggtgggggatttaactgagcttggggggaggagaggagttgggttttctttttgtggttttcgtttctcccctgtccacccccctactcccatttcaccccacattatatattacttttaaaaacactatcaaaccacccagaagataaagtcacactggacttgggagaggcacaattcttttgtatactgttgacaaacagccctggaatcacaagttatacagagaaaacataagtgagcattacaagcacgaacaggaacaggtaaacaaccagacagaggagctgacactgcataggaaaaacacagtccagtcagcattgaaagaacgcagcaacggcaccagtgggagggtctgttttcccctccccgctttcctttcgtttgtttttggcttaaaatttctgctttgaaaaattaaccaccaatcattttaagaagcttggacttgttttggccctactgcaatgccattacagtcgagaatatactgtaaacaaccttgagggggtggccggctgaggtggggtcttgcttgagtc

SEQ ID NO: 432723 - DNA, 930 bp, Homo Sapiens
gaggttcttctggtcccggtaaatgtacgccgctccgcccttgtggtcttccgccgtcccctccggggggttctggacggctcggggagcctccctgggcccgcgctgctgcaggacctgcaccctccgcagggcgaccagggtatgcttctccaccgcctgcaggctccattcctcattatcactcagctggccacagtgcaccaagatgacagctgccacggccccagcctctttgtccgctagcggcatgaccagcacttgggtatcaggagccagtggagccaccagcctggccaagggcttccctggcaggtctgagaagcccagcccattgcagcccagccgcttctgggagatgatagcctcccggactttcccctcctggggcagctcatgtggggggtcctcacacaccagctgggactcaccatccagtaggtaggtgtagacagtttccactcgggggagcacagctgacagggcccccttgacagcacgttgcaggcctgaaatgtcgatgacagagcccagactcagcaaggcgtcctgcaggctgtcggcgcatggctgcggcggcggcggcggctcgtccggcttgaggaagacctgctggccccgcggctcagccggtcgcgctgccgggtactgctggctcctgcagaggatggagtggccgcatgcctgccccatcactcctcatcgtccgccctcccctagccagactaaggtggcacctcgccctgtcccacgctgcacatggagttcagggcaagggcaccacccagcaaggcacagggaccaagagcagtgggctgccccctactcagcctggactcaacaccccaatccagctctgctgccacacagcatgctcccgcctctcccagctgccactgcactctgctgctcaggctgcgcctccccgct

SEQ ID NO: 432724 - DNA, 225 bp, Homo Sapiens
ccccgactagcccgacagggcctcccttgacagcacgttgcaggcctgaaatgtcgatgacagagcccagactcagcaaggcgtcctccagtcggtcgtctctactccctgggggtcctggctcctttgcaagggggtccaggctggctgcaggctgtcgggctagtcggggctgtcgggctagtcggggagctgtcgggctggtcgggggggtacggagctcga

SEQ ID NO: 432725 - DNA, 3164 bp, Homo Sapiens
ttccgggatcgaaacagatgctgtttatggatccttaaaagacaatccgctgcttttttactttttaatgttattacctgtgtagctctgtttgtctctaatacttgtaataaagtgtgggtgagagttcattggggagtgtttattttggaatgttttttgtagactctatggctagattctgaaactgctcattttaaaaagtttcatctgatggaaatcttccccagcaagccgcgtcagccccaagccgtgtggctgcagtaggtccctatatccagtcgtctactatgcctcggatgccctcaaggcctgaattgctggtgaagccagccctgccggatggttccttggtcattcaggcttcagaggggccgatgaaaatacagacactgcccaacatgagatctggggctgcttcacaaactaaaggctctaaaatccatccagttggccctgattggagtccttcaaatgcagatcttttcccaagccaaggctctgcttctgtacctcaaagcactgggaatgctctggatcaagttgatgatggagaggttccgctgagggagaaagagaagaaagtgcgtccgttctcaatgtttgatgcagtagaccagtccaatgccccaccttcctttggtactctgaggaagaaccagagcagtgaagatatcttgcgggatgctcaggttgcaaataaaaatgtggctaaagtaccacctcctgttcctacaaaaccaaaacagattaatttgccttattttggacaaactaatcagccaccttcagacattaagccagacggaagttctcagcagttgtcaacagttgttccgtccatgggaactaaaccaaaaccagcagggcagcagccgagagtgctgctatctcccagcataccttcggttggccaagaccagaccctttctccaggttctaagcaagaaagtccacctgctgctgccgtccggccctttactccccagccttccaaagacaccttacttccacccttcagaaaaccccagaccgtggcagcaagttcaatatattccatgtatacgcaacagcaggcgccaggaaaaaacttccagcaggctgtgcagagcgcgttgaccaagactcataccagagggccacacttttcaagtgtatatggtaagcctgtaattgctgctgcccagaatcaacagcagcacccagagaacatttattccaatagccagggcaagcctggcagtccagaacctgaaacagagcctgtttcttcagttcaggagaaccatgaaaacgaaagaattcctcggccactcagcccaactaaattactgcctttcttatctaatccttaccgaaaccagagtgatgctgacctagaagccttacgaaagaaactgtctaacgcaccaaggcctctaaagaaacgtagttctattacagagccagagggtcctaatgggccaaatattcagaagcttttatatcagaggaccaccatagcggccatggagaccatctctgtcccatcatacccatccaagtcagcttccgtgactgccagctcagaaagcccagtagaaatccagaatccatatttacatgtggagcccgaaaaggaggtggtctctctggttcctgaatcattgtccccagaggatgtggggaatgccagtacagagaacagtgacatgccagctccttctccaggccttgattatgagcctgagggagtcccagacaacagcccaaatctccagaataacccagaagaaccaaatccagaggctccacatgtgcttgatgtgtacctggaggagtaccctccatacccacccccaccatacccatctggggagcctgaagggcccggagaagactcggtgagcatgcgcccgcctgaaatcaccgggcaggtctctctgcctcctggtaaaaggacaaacttgcgtaaaactggctcagagcgtatcgctcatggaatgagggtgaaattcaacccccttgctttactgctagattcgtctttggagggagaatttgaccttgtacagagaattatttatgaggttgatgacccaagcctccccaatgatgaaggcatcacggctcttcacaatgctgtgtgtgcaggccacacagaaatcgttaagttcctggtacagtttggtgtaaatgtaaatgctgctgatagtgatggatggactccattacattgtgctgcctcatgtaacaacgtccaagtgtgtaagtttttggtggagtcaggagccgctgtgtttgccatgacctacagtgacatgcagactgctgcagataagtgcgaggaaatggaggaaggctacactcagtgctcccaatttctttatggagttcaggagaagatgggcataatgaataaaggagtcatttatgcgctttgggattatgaacctcagaatgatgatgagctgcccatgaaagaaggagactgcatgacaatcatccacagggaagacgaagatgaaatcgaatggtggtgggcgcgccttaatgatcaggcagggatatgttccacgtaacttgctgggactgtacccaagaattaaaccaagacaaaggagcttggcctgaaacttccacacagaattttagtcaatgaagaattaatctctgttaagaagaagtaatacgattatttttggcaaaaatttcacaagacttattttaatgacaatgtagcttgaaagcgatgaagaatgtctctagaagagaatgaaggattgaagaattcaccattagaggacatttagcgtgatgaaataaagcatctacgtcagcaggccatactgtgttggggcaaaggtgtcccgtgtagcactcagataagtatacagcgacaatcctgttttctacaagaatcctgtctagtcgctaggctcatttattgggcagttgggacatcagctctctgtcctgttgagtgttttcagcagctgctcctaaaccagtcctcctgccagaaaggaccagtgccgtcacatcgctgtctctgatttgtccccggcaccagcaggcccttgggggggctcacctgaaggctcgaagggcactgcacaccttgtatatcgtccagtgaaagaactgttagtgggttgtcagtgaacaaatactttattatatgg

SEQ ID NO: 432726 - DNA, 660 bp, Homo Sapiens
  misc_feature (342)..(342): n is a, c, g, or t
  misc_feature (374)..(374): n is a, c, g, or t
ccaaaatatatgttgcctttatttcactttatgacaagtttgatttttaggaaaacttggaccatttgggttcttaaactgatccttcacttctcttgatcatgttgttaggagaggggggtctgtttacttatttgcaaggatacaccatcaatctataagtactaaagccttaatagagggtcttttgatggtcaaagtcattaacaccactaggtcagatgctgcaacactgtcttttgtaattgaagaagtccctgacaatagctgtttctaagcatacaaacagaagctgtattatctgtgaccaaggctgttgtattttcaaggcccaagactatnggataacacaagattttttccaaacaaaaatnacttattgaattataccctgggagatacagaataaatgaatgcagtaatcaatacatttagttctacttgtcacataccataaagaaattgggagcactgagtgtagccttcctccatttcctcgcacttatctgcagcagtctgcatgtcactgtaggtcatggcaaacacagcggctcctgactccaccaaaaacttacacacttggacgttgttacatgaggcagcacaatgtaatggagtcctgtgaagcaagatacgagggctagaactgttttcctaaac

SEQ ID NO: 432727 - DNA, 663 bp, Homo Sapiens
  misc_feature (596)..(596): n is a, c, g, or t
  misc_feature (631)..(631): n is a, c, g, or t
  misc_feature (644)..(644): n is a, c, g, or t
ggtgaataacacaagtatttactatttaccattttaaagaacttaccatataatattaaacaataaatgtatgggactcaaaaccacatctgactccaattcttactttcttcttctttcacatccctacccccatggctgaaaataccctccccaattttaaaatatcaaattaaatgtcaccagatgaaacactgcatcttaaaagtcatttttaatcctcgactgtacacaatccaaatcttggtagcagcatctgacagggtaaataccaactcttgtgcaagggtcttttatatcctcaacccctctgattctggaaccggttccctaaacaaaggcagacttcttcagcttcttccagaatagacattagacatggtgacagtgataaacctttggggtgggctagtctttttcaacattgatggagcagaatttacaccctctgattcaatccatctcaggtaaatgttcaatgatggccttcctatctacttctgctatccgggggaacccacctctttaggagttcaatggcatggtggaaagggctccatggatttggttaattattcaggaggtagggggagggncaaggggggtttgaaggggttttttgccccagggnaaaggtctttttnggggggttcttttcccgga

SEQ ID NO: 432728 - DNA, 445 bp, Homo Sapiens
  misc_feature (18)..(18): n is a, c, g, or t
cctcaaactgaagggaangctattactggtggtgtccctacggtaagacttaagcaaagcctttttcatatttgaaaaatgtggaaagaaaagatgttccctaaaaggttagatattttgagctaataattgccaaaaattagaagactgaaaatggacccatgagagtatatttttatgagggagcaaaagttagactgagaacaaacgttagaaaatcacttcagattgtgtttgaaaattatatactgagcatactaatttaaaaagagaacttgttgaaatttaaaacgtgtttctaggttgaccttgtgttttagaaatttgcacttaatggaatttgcatttcagagatgtgttagtgttgtgctttgccttctttggcgatgaatgtcagaaattgaatgccacatgctttcataatatagttttgtgcttcaaagtg

SEQ ID NO: 432729 - DNA, 984 bp, Homo Sapiens
  misc_feature (765)..(765): n is a, c, g, or t
cactagtccacggttggctaaggcattgtgagtagcaggctcctcacagccctcatgaattctggcctctagccaaggcagaagcagtttcaatctgtttcttttttcaacctcagcaacaagctcatcagtagagaattgacctcttacacaagaatcaagttttttatgacatcttcagaacagtcaacatcaagtaatcctccaataactacaggaagtcgacttggattcaccttctgtatatatctctctatatacttttgaagattatttctatataaatagagcaccaaatcatggacaaagtcaaatcgatcacacacaatgataagtggtagctgatctgttagttttgcttccttaagaaaattcttgactcgctcaggatcgtagcagttgctttctctacagattctttctacttctttgatttgcccagtcttgcaagctgcctgaatatatttaaagtgcacatctgggtcctggctaaagttaacaatggatcccagaaaataaaagagaccttcaaaactcttgaaagattcaaaaagttcaatcagagactgagttgacagttgttcatgatatttagaagccacctgaacacaaatctgcagattctgacggatgttggcagacagcatggctctgagacattctagggagtcttctactgataaggaaccaaagtagttgactaaccactcagggttaagaagatgggtgtgaaccactgcacgttttatatcatataaatcagtnaaatgttctaatgcacgctgcagtaggccagccttttcacacagttgagcaatatgagcccggtcataatgtgtgaacatctgattgcctagaatagcatctgcaacttgaggcgcatgcataaggttcatctcaagtaaccgcgtctgtaaaggaccttcagatgggcgattattcttcagagcatcaagcaagaatgcagtacactgctgaattaga

SEQ ID NO: 432730 - DNA, 778 bp, Homo Sapiens
  misc_feature (35)..(35): n is a, c, g, or t
cctacgagcccagttttcggcactaggcctccagnctgaggtccacagcccagctgcagatgtcaaccaaaaccttgcctcgcccagtgccacgctcaccacaccaacttctaacagcagccacaatccgccagccaccgatgtcaatcagaacccaccggcaactgttgtcccacagagcctgccactttctagcatccaacagaattcctcagaggcccaactcccatctaatggcacagggtcttctttcaaacccagcaccctgtgtgctgatgggcaaccccaggcaccggctgaggaggtgagatgcagcacactcctaattgacaaggtatcaactccagctaccaccaccagcaccttctccagagaagctacgctcatccccagctccaggcccccagcctcagatttcatgtccagctccctgctcattgacatccagcccaacaccctagtggtgtcagcagatcaagagatgtctgggcgagcagctgccaccacgcccaccaaggtctacagtgaggtccacttcacactggccaagcccccatcagtggtcaacaggacggccaggccttttgggatccaggcgccagggggcaccagccagatggagaggagccccatgctagagagacgacattttggggagaaggccccggctccccagccccccagtttgccagacaggagcccccggccacagagacacataatgtcccgcagccccatggtggaaaggaggatgatggggcagcgaagcccggcctca

SEQ ID NO: 432731 - DNA, 846 bp, Homo Sapiens
gtggcaggttctgtgggactacagttgccggtgggttctgattgacatcggtggctggcggattgtggctgctgttacgaagttggtgttggtgagcgtggcaactgggcgaggcaaggttttggttgacatctgcagctgggctgtggacctcagctggatgttgggccggtgaggactgctgggcctctcggttttgggacaggtgcagcccattggctgtcagcagtgctgcatttctcctttagagtaaaccaccagtggtacctcttcctcctcactggccaccttctccaggtgccgcagcaagctagcctcctctgagtacccctccatgctgtggccagggacccctctgtcggggctctggggactggggtgccgtggagggcctggctccggcagcgaggtggaactcaggctgagccccggtgcatggcctgggaggcttgaagggagcactctgagggactcctggctgggcttctgtcccctctggccgtggctctccaaggtgaactcgttcaccctctgccggcgcctgttgaagagctggacgccacgggaattggagctgggaggggtggtcagctgggctgcaatctgctggctccgcgccttggcttctttcagatccttctccgtgaggctagtgctccggcccaacgtctgctaggtcctccctgaagccaagcttccccctggatgctcctgccggccttcaagccttggttctcaaagcctccggcaaaggcagccaattgcttggctgacgaagccaggaaaatcccacatcggcagcaacatgaaggacgctggatgtgacttttctcctccacagatgac

SEQ ID NO: 432732 - DNA, 2332 bp, Homo Sapiens
  misc_feature (1798)..(1798): n is a, c, g, or t
  misc_feature (1811)..(1811): n is a, c, g, or t
  misc_feature (1972)..(1972): n is a, c, g, or t
  misc_feature (1996)..(1996): n is a, c, g, or t
  misc_feature (2084)..(2092): n is a, c, g, or t
acaaggcgtgcgccagattagtaggcaactccattttaagaagctgcctttttcacaaaactggaagaaataaaagcggttggaataaacaagttaaaagtctttaatgcaaaaagtaattgaaaggcagtgctccattttggtgtactttcttggaagaaagtataaaattgaccggcatcatgagagacggaagatgccgtgttctcagccaaacaagcaactctttccccgccaggcactgtcgggtggggtcaggccagcttttaaacactggggactggatcacagaaaaacagtggttttctgtccctggaaatgaataggcacaaagacccacttggctgtgggcagactactcttcaataagatttgggtgggaggaggaacattccttttgctattttgagctgagacaatataaatattcaaactgtgccatgcataaagcattgaattctcagggcacctcttcttccccttaccccttttaaggccatcccctccattaataataatccaggtagttgtgaaaatcgtgcttctatctgatcccttcttagtttggcttttcatcccatcagaacaagtaaacgtaggcgccacagctcttgtgagtactgtctccctcacggtgaatgagcctcctggtgtttcgtccaagaaaagaaagggtgtcactggaaccacagccctttttcattttataaactgcctcttcatgttgcctgctcaagtttccacctagaattgctatcactgtggctctttctaaaaatctttctatttaactggttcactgaaattagtcatagaaaacttgtgatttggtgaagaggcattccttgtaataaccaaatgacttgggatggtgtgcatagcaagggcagtgttacacttatgaggactgtctctagcatccaggaagtctctgggtctgagggatggaaagttcttcctgctatgaatgagagtggactcttcccctcacccccaactgaaaccacaaacaaccagaatcttctggaattctgacttagagtcgttgttatagaagaccttgttgctatggaacatgaaactgtgtgtcagatggagagatccccttaacctaagagccttaaatagccctgaaagtacactgggacggtttgcgatggaattaaaattggaagtgaatatttttaggtgctcttgaagctttctggggactcaaaattatcaaaagtcagggacagtccggaggaagagcgtctgcaaaactgggttcctagaagtatagacggacttagctttttgtagaatttggtgaggagcagcgcctcgtgagagcagaatggcctggcgtggccagtgcttcccggcagcacgcagctctgcggcctccagaattcccctgttctgagcttgatgcccctagcctgtcccctacctacttcctcccctcctctctagccctctcacaggggtgattgctacctctctgttttcttgggcctaggcaagttttagaggagttcccaagcattgttatgatgccagtgtgctcgctgggctgggcgcggatggcctgggcttgtgtgtggcctgagggctctcctggggccttctcttttcccagtcacctttggagccacagaagcagtgcactcatttggatgtctgttctgtaacacagcttctctttctacattaaaaaaaatcattattgcattttggaaagcagtgctcatcaaaagcaacttttaaaacctattttattgttcctttaaatgttctctcccgctgaaactgcccnggagaggctatcngctgctcttccattcacccacatcaggttattctccatgtcactcagtggagatcactccagatgtgtttaaagactggacaattcacctatactgtgtaggaaattacctccttaattacctggtagaattgtcagcagacatgttcatccgatgatagnactgcagttttctattaataattngcagacttttatctaacctgcactcatgtacagattattaaaagttttaaaatgtaactgatcagtattgatcaatcattgtcttgannnnnnnnnacagcgtatatttctaatcatattttttaaagccaagagaactggttgaatgaatgtttattttcctgaaggtatttttaagataaagcttcctaatggcgtgtaaactttgcatatgtatgtagtttgatacatattgtcacatttgaaaatcttgtgggttgtaactggttttatacaaaatatcgaatagtggaaattgtataattacaatcatgtaattaaaagtattaacccaac

SEQ ID NO: 432733 - DNA, 527 bp, Homo Sapiens
ttttaaaaaattcacatggagaaaattgtaaaacttgaaataataagtcccactgtaacattgtctactttatttttttaacacttgtacaaactacactttcttattaccttactatgctttgttgaaaggatatgctttagtcttcaagcttttaagaatattagaaacaacatgattaaattcaagtacaaaaagtcctttagactattccgaaatatcaatttttatatggcacaagtcatgatgagtaaatgaagctttccatatgctgatggcagagtacagaataatagacaaaagccacaaaattgaaatctaaagtatcaaatccattctggggaattatcttcaaacatctgtcataataaaaatatgcacaattttctaagaatcttggactttttcaggactagaacgctatttaatgtgcttatacaatttatgaagtgatgactaaagccctaaaaataagtgtttttccttaattaaacatgagtagacagatactctactctcaggccatg

SEQ ID NO: 432734 - DNA, 1364 bp, Homo Sapiens
ttgtgaagtgcttttactttctctctggctcacagtatcgcaaggagctaagtaaggcctgtatggaatctccactgtatccatgggatgggaggtgctgaacacacgcccaaggcaacaaggccactcagggaaggagccaggccatgccactgcgtgccttccatcctaccaagctgcttctgctattctttgctttacacttcagctcatttactcaaggaaatgaaatgaagtgggcaaacagggacagaaatgaaaataggaattctttaagtgggtaaatttgggacaataaaggcatcaattaaaatatggttcaggaatagggagaggtgctccttcgtgcctcacagaagcacggacaattctgtgctatttattgtctttgaaagagggttcactcaaacctctgccgcaacacctccagatgcacattcggtgtcttctgtgctgagctggcagatgccggggaggggtgctgtgcccctcacctgcctgccagtcacagtcaagggtctccttcaaggtgctctgggcccatgttctgtagcgacatgggggatggttgtgccactgcccaggcagtgatcaagcctttgtgacggcccatggggctgggcctgccttgtgctgtgcctgctctgaggcagctggggctgtggtggggagccagggcctcattctgtaaacccagtgctggttctctgggagtctgcagccacaggcacgtggcacatattggtccctagttacattaagggcaggggtaggatttgcatctgtttaagattacaaggactggatgagttctgaaaaattcataattctgaaaacctattagtttatttaaaataatggatggcatgtacctatatatgtagataagtctccttttaaatttttttaaagaaccaaagaatcctacaagcccccgtaacacacatacttgagttccagatactcatcaatgccatacttggacccctctcgcccaaggccggactgcttcactccaccaaaagggcactccacagaggaaattaatccttcgttgacgccaaccatgcccacttccagctgctctgccactctccagatctgggctgggtcttgagagtaaaaataacctgctaacccaacatcagctgcgttagcgattgctatagcctcctcctctgtatcgaacttgataactggtgccagaggcccgaaagtctcttcatgagtgcacagcatgtcctgggtgacattgcacagcagggtaggctcaaagaaattttttccaagttggtgtcgttttccacctgtcacaacggtggcacctttagaaacggcatcattcacctgtttctccaccttta

SEQ ID NO: 432735 - DNA, 407 bp, Homo Sapiens
ataaatttcaacagtgcttctccgaagagaaggtccatcgataaatataattttatgtgacttgttattgtaagattgatctgcctccctgtaggtatcattttttgaagggggttaacctgctgaagttttgccagaatggtgactggctgcgcttgggttcggtgaactcaaagacctgcgactgagcgatgccgtcgggggaccaggtactggccgtggtttaacgggtcctgcggtggtgggtaggaaggaggaactgagcgggcagagttgacacctttttgcttagggacttttctcacagtcattgcagcctgcctcttctggttttcagaaatttcgaagccaattttttcatcttcctgtaccattttcctctcttctctgaaaggcccattgcacgg

SEQ ID NO: 432736 - DNA, 814 bp, Homo Sapiens
ggccggagcgctttcctgctgtgctccggggtcttgtcgtgctcgttcttctgcacgctgtgcatctcgcacggcccgtttcctgtgaacagagaccgcttggcttcgggcaggaactgtccaaactctgagagcaggtcctcctggccccggaagaggttggccacctcggtgaacacctcctcttcagacatgcctcggaatggccggcccctcgtgttcagctgctccttctggtacgtgtgcaggatctccaggaatgacctgtagatttctgggtggtctaggaagcgggttttaatcttattcacatagctgatggcgttgttgaattccacggaatcggactccaggggcacctggggtttgtcctctttatacggcacctgctgcttgaagtcctctgcaccgtccccgtggttgtgcgaattctcctggcttgtcagaggcgactgtatgtttaacttgccattcttgggaatgtctattctatatccgaggggaagaaaagcgttgaatccaacaatgaggtcagggtgctcgtggaagagctgcgagacacgtctgatgactccaggagtatcgatgctctggcttttgaactccttcatgatctccaggaagccgttgtaggtggcagggtcgctgccaaagcggatcttcacctggtccagataggtgagggcgtcttctacgtgcaccggcagcttctcgtggcctgcggagcccgagcgaccccagcgggcgccgctcagcccccggcccgcggggccgccggcaccgctgccatcccgggaattccggaccggtccag

SEQ ID NO: 432737 - DNA, 1866 bp, Homo Sapiens
  misc_feature (97)..(160): n is a, c, g, or t
  misc_feature (177)..(280): n is a, c, g, or t
aagaattttataagtaagtttaatattaattaataatagattatgagatatataacaaaaagaaaagaaataacagaagagataaaatagaatattnnnnnnnnnnnnnnnnnnnnnnnnnnnnnnnnnnnnnnnnnnnnnnnnnnnnnnnnnnnnnnnnttataagttataagttnnnnnnnnnnnnnnnnnnnnnnnnnnnnnnnnnnnnnnnnnnnnnnnnnnnnnnnnnnnnnnnnnnnnnnnnnnnnnnnnnnnnnnnnnnnnnnnnnnnnnnnntttacagcagtttagttttaaacatagtaaacctgaaagggagcgagagcacgtgctcacacctgggcaggggaataagataatcttgtactacaggataattcatcacatcttctgcagggcagccactcaatacgatacacctgatgcagagaaattaaagtctgatctggagaaagcctactttgagaattggtgggaggggatcaagtacaagagtctccacagcttggacaaagcacaaacaaacctgttattgacaacatgggaatgagtgaggattttttccttaatttactttttttcctcttacatttttttgcacacatgctccattgatacatcttcccaaggtttgtctggcatcagtctgtaaatcattaagagcataataacaaaagtgaactcttcaggttttcatgaaggtttaaaaaccccgtaactgagctccttcttgcagtacttgttgccctaatctaagcgtcgggtgaagttctctggaaagaggcctttgtaggtggcaaggtctctgtactgaagccagtctgattccttcactcccaccagccagcctgcatcctgatcagcttctgaatctgaggggaccaccagcaccacatcacccctttgtaaggtaagttcatcagaatttgctgcctcaaaatcatgcagtgtttccaccttgtagagaaagccaggaggcaattcctgagaggcctcccttgcagatgctagctggtcagcagcccccatggctggtgcagaaggcgtgggctgagggtcctggataggcttctgctccgtagccagctccggtgtctcgctggtggggcccggaggagccgcgtcctcggtggtctccttgggctctgcacctatagttatttcgttttctccttcctcttcatggttggaggcaggctctatgaccaccgaaggaatgaccttctcctgaggcactgttgcttcgagctcctctgcttcaggttgggcactctctgcaccctcagtggtttcagttccaattttggcctcctctaaacttactccttccccggcagggacagtggccttctccgcctctgcttcctctcctggggccccctcagctgctgacaccaaggttccaacagctgcatcagcatcagctccaggtatgatcactgcctcctccactggctcctcagcccgagtgtccatttccaaggtccagaccaacggcaggtgtgacagcagccagaggctcctctgcttttggctctgtgggtggagcctgttcagattcagccaagttgcagatcatactctggtctgtctgcattgtgaataatgaagtatcctggggctgtgtgaatccattaaatgaaccaccagaagccggctgtaccaaatcagtgcttgtcgtccataggtcccagggcaatgtctgagacatgggtgagtgggtcactccagcagaacctgcaggtgtcacctcgggcttgaaaggatcaaagtccagatccagcaaagtctcctctttgttcacctcgggtcattcattcagggaagagccagtcacatcccgggaattccggaccggtgcc

SEQ ID NO: 432738 - DNA, 863 bp, Homo Sapiens
  misc_feature (269)..(309): n is a, c, g, or t
tttaaacatagtaacctgaagggggccgagggcaccgggtcacaccttgggcaggcgaataagataattcttgtactacaggataattcatccacatctgtcggcagggcacccactcaatacgattacacctgatgcagagaaattaaagtctgatctggagaaagctacttttagaattggtgggaggggatcaagtacaagagtctccacagcttggacaaagcacaaacaaacctgttattgacaacatgggaatgagtgaggannnnnnnnnnnnnnnnnnnnnnnnnnnnnnnnnnnnnnnnncacacatgctccattgatacatcttcccaaggtttgtctggcatcagtctgtaaatcattaagagcataataacaaaagtgaactcttcaggttttcatgaaggtttaaaaaccccgtaactgagctccttcttgcagtacttgttgccctaatctaagcgtcgggtgaagttctctggaaagaggcctttgtaggtggcaaggtctctgtactgaagccagtctgattccttcactcccaccagccagcctgcatcctgatcagcttctgaatctgaggggaccaccagcaccacatcacccctttgtaaggtaagttcatcagaatttgctgcctcaaaatcatgcagtgtttccaccttgtagagaaagccaggaggcaattcctgagaggcctcccttgcagatgctagctggtcagcagcccccatggctggtgcagaaggtgtgggctgagggtcctggataggcttctctgcttcaggtttggcactctctgcaccctcagtggtttcagttccaattttggcctcctctaaacttactccttcgct

SEQ ID NO: 432739 - DNA, 538 bp, Homo Sapiens
  misc_feature (109)..(149): n is a, c, g, or t
ggagaaagctactttagaattggtgggaggggatcaagtacaagagtctccacagcttggacaaagcacaaacaaacctgttattgacaacatgggaatgagtgaggannnnnnnnnnnnnnnnnnnnnnnnnnnnnnnnnnnnnnnnncacacatgctccattgatacatcttcccaaggtttgtctggcatcagtctgtaaatcattaagagcataataacaaaagtgaactcttcaggttttcatgaaggtttaaaaaccccgtaactgagctccttcttgcagtacttgttgccctaatctaagcgtcgggtgaagttctctggaaagaggcctttgtaggtggcaaggtctctgtactgaagccagtctgattccttcactcccaccagccagcctgcatcctgatcagcttctgaatctgaggggaccaccagcaccacatcacccctttgtaaggtaagttcatcagaatttgctgccttaaaatcatgcagtgtttccaccttgtagagaaagccaggaggcaactcctg

SEQ ID NO: 432740 - DNA, 2182 bp, Homo Sapiens
catttatgctatggagaaaccagcatggagatgtcatgggagagcatgcacaggccccgccctagggagtggtgatgtgtttggggaggtgcttgtttccaggtccatcccacacgttgtccagttggatcctatggcaggctggctgtggctttctctctcctgcttctcttcctcctccagataagggtctgcaggatcttctgcttagcaagtggtggccaaggactggtggatgggtggctggaagcagcgcacatgctccacagtggaactgtctgtctccacggacttcatgtatttgttcaggatggcaaaaacctcattgttcaagatctgatacttcctgatccggtcggccatcttcttcaggggcacattcttaatgatttcatccttcccgtcctgcctctgcacttttagcaggtggtaacagaagtcgaacaggtcaaagcgacgctgctggcccagcaggacaatgatggagcaaccagcccagttcaagccatcgccgaaacactgctcagctgtgaactcgttggttcccacagggatgcagtacacgaactgcatggcgctccacagccggtggaactccacacactcatcgacgtgcatgacgccattggtgggcggtgggccccgccagatggggtcctgcaggtagctccgaatgcgggtcaggatgacctcgaacatggacaggccacagcacagccgctccttggtcaggaggtcaccctcgcgagcaatggcgatttgctgagggtccccagccgctcgatcagagggaccaggtggagcggggcatacttggcttccagacgtttcatccggacctccaggcgctccccctctttgatgtagactctaggcaagatgttttggaagggtgcggcatggagcaaatcgcagacctcctcctgagacagagcttgctctatgaggaggcagaagaggatggcattgcccacttccctcaggctctggaacacgtctgttttgagctctgcgtactcaatgatgtccttcagctggtggtggaagaactccaggatccctggggagccatactcatgtcggggcaagcggcatatcttgggcatcacctctatcagtgttttcacatactggagaatggttccttggagcaagctcttcacaatctttagcagttcctccatgaccacagcgatgccctgataacccaggagtctgcagatagtcttgaaatgaggtggccccacgaaattcctgtaggagctgtagatgtggctgtaggcaatgttgagaggcttggatccatagaggtaataaggctggacgttggcaggtttgtctcgttgtggttcttgggtgaaaggaatggcagtccgcacaaaacggttagtggacccattgtagcagtagttggggagaaagtcaaagttcagttcccagaagacatgcagggtgatacggccatagggggcggacacattgtgattggcctctcggaacatggcatcgaagctgtccagcgtcatatgcttacagagcagccgatgcgtgagccggttaatctccagcagccactccagctccacaatggaggtcaggtcctcactctcaaagcggctgatagcttggtccaaggatttatacatggcggcagagatgcgctgggtaatgagtctgttcaagtcaattgatctacccaacagctggacgtgtctctgcttcagcagtgtttcatagcgattggacggtggatacggaatgatgacgccataattcttacactcagctcgaaaacgtttatccaacaggacactgccagccatggctttgtagtaagcaaagatctggtctgccagcttgtagacaaactgatcaaaacacaggttcacctcagcttctatctcatcatacaggaactgctttttaaacttggtcagagcatagtaggcgctgtcgttgtacagatccagagggtagagcacatactccatcatggaaggttctttggtttccaggatatggtccgttagaatccagtgcatggacatctcgatggggaactggattcgtcggcccatggttaactccaggaagaattctcggaaccagagctgggagaggtcacacactgctgcagggcttcactgatgttgagcagatgtgtgaagaagataactgttgt

SEQ ID NO: 432741 - DNA, 514 bp, Homo Sapiens
actagaaattttaaatggtgcaaacgttatggggtcttctccatacaaaggccaatagcgctcacattctttccttcccatctcaaattctcggcaggccattacaatgatcactacattatactcccatatcatcctccaaaaatctattactgtatttgttaaaggtccttgagttgctacatatgcttttggcccatagacgccctttataaaatttgcattgatatagtctgaatcttgtgaaggagtctttaatgtcaatttaactcggctgtgatcaaatggcagtatgtccttgtatctgttctttttaacattttcttctttttctccagtggctgtgggatatatcttttctgttctatatttggtagacaatcttcttaaccgcatgaagtcccgggcgaagttgtcctccccattgtggtcaggactcttcatggcctggaccctctggatgaatttcctcaggatctccacttgctccatcctcccgcggtaacagaccgta

SEQ ID NO: 432742 - DNA, 3005 bp, Homo Sapiens
gttgttcagagcaaagtcatttttattgtaatgaaattttaaaaggcagttacattagttacacatatacacaaccgacttaataactgttagtcatagagaacattcaagaaatacaaatgatttatccacagcacagttcacatccataagaagaaagagaaatggttaagtgcttaaactgtccactgacacctgcttatgaaatcttttcctttctttctttttttaaaggaaactgagattgttagatgaagcaagccgtcctgctcccgcacagcctgtgaaacctccattttgccactttcaaggtcagtgccccacagaccctggcctgttgttgaccataacactagctttggccacaaaagccagggacacctacgcttggaaatgtgcctgcaccactgtgtggtgcctccttaagttgccccagactccagatggtcaaagaaaaggtgaatgtccaggtggctcatggctccttagtatggggtgtttggtggggaatgaccccggcaggttaggagacagcgacttaggccaagcccatattttctggtaatataaaggacacttctattctgacttgttattcctagagctgttccggtcactggcttcttcctgtttatgtggtaggtcagaaccgtgacggagcaaggtgagcgttcacattctcgcatagcttatgggctgcctaaagtgctgccgggagtggggagaccaccattcattccctgggactggtttctttctcggctaaagctagaaggacactgatgtttgcatgtgtggctaatctggagaacatgtagtcacattgttgacacggaagagtaaagctccccagtgtaagttccttaacaaccagaatccccccactctctgcaacattcacgtctcatgaaataacaacagtgtagaatctggtatgttggagagtagagcagaatgtggctatttgtgatggctgtcactccctgaagccaaagctaaaaataaaactggggggagtgacgcatggacagagtgttctagagccatccttggccatcctgttgccatcactgacccagtcctgatggagccttactgtggctgcatctgtgtccttgctgccggcccgggttgtcactgtacagacctcttcagtggggagctgtctgcttgcctgacctaaggaaagccagttgaaagtccagtagttcaaacaaggtgtgagcgaggaagtgagtcacagagtcaaacaaagtcacaagtgcctctcccctttctaatccagctttgagcccgtctccagtcagagaggtatctgctgggcatgggctgaaggacaagcagaccacaggggccatgagcattccggcctccaaggctgggcggtactggcatgggaggctcttttgcaaaccaggataattaaatcctctggggctttaattcttactccagtttgtcttgaaaatccttggtgaaaacccctggggcatgtgcgattctcccagtcctgggcttctccccctccatcacccctattttcttattgaccccatgacggcttttacaaatcataagcaaaaactgcagtcagactctactcagatttcccgcctatgctcctaggacagagctggaagggaaggaggctgggcctatttagtcataatgcctccccatcaggtctagctttcattcatccatgaatcctcacccaagggccaagaactgagttcactgcaccctggacccctgttgaggtaggagaagtagacgttgggagcaaggatcctctcctaattttgttgcatcccctcagtgcccagcacagctccggatacagggcaggttcacagtcagcgtgttcacctgggtctgtgtatgcacctaagaaaagcctcaactctcctccaagaaacagaagaggcaaaacaaacataagaccccccaaacttccaaactcacaagctaaaggctataaaaagactgttttcatttcactgagaaacacttctttgatccaaaacctatttttgtgccttttttggggggaaataattatgcccaaggcctggggcaagctcaagcctgctggaggcagaggtggccccaagggcagggcaggcagagaaaggcccattctggggctggccctgggaggatgtgcagggtttcaaccacctgccatttccccagaagcaagaaagcctctgaggttggagtgaacactgcatgcatctacagtggagacccaatcaccattacagacaaaaagctctagaaactgcaaagttggggttaagttagagtctaggaactgcagtcatgcacagctggcgaccagccaaaggcattttactgagcaatgtttgacttttgtaggtcccccagcaacattgagcacatggatctccctggccagacagggctggggtttaatgtggagctttcaatggatcacagcaaacactctctccaaactccttcctgcatgctggcctcactccactctcaggttcctagaaccaatgccactcttctaggtcctgcagaatccatgggcagggatgcacgggttgtttctgagcaagcagcatctgcgagggcctacctgaaggactctgggagggacacaagggctttcccagagggtaggtccctccatgtgccctgcagcagccacggtaccttttctaccatatgggagtcagtgggctgatgggctggtgataagaaacagggagggggcgtaatggtcacaaaaggaaggaaacacaagaggccgaaggagtcctcactagtgtaaggggtgtgggagaaggcagaggtccctgaaaacagggggatggattcataaactctcctcaaatccaagagaagcacagcaagccagggatcatgggctcagaggtcagccaggcagaagattctagagtcagctcttgttcttgtcttgagaccaccagagaaattcaaggccggtgggtgtgtggcagaaccagaac

SEQ ID NO: 432743 - DNA, 300 bp, Homo Sapiens
  misc_feature (43)..(43): n is a, c, g, or t
  misc_feature (81)..(81): n is a, c, g, or t
  misc_feature (134)..(134): n is a, c, g, or t
  misc_feature (144)..(144): n is a, c, g, or t
  misc_feature (154)..(200): n is a, c, g, or t
  misc_feature (220)..(220): n is a, c, g, or t
ggattttgacctgtcaatttgtatttgtgtgtgaatgtatttnaaaaccaacaacaaaaggaaagaaaacagctacaaggnggccgaagggcctttgggtgactcactctgccaggggcagtgtggatcaaggncacatttgtnagcgcatgcnnnnnnnnnnnnnnnnnnnnnnnnnnnnnnnnnnnnnnnnnnnnnnntgtcacccgtcccagccatntgtgccacacacatgccatgcacactcacactcccagtccccccaggttggagcagggtccttctgactgcatttctggg

SEQ ID NO: 432744 - DNA, 2227 bp, Homo Sapiens
  misc_feature (2013)..(2053): n is a, c, g, or t
ctttttggtgtttataaagtttttattttccattttcttaaaaataacatttgatttcctttatgcatgtgtggagtgtacttgtttccttaggctgagtaataggcagataaagacgacacgaggcagggtccccaagtggaggcggggcgggacgtgagaggatgggggcgcaggggaaaggcagggctggatgactcacgggactcttgagtgcccatcaacgcacacgcacacagtctaacactttgtttttcaattttttaaaagacatctaaaattactgagagatacaatttcagcagttaaatctacagacggaaatccaagcacttgaacacaattcctaactctaagctcagttattgcacatcacacagtttaagcaggcttcaggctggaaagcagtttgctctgctgggaacttcctcgggatgtctgggtctccttctgtggtgtctctcccctgggactgccgccagcccgcagcctctcgacgaccccaggtatcaaagctcagccatttgttctccccaggggctgagggctcgggctttggtgaagcagagggtccccgtgttgatgccaacggaccccaccccctccaaagtgaagttggaagcaggtgaagctcatggaaggctgaaggcaggcgggctggagtgaaggggggtgaccaccccccacgtgtgggacaacagggggcagtcaagatgccgccacccaccacccctcccttccaagctcccaggccatgcttccttctccatcacccttggaccctctctgagtggtctctcaaggcacatttattttctctgctgcaacctaccagatctgacatccacctcccccagcacccatgggccaaggaggcctggggcagccaaggggagttccaggaccaagcaagcaagaaaccgttctttgaacacatggttaagcttcttccagcatggccctaattcccctacctgcctaagccaggggagtgggggcaggaaggagcgaggcatcgaggagagggcactggaggggctgggtggcaggccccttggtcaaggtcacaaatcaaggagctgaggaaggaccgatctgcaaccttgctcatgaggaaaccttaaccttgtctaacaaaaagccactttgaggccgcccttcagctccacagggagctgctgttttgtctaccttttgaggggaccagtctcagtggggcgaaaggcagtgtgggggcttcggaaacaggcaaggctggacccctgcaatcctaccagaggctagttcagtcccttttgctttcttcctaaaacatatttacaaggacacacaaacgtgcacagccagaagacccagagacagagagagcacgtgtcccaggagcggagggtgacatcaagaggacaggggacacccttcctctgaactccttccttccccaggccccccagcatccttaacaacccccacccccaccccgaggaggaaagttccagaactccagctgggacaaatggaagagataggtagactccaatcctagcaagagcagaagtttcaagtagctccgagtcagaggcgcggctgcctcagagagcagagggctgatgtggaacagcatttccctgaactgagccggggctggagtggggaggtgaaggacagagagaggacaggagaaagaggggactgggggacctggaacgacgcgacacctcaacaatcagaactgggctgcggaatgggaagcagtttatggagttaagtggggctctgctatttcccccaagaaggactcggaagatgttgattccagggcagagtgaggggcagacgggatgaggctcttctgtaaagtccaacagacgctcacagatgctgggaggctggggactgccaggttgggagcctcacccagagagcctcactgcattgaccccacacccaccactcacccagcacacagggggcctctcctcacgctcccaggccaccaggatggcccccaggttnnnnnnnnnnnnnnnnnnnnnnnnnnnnnnnnnnnnnnnnntgaagggcatcacagccccaagtctgggtaagaaattctccaccaaaggtgttcaggaatttgctttgctgaggagaactggatgggtgggggaaaacagcaacaaacaaacaaaagaaatgcacagggcctcttctcatctggtgagatgagctcacactgctcaggcgatgt

SEQ ID NO: 432745 - DNA, 1748 bp, Homo Sapiens
  misc_feature (81)..(127): n is a, c, g, or t
tgcgccatgtccggtccggagttccgggatatcgtcgaccacgcgtcggtgtgtggcacagatggctgggacgggtgacannnnnnnnnnnnnnnnnnnnnnnnnnnnnnnnnnnnnnnnnnnnnnngcatgcgctgacaaatgtgtccttgatccacactgctcctggcagagtgagtaacccaaaggccccttcggcctccttgtagctgttttctttccttttgttgttggttttaaaatacattcacacacaaatacaaattgacaggtcaaaatccatgaaatgagatcccccagccgtgtcctccagcccagccctgaccccttggtttctaccctggctccccttggtttctaccctggctcaaccgacccctgtctgcccttctccctcttgcttctgaggtcaagctctggcctgcgagcctgtccccattgcaaaggggagggaggggcagggagctgtctaccagctgaggtcctcccaaaactgggccgatgtggtgtgacatccccaccagcctcagatgagacgggccaggacgcccagccacagcaagccctgtccctttgccggatccccaaacactagagaagctctcctaacccaaggcggagaatgaaggtggtggcggcagaggaggagggcagcagctgagaggccagggacagggtgcctcgccaagctgtctgaggtctgtcccaggtggcccaggtggtgcaggtagaacagggtgaggagagggggtcggctcaacaggaggaggctgtggctgcagagcctggaggagcttttaggtgttgagatggggcagctctgaatcctagaccctggaatagcctgtcccttttctctgggtctcgtggtggagccatgatctgggctgctctcttggggacactgggtggtggttacacagttgacctctgcctggctcccccttggtgcaacttcctgcctccatcccccttgctggggtcccctcatccacttgagggcgcctgagggccaggagcagcaggcaaggagcctgggtctaggctaagggggtgtgtgcccacctcctcccttacccttaacactcctgtcctgcccagaccaacagagagagctgtccctgagaccccggagagaagcagctgccgaaagctgcagcctttccgcactctgagaccatgatcttcctcctgccaggggagagccacccacaggccatgtccagccccacttccctcagcccccagggtttccttctggcccctctgaggattccctagggctgccccgcagaggggcttccccaagctctgttttgaagcctgcaatgtggaaaagtgagaagtcagagggaacaggacaggtgcagccgggctctgaggccacacctcacacctcgctgttccccaacatcccctgagcagtgtgagctcatctcaccagatgagaagaggccctgtgcatttcttttgtttgtttgttgctgttttcccccacccatccagttctcctcagcaaagcaaattccttaacacctttggtggagaatttcttacccagacttggggctgtgatgcccttcagtgcgtggtgagtgcagcgtgtgtgcgtgtgcctgtgtgtgaacctgggggccatcctgggtggcctgggagcgtgaggagaggccccctgtgtgctgggtgagtggtgggtgtgggctcaatgcagtgaggctctctgggtgaggctcccaacctgtcagtcg

SEQ ID NO: 432746 - DNA, 402 bp, Homo Sapiens
  misc_feature (40)..(40): n is a, c, g, or t
  misc_feature (130)..(190): n is a, c, g, or t
ctgtgcaattcttttgtttgtttgttgctgttttcccccnacccatccagttctcctcagcaaagcaaattccttaaaacctttggtggagaatttcttacccagaacttggggctgtgatgcccttcannnnnnnnnnnnnnnnnnnnnnnnnnnnnnnnnnnnnnnnnnnnnnnnnnnnnnnnnnnnngtgggtgtggggtcaatgcagtgaggctctctgggtgaggctcccaacctggcagtccccagcctcccagcatctgtgagcgtctgttggactttacagaagagcctcatcctgtctgcccctcactctgccctggaatcaacatcttccgagtccttcttgggggaaatagcagagccccacttaactccataaactgcttcccattccgc

SEQ ID NO: 432747 - DNA, 1925 bp, Homo Sapiens
  misc_feature (155)..(201): n is a, c, g, or t
  misc_feature (409)..(469): n is a, c, g, or t
ggattttgacctgtcaatttgtatttgtgtgtgaatgtattttaaaaccaacaacaaaaggaaagaaaacagctacaaggaggccgaagggccttttgggtgactcactctgccaggagcagtgtggatcaaggacacatttgtcagcgcatgcnnnnnnnnnnnnnnnnnnnnnnnnnnnnnnnnnnnnnnnnnnnnnnntgtcacccgtcccagccatctgtgccacacacatgccatgcacactcacactcccagtcccccccaggtggagcagggtccttctgactgcatttctggatccgttctcgaagttgcctgctgctgctcagagctctgctgttgagtcccccccggcagccggcttctgagggcgtctaccagatgtagcccccgtcgtcagcctcgnnnnnnnnnnnnnnnnnnnnnnnnnnnnnnnnnnnnnnnnnnnnnnnnnnnnnnnnnnnnncatcctccaagccgacaccgcttccaaagtcccccgagaagcccacgatgtcatcgcagtcggggctcccatgcgtgcgcgtgcccgtcagctccaggcccaagttggtccacccaccagcagtccccgttggtctggtccccttgcttcttccggtagtagccatcctcgtcgcagctcgggatgaagatgcctggcttcttcttggcggcctcctggatctggatgcgctccagctctgccaggcaggggggcttctccctccagaagcagaagcaccactcagcagtagagacccggccatccttgtaggtgtcacaggagttgaagaagggacggatgcagacctcgtacttgtccaggttgatggcggccagctccgtctggtccaggaagaggtcagcactggtgtccagcttggagaacatccagccaatggagtccttgcagctggcccccaggctcttgtccagcccgctggccgggccggctacactgctggctgagccattctgcttggagttctcatgaaggagctggaaccagtcccgcagccgatctcccaggtcagccaggtcctgaccggtgcaagtctctggtttgccatcggcggtggaggtggcagcctgctccgtggggcaggggcaggggccctcgcatcgcaccgccagctgcttgctgctcaggcacgcctgttgctccagcttacacacagagctgtaagtgtggccatctgagccgcagacagaggcaagctgggccatgtggcagggcttgcagatggagtctttgtttccatggagtttcacggtcggctgcttgatcctgtgctccagcttcttgcgactgatgcacatggcccgctggtagccctgggcaatgcacaccttgtggcggctgcacttcaccttctggcaggggtccttggtggtatccagggcttcatctccttgctgattgtcctcccagctcttgatatagtcatcctccacttcgtctcggaagcggttccagtgcttgatcttgccgctgtactgcgagatggacgacagccattgctcgtcctccatgaaattgccgggggtctcgccctccttgagccccttggcgtcgccttcggccagggctgccgcggccaggagcagcagcggcagcaccagccgcccgcagcccggggcgcgcatcgtggtctgggttcgacctggggggtcttgacttctgcagtattttaatgtccttcctcccaccccgctgctggcgaagcgcacgcggctgtcctcagctctcctcccgcggtctgcctccggtgactggcggagagtgggtcgcggctgaaatgtgacctggttaggagatgcacttgtctgaaaaagcccagcactggacgcggagagggagagagaatcagagaggctgcgccagcaggggctgtaactgtagcatcagcatcacgttt

SEQ ID NO: 432748 - DNA, 923 bp, Homo Sapiens
ggggccaaggggaccaagggggtttcaatggaaaaaccccttcagggttagggaaaaccagggggaatacctttttccagcaaacaatgaatgggttgggttgggccccaaaaggggctcttgtgccaatcacttcgatgggtggatgtcccgatcatagaccctgatgctagaaagccttttctcatcaacatgcacaactggaaccttttcgggtccatccaggacgcggtagctcagagaggctgcaccatccctgtttgtctgcagctttatatatgagttgggcgacattaatatttgttctgcttctatttcagggttgagcagctgcagcttctcaaacacctggacttggatctcatccgagagttctctggccaggccatacagctgccccgatgtggggtccacagccttgaccaccaccctcagcccggtccggccttttacccggccgagcacgttcatggcaaagttgtactgtgacgggagtcggatcgacgcctcgtggtgccgccctcggaggtccaggacgtcccgcttggtgacagaccagtggaaggtcaggcctggcacggcattgccaaaggagaaagggttctggtggttggtgatgccggtgacatagatgggcatctgggtgcccgtcctcatccgcatgatgggggcgcggatcctcacggcccttagcagcagcacttccacctgcacgaggtcctgagagatgatgaccaccttgccggtctctgcatccactgcctgcacgagcccagacacagtgccgttcccgatggcgaggccctgtaccagcccagcagcgctcaccagcgcaacgctctcattgctgatggagaaaaggatgttggactgaggctgggggccgccctcggaggtgacctgcatcgtggccccgataagca

SEQ ID NO: 432749 - DNA, 516 bp, Homo Sapiens
  misc_feature (357)..(357): n is a, c, g, or t
aaaacgttaagcaaagccaggaatgtaaattactttgaaacatctacttatttccattttaatgaagaattaaaggatacaatgtgttaaagacatatttaaaatactagcaagggattagacagacgaatcaaattttgttgatatcccaaataattacaagagacttcgaaaatgtagtgtaattcaggttttctttccagtttaaaaatttctatccattgcctctatctttggtgtcactgccaccaataaacacagtatacagcttagaaacctaattactatcttcaactaggaaaaggtaaaccaacatcatttctttaaaatgagaaataaagaatgtgatcgtacttnattttgtctcatggtcccacaatactctgaaatgtcatgccaaaatgtaaaagttcaaaagggaacattatccattttgctataaattgcaccaaaaatttagctactggtacgctggtgtgatgacagccagtagtatgcagaggctacagaaagaca

SEQ ID NO: 432750 - DNA, 1262 bp, Homo Sapiens
  misc_feature (1217)..(1217): n is a, c, g, or t
gctgggaggcatcaaccgagatcccgtgctgatgtctttgaaagaaggctataagaagtcctctaaaatggtatctaaggctcccatcaaagaaaagaagagtgttgtggtcaacggaatagatttattagaaaatgtcccacccaggacagagaatgagctccttcgaatgttcttccggcagcaggatgagattcgacggttgaaagaggagctggcccagaaggacatccgcattcggcagctccagctggaactgaaaaacttgcgcaacagccccaagaactgttagctccccagctgggctgttttctaagccgatctctccgtcgtttctactcatcccttaacttctcccttaccagtgaccccagagacagagccaggacaggagtgggggccagcctgaggacccccgcctaccacctcgagaactggaagccaacctctaacctcctgacctcatgctaataaaagtccccagcttctggagaccccctgccggcagcccctttccctgccaccccaggagccaggcttcccctcagctgggtgaagactacagactccctggggttggcaggggctccatctcagtggaccaggaagcaagaggggaagcgggatcccagctagacttagaacttggacttttcccctgtgaagggggctgccaggacatctcagcactcccgcctggagctctcagcatcactgaaggtaccacagtgtaagtgctggactgcaggctgcagtgatccctctttcgtcccaccccctcttccctcagcagccccggaagcctgcctcacccgacgaggacagcgagcggcccggctcctttctgtctcttcccttcccaccctcttgtcttcagggaattcagaggattgctctccaaggccataatgaccccttgccttccccatgattctctacaaagctcttgcacacccttttcccattcaatttgtgagccaggcagggtagggattagtgtccccctttgacaaatgacagaactgagggttgcaatggggaaatgacttataaagtcacccagcaggtcaacaatgggccccacgaccaagaccctggggtggtcagaccccaaaggccagggcctttttcccgcttgccatcaggagccaaattccttttgttggggcttcaccaggtgcccaaagttctcttatggggaaaatggagaacctggnaaggccccttggctaaccggtcttaccccaggcaccccggttagc

SEQ ID NO: 432751 - DNA, 1194 bp, Homo Sapiens
  misc_feature (44)..(249): n is a, c, g, or t
  misc_feature (802)..(830): n is a, c, g, or t
acagccgcgcacttgtgggaaagggcattcgtgtccgcgcccgnnnnnnnnnnnnnnnnnnnnnnnnnnnnnnnnnnnnnnnnnnnnnnnnnnnnnnnnnnnnnnnnnnnnnnnnnnnnnnnnnnnnnnnnnnnnnnnnnnnnnnnnnnnnnnnnnnnnnnnnnnnnnnnnnnnnnnnnnnnnnnnnnnnnnnnnnnnnnnnnnnnnnnnnnnnnnnnnnnnnnnnnnnnnnnnnnnnnnnnnnnnnnntacaaatgctttatacaatatttcaacataaagtccccataacagaaatgtaacaaaatgggaatgatagtggaaggattaaagtggcacaaattcaccaaacaaatattaaactacaaatttttcagaggtagattacttttgaagttgagaacaaaaaacagtatgaataaaacctagccgctttccaccaactcagtcattaatttagggggaggcataaaatgtaaggataaatgatattaatatacttaggaagaggccaatttgttgtttttaatctctattagagatgcaagtgtaaaacctggtatgcaaattcatttatacttacgtgtagacatacatctgtacaggcctgggatgcgcctgtgcactgatatattgctacatagtctctgataatataatagttataaattagtgccagataagaatctgagaggataacgtccatttggatatacaaacgcaacaccagaataggcataaaaaagagtccatatccaatctggtttcctctccattacgctggcaatctacttgtgatttnnnnnnnnnnnnnnnnnnnnnnnnnnnnntaccaggggtaagagatcagctaaatgcctctctctgtctataattaatttaaaagaaaggcatcaagagctgatatgtgaccaaaacgttttaaatgagtgcatccaaatctgtcatccctgaaacctacaacaaactactgctaaaacaggcaacttgctttgcaaggttaagttcaaatcaatcctttctctgctacgtgccaaaaacaagggccatgctcagatctgaggtaccagtcccatgacgaggagccagttcatctggcctgtcttacagtgcccttctctttggatctcaatcacccgggcgcccagcatgcgcgttgggcccccaccgaagcagcagatgcctgactctaag

SEQ ID NO: 432752 - DNA, 197 bp, Homo Sapiens
tgtcttcattgtttttttgtgtgtatatgttattccttcttttcctcttagatcttaaacatactgatttcaaagatgctctcagatttctcccttattttcctcctatctcttgagtttattggctaacttatgtgtgagtttcccttttgtgttttgaaatcttaatgtgccagctcaccctgagcttgcggctc

SEQ ID NO: 432753 - DNA, 2419 bp, Homo Sapiens
  misc_feature (55)..(208): n is a, c, g, or t
  misc_feature (211)..(211): n is a, c, g, or t
  misc_feature (829)..(829): n is a, c, g, or t
  misc_feature (919)..(919): n is a, c, g, or t
  misc_feature (1275)..(1275): n is a, c, g, or t
cggaacaaaaaatacggcgaatacaaattattaacgctacaatttgccatttggnnnnnnnnnnnnnnnnnnnnnnnnnnnnnnnnnnnnnnnnnnnnnnnnnnnnnnnnnnnnnnnnnnnnnnnnnnnnnnnnnnnnnnnnnnnnnnnnnnnnnnnnnnnnnnnnnnnnnnnnnnnnnnnnnnnnnnnnnnnnnnnnnnnnnnnnnnttnttttttgtggattagattttaatgtgaattttggaagtacacaaaatgttcaaactatagcatgtatatatatcaagttggcagtataaactacttgcaagtaactttagaacacaagtgtttgcccattggtagtgagatggattctaagttgagatattagctagaacattccagttggtaagttgtcatacatatttaagaaatatgaatccaaactagattgtgataattccctcataacttcacctccacctgagtttcggactctgctatccagctgcgtactagtcttcatcagatgacacaggcatctccaacaccgcatgactggaacctgaactcgcttatcttctgtttcccctaaatttgttctttttccaaattttctatcttggagttgccctcttggaattgccctctaccatctatctagacacttttatcaggaacccagagaaccatctttacctcttagatataatcagtcttgtaagtcttgcccaattttctttcctaaaactttaaaaatctgtcctctctcctctactaataccacaatgttagttcaggccttcatcttcctcaacaactaagacatcctcctaactggttgtnttgcctgtagctttttcctctcatggccatctgccacacagctgtcacttacctgtattacaaactgatgatgtcattcctgtgcttaanactctgtaatacctggtatgtcagtcttaattccttcacatgatttgtgagatcctccacaatacgggccttgtcttgtgcttcatatttctgatctactgaagtgactgtggttctctgatgctacagagtgcctttgcttctttgtgcttttgttccctctgtgtgcagaaaaaaatctcacccctcacctcctgatttattaagttctccaggaatattttcctgatgttaagtaggtacttccattcagtatgtatatttttatcactgggctgatgatcacactgttgagttactgaatgagaactttgtgctacccttactcatttctgttatggattaaataaccatgnaaaatagggaatatatactgttccaaaaaacttttcctctttagatggagactttcaaggacttaaagaggcataatttgttttaaagtcccttaaggatggacaagaaaacacttagtggttcttttgttcagccatcacaagaagaagtggagcattagataatccagaacagcagccttgctatccaatctgtttatctaacaataatagttaaggggagctctgcaggtcagcaaagctagtccaggattacaaactgccatacatgagctacatgtcaattagttggattatgtataagatagcattttatgaaataatgctcttaatacaaaaacccctatatgttactaaaagattaaacttaaaaggagggtataaaaaacattcacagaaaatatttattatgctactctttgtactatgtatgggaacagtatgtttgttaagtccaagagaaaagataattcactgacatgaaacacccaaatgtcttcattttaaaagtagtttagagatagcatcaggtaggccaaacaactgtactgggcccctgtagagattagggtttggtctattaaaaaaaatctttgcttgctggaactgcaagcttggcttccctgcaagctcaataggttctggagctcatttaccatgtcgctcgctggatcccagaaagttgcccatggtcagctaagtgacggaagactatacgactaagcctccagcgccgcttcacaccacgcggacgggacgtcataacacaccgatttctgattctaacaggacagctatcccgggggagggcagcaatttcttcatcagccacatcctgaagaatttttggcaaaatggtattcttcctgagtgaattaatacgtagcctctcatctgcgtattcataggccatttttcgtctcttcacatcgcgccacattctccagtctacatagtgacttcgaacttggcctgaagctgatgaaggaaccatcgagcactacaggtggcagagccgtgggggacccgtgggttatgagattcagcggtgaggggtagcggtgtggataaaagtagaggcctgacctgcttgaacgtccgcagcagcgagcccagcatgaaggccgccatgttgtcccacgct

SEQ ID NO: 432754 - DNA, 854 bp, Homo Sapiens
ggaactctgcaggtcagcaaagctagtccaggattacaaactgccatacatgagctacatgtcaattagttggaattatgtataagatagcattttatgaaatatatgctcttaattactatacccccttaatatgttactaaaagattaaacttaaaaggagggtataaaaaacattcacagaaaatatttattatgctactctttgtactatgtatgggaacagtatgtttgttaagtccaagagaaaagataattcactgacatgaaacacccaaatgtcttcattttaaaagtagtttagagatagcatcaggtaggccaaacaactgtactgggcccctgtagagattagggtttggtctattaaaaaaaatctttgcttgctggaactgcaagcttggcttccctgcaagctcaataggttctggagctcatttaccatgtcgctcgctggatcccagaaagttgcccatggtcagctaagtgacggaagactatacgactaagcctccagcgccgcttcacaccacgcggacgggacgtcataacacaccgatttctgattctaacaggacagctatcccgggggagggcagcaatttcttcatcagccacatcctgaagaatttttggcaaaatggtattcttcctgagtgaattaatacgtagcctctcatctgcgtattcataggccatttttcgtctcttcacatcgcgccacattctccagtctacatagtgacttcgaacttggcctgaagctgatgaaggaaccatctgcttgaacgtccgcagcagcgagcccagcatgaaggccgccatgttgtccgctacaaactacaaaccccgct

SEQ ID NO: 432755 - DNA, 1135 bp, Homo Sapiens
  misc_feature (196)..(204): n is a, c, g, or t
  misc_feature (798)..(807): n is a, c, g, or t
  misc_feature (1123)..(1123): n is a, c, g, or t
aattcaatagtgccggggctgcacactttgcgggaaacgtacaggggaagctcaagcaagcagagcccctaattaggaacaacgcggcttcaaaccacttccttgcccggcaaagcaggaccaccttccccacaggacggggtaaaaacaatgccccacaacccttaaaaaagccaccagatacttaaatcaggtnnnnnnnnntgaggcccctcaagtaacttaagatgacggggaaaggtgcagaggagtaattaattcaggaggcgctccgggaacaggtacacagggtacagtagtcatcatcattaaaacaacaggcattcagctctactgaaaaggcggatgcaagcagcccctcccaagcggatctgcaaaagtgccactgaatccatgttcattcacctactccaggttgtcgtcaattgtaagtaatcctgaacttctcatttctgctcatgctgacaaacttatcatcctagaagtactggttattcaattaatttttaaaatattcggatataccctgcaaataaatataaaacatctctgtacccaaacagtcccaccactataaaaggttacatataaattaaataaactcagatttcttaaccattttctcagcttaagtttgccctcaccctaaatgaagtccaatttatatccaaaatataattaaatattccaaaggtatatcgaacctaagatattgaaaaaatgtaaacaaaatttatctagcttacatttatgaaccatatttttaggtttttaattcatcctgtactgaccctctgnnnnnnnnnnctaatcaagttatgtttagactgaaagctgatttggattttaaagtggttccttggagacaactctcaatgacttaaaaccagtgttattgaatcaagtggtttactgtatcattcaacttaaaagaccaaaatatttcctttctctcttccaataaagctctttctggatgagcccccagatccagctgtcctaggtaaacgtgctgaactggctggagatcctgcagtaatgcttggcacagaaccaaggctgggtatcaagcaacctcatgacttccactgcaactgtttaacatccccaattcctggttttncagtccagttgg

SEQ ID NO: 432756 - DNA, 940 bp, Homo Sapiens
ctagagtttccctgtcgtcggataagcgggactgcgagaactacatcactctcctggagaggcggagtgaggggctgctggcctgtggcaccaacgcccggcaccccagctgctggaacctggtgaatggcactgtggtgccacttggcgagatgagaggctatgcccccttcagcccggacgagaactccctggttctgtttgaaggggacgaggtgtattccaccatccggaagcaggaatacaatgggaagatccctcggttccgccgcatccggggcgagagtgagctgtacaccagtgatactgtcatgcagaacccacagttcatcaaaccaccatcgtgcaccaagaccaggcttacgatgacaagatctactacttcttccgagaggacaatcctgacaagaatcctgaggctcctctcaatgtgtcccgtgtggcccagttgtgcaggggggaccagggtggggaaagttcactgtcagtctccaagtggaacacttttctgaaagccatgctggtatgcagtgatgctgccacctacaagaacttctaacaggctgcaagacgtcttcctgctccctgaccccagcggccagtggtgggacaccagggtctatggtgttttctccaacccctggaactactcagccgtctgtgtgtattccctccctggacttctcatcttcacaagatggggatcatgggggtttcttaccccacctatgtccccctcttccccaccctgtccctgtagaaaaccagtgaagcaggtacggagctgaggactgggccccaggaggtggggacaggggtctgaatgccgagtccctgaattcacccaggaccatccaaggggccaccgcagcattggccccatcaccacgtcctcacccaactctccctgatgaatagaatatacacactgtgctaggtg

SEQ ID NO: 432757 - DNA, 183 bp, Homo Sapiens
cttggagggttgggctgagggagggaaaagacactgaaacctgactccgacttgagcagaccaagcaacatgcgggtctccccccgggccttggctggatcctagtttccctaactgcctcctccacagggaggagtgttgggatccccactcctccttcagggacgcagaggatttggtggt

SEQ ID NO: 432758 - DNA, 863 bp, Homo Sapiens
  misc_feature (66)..(120): n is a, c, g, or t
tcttaaccatgaaaggaagaaaataaaagagtatacattatcttaacagcagaacagtcatttccnnnnnnnnnnnnnnnnnnnnnnnnnnnnnnnnnnnnnnnnnnnnnnnnnnnnnnncacctagcacagtgtgtatattctattcatcagggagagttgggtgaggacgtggtgatggggccaatgctgcggtggccccttggatggtcctgggtgaattcagggactcggcattcagacccctgtccccacctcctggggcccagtcctcagctccgtacctgcttcactggttttctacagggacagggtggggaagagggggacataggtggggtaagaaacccccatgatccccatcttgtgaagatgagaagtccagggagggagggagtagcttggcagcaagctgtggagggcaggctctggagccaggtgggatggggagccagaagaccttcccactcacagggacaggaacactcaggcctggctcccgctttaggctcgatcctggaactgggttgttaactaaggagatacaagtgaaacccctcttccctaagcagctccttccataactgcctccagcacttcaggaacaggaacaaaaaaggtcaaagttatttacaatagcaaagatgcacatacgatacatacatatttataggaaaccaaagtgacaaagaggggaggggaggcacccacctctgcctggggtcttatggagaaagaggggaggaagaaagtgcatttacacagaagcctcctcctttcacttgcatgtctgagggcagcgcacatacaggcgtgcgcgtgtacacacatatgtggggttaggtctggaatcctctaatcac

SEQ ID NO: 432759 - DNA, 437 bp, Homo Sapiens
  misc_feature (376)..(376): n is a, c, g, or t
acgatacatacatatttataggaaaccaaagtgacaaagaggggaggggaggcacccacctctgcctggggtcttatggagaaagaggggaggaagaaagtgcatttacacagaagcctcctcctttcacttgcatgtctgagggcagcgcacatacaggcgtgcgcgtgtacacacatatgtggggtgagggcagaccatggtgagtgggggcctttcggatgcagtcagcatgcttaggagacatgaggccttggagggttgggctaagggagggaaaagacactgaaacctgactccgacttgagcagaccaagcaacatgcgggtctccccccgggccttggctggatcctagtttccctaactgtgctccnccacagggaggagtgttgggatccccactcctccttcagggacgcagaggatttggtggtt

SEQ ID NO: 432760 - DNA, 1008 bp, Homo Sapiens
tgattaccctaaaattgattacatttctttgccccggaaaggtgggatcccaatggaaacgtatggtcccattagcagcggggacaggatcacaccggtgctttcaaattatgacgcaactgaaaagtaatcagtcgcttgctgtatagtagtgctgtgctgctgccacttgcaattgcccaacttgtgaaagttcataacatgcttcacctgccgggaaaggcctgtgatgtcattctgctgctgtagtaacttcatctgtctttcctttgtaacattctctagctgttgtaagagagattttcctttcttattaatttcattgataagggtgaaaatggccactttaatttcctgttctactcgtttgttagtctcatttacttcttttatcctattctgcacctgagtagctgcaaaatgaacataattcttcttctcaagaagtttcgccagtagattctcaattgcacccttctgattttgaaaagcttcttccaaaaactgatacctatgttctttgtgttccaatagctgacagtctctacatgtcaatctatcacatgtttcacagaaaagtttcaactgttcttgtttgtgtacagggcagaaaacagggcgttgaccagatgctccaacagactctgagacatcttctttcttcctgatcaagtgatctttagtaaattttactctttgatgtgcttcgatacatgtcttacatagccactctccacattctacaccaaagcccactgcacttgcattgtcttcacaactagtacatacctgttctgatttttcatcagaactgctaggagcttcagatgtgtctttcaccaaataattatccacaaggtctatctgtctgcattcttggcggcatactgggccccgtattacaccaactatgttctttgtgttccaatagctgacagtctctacatgtcaatctatcacatgtttcacagaaaagtttcaactgttcttgtttgtgacatggcgtga

SEQ ID NO: 432761 - DNA, 1326 bp, Homo Sapiens
  misc_feature (502)..(523): n is a, c, g, or t
  misc_feature (719)..(754): n is a, c, g, or t
  misc_feature (1180)..(1180): n is a, c, g, or t
  misc_feature (1259)..(1259): n is a, c, g, or t
  misc_feature (1263)..(1263): n is a, c, g, or t
  misc_feature (1300)..(1300): n is a, c, g, or t
cgtgggcgacacccccctttttttccaagggtgtttgcattttgggccataaattattgtttctcagcctcattgtggtagttgctgcttgtgttccccctgtttaacattgttcaggtacgtctccttatatagaggtatttgtcctggacttaatataatctatcttccctattcacctgccacaggtcaaatgagttagtaccactaggggggcaatgtttttcttatagtacagttttaaggtgctttcacgtgtatatgtccccccagtcacttatccaaaatgtcgaacatgacatcctatttggtagaactgagtagaaaattaacaccgtgggaaatagacccccgcttattttaccgtaccatgacagatgacgattgactaaattggtcttaacactgttctccaaatgccatgttatagtttaaattaaatgtaactccaggttccacttgttattttgcacccgttgggttttttatgtgtgtgtgtggnnnnnnnnnnnnnnnnnnnnnngaaagcacagaaggccattttctgactaaaagccaccaccgtcattcttggaaaatggcaaaaattaaatctgctttagggcttgctccactaggacggctttaaactgcttagtaaaggaatgtgctgaagagtggctggacgaagcttctgtctttcagagtgctgcctatttcaatacaccaaagattcagcnnnnnnnnnnnnnnnnnnnnnnnnnnnnnnnnnnnnatacattctatcttaccctaatcatgtatacatagtcccttgacacctctactattcattaaacaatgataaataaccataacatgcccttacctgtaatgctttcaagataacacaactttggtaacacttgctttctaagggggaatcattaatcaatcacatgcctttggttgacaccatcagtcctccaaagggctacttatggctctctgtcctaggatactggtgtcctactacatgtgctgacatttgcaggaggtaaagctttcgctttcaggaagtcgaagagaagagacacgtgtgaaaacatggtacataaaacatgactaactttcttgattacattccagtgcaatgatctggagttaacggggcagtttgtttcccaaaaggtagcattacttttgtaatatgcttttcaanggcattagaaatttcacggtttccctgaagaagtactttgtttgctgatacaaggtgagccaaaggggtggtgaaaagnacanacaaaaagggatctttgtctaacccagaaaggttganaaatttgcactgatacttaagttctg

SEQ ID NO: 432762 - DNA, 826 bp, Homo Sapiens
  misc_feature (92)..(127): n is a, c, g, or t
  misc_feature (323)..(345): n is a, c, g, or t
  misc_feature (620)..(620): n is a, c, g, or t
aagggcatgttatggttatttatcattgtttaatgaatagtagaggtgtcaagggactatgtatacatgattagggtaagatagaatgtatnnnnnnnnnnnnnnnnnnnnnnnnnnnnnnnnnnnngctgaatctttggtgtattgaaataggcagcactctgaaagacagaagcttcgtccagccactcttcagcacattcctttactaagcagtttaaagccgtcctagtggagcaagccctaaagcagatttaatttttgccattttccaagaatgacggtggtggcttttagtcagaaaatggccttctgtgctttcnnnnnnnnnnnnnnnnnnnnnnnccacacacacacataaaaaacccaacaggtcaaaataaaagttgaacttgagttacatttaatttaaatataaatgcattttgagaaatgttaagaacaatttagtcaatcgttcatctgtcattggtactgtaaaataagctgtggtctatttccactgtttaattttctactcagttctaccaaataggatgtcatgtttgacatttttgatagtgactttggggtcttcttcactgaaagcaccttagaactgtactataagaaaacatttnccctatgtataattatatgaatgggatgtttattgcttattaattataattcagtcattctctatataggacttcttaaaattagaagggaaatctagctacttaaattgcctggtaaatttattatgcccaaaataacctctgaaaaagggttctccaggaagataacatttaggtttaatatttctttagttaggtaggagttt

SEQ ID NO: 432763 - DNA, 800 bp, Homo Sapiens
ccaacaatatttgtaccgtttttatttgtaaaaataaccatctgaatgcatttccatagtatattacagttaagtacttcattacgttattagagcattcagtagttgcaaaagtattaaactgtgcttgagaagattcagattgtttcaaagtcattcactgaactaaaagtcattttccccatttttacagtcatgacatttaccagagtcattcaactccaatttacataagaaaacattatagacaaaatcccactgaaatcatcaaacaatattttatgctgttacaaatatgttatgcaaaatataacactggcaccagatttcgtatcatccgtgctttacaaagatatattggcacatgctagagcataaaatatgtagacaaaactaccaaataaaagatatttgcattgaatttttagatcacataagaaacgcatagaattacattttatacaaacactcagattgtcactatcttaaaatgcttttcccctataatactgacctatggtttatagtttcgtaagacgaaagcattttagcactgcaaaatcaaacaattcctatagaaaacttaagcattttcatattcatttcaatgcaagtacaaggggaaataggaaaaaagacactttatacattcaaagaaaagttgaaatgaaaactcactggtatcatattgctctgataacactcaaatgaaaaaatacaaaacattccacagaacattttcagaatatacaaatataaaaaggcactctaacttcatattacaagacaataaaacggat

SEQ ID NO: 432764 - DNA, 1053 bp, Homo Sapiens
accccctcacccaattcttcattggaactctcaaatctctcatttgtctctgaaaaattgcctttggtcgtttatcacctttctagaaagaaaacgttttcttgttttgtcactgtccagcgaggccagagtggtaaaagacaatgtttatataacacctttgctaccttcagaagaaccgtgagagggaggggctgtggaaaaacctttcagaagctggcaaaatgggaagagaggacacagaatttgtttaggagcacagctctccaaatgggtttaagtacccatgctaaattccaacccaaactaagccaacaagaaataccctttccaacctaatcttgggacttagatttgtactgaaaacatcatgggcatggttcccaaagatgcatgcaattcaatgcagccttagcatggcattgctgatgggagaaactccatctgctgttttgtgtttttgctgccgcggtttgccattttgcaagtcttccacctgccttcagaattgaggctgtaacatgaatttggctgaggccgcgaaacatccaaacccacacctatttcacttttaaatataataaatacagggaagaaaacagtaaacctttgataaagagtctaaacaaaagacagtcgacattctggggtttcaatcaagtgccacatggtctctggatgaatgtctcgaggagattgtggttgagttcacaagtccccttctcaagtgtagctctctttagatagaaacctcatactctctggtttcccctgtctcgtaaatggggttgtcaaactcggtttccacggtgatctggctgtaggggtgggagtacatcagaggcaggcggaggttggaatagtagcgacatcttgtgatgtaaatgtaggctcctcccagcagtaaggagatgatgaggaccgggatgaagatagccagggccatgttccccccttccagcgacgtctctgctgccgcttctgctactttacacacgggcaggggcccgttccagtgggatggctgtcccaggatgcagcggatggtcactt

SEQ ID NO: 432765 - DNA, 481 bp, Homo Sapiens
tctacggaatagtagcgactctgctgatgtagatgtaggctcctcccagcagtaaggagatgatgaggactgggatgaagatagccaggggcgtgttacccccttccagcgacgtctctgctgccgcttctgctacttctaaagcatgttcaagaactgtcttgattaactttacacacgggcaggggcccgttccagtgtgatggctgtcccaggatgcagcggatggtcacttgagccatgagttcaaagccttcgtagcacatgaaggtgagggactctcttggcaggtagagtcgcttgtacaggatttggtatccattttcaggcagccctgggttgtcacatgccagggactcctccgaaacgcagtggggcaggcgagacgtccagatgggagtccctgtttcacggctgtagcaggtcagaagagaactcccttcaagcacaaaaccggggttgcaggtgtattgggatgggg

SEQ ID NO: 432766 - DNA, 575 bp, Homo Sapiens
  misc_feature (15)..(15): n is a, c, g, or t
tactttccacagggnggagttggtgcggggagccagaatcacctaccagtgtgaccccggctatgacatcgtggggagtgacaccctcacctgccagtgggacctcagctggagcagcgaccccccattttgtgagaaaattatgtactgcaccgaccccggagaggtggatcactcgacccgcttaatttcggatcctgtgctgctggtggggaccaccatccaatacacctgcaaccccggttttgtgcttgaagggagttctcttctgacctgctacagccgtgaaacagggactcccatctggacgtctcgcctgccccactgcgtttgtgagtcctgtttaatgaattgggcccccagtaggtagaagcagattcactttctcttgttcatgatggaaggctgggctgctaggaggccttctgcttttcgataggggcttttattatcattactatgacaaaacagtacctaacactgattgggagcacacatactataacatttacagtaaatttatcacgcgttgctctaagtcttctaccaaatttcactctttcttcctcaagtag

SEQ ID NO: 432767 - DNA, 773 bp, Homo Sapiens
catgttttcaagtagtgccggcacaagagctgcctgtgcacgagggacttttctgctggagccaatctgggagaggaggaataaaaacgagccatctcaggtctcgacgcatctgttagctgtgtactcacaaagctgtggcgatatgactgctgctcaattaagatttctggtgaaatgtttaagctttttctccaagagcttccagcatcaagtacaaaaggatgatcctgaaggaaagatgaagctggttttaacggcgtctgtgagctgctttccctgcacacgaacagaagcttttaccttacaaacagaaagggaaaaaggaccttaaaaaaccatacacagactctagcaaaagccaaattcatgtacatttcactccgtctaaaatgcagtcccggaaacgctccacggtcctctcctgcctctgcacgcaggcaggcagcctggggggctcctgggtgctgccaggagccgtgtcccatctccccagagggaccggccatggccctggtcactgtggcatcttcccagagcaactgcgtctcgctgcccagggaggggattccatttgtgatcagtgagagggagagggaataaagtgcttctcgtaaaaatgaccaaaataaatacgcacatttaacggcagaaaagaaagtcttgaaagggttatttacaaagagtttgactcctccgacccgcgctccttggacttttggaaagacaggatttccccacaccagttgagaggctcagcttggctgaggcag

SEQ ID NO: 432768 - DNA, 458 bp, Homo Sapiens
gtgttggtctcataagtgtccttcagctgtatgatgttggggtgccctgagaccttgcgcaggatgtccacctccttcagcgtggcttctcgcagctcccgcacctcctccgggctgaagctgcctccaccggtgacgtcgatgaccttcacggcgtactcctggctcgtgggcttgtggatgcgtcgcctgaccacactgctaacgcccctgcccaggatctctttgggctcataattctcatagaagtcctgtgcagaatgagagtccggcagtgcctcgtcccgggtcatgctcagatcttcagtgagggaactctgggtggctggttaagtgcttgcaggctcttgaaggagcttgacaagaatcccaaagccccccggggagaggggaccacagagggctgaagccgtgtcccgagcagacacttggaagatatcatctgctgttgttttggg

SEQ ID NO: 432769 - DNA, 689 bp, Homo Sapiens
ttcataagactttggtccatgacaccaatcggagctccatctagactcctggagacccgtttactagaagtgcgctcaaagtgtggtgctggcctatctatgagggtgctggcctggcgggtctgtgcttgggtgcggccactatagcgaaatttggaccccaaggtcaggaacttggcttttggtggctgctctggagaaacaagcctgtagaaagtatgatgctccacgcacactttccatagtcttttcgctgcccggtggtttggcagtttgaatccaatggtactctcaaactgttccagctctgccggtctgactttaatgtagaagttactgcgtttataggaaatttttaagattttcggccaagcaaaacgattgattcgcagtctgtctttgtaaatgagaagtccattagcacacacgcccagcttgatgtccacaccttctgagtccttggcatgatgtaggtcaacaccatacatggaaagcctctttgcattttctaagaactgggaatcagcttgtgctggcgataagcccctgtgggttttgtgcagctctgccaccttctcttccagctccttagtctgagtaggggcaaactggaattcactgaggtcgatgctgcccggacgcgtgggtcgacgatatcccgagaattccggacctgtaccaggcatcgt

SEQ ID NO: 432770 - DNA, 2963 bp, Homo Sapiens
  misc_feature (771)..(787): n is a, c, g, or t
  misc_feature (2825)..(2825): n is a, c, g, or t
  misc_feature (2829)..(2829): n is a, c, g, or t
  misc_feature (2840)..(2840): n is a, c, g, or t
  misc_feature (2855)..(2856): n is a, c, g, or t
  misc_feature (2882)..(2882): n is a, c, g, or t
  misc_feature (2884)..(2884): n is a, c, g, or t
  misc_feature (2890)..(2892): n is a, c, g, or t
  misc_feature (2894)..(2894): n is a, c, g, or t
  misc_feature (2901)..(2901): n is a, c, g, or t
  misc_feature (2906)..(2906): n is a, c, g, or t
  misc_feature (2911)..(2911): n is a, c, g, or t
  misc_feature (2932)..(2932): n is a, c, g, or t
  misc_feature (2955)..(2955): n is a, c, g, or t
  misc_feature (2957)..(2957): n is a, c, g, or t
  misc_feature (2959)..(2959): n is a, c, g, or t
  misc_feature (2961)..(2961): n is a, c, g, or t
ctcagacaaaaggcacaggacatgctcatttaatctcttactatattagctagttcgcaatttgctgagcccagaaccagccccaaaatacaccaatcaagacgttggtaagtttgtctggtttatttgcaggctgtagagatgatatcccagtccacgcacactcccatgcacacgcacacacatacttcatccacctgaatttgcccgacaaaccctcctctgagtcatagggacaaagccatacttggcagtcctcacgttactggttacattagatttggtctttcagaaagaagatggttgaagtcccaagaagctgagcccttagccagagaagtaagagtcctagaaccaagagccacaacctgaaatagatgcagactgcccccgccctccttccagggacaactcttgagaccctctcctcccaggagttgagtctcaagaaatgaagggactgatggggtttcccaggacacacgagcccccacccccattcaatgagaaaaccctctcttctgccatttccagaagctggggccacacctgcttgctctcctcccttaaggagaattcctgcagtcttgtagaacctgtggaacttacctgagataagcctgactggttctgccttcctctctgagtgaggaacagggacactgaatatgatgggtagtcaaggaaggctttatcttcctcaaaggtcccagcctgtcccagagaggagaggcagtgaggaggggtgaggacatctaatgatcttggggnnnnnnnnnnnnnnnnncagggcagggtgggggtagaagtaggattttccatttacagggaggaatgttttgctggggtttaaacttcaactaggcctgtgtgcatttgaagcagatccttgagctcaagatcagccagtcatggccaaataacctcattcctgaactggttgaaaccagtgggttaacccaacctggccatttcctcatgccttacctgttttcctccctcaatctgctatcagaggtgactaaggagccgcagggaacccacgttggctccaaccaccaagacctcccagtcctgtccacttaaggtgttgcaaaggctctgccaagactctcacccagtcttgggcccatctaggcccccaggactgcagggaagtcaccccatacctcccccttcctaacatttatctcattgtcattgtctgggtctcactttcctattggactctaagttccatgaatctgtccatttcattattggattcttaactgttggcctacagcaagtgcttaataaatatgttcagtgaataactgtctcagtcctgagcaggtagggtaagagacttcagaacacaggtggggttaaggctgaacaccctgatcagccaagatggggctgactttgacatcttcctgcatgaattacaagaggcagcttcagaggcctggtctttgccctaagcctgatgctgacttgaaggcatgggagagggcgaatcctggaccagggtcttcagagcaagtgaaaccctctccaagtgttgaccttggaggctgtctcttcccagcccttccctgttctcataactaactaaggcagcccacactggaaatgaggtgtaggcagggtccctgaacatctgggccccagtccagggcacctccctctggagataagcctgaccttgggcaaggcacttaatccctgtggggcaccagtctcctcacctgtgaaatgagaagtctggcccagctaccctccagggtgcattagggttctaaaatcctgcgagtccataagaaaggacacaggtgaccccagttcaattcccaagctcaaggttctgagagatctggggagagatgagttagaccgtgtatactgcacatgccaggacaacatgggaggatgtaaagcttataatagcaggtcaataaatatctggtgaatgagtgagtcaatgagtgaattatgtgagtagggtaggaagacaaatgagagaagcagagtcaggtttcaagcagattggggtcagacaagcaaccttgtatttctcagtcttggcttaccagtgctgctgactttgccgtgagcattttactcctcattctcccatcctggtcccctcagtatcctccctaaaaggtggaacagcactgagctgacctttccccccaaaccccaggcctcacttctgcctccgaagccctctgctgccccagtaagggacagtagggctgcacgctgcctctcagctgcctgcacaggtgtggccagagagcaggactggagggttccttctggtaccttcttgaagggctcccaatgccaagctcctttccttcccaccttcacatcactgaggatgagaagaggtgtggaatgagtggggatcagctggggcagcggggccccgagtggctgtgtcctgggtgacaccagagcactggaaccatggcactgtccaaggaaacccgaaagaggccctgcagccttgtccctactccaaggtcttctcagagtggcctggggtcctcgtcagagccaggtcagtgagcctgaacttggcttggagactttctgaaaggatggagagtgctggttcctccaagtgaggggaacacaggctggaagcctccctgccctggccctgccccctctagtttttggtttgatgtcagcccttctgcacagggagcggggaaggagggaagaagagagggaggggacccaaggctcaggattccccgacccagagcccctttaaggcagataatttgtgctttacaaagacattgatgaaaacacaaacaaacccncagngaccaaacaantgagagagagagagnncacagtgtgtcaagaagggcagcaangncgggannnangtgtggngtggnaaggntggggagtccaggcggggtcntcagggcagggtagcagtgtgtntntngnga

SEQ ID NO: 432771 - DNA, 993 bp, Homo Sapiens
  misc_feature (20)..(20): n is a, c, g, or t
  misc_feature (37)..(37): n is a, c, g, or t
  misc_feature (55)..(55): n is a, c, g, or t
  misc_feature (62)..(62): n is a, c, g, or t
  misc_feature (82)..(82): n is a, c, g, or t
  misc_feature (120)..(120): n is a, c, g, or t
  misc_feature (125)..(125): n is a, c, g, or t
  misc_feature (346)..(359): n is a, c, g, or t
tctccctactcccaactctnctcaaactggcctgggntcctcgtcaagacccagntccactnagcctgaacttggcttgganactttctccaaaggatggagagtgctggttcctccaantgacnggaacacagctggaagcctccctgccctgccctgcaccctctagtttttgggtttgatattcagcccttctgccacagggagcggggaaggagggaagaagagagggaggggacccaaggctcaggattcccccgacccagagcccctttaaggcagataatttgtgctttacaaagacattgatgaaaacacaaacaaaccctcaatgaccaaacaaatnnnnnnnnnnnnnntcacagtgtgtcaagaagggcagcaagatcgggagggaggtatggggtgggaaggctggggagtccaggcggggtcctcagggcaggctagcaatgtctctctctggaggggggccaactggcttggggctgctctcgttggcttttccttcaaacatcatgactaacttgaggacagccgaccgtttccccagcatcatgttcacaaagtctcggtaggatatagtgtcactgacccctcctgtcacctctgagatcatcttcttcatctccaggtgggtcttggggacaccaagcttctccatcatcctctttaaagacatcaggtcaatctcgccttcattgttcaggtcaaactccatgtacttctctttgaaggctgtgagcttttctggaaggttctcttcatcactgtacttctggtcacacagaaactcccggttgatctcggccagcctcctctcctgccgggctttgagcaagccgaacgccttccctccttggaacctgttgctgagctcgcccgacatggcgagcgcggggctcccgccggctccaggcttcgcggacgcggcgagggacgaggaggaggcacaggcgcctggtccgggctccggctagctgcgtgtccgct

SEQ ID NO: 432772 - DNA, 644 bp, Homo Sapiens
accagtgaaagtgtttaatagttaaattatttaaatagacttttcaatttccatgggaaatcataatcgtatctgtttttgcaagagtaggaataaaaagagtgcacaccctttagagggaacgaagagctagcactgcacctgcacactgtcaccagtcactgctgggatgggagaggggtccccatggggccgggaagccatgaccatgggagaacatgggatgaactcagcacacacactttactcaggttggaagcagaacgaaaacccaacaccactggcgggcgatgtggaggggcagggaacttgagaacaacagctggaagaaagcaggcctcctgtggccgacgtcaggatggcaatgcagaactcaaaggatggagcagcagaagcacgggacagactcaggcttggcagttttgggtccacacactttgcttctcagagctgtgttcagttggtgtgcggggaggggagggtggtgctagagcccagtgagaggtggtacaggtggacatcaaagtcacattgtggcagctggcacagagccactgcctcatcacctccaagctcatgttggaggtgaaggtcattctaacctgagaagcaatggaaagatttgggcatgggccctaaggatt

SEQ ID NO: 432773 - DNA, 1539 bp, Homo Sapiens
gagcattgataggcttcggtctgagcacgtccgcaagttcctcctgaccttcagggagcctgacttagagaagaagtactccaagcaggtagacgaccgatttggtgcctatgtggcgtgtgcctcgctcgtcttcctcttcatctgctttgtccagatcaccatcgtgccccactccatattcatgctcagcttctacctgacctgttccctgctgctgaccttggtggtgtttgtgtctgtgatctactcctgcgtaaagctcttcccctccccactgcagaccctctccaggaagatcgtgcggtccaagatgaacagcaccctggttggggtgttcaccatcaccctggtgttcctgggcggcttttgtcaacatgttcacgtgcaactccagggacctgctgggctgcttggcacaggagcacaacatcagcgcgagccaggtcaacgcgtgtcacgtggcggagtcggccgtcaactacagcctgggcgatgagcagggcttctgtggcagcccctggcccaactgcaacttccccgagtacttcacctacagcgtgctgctcagcctgctggcctgctccgtgttcctgcagatcagctgcatcgggaagctggtgctcatgctggccatcgagctcatctacgtgctcatcgtggaggtgccaggtgtcacgctcttcgacaacgccgacctgctggtcaccgccaacgccatagacttcttcaacaacgggacctcccagtgccctgagcatgcaaccaaggtggcattgaaggtggtgacgcccatcatcatctcagtctttgtgctggccctgtacctgcacgcccagcaggtggagtccactgcccgcctcgacttcctctggaaactgcaggccacagaggagaaagaggagatggaggagctgcaggcctacaaccggcggctgctgcacaacatcctgcccaaggacgtggcggctcacttcctggcccgggagcggcgcaatgatgagctctactatcagtcgtgtgagtgtgtggctgttatgtttgcctccattgccaacttctctgagttctatgtggagctggaggcaaacaatgagggtgtcgagtgcctgcggctgctcaacgagatcatcgctgactttgatgagattatcagcgaggagcggttccggcagctggaaaagatcaagacgattggtagcacctacatggctgcctcagggctgaacgccagcacctacgatcaggtgggccgctcccacatcactgccctggctgactacgccatgcggctcatggagcagatgaagcacatcaatgagcactccttcaacaatttccagatgaagattgggctgaacatgggcccagtcgtggcaggtgtcatcggggctcggaagccacagtatgacatctgggggaacacagtgaatgtctctagtcgtatggacagcacgggggtccccgaccgcatccaggtgaccacggacctgtaccaggttctagctgccaagggctaccagctggagtgtcgagggg

SEQ ID NO: 432774 - DNA, 227 bp, Homo Sapiens
tcctgccctccctgctgttttttgctgatcaccttgtccccgcaggcctggccccagcaccttcctccttccctgcccctccacatcgcccgccagtggtgttgggttttcgttctgcttccaacctgagtaaagtgtgtgtgctgagttcatcccatgttctcccatggtcatggcttcccggccccatggggacccctctcccatcccagcagtgactggtgaca

SEQ ID NO: 432775 - DNA, 1301 bp, Homo Sapiens
  misc_feature (77)..(77): n is a, c, g, or t
  misc_feature (81)..(89): n is a, c, g, or t
  misc_feature (147)..(156): n is a, c, g, or t
  misc_feature (256)..(256): n is a, c, g, or t
  misc_feature (1203)..(1253): n is a, c, g, or t
cggccgggggacggctccccaggggcggggtgttttttgtgtttatttttggccgccgccgaaaagggtgttcttcngagnnnnnnnnntaatttgggcacacccgtgggggcggcgtgggagggaatgttttgtccccacatttgnnnnnnnnnnggtctaccctcccggggggggagaaaaccgcccgtctgggcagaaagaagaagcactgtgctgcactattatggggggtagggcttctttgcgggaaaanaagtagcgaaagagtggttggggcgccgttgccgcttatatgccccgtttgaccagaaggggccctatattttagggcgtaagagttataaagcctttgtaggcgtgaatcccgcacacaaacatgcccccgttgtgttgggtgcggcctcaagtcgaagtgtggaaggccaaacatcaaaggtggtggtccccaatatttttgctcacagttttggcgcgaggtagacttttgagaccaaaaagggaaaacccacattccccattggcccagggtaatgttggacttgtggcaggcaagggccaccgccaacgaaaaacgttcagggggaagtctaaccgaaagtaaaacaccaggttagttaatgcccagggccatattcccacattttacatctttccaaaatggagggagcgatcatcccagactaagtaaaagtaaaatgaattggtttacatcatcccaggaccagagtcgaggaccgcattgcctgtggtaaaggaatccagagctctagtaggggtccatagcagatatcatgcaagtccacatatgtgtaattacgtagaacaggaattgatacatttcaagatatactaagcaaagggtttggaaggattaactgaatgcagaaatagaggaagaaaatggatttgtttaaaagatggttagaatctttaaagaagcaacatttttttaaagtggccttatgtggaccaaagcagagatgaactcaagtgtcaggtgggaaaatgcctaagtgcagcttctagacccaagggagacctaaaaatcgtgggacattttcggttgtcacatggggattggtgggagggggtgagtggggtgttgctggcaaacctcccacaatgcacaggacagaccactccacaagattctctgtcccaaattgttaatagtgctgctgttgagaaacccgccccagnnnnnnnnnnnnnnnnnnnnnnnnnnnnnnnnnnnnnnnnnnnnnnnnnnntcccgggaattccgggcggggtcgggggtttgcgtaatgctaatggga

SEQ ID NO: 432776 - DNA, 666 bp, Homo Sapiens
cttgcccacgctaatcctggtctgtcccaaagcaggcccccacgccaggagggcagttttcattctccccacagatgctcatgtaaaccaaccccttctcgctgtaagcagctgtgaatcctgccctgccacttaaggagctcagatcaaacaggtgtcctgtgcttgggttggtgacctggcagtcatcatgctcgttgctcttcatgggacaggctgtggctgtgggccaggcaaaggtgtactcacagtcctccacggcgctgatgaacatgggcctggagttcacttggctctcgctgcaggtgaatcggatggtggttgactttttccgaatcccatctggacataagtcgccatcaacgtatttcaggacaattatgccatctctccactgaggtccgtcccttaccctgccgaggttcacgggcttggagccacccagcagacacgcggctgcttctggagggcacggctcagtgccagcctgcggggccagagacttgcagacattgatgaggtagtgctccgggtcccccgtcccagtgatggcttccccagttgtcactgtacttgacagggacgagaggtcgaaggagttccagccccatctatgcctcggcctgattcaccacccggcccgtacctagcctaccttgtgccccc

SEQ ID NO: 432777 - DNA, 160 bp, Homo Sapiens
cctgggtctagctagctcccatccacagcctacagtgccctcaaccccaaccctaggccccatccagcctactcgggtgtcagaagctggcaccacagttcctggccagattcgcccaacgatgaccattcctggctagacccggggtgatcctctagaa

SEQ ID NO: 432778 - DNA, 2418 bp, Homo Sapiens
  misc_feature (359)..(414): n is a, c, g, or t
  misc_feature (421)..(429): n is a, c, g, or t
  misc_feature (434)..(523): n is a, c, g, or t
ataaagggcagcgcgagggaacggcgttggttttattaaaaccagccccccggggagagagaggactgcttgtttttcccgggaggggggtgatattctttcgtatgggggatgtcgtgtcgccgacgatagtggctgcccccgcccacaagaagagggtggggtcttctcaaaagtggagcggccttggggtgcagcttggttttatagaccccgcggaggggtgaaaaaagggacgcccgcggggaatcggtttattgaaacgggcgtcgttcgaaggaaggaacttggttgtgtgaaaaaagaagagagggctcgcaagagtggggcgccccccgcgggggagtttttgtttgtannnnnnnnnnnnnnnnnnnnnnnnnnnnnnnnnnnnnnnnnnnnnnnnnnnnnnnntgtgttnnnnnnnnngttgnnnnnnnnnnnnnnnnnnnnnnnnnnnnnnnnnnnnnnnnnnnnnnnnnnnnnnnnnnnnnnnnnnnnnnnnnnnnnnnnnnnnnnnnnngaccttatttacactttattgacagacacaacacgtatgtatgtgcgtcgcagcacaggccctgtgggcaagaccggacgctcatgatcccagggataaaaaatctgtccgcgagcgggcagggggcccgggcagggggagtgcgcttcccagggcaccattcgcttaaagtgtgttaatgacttgtccagcaagtttctttaccttcccacacccctcttctcaacgtccccccagagtcctcaggggggccttcgacctgcaaaagcctcacaggagtgcgaggggccccagctcccagggcggccgatggagcctcacacggtcaccttctccatcacgctttcagccacgtggacttcgtctgcctggacggtgacagctgctgactggccgcatatgtgctggtgatccttccagtccttgcgttggcagaaggtggagcagtagttgaccttgtggcagccggtgcactcgctcatagcctcccggccgcagttaacgcaggactgctccttccgctctgcgtcagcgtggatcttggcctggtttgtggcagcttctcggtaggtgctggcatgcttggcttgctcaaacagcgtcttcagctgctgcgctgtgttgagcaaggagttgaccatctcttctaggtacagccagctccgcggctctgacagctccagcccattgaccaacgcgggaggtgccgctttggtgggagtcgggggtgggaccgccagcgcaggcagggatgtcaacactattttgggatgtgacgttggcaacgcagcttctggaaacggtgcgatctggcagctgtcctgatagccggggtagtgaggctcagggtggctggccctgcatgggggctgcacgctggcctcttggactgtggcccctgcgaagacgtcgccctgggccggactctctgatatgacagcagtggcctctaccgtggacgctcggtcaaaggtcagtgcccccgaggtcgtgatctgtcccgagggggtcacggtgaaggtggtagccgcggtggctggaagcaatgtgatgttcttgggggagtccttcttcacgggagttgtgggcagttcattctccttcttgcgccttttgtaaggcacaaaaagcctgactgggccacttaaggtcatgtcgtcgcagcaggcagcacaggtgcaagaggcagcgtgagggtttaagatcccatcctggatgaggcactgcaagggtcggcccgcgtagcgaatgcttcttttccagtccttactgctggctcttcctgccatggcctcaaactcggtgggactgtaccagttctccccctgcttgatgcaccgtccccggccgcctgagccgagcctgttcttgtacagagtgccgctgatgttccggcaccgtacgggcagctcactgtcgtacacagaagggtcccagttgtatttagttccacctttttcttggccgggagccagaggggttggaggagactgaggacctggggtgaggggagctgccgggcctttcagcccggtggtctccacgatgctcccatctgtgtggacgacaatcagtgtcgctttttcggtgttcaggctgtccccgatctgaagggccgtcctaccagacagaacatgtcctgagatggatgccgcgttcgccacagacgtggtgaagacattgtctgcagcagcccccacgttggccactgtcactgtggtcacctctgcgaaggctgcggcagcggcggcctcgtcggggccgggcagggcctcggcgcccatgtccatgtgcccgggctccgccgccatcaccgccactgccgtgacccgcggcgtctcccgctccgcctccgagtctgcctcgtgccgaattcgccacccaggcctcgctac

SEQ ID NO: 432779 - DNA, 711 bp, Homo Sapiens
cccatcctggatgaggcactgcaagggtcggcccgcgtagcgaatgcttcttttccagtccttactgctggctcttcctgccatggcctcaaactcggtgggactgtaccagttctccccctgcttgatgcaccgtccccggccgcctgagccgagcctgttcttgtacagagtgccgctgatgttccggcaccgtacgggcagctcactgtcgtacacagaagggtcccagttgtatttagttccacctttttcttggccgggagccagaggggttggaggagactgaggacctggggtgaggggagctgccgggcctttcagcccggtggtctccacgatgctcccatctgtgtggacgacaatcagtgtcgctttttcggtgttcaggctgtccccgatctgaagggccgtcctaccagacagaacatgtcctgagatggatgccgcgttcgccacagacgtggtgaagacattgtctgcagcagcccccacgttggccactgtcactgtggtcacctctgcgaaggctgcggcagcggcggcctcgtcggggccgggcagggcctcggcgcccatgtccatgtgcccgggctccgccgccatcaccgccactgccgtgacccgcggcgtctcccgctccgcctccgagtctgcgtcctcctccgagtcctcgtccctgctcagcaccggctcctccgcctcgccgct

SEQ ID NO: 432780 - DNA, 2625 bp, Homo Sapiens
  misc_feature (436)..(437): n is a, c, g, or t
  misc_feature (479)..(479): n is a, c, g, or t
  misc_feature (2155)..(2270): n is a, c, g, or t
  misc_feature (2590)..(2590): n is a, c, g, or t
  misc_feature (2597)..(2597): n is a, c, g, or t
gtgtaccacacgtttaatgtttatttatgtttagggttgcaatacaagaacatgaaaaacagtatcaaatgaagtgatcattttcagtgaaagggaaggtagaacacaatacaaagaaaacacggtatctttagtttacaattacacaatataagatgaagaaactttttcaaaaatactatgttatattaacacctcagtggtaaacaataacatcattatgattaaatttataggccactatatgtcacatacacaaggtctcagttgaatcaaatgtggtcttttcacattagatgtatgctaatctttttcaagcagtcaaacttcaaaatacactgttttatttactataagtactggatttctatagcaaactaatgaaggcacagctagtgcaagcagatttaaacccttagtcttatgggctgggggnnggagaaccgtgccccacttgcattggtacttcatgaactttntttttcaagcaaatatttgtttcagttaacaattctgacagtttcacagctacagtctaacagaaacatgaccaaaggacatcacaaaaatcaacactgtgtagcaccaaactaacatgctttagataattgacaacagcttacatattttgaagaatattatactacaacagcctagatagaataaactggcacttagacactttttaggactatttttaaaatatagactaccaagaaaccacaaaaacttgactataaggaataatagtgttcaggttacaggtcagggttttacttttttcaaggctgtatgaatctgcttcacttcttgagattttaagattcttgaaaaatctttcagattgacttattttctgtatttcttgtttccataatgtttgccaaattgatagtaggtaccattgacttctccagtatagtaatagattgatttcaggatgacattatcatgtaaaatctgcccaatttcaaagtcctcatccaggatagcatcttctcgtggttccagcttcccaatcataggaatctcaggaggactaaagaagttgaagaatgatgcattaggaaccactcttggctggatttcaatttctccagtagcagttgtgcgactctgggtagttgtcacagtaacatcttttcctcttctccagtctatcttgcagcctttgcaatcttcaatttcccatccccaagaaaagaagggatcattgtgatctggttttgcctttattatatatgtcttcaccagcacctcatttctgaagtatgggttgggtagaaaatgaaattcaaaggtgtaacttacaggctggccaggttttgagaacttcaggctaacatccgacaagaacttcagaatgggctcatcatacttctgaatcataggcccgagcttgtcaacattctttaaaacaatcagccaatagtcaggaatgcctttagggtcttctcttttaggctttcccttcctagctcttttaagatctacactgtcctgaagcctttcctcaggaactcttttatgagtctctcttactgcagcccttgccttagcctctgttgctttaggctgttctttatcatctgcctttacctgggggacttctttaggatcttcttttacttcaggggttgcctccatacagtctttagaatctgctttttcttcagcctttacctcaggaatttctttaggaacttccttttcttcatccttcacctcaggaatttctttaggaacttccttctcttcagctttcacctctgggttttctttagggttttcttcttcctcaccctctaagggaggcatttcactaggggtgttatcctgcacctcctcatcactgctgaactcctcatcctctgaattccattcacattcttcttctgtaggctcgtattctgcattgatgatttgaagccgcctatcatacagaggcttgttgagttcagcatattttctttcaagatcatgaattgcttttaagaacagggtatctaccttgtcacattcatcttgaatgtttctaagcgcttgcacacgatttctaactgcctgaggcagcctatccacgaaatttgttcccaacggggcccgccgcgcccttctggaaggctcaggtaccctcttctttctatacaagcgnnnnnnnnnnnnnnnnnnnnnnnnnnnnnnnnnnnnnnnnnnnnnnnnnnnnnnnnnnnnnnnnnnnnnnnnnnnnnnnnnnnnnnnnnnnnnnnnnnnnnnnnnnnnnnnnnnnncagattcttccccagaatcactagtcgagctagccatctcctcttcggcaaccccatgggcgacaggttccgagaccattttaaaatctgcttctgccatcttgcaagcctacaaactctaccagggagaccgcgcgaccagagatgggcagaaaatgactcacggatgcttgagtggcggcggcggaggcccgggctgcggaggtggcagcggcgatggcagcagcggcgcagagcggagctggagctggggatgcagaggccggcgctgaggtggcagcggcagtggaggcttgggcgacagcggtggcggcaaggcntctcccngctgcagctagagtgccgagatgtaccg

SEQ ID NO: 432781 - DNA, 919 bp, Homo Sapiens
  misc_feature (441)..(459): n is a, c, g, or t
  misc_feature (484)..(493): n is a, c, g, or t
ttttttttatagtataacacactttaatatttatttattttaggttgcaatacaagaacatgaaaaacagtatcaaatgaagtgatcattttcagtgaaagggaaggtagaacacaatacaaagaaaacacggtatctttagtttacaattacacaatataagatgaagaaactttttcaaaaatactatgttatattaacacctcagtggtaaacaataacatcattatgattaaatttataggccactatatgtcacatacacaaggtctcagttgaatcaaatgtggtcttttcacattagatgtatgctaatctttttcaagcagtcaaacttcaaaatacactgttttatttactataagtactggatttctatagcaaactaatgaaggcacagctagtgcaagcagatttaaacccttagtcttatgggctggnnnnnnnnnnnnnnnnnnncacttgcattggtacttcatgaacnnnnnnnnnncaagcaaatatttgtttcagttaacaattttgacagtttcacagctacagtctaaccagaaacatgaccaaaggacatcacaaaaatcaacactgtgtagcaccaaactaacatgctttagataattgacaacagtttacatattttgaagaatattatactacaccagcctagatagaataaactggcacttagacactttttaggactttttttaaaatatagactaccaagaaaccacaaaaacttgactataaggaataatagtgttcaggttacaggtcaaggttttacttttttaagggctgtatgaatctgcttcactttttgagattttaaaattcttgaaaaatcttcagattgactaattttctgatttcttggttccataagtttgcgcaattgaatggcggtacaattcgcctt

SEQ ID NO: 432782 - DNA, 1029 bp, Homo Sapiens
  misc_feature (5)..(5): n is a, c, g, or t
  misc_feature (10)..(10): n is a, c, g, or t
  misc_feature (13)..(13): n is a, c, g, or t
  misc_feature (25)..(25): n is a, c, g, or t
  misc_feature (36)..(36): n is a, c, g, or t
  misc_feature (39)..(39): n is a, c, g, or t
  misc_feature (53)..(53): n is a, c, g, or t
  misc_feature (67)..(67): n is a, c, g, or t
  misc_feature (71)..(71): n is a, c, g, or t
  misc_feature (76)..(76): n is a, c, g, or t
  misc_feature (101)..(101): n is a, c, g, or t
  misc_feature (106)..(106): n is a, c, g, or t
  misc_feature (111)..(111): n is a, c, g, or t
  misc_feature (113)..(113): n is a, c, g, or t
  misc_feature (137)..(137): n is a, c, g, or t
  misc_feature (167)..(167): n is a, c, g, or t
  misc_feature (460)..(575): n is a, c, g, or t
ctctncctcngantttttaggactnctttctcatcntcnccccagaattcttnaggaactccttctntcantttcnctctgggtttctttagggtttcttnttctncaccntntaaggaggcatttcactaggggtntatcctgcacctcctcatcactgctgaacncctcatcctctgaattccattcacattcttcttctgtaggctcgtattctgcattgatgatttgaaaccgcctatcatacagaggcttgttgagttcagcatattttctttcaagatcatgaattgcttttaagaacagggtatctaccttgtcacattcatcttgaatgtttctaagcgcttgcacacgatttctaactgcctgaggcagcctatccacgaaatttgttcccaacggggcccgccgcgcccttctggaaggctcaggtaccctcttctttctatacaagcgnnnnnnnnnnnnnnnnnnnnnnnnnnnnnnnnnnnnnnnnnnnnnnnnnnnnnnnnnnnnnnnnnnnnnnnnnnnnnnnnnnnnnnnnnnnnnnnnnnnnnnnnnnnnnnnnnnnncagattcttccccagaatcactagtcgagctagccatctcctcttcggcaaccccatgggcgacaggttccgagaccattttaaaatctgcttctgccatcttgcaagcctacaaactctaccagggagaccgcgcgaccagagatgggcagaaaatgactcacggatgcttgagtggcggcggcggaggcccgggctgcggaggtggcagcggcgatggcagcagcggcgcagagcggagctggagctggggatgcagaggccggcgctgaggtggcagcggcagtggaggcttgggcgacagcggtggcggcaaggcctctcccggctgcagctagagtgccgagatgtaccgcagccgaatggcgcagtatgagaccccgagatctcttctcgttttagatcgcgagccccctccccttgcagtcagacctcccgttaatttcgttcccag

SEQ ID NO: 432783 - DNA, 1047 bp, Homo Sapiens
  misc_feature (4)..(4): n is a, c, g, or t
  misc_feature (18)..(18): n is a, c, g, or t
  misc_feature (27)..(27): n is a, c, g, or t
  misc_feature (31)..(31): n is a, c, g, or t
  misc_feature (35)..(35): n is a, c, g, or t
  misc_feature (53)..(53): n is a, c, g, or t
  misc_feature (58)..(58): n is a, c, g, or t
  misc_feature (505)..(505): n is a, c, g, or t
  misc_feature (569)..(684): n is a, c, g, or t
ttancaccccccttaccnggggacttnttangatnttctttacttcaggggtnccccnatacagtctttagaatctgctttttctacagcctttacctcaggaatttctttaggaacttccttttcttcatccttcacctcaggaatttctttaggaacttccttctcttcagctttcacctctgggttttctttagggttttcttcttcctcaccctctaagggaggcatttcactaggggtgttatcctgcacctcctcatcactgctgaactcctcatcctctgaattccattcacattcttcttctgtaggctcgtattctgcattgatgatttgaaaccgcctatcatacagaggcttgttgagttcagcatattttctttcaagatcatgaattgcttttaagaacagggtatctaccttgtcacattcatcttgaatgtttctaagcgcttgcacacgatttcttacttcctgaggcagcctatccacgaaatttgtntcccaacggggcccgccgcgcccttctggaaggctcaggtaccctcttctttctatacaagcgnnnnnnnnnnnnnnnnnnnnnnnnnnnnnnnnnnnnnnnnnnnnnnnnnnnnnnnnnnnnnnnnnnnnnnnnnnnnnnnnnnnnnnnnnnnnnnnnnnnnnnnnnnnnnnnnnnnncagattcttccccagaatcactagtcgagctagccatctcctcttcggcaaccccatgggcgacaggttccgagaccattttaaaatctgcttctgccatcttgcaagcctacaaactctaccagggagaccgcgcgaccagagatgggcagaaaatgactcacggattcttgagtggcggcggcggattcccgggctgcggaggtggcagcggcgatggcagcagcggcgcagagcggagctggagctggggatgcagaggccggcgctgaggtggcagcggcagtggaggcttgggcgacagcggtggcggcaaggcctctcccggctgcagctagagtgccgagatgtaccgcagccgaa

SEQ ID NO: 432784 - DNA, 1280 bp, Homo Sapiens
  misc_feature (43)..(43): n is a, c, g, or t
  misc_feature (58)..(58): n is a, c, g, or t
  misc_feature (65)..(65): n is a, c, g, or t
  misc_feature (115)..(115): n is a, c, g, or t
  misc_feature (135)..(135): n is a, c, g, or t
  misc_feature (147)..(147): n is a, c, g, or t
  misc_feature (161)..(161): n is a, c, g, or t
  misc_feature (211)..(211): n is a, c, g, or t
  misc_feature (802)..(915): n is a, c, g, or t
  misc_feature (974)..(974): n is a, c, g, or t
  misc_feature (977)..(977): n is a, c, g, or t
  misc_feature (1085)..(1085): n is a, c, g, or t
  misc_feature (1227)..(1227): n is a, c, g, or t
  misc_feature (1229)..(1229): n is a, c, g, or t
  misc_feature (1237)..(1237): n is a, c, g, or t
ttggagaaattccaggcctaaacatccggaacaagcaacttcnagaaggggctccatnaatactnctggaaccaaaggcccgagcttgtcaaacatcctttaaaacaatcagccnaatagtcaggaatgcctttnagggtcttctcntttaggctttcccntcctagctcttttaagatctacactgtcctgaagcctttcctcaggaacncttttatgagtctctcttactgcagcccttgccttagcctctgttgctttaggctgttctttatcatctgcctttacctaagggacttctttaggatcttcttttacttcaggggttgcctccatacagtctttagaatctgctttttcttcagcctttacctcaggaatttctttaggaacttccttttcttcatctttcacctctgggttttctttagggttttcttcttcctcaccctctaagggaggcatttcactaggggtgttatcctgcacctcctcatcactgctgaactcctcatcctctgaattccattcacattcttcttctgtaggctcgtattctgcattgatgatttgaaaccgcctatcatacagaggcttgttgagttcagcatattttctttcaagatcatgaattgcttttaagaacagggtatctaccttgtcacattcatcttgaatgtttctaagcgcttgcacacgatttctaactgcctgaggcagcctatccacgaaatttgttcccaacggggcccgccgcgcccttctggaaggctcaggtaccctcttctttctatacaagcgnnnnnnnnnnnnnnnnnnnnnnnnnnnnnnnnnnnnnnnnnnnnnnnnnnnnnnnnnnnnnnnnnnnnnnnnnnnnnnnnnnnnnnnnnnnnnnnnnnnnnnnnnnnnnnnnnncagattcttccccagaatcactagtcgagctagccatctcctcttcggcaaccccatgnacnacaggttacgagaccattttaaaatctgcttctgccatcttgcaagcctacaaactctaccagggagaccgcgcgaccagagatgggcagaaaatgactcacggatgnttgagtggcggcggcggaggcccgggctgcggaggtggcagcggcgatggcagcagcggcgccagagcggagctggagctggggatgcagaggccggcgctcgaggtggcagcggcagtggaggcttgggcgacagcggtgncngcaaggcntctcccggctgcagctagagtgccgagatgtaccgcagccgaa

SEQ ID NO: 432785 - DNA, 807 bp, Homo Sapiens
  misc_feature (264)..(379): n is a, c, g, or t
tcttcttcttagcctctattccccatgaatgatgtgaaccccctatcatacagagccttttgattcagcatattgtctttcaagatcatgaattgctttttaagaaacagggtatctaccttgtcacattcatcttgaatgttttctaagcgcttgcacacgatttctaactgcctgagcagcctatccacgaaatttgttcccaacggggcccgccgcgcccttctggaaggctcaggtaccctcttctttctatacaagcgnnnnnnnnnnnnnnnnnnnnnnnnnnnnnnnnnnnnnnnnnnnnnnnnnnnnnnnnnnnnnnnnnnnnnnnnnnnnnnnnnnnnnnnnnnnnnnnnnnnnnnnnnnnnnnnnnnnncagattcttccccagaatcactaggtcgagctagccatctcctcttcggcaaccccatgggcgacaggttccgagaccatttgtaaaatctgcttctgccatcttgcaagcctacatactctaccagggagaccgcgcgaccagagatggcagaaaatgactcacggatgcttgagtggcggcggcggaggcccgggctgcggaggtggcagcggcgatggcagcaagcggcgcagagcggagctggagctggggatgcagaggccggcgctgaggtggcagcggcagtggaggcttgggcgacagcggtggcggcaaggcctctcccggctgcagctagagtgccgagatgtaccgcagccgaatggcgcagtatgagaccccgagatctcttctcgttttagatcgcgagccccctcccctccgct

SEQ ID NO: 432786 - DNA, 417 bp, Homo Sapiens
  misc_feature (376)..(376): n is a, c, g, or t
atagtataacacactttaatatttatttattttaggttgcaatacaagaacatgaaaaacagtatcaaatgaagtgatcattttcagtgaaggggaaggtagaacacaatacaaagaaaacacggtatctttagtttacaattacacaatataagatgaagaaactttttcaaaaatactatgttatattaacacctcagtggtaaacaataacatcattatgattaaatttataggccactatatgtcacatacacaaggtctcagtgaatcaaatgtggtcttttcacattaggatgtatgctaatctttttcaagcagtcaaacttcaaaatacactgttttatttactataggtcctggggtttctatggcnaacttatggagggcacagctaggtgccaggccggttttaac

SEQ ID NO: 432787 - DNA, 461 bp, Homo Sapiens
  misc_feature (396)..(396): n is a, c, g, or t
  misc_feature (435)..(435): n is a, c, g, or t
  misc_feature (441)..(441): n is a, c, g, or t
ttttttttatagtataacacactttaatatttatttattttaggttgcaatacaagaacatgaaaaacagtatcaaatgaagtgatcattttcagtgaaggggaaggtagaacacaatacaaagaaaacacggtatctttagtttacaattacacaatataagatgaagaaactttttcaaaaatactatgttatattaacacctcagtgggtaaacaataacatcattatggattaaatttatagggccactatatgtcacatacacaaggtctcagttgaatcaaatgtgggtcttttcacattaggatgtatggctaatcttttttcaaggcggtcaaactttcaaaatacactgttttatttactattaaggtactggggtttctattggcnaacttatgagggcacagctaggtgccaaggcgggttttnaacccnttggtcttttggggctgggg

SEQ ID NO: 432788 - DNA, 919 bp, Homo Sapiens
  misc_feature (139)..(139): n is a, c, g, or t
  misc_feature (669)..(721): n is a, c, g, or t
  misc_feature (892)..(892): n is a, c, g, or t
taagaatgttgttttgctaaacagcttacttatgtttatagttgctcctttcaaaagtgccaccagaaaagaacctgttttctgaatccagtgaccagagcagaatgtctccagcccttgccaatataacaccactaantcatgtgcttattgaaaaggccttcccaaccatgtcaggtttctggtttatggatcagcagttggagctgtctgtctctctcacgttttcaatgctgtcttctttgttttctggttgaatttcgccttcatcctccttgtgttgagttggatctttttcagcaacctggtctttggtttggggttcatgtgtagaaacaggatctaaaactacaactggttcggcttgtttttcaccgtcaatgtattttttcctgcatccaatgctactgggaggccagtattccttttagttcatccactgcactttcgcagcctttcgaagattctggctttgtcttcggtctggctgtctgattaacgggtctaagatgaactccctttttaattctatccatcatctcttcaactgcttgcctctttagatctgtgacttcttcagttgtttctggttgagttgccttttctttcttagcaccactgccactggggtgggatcgtttccggatcatggacatgagggatcggatnnnnnnnnnnnnnnnnnnnnnnnnnnnnnnnnnnnnnnnnnnnnnnnnnnnnnctgaattctcagactggttcactcgtttctggagttcatcaacagagtgctttaaatttctggctttctcttcagaattctgatatttcaattccaattcctttttatcttcctctagaagctccagttgctgtttgaggttgtgttttctttgtggagtgtttcattttnctagttgctcttctaattctttgacct

SEQ ID NO: 432789 - DNA, 1994 bp, Homo Sapiens
  misc_feature (84)..(84): n is a, c, g, or t
  misc_feature (86)..(86): n is a, c, g, or t
  misc_feature (659)..(659): n is a, c, g, or t
tattaaaaataaataaagttgcaaatcatatcaattttcatattaaagatgcaacttgggggctaaacagaacgttaataatancncaactgacccttaatgggaaactattggtgcctttttaataagttgtggtgaggagagttcaaattacagcataacagaattcgtttcgtgaattaatgcagtctgtagtaagcatatcatatagcagtattatccagttaaagaaagatacagttgaaaaacattacgttttaattctccatgagtaaagtgataagtaactataaaatcattattgggagaacatggaaacagtcaagcataacgaacttacagaaagataattatctccaaatttaggaagtacatgtacctgcctacccacctcttcaagcctatgcttaccacacgtgcaaaaatacaatacaatacaactactgcaattattactatcattttcttttgcccttaggtgaaaaacacctgacagctacatgctgagccatgctaacaaaactaaacctttcactttctttaatagtaaaattaccattactgaatcattgtcataaaaagtgcattcaagtacattaccacttattttaaataaacaccaattttgaaacaatcaactttgaaaagctgcataaggnggggggggaatccctgattacatttctatttattcactgtggtagcctgaaacattgtatttttagagactaactactgcttaatttcttttttaaaaaaaacaacaacaaacctgtgtaatatagaacagcagtgaagcaagaaaaatgtgtgcttgtcacttatcttcaccatactgtacataagaactctgataaaatatggtacttgtgccacattagtatttgggaaaacataattaactcatagcacagagcacatggtttaccaacttactactgtaaaattcaaggtttggactttcacctcagttctgtattcaggctaccagagcatccccacggaggtcctcgggaggctttggacacaatcaatagcatgtatttttcatccaatagttaacaatgtgtgtaattaacactgactatgggactacgagtttgatgccagctcctgagttttcagtttatctcagtctactgtagaaaataacttgtatgccacagtacccaacaatttccatgctgctgcagtttctccatcaagaggatcagacccaaaacagaagcttctttgggggcttttaaaatcacattgggttgatcagttttgtttatccgattatatacaagcacctcaaactttcagcattccatttgatgagtggtatgcacatttcctaaaaaggtatcaacatctgaatttttttgtaaccttctaaaagaagtcatacttaatacagtaactaggaaaaaaacctcatctttataaagatcaaaaaaccaaaacctactaggaatgtgtgttttgctaaacagcttacttatgtttatagttgctacttacaaaagtgacaccagaaaagaacctgtattctgaatacagtgaccagagcagaatgtctacagcccttgccaatataacaacactaatcatgtgcttattgaaaaggacttccaaacatgtcaggcttctggtttatggatcagcagttggagctgtctgtctctctcacgttttcaatgctgtcttctttgttttctggttgaatttcgccttcatcctccttgtgttgagttggatctttttcagcaacctggtctttggtttggggttcatgtgtagaaacaggatctaaaactacaactggttcggcttgtttttcaccgtcaatgtattttttcctgcatccaatgctactgggaggctgaaacgtaaccttggaacttgtgcatccttccaatttacggggcccttcacctggctcaggtgttgggggggacgggctgttgaattctgcctccagagtttttttgttcaaggctgtttttgtt

SEQ ID NO: 432790 - DNA, 666 bp, Homo Sapiens
  misc_feature (28)..(28): n is a, c, g, or t
  misc_feature (150)..(150): n is a, c, g, or t
  misc_feature (154)..(154): n is a, c, g, or t
  misc_feature (158)..(158): n is a, c, g, or t
gaaatattggactaaaatacatactttntcagcagcagttgttacagtttgctaaggaaatcagtgtgagggctaatacagaaaactggtccaaagaaacattgcaaaatacagttgatatccttctgcatcatatattccaagaacgantggntttnttatctggaaattttctgaaagaactatctttaataccattcttatgtcctgagcgggcccccgcggaattcattagatttcatcctcaatatcaagaggtaaatggaacacttcctcttataaagttcaatggagcacaggtaaatccaaaattcaagcaatgtgatgtactccagctgttatggacatcctgccctattcttccagagaaagctacacccttaagcattaaagaacaagaaggtagtgaccttggtccacaagaacagcttgagcaagttttaaatatgcttaatgttaacctgggtcctcctctttgataaggtaatcaataactgcagaaacatatgcaacataacgacgttggatgaagaaatggtaaaaactagagcaaaagtcttaaggagcatatatgaattcctcagtgcagaaaaaagggaatttcgttttcagttgcgaggggttgcttttgtgatggtagaagatggttggaaacttctgaagcct

SEQ ID NO: 432791 - DNA, 520 bp, Homo Sapiens
ttctgcgacagccgcactttatttggagttttccacctaagcagctcccagctgagctgcatgacatgtgcaaaagtcccctagaaagctgggcctcgcagtgtgtaaaaaaggccccccatggggcagagccgtgcaaccattttaaaaaaagagacagtgagagagaaatcaggccccctgggagcctggcttgggtggagtgcacatcgctcaggccggtccatgtgccaggccactcctgctggttcgggggctgttttcttctctgattgtgctttcctttccaagtccttaaaactctggggttgtagccaccagagagaccagaccaagtcctcggggtcaggagggtatctggccggcggtgcagtttgagggtgacctcacacacagacacccacaacacaatgctcccccactgctcagccccgccagaaactcagggcttccctggcctcgcagccctcgccagccccttgtgtcccagcctctgcccctgagcctggccccagtcggc

SEQ ID NO: 432792 - DNA, 1594 bp, Homo Sapiens
tcccatcaagagtccccatccttcaagaaaccaccacaatttgtaccccaaaggctggtatatatatcaagaaaggatgacttccttccttgatctttaaataacaccctctccacatcggaggtatctggaggttgggcatttgcctaacgccacggggtccaccggcgggggtcacagctgctggctggtgaagaaggatttagtctccctgcagacaggattgacacagagcggacagctcagggtcagctgcttggaacacagctcgtttgactggatgtgtgaatgcaccaagtcggccagggccttagagaacaatggatttccattaagagactcagctcttctgatgttttcaactccacactccttggctaaaacttgagagtactcgatgtccagctccatacagcgtttcaatatggtccactggtaaatgctatcggaaccaagaggatattcttcctccccctctcacaaagccctttgatagattcgtctgtttgaggacccaaccagggcatcggaccaaccttggattgccacaccagtcggtaggggttgcagtactccagcctttccatgactttttggacagtggcgcttacctcctgaggatatgggtcgcctctgttgaccacagacatcggcagtgagtgagcagaaaacagaatgaccacctcgcttctcttctcaagtggaaaatggtccagttcctttagaatatgatctgcaaagcactggatgaggaggtgatgtgtgggccacctgtcaatagtgctccacttcatcgtgggcttccgtcccacttgattatagtatctgtaaatggcatttaagctgctgcctgtggtggagcagctgtactgtggatactgtgtgaaagcaatagccctttctaggccatctctctccatctcttcaattgcttcttctgttaaaggatggacgtaccgaaatccaatatagtatttgtgaggggctgtgttgggggacaattcatccagcagcttcaccatgccctctccctgcttggaagtccatatcttgatgggggatccgcctccaatcctgcggtactgctcttgaatcttgggggttcggcgtttggcgatgaatggtgccagcttattctgaataggaagtgtcatgaggtctcggtccaagaagagtctcagaaggaagtcgtgaacatctccaagagtttcagggcctcccatgtttagcattaatattccagttttcggcttcctcttctgcggttgaacttgaggttttgcaccctgggcatgctgggctgtttctgtggtgacggccgctgcagctgcacctgacttccacctccatggctgacagaccctccagctgctggatgccagcggatcgcggagcaggacgcccgcggcgcgcagggccgcagccatgtttgcgccgagtgaacgcattgcctgggcagcctcggcccgagtccgggctcctcccgcggcggcgcgcccaggtgtccgcccagcagtggccgagccgggtagcgatccccacgcgcgtccccagccacctgacctcgcgccctcccggcgcgcccgcccccgct

SEQ ID NO: 432793 - DNA, 1322 bp, Homo Sapiens
  misc_feature (74)..(85): n is a, c, g, or t
  misc_feature (117)..(183): n is a, c, g, or t
  misc_feature (523)..(545): n is a, c, g, or t
  misc_feature (945)..(968): n is a, c, g, or t
  misc_feature (1160)..(1160): n is a, c, g, or t
cggtccggaattcctcgggatctgacacaaatgggctggtgcccattcagaatcaaggggtacttggttagggnnnnnnnnnnnngtttgcacccccaaacgtcctgtatcttatgnnnnnnnnnnnnnnnnnnnnnnnnnnnnnnnnnnnnnnnnnnnnnnnnnnnnnnnnnnnnnnnnnnngtgcaagtgatttttctaccagacagcgaagcacccctttgcttcccatgcgacttcaagaaggtttcctatactatacatatatatacgttctggttggcaagccctgctgatcagagaaagtctctgcatgttctagtgttagtaactaatttttatatagttaatgtaggataaagtagagtgcattaagacacaatattgtaatccctactctaggcacttgcctttaaactatgtttttcagcccttcagaagggttctactactgtcctatacaatcaagtaactgaaattcttgggaagacactttgctcctcatctttctccccgaaacaannnnnnnnnnnnnnnnnnnnnnnccttaatttgcacgaaaacaaaaattccatatcaatgtgccttgccctggatagcgattatttgtggaattgttgcacatgctcctctattgaaaggggtttttccctagtcaagcatttggagacactttttgtaaatgtgacttttatgtcagccatcgtcagtttcaacatctagaactaaatagaaagctagttgttccgcagataggagtagtctttattgtcctgtacggtcggtggcagtgctattctgagatctgtagatgcttagaatatcagtattttggatgttgctgcattttacaatttatttggagtcttcctttattttcccccagatatatgaaaatatgcaatacctgcttatatcatgtagaaaagcttagcaattattaannnnnnnnnnnnnnnnnnnnnnnngaccaaagtcggtgctgcacttgacgcagtgtgttttaggtgtttgtctttgtacttttttgtgatttttgaatgcacgtgcgcaggaagggctcctcttagagaagcagtcaaactgtgaagcactaagctgaccctgcttcaagcaattttgtttttacaactgttcctttcacaagcaagccttaaaanaaaaaaagacaacttcctttttcttcagctcccacaccccatttttcttagcagactgcagtcaatccacattcaataaaaagtatataatgcccatttttatatgcacgtttttaaacttccaagttctgaaaattgtttactggttatctctatttaagg

SEQ ID NO: 432794 - DNA, 534 bp, Homo Sapiens
  misc_feature (17)..(17): n is a, c, g, or t
  misc_feature (70)..(70): n is a, c, g, or t
  misc_feature (163)..(163): n is a, c, g, or t
  misc_feature (242)..(259): n is a, c, g, or t
gactactccctatctgncggaaaccaactagctttcctatttagttcctagatgttggaaaactgacganggcctgaaccataaaggtccacctttaccaaaaagtgtcctcccaaatgccttgactagggaaaaaccccctttcaatagaggagcatgtgcnaacaatctccacaaataatcgcctactcccgggcaaggcacattgatatggaatttttgttttccgtgcaaattaaggnnnnnnnnnnnnnnnnnncaacattgtttcggggagaaagatgaggagcaaagtgtcttcccaagaatttcagttacttgattgtataggacagtagtagaacccttctgaagggctgaaaaacatagtttaaaggcaagtgcctagagtagggattacaatattgtgtcttaatgcactctactttatcctacattaactatataaaaattagttactaacactaggacatgcagagactttctctgatcagcagggcttgccaaccaggacgtatatatatgtatagtata

SEQ ID NO: 432795 - DNA, 1097 bp, Homo Sapiens
  misc_feature (853)..(853): n is a, c, g, or t
ggatttacctcttttcagatggactggtccgctttgccagttgcaagtattcgccttccatgaagagccttggcaataagttcatgcacctgaccaactacagtgtcaataaaaagaatgccgagtaccaggccaatgcagatgaaatggcttgccagggccacaaatgggcactgaaggctttgtggaactacctgagccagaagggagtcaatagcgacgccatctgggagaagataaaggatgttgttgtcaaaactatcatctcgtcagagccctatgtgaccagcctgctcaagatgtatgtgcgacggccctatagctgccatgaactctttggttttgacatcatgctagacgaaaacctcaagccctgggtcctggaagtcaacatttccccaagcctccactccagctctccactggatatcagcatcaaaggccagatgattcgtgaccttctgaatctggcaggttttgtcctgcccaatgcagaggatatcatttccagccccagcagctgcagcagctccaccaccagcctgcccacctcccctggggacaaatgtcgaatggctccagagcatgtcactgcacagaagatgaagaaagcctattatctgacccagaaaattcctgatcaggacttctatgcatctgtgctggatgtcctgacaccagatgatgttcggattctggttgagatggaagatgagttttctcgccgtggtcagtttgaacgaatttttccttctcatatctcctctcgctatctccgcttttttgagcagccacgatatttcaacattctcaccacccaatgggaacagaaataccatggcaacaagcttanaggagtagatctgctccggagttggtgctacaaagggttccacatgggagttgtctctgattctgctccagtgtggtctctcccgacatcacttctgactatctcaaaggatgacgtgatactcaatgccttcagcaaatcagagactagcaagctgggaaaaacaagctccttgtgagttaacctactactctctgaaaacgggaccacgccccaaatcccagaagactcaagctgggccttt

SEQ ID NO: 432796 - DNA, 774 bp, Homo Sapiens
  misc_feature (21)..(21): n is a, c, g, or t
ctcgtcctcggaggaactggntttctggggataaggggaaaggccagcttgagtcttcttggatttgggcgtggtcccgtcttcagagagtagtaggctaacctcacaggagctttgttttcccagcttgctagtctctgatttgctgaaggcattgagtatcacgtcatcctttgagatagtcagaagtgatgtcgggagagaccacactggagcagaatcagagacaactcccatgtggaaccctttgtagcaccaactccggagcagatctactccacggcgagaaaactcatcttccatctcaaccagaatccgaacatcatctggtgtcaggacatccagcacagatgcatagaagtcctgatcaggaattttctgggtcagataataggctttcttcatcttctgtgcagtgacatgctctggagccattcgacatttgtccccaggggaggtgggcaggctggtggtggagctgctgcagctgctggggctggaaatgatatcctctgcattgggcaggacaaaacctgccagattcagaaggtcacgaatcatctggcctttgatgctgatatccagtggagagctggagtggaggcttggggaaatgttgacttccaggacccagggcttgaggttttcgtctagcatgatgtcaaaaccaaagagttcatggcagctatagggccgtcgcacatacatcttgagcaggctggtcacatagggctctgacgagatgatagttttgacaacaacatcctttatccc

SEQ ID NO: 432797 - DNA, 507 bp, Homo Sapiens
atgagccactgtgtctcgctgggatttcaatttttttcaccaacataaacttatattaacttgttataatgtatctggaacagggatacagtttgcaggcactaaggaagggataagacgtcagtttgaaaagagcccgtatcagaacaacatgaattctgttaaaattgaggcaagaacaaacctcaagtttatggtgaagcttgggtggaagaatggtgaaatcattgatgctttatgaatagtttatggggacaatgccccctgccccccaaaataagcagtttacaaatggataactcatttgaagaagggacaagacgatgtcaaacataaagcccacagtggcagaccatccacatcaatttgtgaggaaaatatcttgtttgtatcctaattgaagaagactgacgattaaccgcacaaacaagagccaacaccacagacatctcaattggttaagcttacataattctgactgaaaaattaaagcccacagtggcagac

SEQ ID NO: 432798 - DNA, 1050 bp, Homo Sapiens
  misc_feature (778)..(778): n is a, c, g, or t
cccgggatatcgtcaaccacgacgtcgctatgtgtctttattgtcttaaattttgcccaaggtaacgttatatatcccaccacttcattgctggtttgggtacatatgattttgaaagtggtatattaaagtctttccttccaagtattttgtaatacttgaaaattcttagatgtatactgctaacaaaagttagaacttaaacatttttgtttttatcatttatagcctagattagggacatatttgcatcaaccaaatcatcattagatttgaaaataggcagatgaatgaacaaatatggtcattgcactttccttttactttcagagtctaagtatattccttaaggttagtaaccagtctttattaacaaatataaaatttttcttcatgtctaatcccattgcatccacaatgctgtgatttatagtacatgatcaacacttaaaagtactttacatatgtgtgtttctgaagcaagttttcatgacctctgttagattctcaaaagaattcagaacttcaatttaagaatcaccattttaagaatacatgtgtacatatacacattaagcagtataaagcagctaacaattggcattggttttacactggtgcagtgtgcttaggtaaagtaacttcttccatgtttcaaggtcaggttcggagttgaatgaagtgtcgcatttaaatttaggattaggctttggaatatatcttgtttttattgtctcacatttctgatattgactacttatcccatattctgtttcanattctttatcatatttcaagttctttctcatacttcttgatcttggcttaactaagcaagttagtatcagagactagttgactgaaccccagattaaacattttgcacttgcacaaaaccttcttaacattttgctttccatgaatccgaaaagtcattcactaagagaccgatcttgagaggaaagagaactagaaggccactaaattaaaataattggtcaaaatattaaatggttcccatggtggaacctacttattctaaaaatccta

SEQ ID NO: 432799 - DNA, 742 bp, Homo Sapiens
  misc_feature (14)..(14): n is a, c, g, or t
ggacaacttttagnacactggggtggaatcctccagccttaaaaggccccagtgccgggatgaatgactcacaacagcaatcccacccaaatgcagagctgctaagcagaggcagaaggatgctgctcagaagcacagaggaatttatcaaggctataagctaaacttgctgaaaaatgtgaggctgatttttatattttggtatgtgatggaaaaataaactaattcagaaagaaaaacacatcttcttaatgggttttctacacaaaaacttacattttcattgcctgacatttagtatacagagtaattttccatatctcacttaggatacaaatattgtctgactacttctgttttaagaattataagtagttcagatatacttgaaatattttccaaaatacttcgaatctaatagaaatagattatcatcctccagtaacaaagtcaaagaaggcagaacactggttaagtttgttcactaatttcctaaaaggtaatctcttaaaaaatatacatacagcctcaccacttactcttccaagttccttaaatatcaacatcttatgttaatctagattcttggaaaaattaaagttctttagcaaaaagtcaacattaaagttttatccagtgttgaaaatggtgtaaaaagagagttcacaccaaggtataagttggaagattaaccaaaaacttaggagttataaaatgttttttgccactgaatgaaagaaat

SEQ ID NO: 432800 - DNA, 414 bp, Homo Sapiens
  misc_feature (223)..(342): n is a, c, g, or t
cattggacttttgttccaagccatcatcctaggaaacaacacagggctatgaatttttgctacaaattttatatctacttatgtactttctggaaaaagaagcactgcccccagtggttcatcactgtctatacttagaagcttgttttcaagcaaatagcctcaagggactcagagaagtctaaactttccagtaataaccagttacaactgtagaggcagnnnnnnnnnnnnnnnnnnnnnnnnnnnnnnnnnnnnnnnnnnnnnnnnnnnnnnnnnnnnnnnnnnnnnnnnnnnnnnnnnnnnnnnnnnnnnnnnnnnnnnnnnnnnnnnnnnnnnnnngctaataactgattaggttgctagtatttaaatgtacgtatgtattggccaggcacagtggctcatgctcat

SEQ ID NO: 432801 - DNA, 1918 bp, Homo Sapiens
  misc_feature (1296)..(1308): n is a, c, g, or t
ccctgggggtcgctccacatgccacattgctatcatgctttcaatgaattatgcattatgcacgtcagaaaactttaagaaacaagcaaaaaagtatgaaaaacaataattcatgtatttattataaaagtgtgctttattgtaaggaaaatttaaatataaccaacaatactgaaaataatgtacgtggcatttatagccttggtcaaagttctttattaaacaggcgtttgctgttccatgaatagttaacaattagtttatgcaacaaaatagataacttgaaaaagtgagtaagaatacagaatgatgaaccaggaatctggagttcttttgtgttttttcttgtttaacagacatggcttttaaaataaaatctgaaatataaaacaagtcatcttcatgtagagagctctcttttcctacaagaaggttttgcaaaaatgttaaacagtgttctaaaaatgtggctgaagttatactttacatactttaacttcttatatatacattatccaattaacattctaaccacattttcatatacaagtgggaccataaacattctctagtaagactacactagcacagagtaattttacccatgtatatatattcatttgaaacctgtttcccaaaatgaaatcactcatttaaaagcaaacaactggttagaattaatgtctctagacactgggtcatggggcctagaaatcatgtaagagtatattgctttggttgaatataattaaattcatcttatgtggcagcatactgagcatatcaatgaacaatgaaaatctagtacatctgagttctttctgcactaatttcaactatgagtctacattaaagcaatggcaaggcctaatggtatatatggtaaggtcagaaattcattttgtctttatatagggttatgctcataaaaatttgtttctattcctctagaggatgtttttaagaattaaaaaaaccaaacaaacccatattggctgctgatcaatgagattgtgggttggcaaccatcctaagaaagaacggaaacccaagggaacagatgtctacataggactgtattatgcaggcctagtgaagaacaaagaaataaactgtgggcatgctgataaggatcccacattatttttgggataggagagattttttaggtgtaaaatcttaaagaatacaaaaaatgtcggatcttaagtttaaatcactttttaaaaaaacaaaactttgtgacattaaatgtcaagatcaaatttttaaagacatagaatacagagaattgcnnnnnnnnnnnnngcagatatatgcttgatgagggaaaaatgcattaatgatctctcatctaaaacactgttttccttattatcataatgactaaattgcctgtccataaaaccactggaatatgtatgttactgacattatgccaacaaagtcaaaatgtactttattgcaaaaatataaaaagttttaaaactgcatatgatattttataccatttcaccaataggccaaggccagcacataacttatcaagctagaaaactttaaaacaaaaatgattaaaattttactgtgtttaatgagttataaaaaaaagtgatgccatgctgtgtagcatgtttaattgccaagtgccctcttacatggggatagtcactaatatgattatcagtctgaataagtaaaacacatatagcctatgataacatcctttaattatcttcttaaacacagatactttctatatattacaatcattttaataaacctttcagtcataattttgtggagtacaaagtcattttatcagtatgttgatttttttatgaactactctttagaaagtgatgttaaagcctattgactattaaatcactactgtttattgatacgttgtaaatgt

SEQ ID NO: 432802 - DNA, 460 bp, Homo Sapiens
  misc_feature (347)..(355): n is a, c, g, or t
atgactgaaggacggagctataggactcaaaagaccctggtcttgaagccagaaagacctggctttgccagtagcatggtatttcaattaagtatgattaaacactcttcgagggaatagaaaggggaaggaagaatggagatggatcatttgtttcatgccttttacttacgtgtaaggaattatgagcaggtgcctatggattttggaatatgcttctctaacactatataaattagaaagtgaaacttatagccacaaatgtccatttaaaatttctaatgactatggaagaaattatttagactctctcctatactattacaccatacatcattgcaaaacannnnnnnnncattttgcccaacctccactcctgtcattccaccactcctatagtatctaaaatatagtttcttttagagagattggtgcaccactcaacttgtcagcttgaggg

SEQ ID NO: 432803 - DNA, 2819 bp, Homo Sapiens
  misc_feature (875)..(885): n is a, c, g, or t
ttttttttaccattttgctgtctgtttatttcaactgtacagagaagcttaaacacctgtggaaaaacacgaaaggcttagttgtctcttaagttcatgtactttttagtgataaatacacagtatttaactttatacacctgataaaaggaaaatgcatagtagaaagggtcgggaatgaaacagaagcatcgggcattgaatcgatcacagagtagaaaaatctgcagtccccagaaactcggcctccagctggagaggggaaccagcgtaccctgaaacttccctagcaccttggaagcaagtggaggtcatggttcttccactcggcaacgtgaagctccccgctggaagacaagtgagagcgacaggccaggcctgtgtgtccacctgcacaggcattctccttgttccagaaaggctctgaggacggaagacctgcctctcaggaaaggccagaccagtagggagaggcctccgcagccccaagtgtcaacaaggggctcaataaggctttctgggagccactggcagctggtgggatggaagggggaggtggaaaagggcagaggaaatgggaagtggatggagggtttgtgcttccttcgaggccacaagtgcaggccacaggttgcttacaccaaattggtcccacagatgagctagcaatggaagaaattatgggcgtcctctttgcccactggaagagctgctcataacagcacctcctttcctgacagagctggcttttgaaaaatcaatgtgctccaagagtggcagctcaaatgctctgtgtttacagccatcttggcttatccttttcatgtggggcaggtcctttccacagctttctttggtgtttcttcattaaaagnnnnnnnnnnngtcatcaatgtgggtctcccccaccccactgcccccacagctgggtgctgcctgattgctggcattccctggaagaaatcttagatggaaggttccgtggtggggagaaatggcattgtctgatgcagctgtgtaaacaagagaagccctgcagaagctctaagcactgctgccccctgggccagccaccaggccaggccagagcccacacaagcaggctgggcctaagactagggacccgctggctttaacctctgcaaggtgcttattgcaaactaaccaagccccatctggtgccagaaggggtggagctattgagtcctctccccataaacataaagccaggagggcaagaggaagtgctgggttacaaagacccagcaagcaggccagacgaccctctctagactacctgtcctttgctcttcaaaaccagcattccctaattctgaactgcttataagatagcaaaacaagtctggctaaactacagtcaagagcttaggatctatggaagccaagaaggcccagggctccatgaatgggctgggcaggggcacgaggccttgcctttgtctgagaagtcctcacaccacagctgatcagatggaaacaatggggaagcagagtttcccggtgccgtctttccccagcccagattccaccaagcgctggaaagcagagctgggaatctcccaaggcagagtccttccagctttcctccccctcaacttcacactcccctacctgtggctctggaaggagtcacacttgaacctcaaccaaacttcccaatatcagttggaagtcaaaaagatgaaccctttctttctggacttttagctacaaaggggaacttcctgtgccaagccctggtttcctcataccccaacgagtgctgtgggtttcaacagtcttctctaaaagggtgccccaaggttattgtgtggagtctagggaagctcagatcctcaggatgatcatttgtgtgttggtccagtgaaagcatttcccacctggccctccagaaactgggtatttcattgaccacaacaatcagctaggatttaaaatgaaaacaaaaccttagcagtctttagaatatacaggttatgaactagctaagctgctaatatatatacaggcgggcataggtttcatcggctctaactgatcacatgcctgaagctgtgaaatatatcctggaagctctaaatagtttctgaactactgtgctctagagttcactctagttagagacttgaaaaatgtttttgtttaatcttaagccatgtaatgtacatggaagcataggatttcaccctgaagttttcgtaatttgacaaagagatttaccagagctcggtcagctatctcagaaacctgctttgagcagctgtcatgaagaaacacgttcagtctttcaggagaaatgtttccccaccacagctgctgaatacccttccaggcttggaaaatccccttccagcagcacttattaaatttcaagccctttctgttttcctgactacaattctacccataaaaaatttaaaaatccttcttacaaataagttgcatcaaagctccctgcagctactgagggccagccctgctctgactccttgagaccacggctctggaaggtgccatggtttccggtttgcactaggagccacatctagccccctactccctctcaaatgcagcaaccacctccatggcctcagaccgccggagttttctgctcgcctttccacagttgtcaaaccccacacacagtcacttggtatatctgacgtggttctgaaaatcacaatgaaggatttttggcataaaaacgttttaaaaagcaattgtcccaaaatgcacgtggggttaggtctgcaactcctcacacccgcctgtccagccagccagcggccacggtcgac

SEQ ID NO: 432804 - DNA, 423 bp, Homo Sapiens
  misc_feature (378)..(378): n is a, c, g, or t
  misc_feature (403)..(403): n is a, c, g, or t
ctgtctgtttatttcaactgtacagagaagcttaaacacctgtggaaaaacacgaaaggcttagttgtctcttaagttcatgtactttttagtgataaatacacagtatttaactttatacacctgataaaaggaaaatgcatagtagaaagggtcgggaatgaaacagaagcatcgggcattgaatcgatcacagagtagaaaaatctgcagtccccagaaactcggcctccagctggagaggggaaccagcgtaccctggaaacttccctaggcaccttgggaaggcaagtgggagggtcatgggttcttccactcgggcaacgtgaagctccccgctgggaaggacaagttgaggaggcgacagggccggggctntggtgttccacctgcacagggcttnctccttgtttccagaaaggg

SEQ ID NO: 432805 - DNA, 1619 bp, Homo Sapiens
tcgacacaataacaaacacctatttattatattaaatacaagcctgaaatattaagtacaaattacagattccaagaaattacatttcacatcccaaaatgtcctgttggtgctttgacaactaaaacaatgttttagaaagattttgtttcagatcctaaaaaatagcaacaatttggggataaaaataagtaaaatccaaaacttcaaagtttattccaaattcttttgaatccctatggtggctgtaaacagtttttaaatgctcatagcttcaaggaatgtgagtatcacagtttatatgaatttctgcctaggaagcccagcaatgttacacagtagtttcgtgtttccataatccagtcctaacattgccagtgctatcggtaccgagcaagggtccctcctgcccattgcttttaattggtccattctgaatggccaagttgaggccataagatttttgctgattttcaagttcaaccacagctggcttccttaacgcatcttttttactagtggttgaaactggcttttcaaaatttctgctacttttgggaagtgtgctacaagcatcgctgctgtcttgctggggggggttgtactgtctctctctgtaggctaaataagctcttccggctcctcgagtgtccttcgttattgcccagcccggcttttaggtaagccgttctgcacgcttccttccacgctcgttgggacatcgtaggcatattctctcaggactgtgagtcggcttgcccggttgtcctttacttctgttttttatggtggcggcttgagtgcacatttgttcgaaactgacttctaaaaggcgccacgtgcatttttaatatcattgtccattgaatgttctgtcagactattatcaagctgaggggtggagttcaaaggtaaagaattggcatggcactgagctgcagccgcctgcaagtttgttaatttgcagccctgggaggaatttttgaagcttgaagcacttttgtttgtgcatgaagactccgcactgctattggggcatttgggtgcctctccattcgtcccattagagttggggggctggacgttgacttgcactgaatacgagctccgtcctgggcagcaagtcatgatccacgcaagtctaacatcctccctattaacacaatggtggaccacgaagaacgcactgaagcttaaacttgtggctccaaaaacgaagctaaaaaccaagtccaaagggtaatacaaagaaacagccaaagccccaaacatccacagtgcaacatataagagcaaagtaaggctggcccccaagagctgagaatgaaaagtgtgctcattttccaaggctgatgtagaaatcagagacaaagacattgaatcctgatgatttatttcgccattttcattggctgccaatctctgttgctcctccgtgggctccttaagctcatatttgcgctcagggtgtcttttcaactgaataaatatgctcagaaagtacatgcagtttacaaaagtgatgaagctggctggcccatagaaggctcccaaggagggttcccatgccatccagcaatagggtgcgtttggccgactgccgtaattcttaatgttcg

SEQ ID NO: 432806 - DNA, 345 bp, Homo Sapiens
  misc_feature (283)..(283): n is a, c, g, or t
cgacacaataacaaacacctatttattatattaaatacaagcctgaaatattaagtacaaattacagattccaagaaattacatttcacatcccaaaatgtcctgttggtgctttgacaactaaaacaatgttttagaaagattttgtttcagatcctaaaaaatagcaacaatttggggataaaaataagtaaaatccaaaacttcaaaagtttattccaaattcttttgaatccttatggtgggctgtaaaaccagtttttaaatgctcatagcttcaggngatgggtgagtttcacagtttatatttgaatttctggctaggaagccagccaatgtaccaca

SEQ ID NO: 432807 - DNA, 1719 bp, Homo Sapiens
ctcatttgtaaaaagacatgaatgaagttttgaggttcgtgagatttcatcttttcttgaatggtcacttaaagtccaacttgacaatgaactgctctgaaaacataatatgatatataattgcagaagcaggtagagtataaagatgatgactagatggtttctgaaggaaatcaagagtaatgggtaaggaaagtgagagtgacagctttaagggagatatatactacatgtgactaaaataaggcttaaatgatactctctactcacagagtgccttttggaatttttacccggatttcattcattaattttaacttaataagacacagcaagagcagtattaggtctaaattacctttaaaaatttggctgcagacattaaatgattacaaaacactatgatcatcttctgaaggtattctacacatcttaatatggctactgacatcctaagcaaaatgtcaaagtggcagattaacaagcttacttaaaaactaactctagaacagagattacacaccttaagtagaattatgcagattatttattagtcaataggatagttctgattaagaagaacagcttactatttaaacacttttcctttgtctctgttggctgttttttgaagagatgtagttgtctctaacatggtctctggtattctgtaacaacaccttatactaggagcttagtacttagatttggaagagaaaatagtttttatcttgcacattatctacaacccactgggagtggctgcctgaatctctgaactaaaaaggagcctgaccctttatccaaggctcagtacagaaaagggctgtaattgattagcaatgtctgccacagaaacactaggaaacaagtgtggcagggtgacccaggaccagtctaaaatgagcccaagtgaatcattacttttctatgttctgaattatactggcataaaatcgaaggttaacaaaattggagacattagcttttaaaatgtcctttcaagctctatcagactacaaacaccacataagactacttttacaattaaatcattcagtgatttttcactcacaggttatatgcatccacattaaaaatataagattatgattttctttaaactgttatcattatataatcccatttaaacatgagactattacaataataatgatccatatgttactggagcaggggctttagaattccagatgtaataatcagaagaaattagtttccggtgtgcacttatttttggttttcctgatgcaaaaacttgaactgaatgctgatctgcataacatccagtaagtgtgtaatctaagatcctaaaatgaagctttaaatatgctgtttctccagtacaaattgggtcaaatggctgcttctcatggctcttggctccaaaagttacagttccagaaagactaatttccattgattttgggaacttctggccaataatccagatcaataagcttttctctcgaaatacttcaagctggccaaaactagttttgtattccaaatgtgtaattggacctctattgtaaaaaggtatatgggcttcacagaattcaaaattatttttcacactttcatgaagttttaaattaatggttattcttagttgtacttcttcctccttcatttgataaaaacccaaaattggtgggacagggacctgggaagtgtagaagcataagttgaatgact

SEQ ID NO: 432808 - DNA, 1731 bp, Homo Sapiens
  misc_feature (73)..(93): n is a, c, g, or t
  misc_feature (266)..(285): n is a, c, g, or t
  misc_feature (363)..(384): n is a, c, g, or t
  misc_feature (541)..(569): n is a, c, g, or t
  misc_feature (978)..(988): n is a, c, g, or t
cgagaataaatagacatagacaggctagctaagtcaagactaggggctaaggaatatagaatcacccaggtcnnnnnnnnnnnnnnnnnnnnnctctcctcagttgggaacatctatcatgctggaggactactgtgatggggctttacattttactgttttgttgctagcttattgtttcatacttgggaatcagtcatgtttctgattgtggtataaagtttgcttaagtgccccttagttaaagctgttcaatgaatgtaagnnnnnnnnnnnnnnnnnnnntattttgaatagtcgtgtgttcatgcctgttctcagtcttgtcccctttaccgtttctcatgcaggttatttcttgcnnnnnnnnnnnnnnnnnnnnnnaaccggagaagcaacaaattacgtagttttttttgtgtttctttgattactagtgagcttgagtacttttaatattttattggatatgtttgtgactgactttaatttcttgtttgtgtgtgctgtggctgcccgatccagcacctacttccttctnnnnnnnnnnnnnnnnnnnnnnnnnnnnngcaaacaattgtgcatgtggtttgggtggcattgtcacaccctcggctttctagattaacccagttaccttttagcagtgccccacttccccagtagcaatggttcaggggtaggcacctgacccagaccagactactgagataaagatgtttgcctaggctttttcaggagcaattgaagacatcttgttggagatagtgtgctgggaggagtcacattctgaacttgctgcagctcgtttttctaatataaaggaaccagcctgaggcagtaccagggtgagagggagtctattggagcccttgggaacttctggatcaaattggacctgaattgagatctatttctcagctttcacttatgtgagccaataaattccttttttgttgaaggcaatttgacttggannnnnnnnnnncttgcaaccaaatataagtagtgtgagaatgtgtgtgtttttcttatttacagaggtgctcgtacgtcaagttagttacatcagtaatagattgtttgcatgaggaagaaaaaaagtaaacccccttgaaaagccacctactcttaaataaactatcaacatttgtagcgaagaatagctttctacagaatttctctcgtatgggcatatagtaccttagaaaaaaactggtaaaaatgaagtttaaacctctcccctaccactattaattggactggtggggttgtttccggttttttcaatttttcaccttgcccgggtcccacccccacgtagagacaattgcgcccccctttctttcggatttgtcgccttcgtatcccgtagcccccgtgagaaagagagtaataccttgggtggtggccaatttccccattaaggaccctattgagtgggccatggcctttgttgcgcggcgcctctgttgtcgccaccgccaacgagtgtttgttaaccaaagcgctccgccctaactgcgcgaaaatgatgaaccaatttatgttgggtattctcccaccttaaatacggacccttcttcatctagtcacctaaacatcttacacaggatcctcttcccccgtcttcacaaagataagcgcatgatgccttcacgtcaaaaaattttgggcgagaacccacacccctcgtcggggtcgtgagacaatcccgagacgtccggagcg

SEQ ID NO: 432809 - DNA, 499 bp, Homo Sapiens
gggtgaagttctcctcttcctcctcctcctttatcttgtcttcttctgttttcttcagcatccctccaatcattcttctggtaggacttggtgactgtttctgtttcctctatctcgtatctttcttggcgactttcacttttttcttccttctcggtagtttcattttctgctgtgtcattttgcattcttctgcttgggagcgacagacttgcatctgttattgttgggtcgacctccttctgccgctccagagcctccttaaggcgtttttggcggtttttcttcacggcgagccaggcgctccaggaatgcggcctcatcatccccttccacttgagtgtttgtggtggttgtcttggcctcctcgtcaggcacactgtacaacagaaagaacaacaccaaagacagcttgctcattcatcagtcagcagcattcatacagcctgtgctacccaggactacagcagatgccagtagtgccaagcttgcccatatc

SEQ ID NO: 432810 - DNA, 819 bp, Homo Sapiens
  misc_feature (88)..(127): n is a, c, g, or t
aagcatccctcccaaatcaattcttctgggtaggactttgggtgactgtttcctgtttccttctatctggtatccttctggggcgacnnnnnnnnnnnnnnnnnnnnnnnnnnnnnnnnnnnnnnnngctgtgtcattttgcattcttctgcttgggagcgacagacttgcatctgttattgttgggtcgaactccttctgccgctccagagcctcctgaaggcgtttttggcgtctttcctcacgccgagccaggcgctccaggaatgcggcctcatcatccccttccacttgagtgtttgtggtggttgtcttggcctcctcgtcaggcacactgttctgggcattcacctccacctggtcggtcacctgtcccaaggatttttcctcttggttctgccgcagccgttcctgtcgggctcggcggcgccgttcccgggttgcctcctcttcatcatcgtcattcctctggtaggcgattctttctgcttcgagtcgcatctcctccctcttttgccttctaagttctctgcgacgctcaaaatcatccatggtgtgatttcaggttcagggagaccagatgatgtctggacaggtcagcaatcagatgtctgagccttctggttggtcaccaatccctgtggaatttgatttgatgatcttgaaatgttccaatgataccttttgttcagcttaactctcagctcccaaatctttctgctttcaattcttcaaggaaggcacccggaatacaatgcaagggagggcattcttgaaattccgggctcgggggggcactcggatctacggtggagaggt

SEQ ID NO: 432811 - DNA, 494 bp, Homo Sapiens
ttccagagaccagaaatgtggcattttaattgaataacttcatacttgcttgataattgtatatttaacataaataatgtccacttgtcacatttatatttcttttaaacaatcaattagtatttaatgaattagtgtctgtacagtgaaaaataaggtagttgttaaaaaaacttaaatttttattggttttgcttacataataaaaaatcagtaactatagccactttaggcaaccaaaaaatcctcccagatatataattttttacattgttatattacacttttataaagttagctacagcatacccatgttttgctataaactgtattcctttggccatatgtaagctatcaatactaaaaggtgtttgaacatacatccacattagcagtggataataagggagaaaataggttaaaatcttttataaatcttttgggctgtaacatccatgttaacaataattttgtctgttgctatattaaagtcc

SEQ ID NO: 432812 - DNA, 1347 bp, Homo Sapiens
  misc_feature (1257)..(1257): n is a, c, g, or t
  misc_feature (1315)..(1315): n is a, c, g, or t
gcgagatccgttgtctcccaagatggtggcgctgggctcggggtgactacaggagacgacggggccttttcccttcgccaggacccgacacaccaggcttcgctcgctcgcgcacccctccgccgcgtagccatccgccagcgcgggcgcccgccatccgccgcctacttacgcttcacctctgccgacccggcgcgctcggctgcgggcggcggcgcctccttcggctcctcctcggaatagctcgcggcctgtagcccctggcaggagggcccctcagccccccggtgtggacaggcagcggcggctggcgacgaacgccgggatttcggcggccccggcgctccctttcccggcctcgttttccggataaggaagcgcgggtcccgcatgagccccggcggtggcggcagcgaaagagaacgaggcggtggcgggcggaggcggcgggcgagggcgactacgaccagtgaggcggccgccgcagcccaggcgcgggggcgacgacaggttaaaaatctgtaagagcctgattttagaattcaccagctcctcagaagtttggcgaaatatgagttattaagcctacgctcagatcaaggtagcagctagactggtgtgacaacctgtttttaatcagtgactcaaagctgtgatcaccctgatgtcaccgaatggccacagcttgtaaaagtgccagcaggtttattttttgttttgcaagccagctctgcctccttacagtatgacatctgatgctggagggtcgcactttcacaaatgagtcagctggtacatggggttatcatcaatttttagctcttctgtctgggagatacaagtttggaagcaatcttggggtacttacccacaaggctggtggagaccagatcaggagaacctcagtctgacgacattgaagctagccgaatgaagcgagcagctgcaaagcttctaatagaacgctactaccaccagttaactgaggggctgtggaaatgaagcctgcacgaatgagttttgtgcttcctgtccaacttttcttcgtatggataataatgcagcagctattaaagccctcgagctttataagattaatgcaaaactctgtgatcctcatccctccaagaaaggagcaagctcagcttaccttgagaactcgaaagggtgcccccaacaactcctgctctgaggataaaaatgaacaagaaaggcgctagaattgattttaaagatgtgacttactttaacagaagngaagggtatatggaaattcttgaattatgtaggaggaaagagagggttatttcccctntaatccctgttctttgggaggagttttttcta

SEQ ID NO: 432813 - DNA, 1944 bp, Homo Sapiens
ggtaccgtagctcgatcaacacatttatttcacttatattgagtatacaagaacagagagcacacgcatacagcacggagcactgaggtgggggagcatggggacgagaaaggagagaagggtgtgagtaaaaaggaacaggacagcatcgcaattggttgttaaggtgcttttgaaagaaaaaattatttcgagtgatgttgctcatgcagtttcaggccagtcttggaatgtgcttgcaggattcaaaaactgaaacaggtcctggtacttcctgtaccctcagatggaaaagatccagagaaaacaaaataagagaaaatgaagacccatgagatagcaaagtagaaaaagaccctggagagcatctggttctttctgcttattttgcaagtcgggaaactgaggcccaagagggggaatggggatagcctgatgtcacatggtgagttaggagctgagccaggatggtcacccagaactcctaaccgccctcagggactttttccactatgctacatggcctcctgggtggagaggtggcacagagaggatgagaaacaaaaaagagaaaaggaaaagtaggttgaagacagacaagacaaacgtctctattctctacaaagagaaggatggggaggaaacagtgccctagattctagctttgcaggtcccctcctccctcgtggcactgcctgcatctccgtagaagggaggtcacagcatccgcgggatggtgatttccccaaaccctggtggcccataaactccacaagctaagcctggtcacttcacccctgccccaaagccaggtgcaaaatccacaacaaggatcctccctctgaggtgtgttcagtgtgctcaggactcctggttcctgcaaagatgagttcctagaccgaagtggcccagagaggatggagccaccactccagctcttgacccagaaagagggggaactctcaagaagggcaggaagaaggttctgtggcttttccaccaggattgtagaaagaacctggtgtatggaaagtgtgctgctacactcagggggagttggagtggacccaccggcctgcaccagggggaatgccactgattctgctgccccgctgaacttcccatttgcccagagaagcaaatgctattctgatttcctgccctgcctcaggccagcaccagctaagcagctaaggtgtatgtcatcactgacaagccaaagggacgcatctaacctgggccgcctgggggcatccctgggctatgccccgataggttggcgagagtggggagatgctctcagatgggccagccatggttgaaatataaagctggctcaggtggctcctcaggttccgccctcccctcccaccttcttcagcctgagaatagtccctggcacaagcaggtaatcagtaaatacttgtggaatgaatttattaactggtttagaaggaggactgggaggtaaaatggaactgagaaattcgcagtgcagtgggacattttccctcatcaaggggcactttctgagctcagagaagtagcttgtggcagacaagcctgaggaagcccacgtgtggcagagagcaatgccaagcttgtgatgggagcttcttgaagggttcctgtggtcttggggtaatttctgggcacaagctcagagttcagctgttgactgagagggaggtctccaagccaaggtcttatgcagagctggagcctatgagcaacatcacccgtcagtctcagctttgtcctgggacaggggagggctttgcaaatgcagttttgatctttcagggtctgccccatgaagcctccttaccatggctactttggcctgagaagaagaaatgattcagaacaaggaagagagtagaggaaaaggcttagctgggaatttttagacagtcaggttaaagccaccatcttctacaatgg

SEQ ID NO: 432814 - DNA, 710 bp, Homo Sapiens
aactgtacctttacaaaacagatgaactgctctacatctatcaaggaaaggacaaacctagtaactttttatcattcacaaactgtcaaagttgagagagagctcagggaaaacaaccgctttcaaaaattagaatgcaaggtcttgtatttaagtagcctgaaataatcttttaaatggaaaataaagattaatcagagtgaaaattaaatgttattttgacacaatgaatcacaagcaacgattaaatgtatatattctgtatctatatgttttccaggtcaatcttcaaaatgagctgaaaacaactgtttagaatagtgtgattttgcagtctttgcattgctgtttagagtatcaaacaaaattctgggccacagatacgctgcatttctccagtctgggatgctcctgtcagggctttagagatgaccatagggatggaacaaaacactgatctgggataaggcatagcaaaccaagacaaggaaaagagtaacccactgggtgggaatctcatttttccattactgaccaatggacaatataccaatatttcaaattgtatcactttcaatcagaggatgagaagaggttttctcccacttgcctcatttgagctcaaccaggtagatgcctggagtcttctctagagcaacatctgattcctttgaaggagtaagacagttcactttctcggcaaggcttct

SEQ ID NO: 432815 - DNA, 616 bp, Homo Sapiens
  misc_feature (64)..(206): n is a, c, g, or t
tacgtcagccctccaggtacctggaaccacaggtatatgccaccatgcccagctttttaaaatnnnnnnnnnnnnnnnnnnnnnnnnnnnnnnnnnnnnnnnnnnnnnnnnnnnnnnnnnnnnnnnnnnnnnnnnnnnnnnnnnnnnnnnnnnnnnnnnnnnnnnnnnnnnnnnnnnnnnnnnnnnnnnnnnnnnnnnnnnnnnnnaaactagatttatagacatattttttaaaagctagggcacttttccccttaactaaaagcactagttcagttcttcaggtaatttcattggaactcacctaagactggaattggaatgtttccatgttgctcattttttctacaggttatgatagaatctcattaaatcttgacatctctcccaggggaagaatatcacaggccagtggtgtgaatggggtatgagatgatagcatttactaaatcggtaatctcttttatgtatgttcttgttatattgaggttaagaggcaagatgattggcagcagaattcttcaggattttgtttgctgtggtatggattatattggagcaccttaatctgaaggatgaaactgtgacttgatttatctaattagcttttaattcc

SEQ ID NO: 432816 - DNA, 1392 bp, Homo Sapiens
  misc_feature (62)..(99): n is a, c, g, or t
  misc_feature (1347)..(1347): n is a, c, g, or t
taaacagaccgagtgtatcgactcactatagggcgaaccggagctgtacgcggtggcggcgnnnnnnnnnnnnnnnnnnnnnnnnnnnnnnnnnnnnnnatcaggccaaatcggccgagctcgaattcgtcgagagcggagcgggcgagcaagggagcgagcaggacaggagcctgatcccacagctgctgctccaggcccgcgatgaggaaaagtccaggtctgtcgtgacatgtctttgggcctggatcctccttctgagcacactgactggaagaagctatggacagccgtcattacaagatgaacttaaagacaataccactgtcttcaccaggattttggacagactcctagatggttatgacaatcgcctgagaccaggattgggagagcgtgtaaccgaagtgaagactgatatcttcgtcaccagtttcggacccgtttcagaccatgatatggaatatacaatagatgtatttttccgtcaaagctggaaggatgaaaggttaaaatttaaaggacctatgacagtcctccggttaaataacctaatggcaagtaaaatctggactccggacacatttttccacaatggaaagaagtcagtggcccacaacatgaccatgcccaacaaactcctgcggatcacagaggatggcaccttgctgtacaccatgaggctgacagtgagagctgaatgtccgatgcatttggaggacttccctatggatgcccatgcttgcccactaaaatttggaagttatgcttatacaagagcagaagttgtttatgaatggaccagagagccagcacgctcagtggttgtagcagaagatggatcacgtctaaaccagtatgaccttcttggacaaacagtagactctggaattgtccagtcaagtacaggagaatatgttgttatgaccactcatttccacttgcagagaaagattggctactttgttattcaaacatacctgccatgcataatgacagtgattctctcacaagtctgcttctggctcaacagagagtctgtagcagcaagaactgtctttggagtaacaactgtgctcaccatgacaacattgagcatcagtgccagaaactccctccctaaggtggcttatgcaacagctatggattggtttattgccgtgtgctatgcctttgtgttctcagctctgattgagtttgccacagtaaactatttcactaagagaggttatgcatgggatggcaaaagtgtggttccagaaaagccaaagaaagtaaaggatcctcttattaagaaaaacaacacttacgctccacagcaaccagctacacccctaatttggcagnggcgacccgggcttagccacattgctaaagtgcaacatagaacta

SEQ ID NO: 432817 - DNA, 946 bp, Homo Sapiens
  misc_feature (54)..(54): n is a, c, g, or t
  misc_feature (921)..(921): n is a, c, g, or t
gcctcatggtgtacagcaaggtgccatcctctgtgatccgcaggagtttgttgngcatggtcatgttgtgggccactgacttctttccattgtggaaaaatgtgtccggagtccagattttacttgccattaggttatttaaccggaggactgtcataggtcctttaaattttaacctttcatccttccagctttgacggaaaaatacatctattgtatattccatatcatggtctgaaacgggtccgaaactggtgacgaagatatcagtcttcacttcggttacacgctctcccaatcctggtctcaggcgattgtcataaccatctaggagtctgtccaaaatcctggtgaagacagtggtattgtctttaagttcatcttgtaatgacggctgtccatagcttcttccagtcagtgtgctcagaaggaggatccaggcccaaagacagtcagacagacctggacttttcctcatcgcgggctggagcagctaaggccccctctggacacaggatctcttaagaccggggaaaagtctgggagagagaatcgtggagagactggagccagcgcgagtctgcgagtccgagtccgggcgcgccagagcagaggggcgtcctcgctctgcctctcactcacttggtctgagccatcatggactctgcgtgctcctttgctgaagatttcacacccaaatttgcttcccaatatccaatctgcagctctgaattgtgctgggttcctggacgaagaatatttaactaataaatcactccgatcatttctaggtttgagaatcatatctccatttccggaatcattcctttgcctcgagctccatcattctcggattaggaaaatgggagagggagaggaggaatttttagaagtcaggacgaaatccgcatctacttttcncccccccttctccggcttttctgtt

SEQ ID NO: 432818 - DNA, 2157 bp, Homo Sapiens
  misc_feature (2097)..(2097): n is a, c, g, or t
tattaaaacgttcacgtccccaaaacggggctgcccgctttcccttcctgggtgtggcccacctccttggcgtccccaggggaggggaggctggaggaatgtttaccagaggaagtctccagccctgggaacctcggtgggggccctggagacagggagggcctgtctgggaggggggttgagcatggccatctcataggtgcccctggagttggggctggggtttggggtggcctcccccaagaactaaaacacctcgtgccgaggaaatggcactttaatagttggggccagggtgacaggaccaagatggggctggcctgtgtcagtcaggaagcctccctcttctgctgggacagggccttgcggcagctcctcctccccgcctgaggtcctaggcctgccacaggccagcatgccggtgaggtcagtggcaggagccacccagaagccccgcagatgacggagctgagaacagggacttcacctccacgtgttgccatttcctcactggaaagtccttgggaggtggctgggctcagcctgagctcagggctcttcggtgggggttggggcaggggcagggcgggcacttgcaggtggcacaggcttcatcaaggcaggacacgggcttcatcaaggcaggagccacagcgcccgagccctggcaggggaggtaaggcccaggatggggcagggccgtgtgctcctggaacggacatccttctctgccagagacctgctccccaagccctgtccctcccaatccccaggcagcccactctgccctccatagatgaatctaatcccatatattacaataaactgcatttgcctctccccattgccccaccctcccctaccctgggccagcggcccccacttccttgtcctctggcggtggcaggtgcccctcctcaagcagtgccacatcctgtcagcagccagctgtcctggcactggcctgagggctgggggacgcagagggcggggctgcacagctactccaggtagatatcttctgtggggcaggtgtactccacaaactgcttgtagaactgctggaatgctctccccacggactctgccagggctttggtggagtcttcagacacaaagacgtggcaggcaaaccggtggtcggcggggtgcttggtgatgaacccaaagtacttgttgttctttggatgatatccgcagaaagagatgttttttaactggaaaaagtggctacatttattccccttggcctcctgggagtcatcggccttgacgcctatcttcacaccccgcacgctgatctccaggacacagctggagggcgggttaaagtgcacggtgagccggcgggtggtggcaatcttttgcatagcagcacagaggacgtcattgcccttgtgatagggaacctggactgagcccaggaacttcacccggaactggtccacccagtcactgtttttggccagggctgccatgtgctcgggctccttggtgacctcgatggcgtaataggcaggaaagacaccccgggcaccagtgcgcatgttgtaggcctcgtaccagtagtcttcagcctggagctccactagcagagggtcatccacttccagctcaagttcgtcttcgtgtcgaggcacaaacctgaatatggcccggtgggtctgctcctgctcctccccgttgatgatgcaggagaacagcccgaaggactcagcactggaggagcgggagcggccactcatgaagacgttcaggaatttcttggagaaatggacgtcgggttcatcaggcgtggagtcctcggagaggcaggcagggggctggggccgcggggcctcctcatattcctctccgatggccgactcatagggcgaggagacggaggcacagttgtcatagacggtggcagagtcactctcgtcactgtagtctccgaagcacggccgcaggctcaccagctccagctgtgcatgctcatctaccaccagcgtgtacttgacagagtcataggacagggcgctggtgtccgagctcagagaggcccgtggaggtggcggcggctcccccaggctcccccgccaccctccgcctggnggctcagcccgctctggggacgacaggcagtcgaagccctcttcctcttcactgatggta

SEQ ID NO: 432819 - DNA, 5166 bp, Homo Sapiens
  misc_feature (41)..(59): n is a, c, g, or t
tgggtggcgaattctgcacgagggagagaactagtctcggnnnnnnnnnnnnnnnnnnnacaattttatttataacaatatctgtgttatttagttgtaaaggaattcagcaaaaattattaaaacgttcacgtccccaaaacggggctgcccgctttcccttcctgggtgtggcccacctccttggcgtccccaggggaggggaggctggaggaatgtttaccagaggaagtctccagccctgggaacctcggtgggggccctggagacagggagggcctgtctgggaggggggttgagcatggccatctcataggtgcccctggagttggggctggggtttggggtggcctcccccaagaactaaaacactccatcctttcccgcctacctcacccagagccacgtcttccagacaggggcagcaaagaactctcccttcccagaattagccctcaggaagctgtgggagcgggcaagcagggatggggcgagaggggagagccttggcaaagtgtcttatacagggaggggaaggctgcaccaccagctctcccagtggggtgcgttctggtgggagggtaggaggtgcagccccaagccctccctgcctgtctccctgaaggcagcatgggggtgccaaggagcaggcagggaggggatggagaaataatactgtgctcgcttgccggcttgctcgctcacatataaaatgtaattccttcatttttacatttatacatccggcggggccagggaagggctggctggggaggggctcactgaaggacttcaccggcagggggcaggaggctttctgggggcagtccgacggggcagggccctatgccaaggggtcccctatctcgtcctcagggccccggcccaggagttctcgcttctcgtccgtgctggccagggagtggcgactgccatggccccccatgtagagtgtggcatacacggggttggtgaagttggtgggcttgtcagggtccagggcaaagtcagcgtccagtaggcctcccacatcatcaggctctccgccttcgtacatcttgtaggtggggtttccaatctccacgttcatggccccgttggtcatccgttggtgctggaagcccttagccccttggactcgccgcttataccagaataccactccggccaccagaaccagcagcagcagcaacagcagagggattaggatggaggctatatgtcctggctgctgctggctgaagacgtgctcctcacaccggggccctgtcatgtggggtgggcactggcactcaggcatcattttgctgttcatggtacaggagccgccattgctgcagtggccgacgcaggtcagacagctgggggccacccggccatccgtgcagttgcaggtgacatccccactctgcttgttgaccacacaggccccttcgagacagcggctgcacttgttcacctcacacctcgatccctcaaagtaggcagtgcagcggcattgtcgggagccatcagcagccatctggcatgtgccaaagttctcacagtagccagagcactgccggtactggcagcggtcgcccaggaagccgggtaggcatcggcactggggctggttgccctggttgacagtgcaggtgctgttgttggcacagtagcccgcacacacctgctgggtgcatttggggcccgtgaagcccgtggggcaccggcacgtgggcatgccagagggggaggcagcacaggtgcccccattgcgacagtgctcccagcactggtccagttcacacttgtcacccgtgtagcggggttggcagcggcacttgggctgcctccgtgcattgaggaaacagctgccaccgttgaagcactgcaggttacaggttccaggccggggagcatctggggggggcgttggagagggcacaggcacgcatgtgccgttgtccagccgcttcccattgggacaggtgcagacaggcccactggggctcagcaggcagagccactcgcatttcttgcggtcacatgggttggtcacttcgggctgcttgtgctgatggtaaaggaccacgtcagaggcgtggctcaggccccctgtcaggttgaccaaggggctgtggccaaacttatggatcttgaagacacgattattgatgtaggtgacaccatagatgtaatcctcaaagacgtcgatgctgaaggggtgacttaggcctcgtttgctgtcagcagccacaatggggtccgtgccattgagccggatgctgccgatgactgaaagcttggcgtctgcccagtacagccgctcattgtgataatccacggccaggcctgtgggccactgaatgttgtcctgcaccagtgtctcccgaagcgtcccatccatcgctgccgtctcaatcttggggtggttgccccagtctgaccagtacatggtccccctcagtgggtccaccacaatggcgtggggctcgtcaatcatgcccgagatgagcgtcttgcggttctcgcccttcatctgcgccacctcaatcacatctcggcccgagtcggtccagtacacgtttccggccacccagtcgatggcgatgcctctgggcatcttcagccctgaaatgttgaggtgggtgacaccccggtcaatctgtcgccggtggcggttggaagtggtaggaggcgcagcaggtggcaggctgcggtaggagatggtgcccgtgtgccagttggtccaatagacacggccagccttgacatggacatccatagcatcaatgcggacactctcgtcaccctggaatgcctgctcgtaagccgaatgggggtggccggggaacaggctgcggatctcattgtcatcagcgatgtacaggacctggtactcagagccttcggccttgcaggtgttgtgcgtcttcatgaagttccgagcgcagctgcagaggtggccgcccttggtgttgttgcagagctgggagcaggtgccgaagcgcaggcactcgttgatgtcttggcatccgggctggccgggcacggtgtggaagcccgagcggcaggcacagtaggccgctttctcggtgcgcacgcagcgtgcctcgtccccacagatgctggcattggtggcgcagctggtcagcttggggtcgatgctgcagtcctcctcgtcagagccgtccccgcagtcatcgaacatgttgcagcgcagggaggaggagaggcagcgctggttccggcacagaaactccttcttgtctttgcagtgggtggtgtgggctgtggggggctcacagtcctcttcatcagtcccatccccacagttgtccgtgccatcgcattggcgcccgatccacagacagacgcggtcattcttgcaacggaagggccggttgggagggcacacgaaccgggcacactcctcggggttctcatctgagttgtccccacagtcatcctcgccatcgcacttccaggccagcggcttgcacaaggtgttgttgcactggaactcgtccagggggcaggtccgcacgccagtgccgcaggcctcctcgtcgctgccgtccatgcagtcggcgtctgcgtcacagcgccagcgcagggggatgcagtggccgctcttgcactggaactggtccatgtcacagcggggggtgcagtctttctcgtccgagccgtccgcgcagtcgtggtctccatcgcatttccagcgccccgcgatgcagcggccgttggcacaggagaactcactctcggagcagggccgaggggtgcagctctcttcatcggagttgtcaccgcaatcgttgtcgtagtcgcactgccagcggccgggcacgcagcggttgttcttgcagcggaactggtatggctcacaggtgcgttcatcacactcttccttgggctcatccgagccatccccacagtcatcctctccgtcacacttccaacgcgctgggatgcagcggcccgaatccttgcagcggaactcgtccacaccacaggtcatctgggtgcagttggcgggctcatcactgccatccacacagtcattgtcccggtcgcagacccagacccgggggatgcaccgtttggtaatggagcactggaactggttgggggcgcaggtcacctcggggcagtccctctcatcctccccatctccgcagttgtcctgcccattgcagcggaagatgccgggaatacagcggttggtgttggtgcatttgaactgactgggcaagcagacgtggatgtcacagttggcctcgtcactgttgtcctggcagtcattgtcgccatcgcagatgaaggcagggtttgtgcagatacctgtggagcactggaactgtccgggccggcacttgaactcagggcagtccgggggctcgtctgagtggtccccgcagtcgtcctcggtgtcacacttccaccagaaggggatgcacttgtcgttcttgcatacaaactggctagccgtgcagttggacacacaggtgcgcccatcgctgcccaggtagaagttggtggggcaggcacatttgtgccctcccccgggggacagcaggcacaggttgctgcagccaccattgttgaccttgcaggggtgattgggcacgtctggctggcgcagggcatggaagacatgcaggtccatgggccggtgcagcgtgctgatgaggagcgttttgttggtgcctgtggtcttgtgggctcggttaatggactttgtttcccagtcggtccagtagacgtagtcctcaaacagggtcagtgcaaagatgtgcgggatgtcctggctcagcacaacgtggcgattggagccatccaggctggcaaattcaatgtagtcctcgcgggcgtcggcccagtagatgcgctcagtgacatagtccagcgtcaggccattgggccatgtgatcttggtgtccacgatgacgctgcggctggacccatccatgccgatgcggccgatcagtgaatggtcaccccagtctgtccagtacaggtacccattctgcacatccaccaccagagccctgggctcacggaggccagagctgaccagcaccgtccgataggccccattgagcttggacacctcgatggtgtcccggcctttgtcgcaccagtacaggttgccacccacccagtccacagccagcccat

SEQ ID NO: 432820 - DNA, 1166 bp, Homo Sapiens
tacatttttcttattatataattagatataggtcaaatatcccttatccaaaatgtgtgggaccagaagtgtttcaaatgtttttggatttggggatttttgtatatatataatgaggtatcttgggagtagacccaagtctaaacacaaaattcatttgttttatatacaccttatacaacatagcttgaaggtaattttatccaatatttttaataatcttgggcatggaacaaagttttgattgcactgtaactgccacctgtcaaatgaggtcaggtgtaaaattttccacttctgacggaatgctggaactcaaagtttaagattttggagcatttggggttttggattgttggaacggaatgttcaacctgtactatttggggtccggttggaaattggctttacatttttaaaagccagtgtagactgtatttctgccttaccttctctctagtcaaatactccactaaaaaaatgaatatttcagtttgagagggaggcattatatagaaaagccaaactatgaaaccattcttattccataatacctctgaacctgagtttactgttctttgagaactctgtttcagctgattataagagaaagaaatccagtgacacgagggcaggcaggccacgctctgctctgatcgagaaaagcttcctgatgtcagggagatggaactgccaccatcagaaccatggcactttgggtgaaggtgtgtcagcgaccaagggggcaggaaatgggcagtgactaagggggcaggaaacaggcaggcacatggcaaggttctcccagcccatcagcccagtgatggcctcgattttgaagctgcactactgtctgaaaagcacaattactggtgactcttaacaaacttcagcatactggggaaggagactgtcaagtaactgaattggaaagatgaaaaagaaccatctctaaaagttgatgctgtcagaagaataacctcctttgtgcaagtcttgcaacatcttcattcaaccacaggagggcagagagtttcagaacctcccccaccagtgagctccgtgctcacaattaatacaaggaaagggttatctaaacagccagatagaaatatactgcacgttcctttttaaagacgacagaaacttttagaatttcataaacc

SEQ ID NO: 432821 - DNA, 733 bp, Homo Sapiens
  misc_feature (63)..(81): n is a, c, g, or t
  misc_feature (103)..(360): n is a, c, g, or t
tcccaacattttggataagtggatatttgacctatatctaattatataataagaaaaaagtannnnnnnnnnnnnnnnnnngaggaggagtttcactcttgtnnnnnnnnnnnnnnnnnnnnnnnnnnnnnnnnnnnnnnnnnnnnnnnnnnnnnnnnnnnnnnnnnnnnnnnnnnnnnnnnnnnnnnnnnnnnnnnnnnnnnnnnnnnnnnnnnnnnnnnnnnnnnnnnnnnnnnnnnnnnnnnnnnnnnnnnnnnnnnnnnnnnnnnnnnnnnnnnnnnnnnnnnnnnnnnnnnnnnnnnnnnnnnnnnnnnnnnnnnnnnnnnnnnnnnnnnnnnnnnnnnnnnnnnnnnnnnnnnnaaaaaatgtactttctttctcagaaatacttttaaaaaaaattgaagggtgaggagaaaaacatcttggagaagaggacccattaaaactttaaatatctgtgggaaccatttttcctgattttcccttttttaacatcatggcaaagatgggtttttttccaacaaaatttaatttaatatctttccacttgaagattttaggtttgttttcaatacttaatgaatataaaactaagggagaaaagccaccctgacataatttaaactttatatgaacatttggataagagtttgtggattttttctgtagataatatatttgatccggaactcaagtgcatggaaacatgattttgatttttaaaatctag

SEQ ID NO: 432822 - DNA, 1187 bp, Homo Sapiens
  misc_feature (436)..(438): n is a, c, g, or t
  misc_feature (449)..(449): n is a, c, g, or t
aagaacgttggattaagtctatatggcgctagctcgtagtgtcgtacgaacggagcgcagcgagataggtgagcgaggaagcggcgtattaaggttcgcgattagcatacattatatcgaagtttatcagtgcgatggtaccgtggatatatgcccgggaatgcggacataacggccgggtgcttattatttgagcatgagcaagtaacttttgatcagtatacatttcattttaatgtataaactgccgacagaaacatattatgtaaaatgtgtgctaaactatcccaggaaagtatttaatccaacattgtaaatgaagtatcttgtacatataaatttatttcttttgcagagcattatattactggatgtttaatttacaaaatagttgggtaaatgttccaacaaactttaaagtaccttgaagtcaaannnttgtctgtttntgtttggtgtagtggtgtgttttcttaagtgttacatttaaactctaaccaagggaagggttctttaagaacattccctttagagggataaagttgagaagtgtgccttttttttaatggcttgaagttttcagaggtgataaaaattaaaatcacactactatttgaagctcattttctatgcaggttttttaacgtcatttatgtatcattctttttatatatcacacttaaagctttgtgttagcttttttcttttgccccagatcaaactgaacaatgtatattacactatctgtctgtaaaatactttttttaagaaagcatttatatttatatgacagcttgaactgacaaccttgtgtatataggatcatcttgaaagtattatttcacaattgaaaagaagaaattatattggtacctattgatgttatggagaagagggtattttctagttttgtactaaaaatcaattggattgactaaatcccaaaacatgacactgtaggcagcagttttaagtcttatttttactgtttatatatttgaatgctgctacaacagatgatcttcatccctgaagttttcagctaaacttggtttcctagaatagactgttaactttcaaaatttttattggtgaaatggaaatactgtttttccttgtgaatgaattttcatatttgtaagtgctaagtttataattcaggtttgatcaaggtgtgaataactgaa

SEQ ID NO: 432823 - DNA, 669 bp, Homo Sapiens
  misc_feature (616)..(616): n is a, c, g, or t
  misc_feature (636)..(636): n is a, c, g, or t
  misc_feature (647)..(647): n is a, c, g, or t
ccggaattcccgggtcatacctcatttctttaaacagctctccaagctttcactgaagtctgtctgttttttatattggctgtctggattttaaagacttttcatattttatatttctactgattttgtttcccctaacaacatttgtcactgtctttggattatgacccaggcaagatgatttcagattttctaaaatcttgcctgtgaggttttgttcatatcagtgcttcattttgtaatgtcttctcaagaaaaatacctatgttaactcacaagtataaaatatgtgtgtattataaaacaatgaaaagtgtatttttggagatagtcaagcatttagaagtgcagtgaacttgctgtcacggagtaaaatgctaattatgtttcactttcctagcctagtgaaaaagaaaagtgctcttgagtacaataccttaattatttcttaaaatactgactttgacctagctcactgtattttttatttaatggattatggattacagtatttttcttctgagttaaattttccataatttatgtgaagacacaaagatgtttaaaacaaatgattattcataaggaaatcatgatggtctcagtattaattttngtgtattggaagggctttgntctttaatagnatttataaatttcagcttcccc

SEQ ID NO: 432824 - DNA, 1467 bp, Homo Sapiens
aaaagggggcaaaaaattccccaaaaaaatgggctttcttttgggggttaagggggaattttttacattttccccccttcaaggttttgtaccaagatcccaggttaacccttaaatttcttttttcccttaaacggggctggacttgggattgaccttgttgagaaaagggtatcccattattaaaggagtcaggagagaaagggattttctgtggttacatgtaaacttgtgataggtctgcagaagttacatgtgaagaggatagtgaggaagtcagccatgatccatctatgtgaaggtcacaccagcttcattgtacactttgaagactttctcaatggcattaacataggcagctgttctcaggtccaatcccaggttatacttcatggctgtgcgcataatttgcctggcagaacgctccattgtgtatgccaagccagagtgcacgatgtctttctcagatgcacccgatatcctgtcttggaactctgccgtgggtacaatgggaatagttccaccatgctttccaaattttctttctaaactctcttgaacagacatgagcaagtggtagttagaatccctttcatatttgaaggtcaaacggccatagctgacatgatttagattcttcagccactcaaagtaagatactgtcactcctccagcattcaagtagagatctggaataaccataatgtttctctccaggaagatcttgtcagcttctggagttgttggcccattggcaccttcagcaatgatcttggctttgactctgggtgcgttggatttggtcaactgcttctcactggcagctgggatcagtatgtcacagtcggcctccaagatgcttccttcatagggctttgccttggggaagcccagaatggacccatgttgcaatttgaagtcttccagttcctttgggtcaataccatctggattccatatactcccatcagactcaccaacagcaatacatttagcaccaaaacgatgtaaatatctcatagagtgtaggcccacattaccaaatccctgaacaacaaatgttttatcttgcagaacacgctggtgtcattcctaagaatgactcatgtaagaagacttcatgtgatgataattttcaatgcaccatggaagacacacacggccagtagcagagatgcgtccatggattcccccttggctgatgggtttaccagtaacacaggcgtgtgcattaatatcatagtgccctatggtgctggcataggtatcagcgatccaggacatcatctccgctcacctgtgctcatgtctggagcaggcacatcaatgccaggaccaataaagcacctttttgctagctccagtggtgaacctccttgtgatcttttccaattcattatcagtatagttcttgggattgatcttaacaccagctttagcaccccctaacggcacatcaacccgctc

SEQ ID NO: 432825 - DNA, 2300 bp, Homo Sapiens
  misc_feature (477)..(485): n is a, c, g, or t
  misc_feature (511)..(520): n is a, c, g, or t
  misc_feature (641)..(698): n is a, c, g, or t
  misc_feature (729)..(779): n is a, c, g, or t
  misc_feature (871)..(885): n is a, c, g, or t
  misc_feature (2288)..(2288): n is a, c, g, or t
ggagggggggccaaaaaatggcggacaatttgttgtggagcgcccggccgtttttttgcccccaggggggcgaaaatattatattaaggcccaagggtggtgacaacaggggggttgcggatgtcccccgcttgggcggagagttcacggggtgtctataacacagggcggcggttgtagggaggggggcgtttctcaccgtgttgtcgggccggaaaaagggggtatatagaaatgataattgtcccggcccaagtatcttctccaatattaaagttgtcccacggcgggccgcgggggcgcggtgaaaatttttggagaatatttgaggggcgtccgcccctttgtggagacaccccccggtgttggagaataaagaagtccccccacgataaagggggccctcctcccggaaagaattcctccctactcggggagaattttgtttttgaagggaacacagtctttcgggttttnnnnnnnnnggcggggcggtttgtttttttatttnnnnnnnnnnagttccccaagccgccttatgttctgtagccccaggggtttttccttaggggaaacccgggttattgccccagtgtgtcctctttccccttatgggggccgccccgggcccaacaagaaannnnnnnnnnnnnnnnnnnnnnnnnnnnnnnnnnnnnnnnnnnnnnnnnnnnnnnnnngagtgtgtttagctttgttttggaccttggnnnnnnnnnnnnnnnnnnnnnnnnnnnnnnnnnnnnnnnnnnnnnnnnnnnggaaaacgtagacttttaataactgcttttatcaccaggttaagccatgcagttacaaagtagttagaaatttctgaagggtgttagagttnnnnnnnnnnnnnnngctgactcttacacatatattatctagcacttcatggggacactactgttcaaaaggccctggccaaataactcccaaatgaaacactcaacccaaggatgttttcagcccactgttagtgaagctgggtgcagaatgcaaagcctctaaaaggagaggatacaaagtcaggtgagtaggggccattggcaatgctcagagccagccagactccaaacagggagcccaagtggtttttttctgggacactctacttgaattattgtttaattagtcaaccatagatcttcaaaagagaacaattagttaacatgataaaaagtgactgcattctttggactgtatcataattatagtaagcaaattctgacagttttaatgaaaatagcctccaccattttgcaggtatgaagataacttaattatccacagggcttttaatgtctgctggacaatacatgaatgataagctataaatgacattgttttatgatataaaaatactagtttttttcatttattatttctataggcattcactgtttgagtcaaggttaggcttgttaagtgattaaaggcaattttattacagcagcatgtacttattctattctaaaagaataatattcataaacagaaacaggttttatatttgtttgcaacctgcaaaattgaattattttgctgatataaaatactaagaactcacttgaggaccatgccaccttctgaaaaggccacacacctacttcttaaatgtgttaaagttacagtgtgtcccagactcatccagaaaaaataagcaagcaactgactgctcttgactgttcctccccagcactagcactgattgtgttgggaaaagccacagagcaaggctgcacagccagataaaggaggctttttatttaaaggcaaaataccaaaatggctctctggtgtaggtgatttctactttcacactcagcttgtacatgatccgctaaccttaatttctttctccttaacgggctgacttggattgacttgttgagaatggtatccattattaatgagtcaggagagaaagggatttctgtggttacatgtaaacttgtgataggtctgcagaagttacatgtgaagaggatagtgaggaagtcagccatgatccatctatgtgaaggtcacaccagcttcattgtacactttgaagactttctcaatggcattaacataggcagctgttctcaggtccaatcccaggttatacttcatggctgtgcgcataatttgcctggcagaacgctccattgtgtatgccaagccagagtgcacgatgtctttctcagatgcacccgatatcctgtcttggaactctgccgtgggtacaatgggaatagttccaccatgctttccaaatntttctttctaaa

SEQ ID NO: 432826 - DNA, 511 bp, Homo Sapiens
aggttctcaatagactcactgctgagagctgtgaatttgcatagagagatgatgagattgtcaaacacatcgctgaggccatagtgggcggagatcatggcgcacttcctgaagcctgagatggctttctggatgattgtctcctcaaggcttttgtcaaagacataagagagagcagcaatagtggggccccaggtcatggtgaagaggtcaagatcatagctggcagtaggcacacgcaggaatatgccctcaggggtggcacctcgatgaagcagcacattccacacatagttctcccgaaccaagcctgtctgctcctcaggcattacaatttcctcattcttgatggcatggtacatgtcctccaggatgtcttgctcaaagtccttgcctccattcacacctttcagatttttgcgaaactcctccagggtcatgggtgcattctgtttacgaacattgtggttgtgctggtcagtattaagcatgatgacagcataggccaggg

SEQ ID NO: 432827 - DNA, 805 bp, Homo Sapiens
  misc_feature (493)..(501): n is a, c, g, or t
tgccgtgagcttactcattactgcagaattggaaaatcagtgcaacctgacaaagactcctcagtgtaggttaaaaagcaaatgaggataccactgtgcacagagaaagtggcatgtgaacagtgacgaaaaatttgagataccaaatactaacaataacttcaagaacctgcagacaggcatctctgtggattgtaggagcatgtgggagggtaacaacatgactcatgcccagcctgcatttttctgctaagacctacttgcatgtcatttcttctttttaattgttaacatcaagatttggtgaagaaatacattcagttcacccgcaaaaaagaagcaattactctcactgacttcatgaatcccccgataacctgtttcccatttgtcccatggttcctaggaggccatgtgaatcctaagtaaagctccagccctgatttcacagatatcaggcaggccatgaaatgggttctgtgtttcaaataannnnnnnnncttccattttcctgaattagcagttatttcaaatgttaatacttataggccttcctttggatttaccatcacaaaagaacatgcaatgcttagaccaatcttagtcctactttatgacagtaaagcaaaaattaaaggaggtgggggaaatgggtgagagagcctgtaaatggagaggtcaggacacaggtgggggtcacttctgcaagtaaaggtgcaatctttccaacaggattgacatttcctgatgaatcattacttgtgattacaaatcacatacacatcggccattcctgataaaaaa

SEQ ID NO: 432828 - DNA, 579 bp, Homo Sapiens
cttacagagagggaagaaaatgatgctctcattttagcaacatgataaaatagttccgatttttcagagtccagattttgctctcagcttgtatttatcaaacatttgaatcattttattactgccattcatctaacatttggaatatttggcattaaattgccaaaatggctgagaaagaacaagatcacatttcaactacctggccccagattttagagcaaatatgaaggtggtggaataaattttcttgcttgattgacagtttaagaaacacataagagtgattttctacctcctctttcctctttccagatctgaaagtgcccttgactagttcctgccattgcgccaacactgtaaaacatgtttgcttgagcaagaattgatattgactccgattgcagggagtaagcttgattgcctttctatggcagatatgagctaatatgatccatcaaaaaggctgtgcttttgagacagctttcactaggaagtatacattttgtgccaggctctgaattggttttgatcgcacgcgtgggtcgacgatatcccgtacttccggccggtaccagc

SEQ ID NO: 432829 - DNA, 420 bp, Homo Sapiens
gagctcttcagagatcataagaacttgggcttttctacgagatgaccttgacataccaagtggtttccaaatggtcaacttacttaaaaatcttttcctgttttgagatagtcactggatcaagaatgcattaagtgtggttaccctaaatgttcccttttaaatctgcttttcatgttgaaaatcagttttaatgtagagaaagaaatgtctgccatttgctgcttaacaggctttgtgtcaggtttttcagtgttggcaagctcttggttctacgtggatgatttctacgtggatgttctcctgagtccttaattctgcctaaatagaatttctttatgatcttaacttcacttccattaggtgaagattgaaaggataggattgacatacccaaagtagccagctggtcttcaccac

SEQ ID NO: 432830 - DNA, 719 bp, Homo Sapiens
  misc_feature (239)..(239): n is a, c, g, or t
cacgagggtgtattggttttactttttatcattgaaactacaatttgttgagcactgaccatgcaggaaacccgtttttccccgttttctcttttgtgctcacagcacctcctggagtaggtgttcctatcatcctctctttatagctcaggagccaaagctcagccagcccgaaggagccaggattagagcctgcatggatgcaacagtcacgcttctctctattacgtgtcttgcancttggagtcacatgatctcagcatctgatccaccctgggctcaggtcagtataaggctgaactcacaaggtgagggttagactgacctcctctctcaggacaggaaaagaacagagcctactgcaaaaggcagatactcttgcctccactttgacatctcacaactccacagcaacactacgggtgggaaaacattcacatgtatgttcgtggaaactaatgcacatggaaacaggatgctcctatgatgttctgatgtagtttccgagtgatggggggacatgcatagttttttctacccagttcctaccgacagcgctagacttccagatttgagtgttttcctctcactactgatttccaacagcaccaaaaagaacaggaaggaaagatggtaaaatgatgttaaatgctatgaagtccctgtcctctccatctgcctgcctatagaccccctcatttctggcctgcagcccgggg

SEQ ID NO: 432831 - DNA, 1284 bp, Homo Sapiens
gcattcaaatttttattcaaagtttagtctctctccttgggtttcccctcttttatgaaatgatcaattttggcgaagagccccagaaagcaagatagaaaagaaatatgctctttaccgtggccgatcagcaacgaaccaacactgtcctcatctaattctacgtcttccacactgcccagtaacacaaataaccagagcgcagacgccaagaatccttccaagtaacgcagctaacagaccaaggtgacagttctgacttcttggggggttttccaagtacatacgtagcattataaacaagcctctatgttgtgcttacacaactcactcaagggatttttgttttcacaagtgaaaacgtttatgaaatgctagcctgcgaagccgctttcaggaaccatctagtgagatttccctcccaagacaggcagctttctcacataccgtggaggcctcctgccggcctggggactgacaggtgcagggccctgcccctcgagggccagcctctccctcgggagcgtgggtttttcctgtttgatcctggcttaacttgaacatctctggcattggagctgccctctggagtagcccagaagttggcactcacctcaccttttgctgcatttccaagagatcagcctttggacttcctggaaagtggtagaaccactgtcctatgaaacaaagtgcttctgtgctgaaatggagtaagttccctgcagcctctggcaaggtaacctaccgagcacctcctggagtaggtgttcctatcatcctctctttatagcccaggagccaaagctcagccagcccgaaggagccaggattagagcctgcatggatgcaacagtcacgcttctctctattacgtgtcttgcaacttggagtcacatgatctcagcatctgatccaccctgggctcagaacctcccagaacctcccagaatcgaggctcacggcagaggttctgcactcaccaaggacgcggggggaccatgtctgtgctcatgtggatcccagctgctgggcagagcacaccacacatccagactcaacaaaatacatggagtcaaaggtcaggtgactgaatcaatgagtatgttacacaccaagaaagacccctcctctctgcaccccggggagcagccccagaggcctggtctcctccaggatgaaaatgcaaacgcaggtgcctgggggctcccagagccttggcttcacggttccctcccggccttgctggagcttcatgtgcctccccttttgcttaatgagagc

SEQ ID NO: 432832 - DNA, 2700 bp, Homo Sapiens
  misc_feature (2556)..(2556): n is a, c, g, or t
gttctttttcacattgtaaagccaagtggccaacaattaagaatttgaagtcttagaaatcagttataattccttcacaatgtggtagtcccagagtaacatctgtaagtgaaacaaaataaaaatttaaatatcttcatctttaaaaattggaaatcttggggcatttaggggaggatgagtaggtgtaatgttgattagtatgataagataactttaaaaaacataacacttatagactgtggatttaacagtttagggctcctaatgcgttattatgattcatctccacattcagagactttacatttgtagttaaatgtttgaatatttgactggctgctgcttttccttttagttgttacattatatgccactctaggaggtccagccattgttcatgcattaaatgaaacagaggtgaccaacatcattactagtaaagaactcttacaaacaaagttgaaggatatagtttctttggtcccacgcctgcggcacatcatcactgttgatggaaagccaccgacctggtccgagttccccaagggcatcattgtgcataccatggctgcagtggaggccctgggagccaaggccagcatggaaaaccaacctcatagcaaaccattgccctcagatattgcagtaatcatgtacacaagtggatccacaggacttccaaagggagtcatgatctcacatagtaacattattgctggtataactgggatggcagaaaggattccagaactaggagaggaagatgtctacattggatatttgcctctggcccatgttctagaattaagtgctgagcttgtctgtctttctcacggatgccgcattggttactcttcaccacagactttagcagatcagtcttcaaaaattaaaaaaggaagcaaaggggatacatccatgttgaaaccaacactgatggcagcagttccggaaatcatggatcggatctacaaaaatgtcatgaataaagtcagtgaaatgagtagttttcaacgtaatctgtttattctggcctataattacaaaatggaacagatttcaaaaggacgtaatactccactgtgcgacagctttgttttccggaaagttcgaagcttgctagggggaaatattcgtctcctgttgtgtggtggcgctccactttctgcaaccacgcagcgattcatgaacatctgtttctgctgtcctgttggtcagggatacgggctcactgaatctgctggggctggaacaatttccgaagtgtgggactacaatactggcagagtgggagcaccattagtttgctgtgaaatcaaattaaaaaactgggaggaaggtggatactttaatactgataagccacaccccaggggtgaaattcttattgggggccaaagtgtgacaatggggtactacaaaaatgaagcaaaaacaaaagctgatttctttgaagatgaaaatggacaaaggtggctctgtactggggatattggagagtttgaacccgatggatgcttaaagattattgatcgtaaaaaggaccttgtaaaactacaggcaggggaatatgtttctcttgggaaagtagaggcagctttgaagaatcttccactagtagataacatttgtgcatatgcaaacagttatcattcttatgtcattggatttgttgtgccaaatcaaaaggaactaactgaactagctcgaaagaaaggacttaaagggacttgggaggagctgtgtaacagttgtgaaatggaaaatgaggtacttaaagtgctttccgaagctgctatttcagcaagtctggaaaagtttgaaattccagtaaaaattcgtttgagtcctgaaccgtggacccctgaaactggtctggtgacagatgccttcaagctgaaacgcaaagagcttaaaacacattaccaggcggacattgagcgaatgtatggaagaaaataattattctcttctggcatcagtttgctacagtgagctcagatcaaataggaaaatacttgaaatgcatgtctcaagctgcaaggcaaactccattcctcatattaaactattacttctcatgacgtcaccatttttaactgacaggattagtaaaacattaagacagcaaacttgtgtctgtctcttctttcattttccccgccaccaacttactttaccacctatgactgtacttgtcagtatgagaatttttctgaatcatattggggaagcagtgattttaaaacctcaagtttttaaacatgatttatatgttctgtataatgttcagtttgtaactttttaaaagtttggatgtatagagggataaataggaaatataagaattggttatttgggggcttttttacttactgtatttaaaaatacaagggtattgatatgaaattatgtaaatttcaaatgcttatgaatcaaatcattgttgaacaaaagatttgttgctgtgtaattattgtcttgtatgcatttgagagaaataaatatacccatacttatgttttaccacgtcccatgcgtatttcccctaantcttccttgccggcccccctccggcccccccaaaagttttccaaaacactttcctttggggggggcgcggcccccgttagggcaaggggaacaatggggccataaccttgttccccccaagagcaaacccccggcccaagaacc

SEQ ID NO: 432833 - DNA, 615 bp, Homo Sapiens
  misc_feature (224)..(238): n is a, c, g, or t
  misc_feature (565)..(565): n is a, c, g, or t
  misc_feature (602)..(602): n is a, c, g, or t
tgggggcaaacagttaattgttcttatgtcattggatttgttgtgccaaatcaaaaggaactaacagaactaacttgaaagaaaggacttacaggaacttgagagtagctctctaacagttgtgaaacagaagatgaggtgcagtagtccccctttatgtgaggtttcgctttcttgggttatacctacagtcaaccgtggtccaaaaatgttaagatattttnnnnnnnnnnnnnnncacattaacataacttttattatagtatgttataattgttttattattgttgttgttaatctcttactgtgcctaatttataaactttatcataggcttgtatgtataggaaataaacattgtatagggtttcaggttccaagactgggggtcttggaacatatcccttgaggataagaggggactaccatacgtaaagtactttctgaagctgctatttgggcgtgtctgaaaaagtttgaaaatctattaaaaattggtttgagccctgacccatgaatcctgaaactggtctggtgacaagtgccttcaagctaagaaatgatntttctcttttggcatcagtttgctacagtgagctcanatcaaataagaca

SEQ ID NO: 432834 - DNA, 1815 bp, Homo Sapiens
agaaattagaatactttattataaatattttcagaatataaactgattttgtatcaagactctttgaaactttagaaactttatgtaacctaagattataatatatttcattttccactttccagcctagaaaatacactgcaagttagatctaataaaggagaaaaaaattgcttcacagagaaaaaccaatgaacataaaatacccaactcaaaactataacaaacccaatcaagaaacagattgtgcaaaggtcattaatcctccaatttaaaataaataacctcccaacagaaaatatttccaccatcaaagcaatttgatgaataaaagcagagtcactttcattaaaggaaattacactatatgttcaaaaaatgtaataatgcttttagaaaatgaggaaaagcaatttctgtgttggagagcaagcatgctaaacactttgtttactaggcctttgttagaagttaaagaacctattcacataagaaaagtggtatgaacacggatatcataaaaccaagctctcacctattttttcaatttaactttgggagaaccaactttgaaagcttcaaaatccaagaatagactggtcccaaagcatttcctcctctgtcctttcttggccttgttcctttttcttttttgtacgcttacgttcctctttcttagagactacatctcggctttttttctcctttcgattcttaagcttttctgtactgacatgtacggtttctatttccacctctgttttctttctttggatgctcttgtgtttgtctaagtcaatttcctcgcagcttttttttctcttatgcttagaccgctcctcctctgatttttctctgccttcctctgggtgccttttcctcttctgatgtatctgtttgtgactggcttgatgagtactggtactgttatctgaggagaagtgcttgtaaactctatgttctacaccatgtgagccacaaatatattcttgttgattaaagttcaggggtactggtttttctgagaaacagtccctcgtgaactgacagtagctcagagagtctagtctcaatctgctgtcatgggctggtaaccactgaggcaaccgattttccactgtttgtggaatattgcatgatcttgggtaggtctggatggtttcagatgggagtctctggtcaaacattctatacgtgggtctggaattaacctctcctttgtacccacaggtttccaaatagtccccgtttcatcgtttcgtgaaacaagtctttggctctaagcctctggctttgctgtactttaatataatcttcaagttcatcttgaaaagagtcatatgtcttctttgaatgcttcattaggttgacaaaacgggattttcccttatcaggctgagaatttggtggagaaatctgatcatattcactcagtttttcagcatgaattttcaaatagtgagactacacaataactggtgagctaaaaaccacaattcagagatcaaaaatcaatttttgtccaattctccactctcactcatctcataatgcaaaatcctttgttatttgaactgtaacactactccacagacatcttttataaaaggtatctgtaaacaaagttcagtctttgttcattcaatgtggtatcttctctgaggcaggggcgggcgtctacaactactgtcccccgccccgccaacgccgccagccaggggataagccgcggtggaggtggcggagaggcaggaacaaccgctgccgccaccgccgcctccgccgccgagcaggctggatgggaggaggaggcgg

SEQ ID NO: 432835 - DNA, 1302 bp, Homo Sapiens
  misc_feature (528)..(528): n is a, c, g, or t
ttaacagagcttatctccctatcttttctgaaaacaagtttttggctctagtccttctggctttctgcacttttatgtaatcttcaaagttcatctggaaaagaatcatatgtcctctttgaatgggttggtagccactgaggtaactggctttccactggtgaaatatggtatggtcgttggtaggtctgggaagcctcatgtgaaaatctttgctcacacattcttgatctgggtccagaatcaaccatttctctgtacccatgagtatccacagagttctctctcatctttctgaaacaagtctttggatctagtcctctggctttctgtactttgatgtaatcttcaagttcatcttggaaagagtcatatgtcttctttgaatgaggtaactgcttttccattgcttgtgaaatattgtatggtgctgcgtatgtccggaaagtctcaaatgggagtctttgttcaaacattctatgtctgggtctggaatcgaccacttctctgtattctacgggtttccanaagaactctcttccatctttctgaaacaagtcttggcctctagtcctctggctttctgcacattgatgtaatctgcacactcattttggtaagagtcttgtgtcttccttgaattcttcactagattgataacaatggattctttaatttgatgttcacttccttgcatgtgggaccggaacatatctaaagatgtaaaagcaatactacaaatatggcaaacataggttctcatactaaatgctgagatcactgcagtgccttagttaccaaaagtaatttccacagattttagaaaggagagaggttcagtgagccccactctcaggataaaagctgaaagcaaaattctaaaacaaaactactagttaccacttcaaaagagtcaaaagctatacactgggaactatatagtaactagcacactattccactttgtaggtagaattagaagcaagggatacattaattttttaaaaatctcatcatccttccactttatctttgaccagaagaagcaaattaatacatttcataagccaaatataaaatcattctgaccctagggaggaggaaataaattggtacatgcaaagattttggggacaaccatggtaatcttttaaaccaaaaagtgacctaatcatttcaaagaagctaaattaattattaccaagtatattggccttgtctgagcaaagactattcatagaaacaggagactgcttgcaaggggaaagaaagatgctgactctgaagaaaatgaggctgccc

SEQ ID NO: 432836 - DNA, 429 bp, Homo Sapiens
agaaattaaaacactttaatataaacatttccagaatatagactgaccttatatcagtactttttgagaccgttttaaaactatatatcatctaagtttattatagactgtttcattttccactttcagaactagaaaatgcaaaaatacactgcaaattagatttaacaaagaaaaaatcagtttaagttatttcatacatattccttggagaaagctgagacacataaacacagaaaaacaacaataaaataccaccaacactaacacaaaaccaaggaaagaactgattttgtaacgcttggtaattctgtcctttaaaataaattatctcccatgaataaataattcactatcacagcaatttgatgagcagaagtagagacaacttcatttagggaaattacattatatgtgagatatgtgaga

SEQ ID NO: 432837 - DNA, 348 bp, Homo Sapiens; identical to SEQ ID NO: 119553

SEQ ID NO: 432838 - DNA, 416 bp, Homo Sapiens
  misc_feature (399)..(399): n is a, c, g, or t
aacagtggagtaattttattcacatagggttgcgattaaaaggttaactcattcaaacacatttttgctatgctaacattcctttgcctcttattcttacaaataaacccccatcacagagcagaaatgttagaaattatatcacaaatggagcacaataagtatttttaaaaccttttaaaatatggcttataattttacacagcaagttacctattaatatgttacatattaacagatctatttggacaatcagatttccttgagattaaggatggagttggcatttttcctttaagaaggcattttaaggccgggcatgggtgggctcatgcctggtaatcccaatactggggagggccgagggcagggcaggatccacaagggtcagggagttcngaggaccaggcctggac

SEQ ID NO: 432839 - DNA, 150 bp, Homo Sapiens
taaatatggcttatattttacacaggcaagtacctattaatatgttacatattaacagatctattggacaatcagatttccttagattaaggatggagttggcatttttccctttaagaaggcattttaaggccgggcatggtggctcat

SEQ ID NO: 432840 - DNA, 2327 bp, Homo Sapiens
  misc_feature (1102)..(1103): n is a, c, g, or t
  misc_feature (1109)..(1109): n is a, c, g, or t
  misc_feature (1112)..(1112): n is a, c, g, or t
  misc_feature (1197)..(1216): n is a, c, g, or t
  misc_feature (1631)..(1631): n is a, c, g, or t
  misc_feature (1634)..(1634): n is a, c, g, or t
  misc_feature (1636)..(1636): n is a, c, g, or t
ttgatacatatatttattatgctgtaaaaagcaacactacctgattgcatttaaaataaatgtttcccaatttcagaatacttacaacttgtagttttaagattagattcactttgggaggttttagaagcaaatacattcatagctgtgtaatccccaggaagaatctaaatctgacatcaggtcattcagtccctgccagacagacaacagcatcaaatggtcaacagctaatccagctctgcagctaaagggcagtgtcgggcagcagtggggtatagcatattaccaaagatgagaccagcaaaaacaacaatgtgtataaagctttaaattaacatgatcatatagagcgctcaggatacagaaaaagcacatatgatactaaagccaaaacaaaaagatctttggagtttactgacggcagcagttaatagcacagtcaacagcatttaaatcaaatatattattaccagccaacagcaaacagcccgagcaggaatcggcacatagtcataaataacatcaggggtaaataacggcacatttaattaaacaacaaagattttacagaatggttttgatctgaaaaaagatgaaaactctctttgttcccaaataatggttagaacctctttttattatagaaaagcctcaaaatcattggtaatcttcaagtcacacaattcaactgtcttgtttcattttagtcacacaaagcgggctgctctttgaataaagttatcttgattgatttcagttaaaacgtgtctaccctgtaatatctttggggataatgctgctcctgtgcagcatcttacaaatgctacctgtctccatggcttgctagatccacggggtaggaaactgctcactcagcatcctccccatggaagctcaagcatgggaacagcttcgggcctggtgcagctaaggaacattggccgtggtttcaccaaaggaggtgccatctaggtaatgggagggcagtggcaggagccactggcttagactggaagtgaaaatgaaagcacctggaggctgctggagtaaggtgccatcaggcatgtaaagtttagaagcagcagagtgtgctcatagnnaaaggnggngaaaggaatttgctgtatgtgataacaactaacattcatgtacttgagctcatttcactaaacacagcttcagagaagtccattnnnnnnnnnnnnnnnnnnnncttaatatcagaactcctcactaacatgccactttatctcgaggtatgacaggataaaatgtatgtgtaactcctagaaaatcctgttctatccgttttttgaagccccttttacccactttccaaatgaatcctgaattaccaacccaagacaaagaattataggtcacaatttaaaatgaaatggcctttttcttattattaaactacagagcccaccaagaattacacaatagaaaaatcacaagaaatctggaatgatccagtggtcccccaaggaggacaaatctcttgatgcagactcttaatgacaggcttggaaacaaatgtttgttagttgtagcagttcccatactttcagaataactctggtagcttagagcatttctgaatttatctttaccctagaagctanaananaaaacttcttaaagagctgcagttgcacatcccttcgttttttagactgataaacttgactaatttatacttagtaattttgtcttctgtttggtcttctgtagacaaatggcaaagttctgatgccagaaataggaggcattttctgacttactatggaaaacataaaaactgcatagtatgccagctctcactttcccagctaaaggaaagaggcagatagctaaatgtctgagaagagaggctggactaaggggatatagaaaaaggaaaatttttcaaaagcattataactacattcacacatacgttttggtcaccaaacatatcttaaacagattccctgataaagtctaatcagaattggtctatcttactaacagttgttaactattatagttttttaagagtcacatcatgaagctagggtgagagagagacattttaaacacacaaccgtaagtgcatatagttgttcaaacacttaaactaaatttgtatttgaagtcttgaaaatcacactatttgcttctaaaggcaaccttgacccatttggacagactgtacaacagagcttactttataaatgcatatcagcagatcatcaccataaattgaaaattcacaaaacacaaataaatcatggaagaccacacgagctagcattggtaactatttcttttacatcaaa

SEQ ID NO: 432841 - DNA, 1266 bp, Homo Sapiens
  misc_feature (769)..(769): n is a, c, g, or t
caaacaaaacttttccttacttcttgacagatttgaagcctttgttacagtcacactgacagctggttggcacctcaggacatcttgacatcacttaagttgtagcctcaacaccaggtttatagtttattctgtctttcccagcagtgcctggcacataatatgtgctcccttaaaaagcagggaatgtgtagaaaacaagtggcctattttataaaactctaaatttattcaaaatgttaaaagattttgttctccctccaaaatattttacaattaaaaaaatcaaaactatatcctattttctcagccactgtacaagttgctgtttccatctcaggactagtctctggccctccaacactctgtccctccctcaatcccccacctcctttcaatattgctgttaagtttgtttataaaaccctccaccctctctccccaccccataccctgctctgctctgcccagagtggtgtctctttgcgattccaggccgttggctgcaggtgaagccgaatggatgggtacgatgtacacaagcaacacctgaggggcaagagtatgctttgtgcttctgggagaatcacttttttcttggtcaagtggaggatcgttcttttttgtcccatggacacctgttctgagccaaatatttggcttatagttgcccacagccatgttgctctgcttttttctgcacgttcctctgggcgtgggtccgtgacagatggctcttatgactgtaccatttgtttgcctgtggacntgttagggacaggaaaggggcacatgactagaatggtgcttgatggagccccaacttctcagagagtgggcacaaacccccaggggggaagttttggttttctagtaggcaaagccagggccaaccaggaccatggaaggtagggaaaaggggaagaaacgtctaaccatatagctctgagtgagccatgttccttttgaaaaccccctgtccatccccccctttattctgtaggtcccaggaaaattccaaagaggaggaaggaaaagaggaaaaggattctgttctgctgatgagaaaaggcaggaactgacacagtgctcagggctggggagaggcaccgctgccatctgcagctgtcactgcttccctgttctgtgagggaggttgtgcaggacagaagccaggccctcagaggcttcatcagctctgttctttgtccttgactaataagactgtatgctggcccccgctggacacagataagaccacacggt

SEQ ID NO: 432842 - DNA, 497 bp, Homo Sapiens
ggtgttacgtgggttaaatttagattatgtatttaagctggctggcagaattttaagtgttcaccatacctcatgtccttccccagtattttgttacagatatacttaccaagaatgaactatcatttataacaactgaaggacggggtttttaaaaattcacgttattatttctttgtaaatattattcagggtgggggggtaagaaaatacggttaaatcattgggaggcttaattgttttaaagactttacttgcaagactgaaaagacaaatgggcttcattttagaaaattctaatagattcacttgaatcaatttttgctatttttatttaaaaaggcaaaggcaggagaaacgggttcaaataagtcaaatgaaacaaacgtggtgctttctgtggagacagtggctctgacacaccactttatgctagaaaggcgcaaggggccgggtgggtgtggacagagggtccactaccaagtcagctctatgcc

SEQ ID NO: 432843 - DNA, 513 bp, Homo Sapiens
  misc_feature (150)..(452): n is a, c, g, or t
aataaaagtgttatactagcttttttatatctaatgactacagcaatcagtaaacatagtttatggttttatcagtgaaacatagtttacagtttcagtgtacaagcttaccactgtgcaaatgcatgctattttaaaagtaaacccttnnnnnnnnnnnnnnnnnnnnnnnnnnnnnnnnnnnnnnnnnnnnnnnnnnnnnnnnnnnnnnnnnnnnnnnnnnnnnnnnnnnnnnnnnnnnnnnnnnnnnnnnnnnnnnnnnnnnnnnnnnnnnnnnnnnnnnnnnnnnnnnnnnnnnnnnnnnnnnnnnnnnnnnnnnnnnnnnnnnnnnnnnnnnnnnnnnnnnnnnnnnnnnnnnnnnnnnnnnnnnnnnnnnnnnnnnnnnnnnnnnnnnnnnnnnnnnnnnnnnnnnnnnnnnnnnnnnnnnnnnnnnnnnnnnnnnnnnnnnnnnnattaattaataaataaacccacccttatatgagtctatgatttctgcatctggtacattat

SEQ ID NO: 432844 - DNA, 983 bp, Homo Sapiens
ggaagtaccacatcatacggaggagtgtgctctgtcttcttaaagaagccatgtcttttctctttggagtggggtgacgttacactgtttgcactgggcttaggggagcggtgttttgctggaatatcattttcttctgcatctaagccagtagcatctatgtctatagcagatgatggaggtgttgattttctggaactaggtactatgtcacccaaactggatgatgaatttcctcctgatttactggagtagaatttcccttgcttggctctctgttcatgctgcagcctcatgttttctagtttgcactgggcttggaatgaatccgctttcacagccttcttttacccatcgccctatccacccgtcattgttaaatttttccttcacatgcagataatcttttgcttcgaatgagatggccatgccaggcactggaacatcatcttcatgggccgcactgtagctgacatttgtccgaaccgcaaatgcaacgggctttgtctttgctttttccaactgtgcctgggcctgccgctccgcttctctgcgcactgcctcccggtcctcctccagagatacatcggaatcggatggacggctagtgtaggagtctgccgaaccataggacacccgtactcgccggcgatgcaccagcccgcagcactgcatgaagagggggcagaacgcagtcagcgtgtggcttcaccaagctgcactgtgccttgtcttctcgtcacagcctcggtccatttcttcccaccttctactcccaggtaagaggcatgagcaaatcacttagcttctgcctcctaggtagtttctaaaaaagccaccgttcctgcaggcatgccaaaactttgttctcccctgtttgtctttttttgggggtggggggcgtaatttgagatcttcttcaagggggtttcctatttgcaaaaatctacaagaagtagcattattttccggaagtaagtatt

SEQ ID NO: 432845 - DNA, 867 bp, Homo Sapiens
  misc_feature (455)..(455): n is a, c, g, or t
agcggaggagtccccaccctctcatgtaggtgagaggcggctgaagagttgctgtattctgggaatgggcagggtcactcgtccgaacagagtcctatcctacgcggcggaagagtgtgccctttgacttgcatcgtctacctacctctgccatcctctaccagccgcaactgcgagggctggagccaacttcaggactgattgatcatgacttctataaaggagcaggcagcaattagcaggctcttaagttttttacaggagtgggacaacgctggcaaagtcgcaaggagtcacatcctcgacaagttcattgaaaccaaccaaggcaagactgcccctgaactggagcaggagttttcccagggagccagtttgttcctggtacgcttgaccacctcgcttagaatcacctatatgactgactcatgtttagaaaagcttctcaggtccantggcatcttcttatcagctgtaagcagtaatcggtaccttatagaatttcttgaggttggaggtgtcctaaccctcttggaaatacttgggctagagaagatcaaggaggaggccaagaaggaatctgtcaaactacttcaggttattgcgaactctggcaggacatacaaggaactcatttgtgaaagctatggtgtacgatccatagcagaatttgtggcaaagtctaagtcagaagagacccaggaggaagtgcaggttctgttggattctttggtccacggcaatcccaagtaccaaaatcaagtgtataaaggtctaatagctttgctgccctgcgagtccccaaaagccagcagctgtccctgcagactctcaggactggccagccaatccatgggacacacaccc

SEQ ID NO: 432846 - DNA, 1384 bp, Homo Sapiens
  misc_feature (57)..(57): n is a, c, g, or t
  misc_feature (112)..(112): n is a, c, g, or t
ggtttcagcaagcccaagaggcccctgaagcagcgcctggcgcacatggtaaccganccaggtctttgatcaactcgagggctcaatacggactttcccaggtgcattcgtnccagcactttcaggcaggcagtccacgatgctggggtgtgtgtccccaatgattggctgggcagtcctgagagtctgcagggacagctgctgggcttttggggactcgcaggccagcaaagctattagacctttatacacttgattttgtacttggggattgccgtggaccaaagaatccaacagaacctgcactccctcctgggtctcttctgacttagactttgccaaaaattctgctatggatcgtacaccatagctttcacaaatgagttccttgtatgtcctgccagagttcgcaataacctgaagtagtttgacagattccttcttggcctcctccttgatcttctctagcccaagtatttccaagagggttaggacacctccaacctcaagaaattctataaggtaccgattactgcttacagctgataagaagatgccaatggacctgagaagcttttctaaacatgagtcagtcatatagttgattttaagcgaggtggtcaaagcgttaccaggaacaaaactggctccgctggggaaaacttcctgctccagttcaggggcagtcttgcccttggttggtttcaatgaacttgtcgaggatgtgactccttgcgactttgccagcgttgtcccactcctgtaaaaaacttaagagcctgctaattgctgcctgctcctttatagaagtcatgatcaatcagtcctgaagttggctctactactccccagaggacatgggatgcgtgcttccagaagggcgtccacgcagcctccaggatggagataaccacgaaatctagctggccttaagaaccaggtgaatgactgcggaccaacctcatttctgaccttcagtggtaatttgtgctttcaagcattaagcctcttagaggtcaaactggctgaattgactggtttcttgttggtaagctccccttgttggcagttgcttgcaatttcctctgcttcaagccggttagcctccctgcacctgccttctgccttccaaatatttgttgaattctttcatctcctgttgcctccttccatgaacttttgtgactgaatgcttttttatatttcttcagcggggttatgtcactccagccctcgcagttgcggctggtagaggatggcagaggtaggtagacgatgcaagtcaaagggcacactcttccgccgcgtaggataggactctgttcggacgagtgacctgcccattcccagaatacagcaactcttcagccgcctctcacctaca

SEQ ID NO: 432847 - DNA, 801 bp, Homo Sapiens
ctgcttccagtttaagaagttcttcctaaagggagtaggatcaggaagataatcacattttctaaatatgtttcaatcacattttaatctataattccacatatagtttctacatcaagtcgtcatcctgttgcattaattttaaagagcatgcttctagtgtataaggttgaaaagcattcttccccttatagattactaaagatttattattaatgggtatactgattttctttagtcttactttttatttatcctttttaagtcatcaacaaactttttctgagtatttgattacctttctttcaaaccgtacagtatctcctggatttgtttctctttttatttaggtactttctccaaaagtgattttagtttgtatggaaaatcttctgatgctttgatggtacatattcttattaatgccctcacattagaataactattttcagaacataaaattgtaggttcaaagtttttttcaggttcaatttcacattcttgagctaggcatggtactgatggttttcaccataacatacaccaatgtccttttgtctgtgggctcccatccagcctggtggctgaagtcatctacaggtaagattgaccaaacctctgaacaggactgaaaaaaatgttatcttcagaaaaccagccctcttgtacactgctgctgtgaatacaaattgattaacttttctggatggcaatctagcaatgcagatcaaacatttaaaaatacatatatatctcgacacaattttatctccaggcatccacatgaaaggaactccacaa

SEQ ID NO: 432848 - DNA, 1434 bp, Homo Sapiens
  misc_feature (404)..(516): n is a, c, g, or t
  misc_feature (534)..(580): n is a, c, g, or t
atcagagtgggaatacgggacgacagttcaacgggaggaggaagggggcgggggaataagcggagggaggctatggcggataatgagtaccaggcggatatttcgggggagccatcgggataaggggcggtagcgggcgttagggcaagaaccggggtggaaaggcgatcagaaggggggcggcgggagaaaatgtgaggaggcaggtgggcggcgtgagtgcaccgcgagatgtgcgtgtggtggggacagcggaagaatgggggggagatagacgagagcggcggggttaattgaaggagctagggggtgcgggcagcacatagcttgcggcgcgcgtcacggtatggcggtcgataccgggcgactaaattatttcgcggagtatgtggattgggaaagannnnnnnnnnnnnnnnnnnnnnnnnnnnnnnnnnnnnnnnnnnnnnnnnnnnnnnnnnnnnnnnnnnnnnnnnnnnnnnnnnnnnnnnnnnnnnnnnnnnnnnnnnnnnnnnnattcatttcattgtagcnnnnnnnnnnnnnnnnnnnnnnnnnnnnnnnnnnnnnnnnnnnnnnncggaatgggaaagggagcggggaaagaatgggcgggccacagtgcgcgcgcgctttgggcactgaggagacagcggcggctaacagaccctgagggcattcggggggcacttgttgtagatgatctcgccagcagctgcattcttccacgtcatcagcatcacgtactcatccctgcacatctcatggaaggctggacacctcttctcactacaaggcttcacctcctctccggtgccctcgcaggggtagccctgcgtgcccgtggcctggcacatgcggaagcggcgctgccagcctgtgtcacacgtcttagagcacaggctccacgcattccatggcccccacttgctatcagtggccgggcactcgaggttgctgcactcccgggtgtcagtgagggcacccgtgcatgtggcccaggctgggcccgccacgctgcacttccggctgcgctgttgggtcccattggcacaggacgtggagcatgggccccagggaccccattctaaccactggccttccaccgggcaggcagccatactgcagagcttagtctgcagctcaggaccctcgcaggccttgccgccgtgctgggggggcacgcaggtccgcatccggctccgggacccccgcccgcagctgcgggagcacaggctccaggacccccactcctcccacacgccgtgcactgtctgcgccatgtatagcccaggctcatctgcagacctcggccactgggttttcactttcggttcctcttccggctcctcaccatatctcatctcggttgtgaacagatcattgctgctccccgagtgcaaatcggcctcagcaggtggggctgggcccccg

SEQ ID NO: 432849 - DNA, 554 bp, Homo Sapiens
ctgctttcacgtgacttttatcaccatacaatttgtggcatttcctcattttctacattgtagaatcaagagtgtaaataaatgtatatcgatgtcttcaagaatatatcattcctttttcactagaacccattcaaaatataagtcaagaatcttaatatcaacaaatatatcaagcaaactgggaaggcagaataactaccataatttagtataagtacccaaagttttataaatcaaaagccctaatgataaccatttttagaattcaatcatcactgtaggaatcagagtctgtaattcttttcttgattagagtggtaggacactgtaatactgttcctccatgtttccatggcatacaatgttatgtgttactctacactgtaaatgcagtattcaaattcacttgagccgtgggcctggaagttagagactagcttttaccttattactttcaatgattttatctgagttaagctgataaatctcttcgcggctgaatccaaattcttcaagtatctcctcagtgtgttctcctatgaaaggatccc

SEQ ID NO: 432850 - DNA, 418 bp, Homo Sapiens
acttctaccatagaggaaaaatgactatgtatatcaacttggctttttaagattcagctcagcaatccaaaaataatttataattccaattagagatcttaaagataggtctccagaggttttacttcttaccgaaaaatattgtcaaaggtaattccttcttagattcagatcttcttgtggattcagatacaaatgtctatggacattaccatgttgtcatggtaattatgagctttgtacctctcaaaatgactacaatctggagttagaaaattttgtatacctcatatatgttatgagaaatgaactattgttgccacatgttatggcagatcattcaaagctatctgttgtattatcacagtttaaaaaatatcctgataccacacatactaagtacatgtatacatagatc

SEQ ID NO: 432851 - DNA, 1723 bp, Homo Sapiens
  misc_feature (102)..(102): n is a, c, g, or t
  misc_feature (127)..(127): n is a, c, g, or t
  misc_feature (145)..(145): n is a, c, g, or t
  misc_feature (732)..(773): n is a, c, g, or t
agggggcctcccctcactgaggggcaagacttggatttgggcctattgcctccctcctacctgcccctcttgtgtgtccaaggtcccatcagtcagcagagnctggttccagtaatccggttcaaanagggccaagtgggccggnagctggtgggtcggccgggggtgcagggggttgggcagcagcctcaaaggtgaagaaggggctctgggttgggccaggtgaggccaaggcctccagcgaggcgaggctggtataggaggtgcctttggcccggtgtgactccaggatggcttcgaacacacaactgaaagagtcaggcccatcagccgaggggctcgtcccaggtagaaagggcacaggtgacttgagaggcatccggctccctggccgggccccttcagaggcctcaaacacctcgtcgtccacatcttcttccccacctgcctcatcgtcgtcctcatcctcattgccactgccgaggctgggatgagggccagggagtgggccgggccgtggggcaggtgggtaggcagtgcctggtgggccctcagagctgggctgactttcgatggccgagtcggcctcctcccgctcagccagcacctcatcgatgtcagtctcgcggtagcacctcaggggcaccgtgtccaggtctgtctcggaatacttggctgctcgccccacagccaccccagagccctgccttgagcccaccccaggtggagatnnnnnnnnnnnnnnnnnnnnnnnnnnnnnnnnnnnnnnnnnntccaaggagccatagaagaattcccatttggctctagcgattctctgggcatgagaggagacttccccgggggaggaccaggtatcccccctggttcaggaatccagtgtcagcaggtcctccgaagagtgtggccaggcgctcagggggccccccagcccattggggagagaggagtaaaggccatctgctccaacctggggtggggctggcggcccatgtacaaggttccggctgccaggtagggccgagcctcctctggcggggagtgggtctgatgtggatgcttccagccgtaacttccggttggagccaggcccaagggctggggtgggcctgggaggagaaaccccacccagatcccagctccgactcaagccccctggagcaggtagcccattcagtggcctcacactggccttctccacaaagcggaagatgaccacagagctctgggccccgggtgggggctgcccagtgggtgaagagggtgcccagggtgagggagcaacacggggtgagggggggccacgcagaggtgtacagggtgctgtcacacgtcccagttcccggcctcgaggacctggacctgccactgcgccgtaagcaaggagcctgtgctgccatacatgctggctggggggctctggggcaccgggccttcggggagccagcggcgtgggcatcgtggtggggagatggcacagtcgccttccgagcagaagcgcatgggaccctgggccatgctggggccgggggtcaggttgggggttttgggatggcgaggccaggcggggagtaagggggctgcatgctcttcagacaggccgctgctcgcccagagctgagaccgaggagagacagaggagaggctgggcccagctgagcgcggggaggggcggcgcggactccgcgtggtgctgaaggggacagcgccagatttgtcgcac

SEQ ID NO: 432852 - DNA, 864 bp, Homo Sapiens
  misc_feature (669)..(709): n is a, c, g, or t
ccatttcccacaaaaatgattgttttgagatcttaccatctcctggcttgtcgcagagtacaggaaatcaagacaaagtacagcacacaaggaataaggagggagggaagcgtgggggagcctgacactgtggactctcccagctcagtcgacccatgcgccttgcttcatggaagaaaggaatggaagatgagtcatgccttcagcacacagtgaccttcctcactagtaaatgtgcctctagaagtgtccaagaactcactgccagagccaggctgcctgcattagaatcacctgagagcttttgcaaacataggcccctactgggtccaaatgcattcatctcttggagaggaggagagaggcagaacaaggaaaaggatgggaagaaaccagccttgtgcacaggaggatgctgggattcctcctgcacgtttagtgcgatgcagcctattttacaaggtcacagaagctcagagaggtaaacctgcccaggttctcctagtttgtaactggcaaaacctgcccaagtctctgtctctagagatatttccacttgcttcaactctggagctgtcttagttgtaaagatgagagattccactcatcattcacttttgtttgcagatattgcctaaggtaccttgtgaatatttaggtcagggctgnnnnnnnnnnnnnnnnnnnnnnnnnnnnnnnnnnnnnnnnncgaagcagtcttgtggatagaacccaaagtggctccgccatttaagaccctgtaaacagggagaccagagtctggagtcctggtctggtttccacaccttccttagatttccctgtgtgtaaaatccaactacatcttgacacttgcatccgagg

SEQ ID NO: 432853 - DNA, 498 bp, Homo Sapiens
  misc_feature (289)..(329): n is a, c, g, or t
aaggatgggaagaaaccagccctgtgcacaggaggatcctgggattcctcctgcacgtttagtgcaatgcagcctattttacaaggtcacagaagctcagagaggtaaacctgcccaggttctcatagtttgtaactggcaaaacctgcccaaatctctgtctagagatatttccacttgcttcaactctggagctgtcttagttgtaaagatgagagattccactcatcattcacttttgtttgcagatattgcctaaggtaccttgtgaatatttaggtcagggctnnnnnnnnnnnnnnnnnnnnnnnnnnnnnnnnnnnnnnnnnacaaagcaatcttgtggatagaacccaaagtggctccgccattttaagactctgtaaacagggagaccagagtctggagtcctggtctggtttccacactttccttagatttccctgtgtgtaaaatccaacaataatcttgacacttgcatccagagggtaccgagct

SEQ ID NO: 432854 - DNA, 672 bp, Homo Sapiens
ctctttcaacaccaaagttcacatggcagcacccgctcccctctgctctagcaactggaatacgaatgtagccacaaaacatacaggaagttttcagattcacaggaataaatgtcacggggggagatgccaagatgcaggatgcacagagacaaggagtggagagggagctgaacgtccagggaaaagcgctttccatgcggcacctccagggagcagggagaggaagcgcatcaaaaactgcatgcaccatgtaaaagtccacttcctgattcaacaaggaagacaagtaagaaaatctttacaagtggacaaatgctagcggtgtggcaattgggggtcccagtaacgcaacccacacacactttaagaagtatctgtcccatggtgggttgtgacagcttgaaatctatgctgtttgggcatatgcccagctaaaatgcagatggacacatcttgaaccaccacaagataatcaacagatatctgttgaatgaaaacctatgggaaaagtaggagaaggagaaagtgatgtgtagtattaaacatctgtgaatccgaaaacattcttgtggcaatccacgcaaaaagcaacgatcgttgtgcccatttttcttatggatgccaaaatcagcttccttgtaactttaactcattttccccacgcgtccg

SEQ ID NO: 432855 - DNA, 2086 bp, Homo Sapiens
  misc_feature (774)..(774): n is a, c, g, or t
  misc_feature (1581)..(1599): n is a, c, g, or t
aagcatgtaattgtatatttatttctctttttaaagaacactccttaatgtaattcaatatacaaacttggtttcacagaattataatccactatatagcacaaagataacccagattgtatgtgtgcgtgcacaatgttgcgtgcctgtgcacatgttgctgcacccctccctctctttcactcttctggacctacaaatgctcttcccaccttcaacactaaccaaaagccattgtgagtattacatacaacagacatcctcccacgagttctttgcccttgaaagattcttttccccattccccctgagatagccaggagtgtgacactcttcccctatgaaaaagggtaaggtgacctcccctaacacagatgttaaccctgttcccatgtaaaccggctgacaggaagagctggggagcaggtctccatccccttttcccccttccacacccaaccctcagagtccaagtgcgaccctctgtgtagccttagttccagtcaccatcctgtgtagcaagaactaaggagattgctaagcccaggtcttctccatgagcagcgcacagcactgcctgccaagccaccgggccggccgataaccaagctctacacagtcccatgtgctttgtcaccttaattttttaaagacacctagcataggtctgtggcaacctagtgtccaactgagttacataaaattgtaccagtgatgcacttgtacatatttacatggggtggaatgttttcccatatttttagatgagtatanagatcaacatgttcacataagaccaaatacttttaatattatttataactgatttataaagctttgaaaaaactcacaatagcacattgtttactttaatgctttacggtactatcattttaaaatcacaatcagcacttaagttatagtcaatccagcaaacaagagacaaaaaaatatacaagagttaagaactgactgatacatcctttatctttttttaactaatgcataagtgcagaataagatactctagtttaaatatcttgtttacaatgtacatttttgttctagttacgcaacagtaaatcccatgcttcacatagaaaagcaatccacaacattaagaaaaaatgtacaatttatgaaacaaagtaaataaatattagtattacagaatcagagctgtacataaaagctgttcagttttaatcatataaaaatatgttttagtgcaacctcacatatatattgatgctgttttgctttacatcatttagatccaagtgtccaaaaaaggaaagaaattacatttattacaaagcagatacacaaattctaaaatatgtacaaattactgctaaaaaatgcttataagaatataagcaaagtaaagaaaaggcacaaacatctgtacaattttaaaagtaccagacccaataggttaatttcaaattttgttttggtcaggctcatgatgacttgttaatttacctaattcttttgatataacaaaagtatatataatagcaaactactgtaacttaggacaggcatgctataaactggattacctccatttctagnnnnnnnnnnnnnnnnnnntgggaaaatgtggaaatgaaagtctccatgcatcatagatcaatgtagctgactcttttctgatgaaggatctttgctttccctctgtgcttgaagataattccttgctgctgtgaaagtccaactgcttgtcatccacacaactcttgctgtaaaacgtggagtgagctaatggagtctgtgatgtaccaaaattgtccttttcaccatcatgcaagtcagggtgggtggctgaggtacagggctgacctggctcaggtctactaaagtgtctaatgctaacatgtgcacttcccagggggttctggtggggctcctgcacccgcgctggctgatctggcccgagcagagctgcctcttccgtggcaatccggagagaggcaatggcttttgtacaagtctgtatattttcctcctgttcccgctctgttgcgtttaggctgtcttccgaagtgctctgtttcatctggcacgaagtgtgacgagg

SEQ ID NO: 432856 - DNA, 495 bp, Homo Sapiens
aagcatgtaattgtatatttatttctctttttaaagaacactccttaatgtaattcaatatacaaacttggtttcacagaattataatccactatatagcacaaagataacccagattgtatgtgtgcgtgccaatgttgcgtgcctgtgcacatgttgctgcacccctccctctctttcactcttctggacctacaaatgctcttcccaccttcaacactaaccaaaagccattgtgagtattacatacaacagacatcctcccacgagttctttgcccttggaaggattcttttccccattccccctgaggatagccggggagtgtggacactcttcccctatggaaaaaggggtaggggtggaccttccccttaacacaggtggttaaccctgtttcccatgttaaaccggttgacggggaggaggtggggggagcggggttttccatcccttttttccccctttccacacccaaccttaggggttccagtg

SEQ ID NO: 432857 - DNA, 1320 bp, Homo Sapiens
  misc_feature (724)..(783): n is a, c, g, or t
cttggcctcccagaagtgcatccacagggacctggctgcccgcaatgtgctggtgaccgaggacaacgtgatgaagatcgcagacttcgggctggcccgggacgtgcacaacctcgactactacaagaagacaaccaacggccggctgcccgtgaagtggatggcgcctgaggccttgtttgaccgagtctacactcaccagagtgacgtctggtcctttggggtcctgctctgggagatcttcacgctggggggctccccgtaccccggcatccctgtggaggagctcttcaagctgctgaaggtgggccaccgcatggacaagcccgccaactgcacacacgacctgtacatgatcatgcgggagtgctggcatgccgcgccctcccagaggcccacctttaagcagctggtggaggacctggaccgtgtccttaccgtgacgtccaccgacgagtacctggacctgtcggcgcctttcgagcagtactccccgggtggcctaggacacccccagctccagctcctcaggggacgactccgtgtttgcccacgacctgctgcccccgtgcccacccagcagtgggggctcgcggacgtgaagggccactggtccccaacaatgtgaggggtccctagcagcccaccctgctgctggtgcacagccactccccggcatgagactcagtgcagatggagagacagctacacagagctttggtcnnnnnnnnnnnnnnnnnnnnnnnnnnnnnnnnnnnnnnnnnnnnnnnnnnnnnnnnnnnncgcatcttgcctccaggtgcagaggtaccctgggtgtccccgtgctgtgcaacggtctcctgactggtgctgcagcaccgaggggcctttgttctggggggacccagtgcagaatgtaagtgggcccacccggtggggtaccccccgtggggcagggagctgggcccgacatggctccggctctgcctttgcacacgggacatcaccagggtggggctcggcccctccacaccaagtgagcctgagggaagccccacatgtcagcatcttgtgcctgaggtgttagggggcaccgctccccactcagggttccattaccacctgccctagagactgattacggtactggaaatggacctaccctaaatgcaaaggtattcgacaggtcatccatcaagcggggataggatatactatattcacaatgaagaaggacgagacaaacaaggacaagaccaacagatgaaaagaccgcccaaaagagattcacacaaacattaataatgtatcccatagtaataataccacacacccatt

SEQ ID NO: 432858 - DNA, 1491 bp, Homo Sapiens
  misc_feature (80)..(92): n is a, c, g, or t
cccgggatggggccccgggctgtggttttcaccgggggcaagggtttgaccagctcggtgaaccccccccaggggatctnnnnnnnnnnnnnccttgaaatttctggcaagttggtggtgaatgggccccctccagggaagcatcccggggaaacccgcctagggccgggttccgtgccctgggcgcaaagggggaaaaggcccggggaagggtggggaatccctccaaggttagaaggggcttgtttaatccccccctggctggctggttttgggaagtttcccccaggcttctttgggagttcccttggtccccctactagggttcagggtctggtttagggtcaacagctgcaccactgggaaactgcccatcattcacgttctccacactgtacactgggttggaggggaactcaggctgtcatagaccagccgcacgtggccctggtacagctccagtgccagggggtcattgtctcctttgtagagaaggatgccgttgtccttgtcagtggccacctgcagggagatgttggcctggggtcggaccttggcggaggccagttccacgtaggagtctttgcccacgaagttgacagtgatgagcttctcgcatctggggccggcgaagcctggtgggcagcggcaggtgggctcctgctgcaccacgatgcactgggccccgttctggcactcgtactggtcgcatgggctggtctgcagtaggaccatgggtggggggtgttcacagaagggtccactgaagccctgggggcaggtgcatgtgtagccattgattgtgtccacgcactgggccccgtggcggcacttgtgggccacacagtcatcattgtctgtctcacagagcttcccgctgtagccagggacacactcgcagctgaatcctttgtccagggggatgcacttggcctcatgctgacagaggttcagctcaggcacacagtggtcaatcacctcgtcgcatagctcacctgtgtagttaggcggacagatacacacgtagttgttgatcccgtccacgcaggtggcattgttttcgcagtcgttgtcctcacagtcatctgggttgatctcacaccgctgcccctcaaagcccagagggcaggagcagctgaacccatccttgtggctgtcactcaggtggcaggtgcctccatgctgacaggggttctggatgcaggtgttgatgggcacagtgcagtccttgcccttgtagctgtaggggcaggcacagcggtacagctccacagggtcctgggtgcatgtcccgttattcttgcacgggctggagaggcaggcattgcatttggccacaatgttgatgtccactggccctttgcactggaagcggtgggttggggtggtgagcaggagcctgtcagccatgggctcagggctactgcagcgggcgatgccaggctccttgtaccccgccttcacccactccgacagccaccgaagactgca

SEQ ID NO: 432859 - DNA, 1129 bp, Homo Sapiens
  misc_feature (1039)..(1039): n is a, c, g, or t
  misc_feature (1115)..(1115): n is a, c, g, or t
tatacggtctaaggtacgaggcctgggtgtcgaattcggcacgagggtggcctcaaggagctgcaggtggggggctcagcctgcacccacttggagcccctgcaaggagcgaaaccggtcagcaccaagtaacaccacacacacgcagcacccaggatgatggtttcacttcagtcttccccatcccaggttttatgttgctgggcttccggagagccggtccaagcggaggctttcagtgatttaagtacaaacatgcatctcgtgatagtcctgccttgagagcttaggaatcttccggataagtatgaagcaattcgtaggcctgtttcccatctgattccatagggggctgggtgtggccttcgggttgacatgagaaaggtctttagcaatcatttctgcaccggagatgagttttatcctgtgttggggagaggtgctcaccctccaccctgtgtccctgttttggtagcaagagtgaccgatgtcaagaacgagcatcaaagccagaatcctgcttgtttgcttaaaaatgtaattgggggcggcgggggaggagaggggaaagagacattcgcttggtttagtgaaacgcaggtgactttgtagctctgtggtcagcctacttgtctgctctgagggagagtgcgtggggagccatgctcaccgtggcaaacacaggaaccccatgactcgcccctcacctggcgtggagctgcctggtttgggctggagcagagctggtttcctggaatgttcctttggcccacatatggttctgtcccggtgagctctgttgtcagaggctccacgggacagaaaccacatgctagggtctagggcccttgtctactgatagtcagtttgctgtgtcagaaagcacttcctgaaagcagatatgagtcaccaggacaggcaggatcttacaaaactcacgggcctctttggtctgcatgatggcccatgcgtttcataggctgtcactgagcgggattgtctgctgagtgggatgagcaactccagtttcttaaggaancactggaatctgcagccccacatgcatctgtctacgcatgctcgtgttcgtttgcaacatgctgtggtggaggtgncagtgtagcctgtg

SEQ ID NO: 432860 - DNA, 1839 bp, Homo Sapiens
tttttttctgctcggtgccattttatttaatgcaaacactagacagtttacaagtcacacctggacacaagcacgtgaacagatgtacagggaattctggaattttgagatcagtccccatttcttcctcagggccctggcactgaaccccagcccctgtcccagagcctcccctctgggtcccaccccagaagccacgcacacctccttccgcccagctttatctttccttgagctgtgacttcacccagcatgtgctcagagttgttacaaattttctctgccaaattaagctgatagagattggccactttcaaccagtcctttcagtccactgtgtctcccctctcgcttgggacaggcccatgctggccagtgcaaccttcagatagacacatggtgaccagagcccgccaggcttctgcaggtggcagtgtcgagcaagtgtaagatgtctgtgggaaggagaagctcctgaaatgaacgttctgcaaacagaaggctgaggggtcttccaggcatgtccagtcactaggagctgccaccggtgggcttgagtgccaggctctaggctttgtgcagaaagcacccggggcggggggcggtaagggagagcaaaatgggtctctctcaactgcagtcagtgctcctgggaacacggtctcacagacagcacatattctacgtcacagctctagggtttcaaggacttagccatccgacaggcctcaccataaaggtaaagtggacaacccctgaggtcacgctgtccaggtggcgacaggccacgcatgccaaaatcctccatagccacctccggcccagcaccagccagagggtggggccatcggttctcgacatacttggtatcagggagggacaagcctgacaaagttcacaatctggccaatgagtgtgggaggccctggaaacaggccaatcctgcaagccaccccacccttactaacttcctgaagcatgggaagcttctcgagaccaggccaaggtttctttccttcatggcaccacgcagaggcatttctgcagtgctgcaggtcccccttcagccacacagtccaggtctgtcagggattaaagggccgagcaggaaaaggggtggtaaggagctcaagggcacgcactgggaatggcctcacaaggcagccttgagacgcacagggctacaactgaccaccctccaccacaggcatgtttgcaaaacgaacacgaggcatgcgttagacagatgcatgtgggggctgcagattccagtggtttccttaagaaactggagttggctcatcccactcagcagacaatcccgctcagtggacagcctatgaaacgcatggggccatcatgcagaccaaagaggcccgtgagttttgtaagatcctgcctgtctggtgactcatatctgctttcagaagtgctttctgacacagcaaactgactatcagtagacaggggccctagaccctagcatgtggttctgtcccgtgagcctctgacaacagagctcaccgggacagaaccatatgtgggccaaaggaacattccaggaaaccagctctgctccagcccaaaccaggcagctccacgccaggtgaggggcgagtcatggggttcctgtgtttgccacggtgagcatggctccccacgcactctccctcagagcagacaagtaggctgaccacagagctacaaagtcacctgcgtttcactaaaccaagcgaatgtctctttcccctctcctcccccggaggagcacagttagcgcgagagcgcccgaaggggaggccgaggaggagcgggaggaggagccccgccgcctctgca

SEQ ID NO: 432861 - DNA, 848 bp, Homo Sapiens
agcggggggctcctcctcccgctcctcctcggcctccccttcgggcgctctcgcgctaactgtgctcctccggggccctccgcctgctcccagccatggtggcctggcgctcggcgttccttgtctgcctcgctttctccttggccaccctggtccagcgaggatctggggactttgatgattttaacctggaggatgcagtgaaagaaacttcctcagtaaagcagccatgggaccacaccaccaccaccacaaccaataggccaggaaccaccagagctccggcaaaacctccaggtagtggattggacttggctgatgctttggatgatcaagatgatggccgcaggaaaccgggtataggaggaagagagagatggaaccatgtaaccaccacgaccaagaggccagtaaccaccagagctccagcaaatactttaggaaatgattttgacttggctgatgccctggatgatcgaaatgatcgagatgatggccgcaggaaaccaattgctggaggaggaggttttcagacaaggatcttgaagacatagtagggggtggagaatacaaacctgacaagggtaaaggtgatggccggtacggcagcaatgacgaccctggatctggcatggtggcagagcctggcaccattgccggggtggccagcgccctggccatggccctcatcggtgccgtctccagctacatctcctaccaagcagaaagaagttctgcgttcagcattcagcatgcagcagcaggtcaagagggtctcaacgcagactacgtgaagggagagaacctggaagccggggtatgtgaggaaccccaagtgaaatactcca

SEQ ID NO: 432862 - DNA, 1311 bp, Homo Sapiens
tacacataggctctggctccttgaggcactgtcaggagctgtctattggcagaaacctgccacaatgagccactccagtgtgcaggagtcacagtcccttgagttcaaactcttgtcccctaagcataaatgtcatcaggcctcagcatcatcttggcccccgcatcctgtgctcagtaaagctggaaggcaggctggctttgggagttggtggctcaagcagcttcccgaggctgggtgctggctttctatcagagctggctcttgaatttcggcaccaagtctcagcacgcttggggcagggcagaggaaccaaactcacaaacacccagagctcatccgggaaactcagaccaacaaggagccgatggcacagagcagcacagcagctgtggttccaaatgaaggggtggggggagccgggtgacaagcggtggcaccattgtgcatgcctgcagctggacagggccctcagatccgggctggttcgggcggcggcggcggctctgcagactgcgtgtgcaacgtggagtatttcacttggggttcctcacataccacggcttccaggttctctcccttcacgtagtctgcgttgagaccctgctgaatgctgaagcagaacttcttctgctggtaggagatgtagctggagacggcaccgatgagggccatggccagggcgctggccaccccggcaatggtgccaggctctgccaccatgccagatccagggtcgtcattgctgccgtaccggccatcacctttacccttgtcaggtttgtattctccaccccctactatgtcttcaagatccttgtctgaaaaacctcctcctccagcaattggtttcctgcggccatcatctcgatcatttcgatcatccagggcatcagccaagtcaaaatcatttcctaaagtatttgctggagctctggtggttactggcctcttggtcgtggtggttacatggttccatctctctcttcctcctatacccggtttcctgcggccatcatcattgatcatcacaaagcatcagccaagtccaatccactacctggaggttttgccggagcatctggtggttcctggcctattggttgtggtggtgtggtgtggtcccatggctgctttactgaggaagtttctttcacatgcatcctccaggttaaaatcatcaaagtccccagatcctcgctggaccagggtggccaaggagaaagcgaggcagacaaggaacagccgagcgccaaggccaccatggctgggagcaggcggaggccccggaggagcacagttagcgcgaga

SEQ ID NO: 432863 - DNA, 828 bp, Homo Sapiens
ggcggaccgcaacccagcaccccctctactcctgaccatggtactttcagccaggccaagttctttctcatgcaccaccagagcaattctgcagtcgccagtcccccttcagccacccagtccagtcctgtcagggattaaagggccgagcaggaaagggttgtaaaggagctcaagtgcacgcactgggaattgccttcacaaggcaagccttgagacagcacagggctacaactgaccaccctccaccacaggcatgtttgcaaaacgaacacgaggcatgcgttagtacagatgcatgtgggggctgcagattccagtggtttccttaagaaactggagttggctcatcccactcagcagacaatcccgctcagtggacagcctatgaaacgcatggggccatcatgcagaccaaagaggcccgtgagttttgtaagatcctgcctgtctggtgactcatatctgctttcagaagtgctttctgacacagcaaactgactatcagtagacaggggccctagaccctagcatgtggttctgtcccgtgagcctctgacaacagagctcaccgggacagaaccatatgtgggccaaaggaacattccaggaaaccagctctgctccagcccaaaccaggcagctccacgccaggtgaggggcgagtcatggggttcctgtgtttgccacggtgagcatggctccccacgcactctccctcagagcagacaagtaggcttgaccacagagctacaaagtcacctgcgatcttcactaaaccaagcctcgtgccgatataacaccgggcctcgtacctagcacatagct

SEQ ID NO: 432864 - DNA, 1319 bp, Homo Sapiens
  misc_feature (226)..(234): n is a, c, g, or t
  misc_feature (240)..(356): n is a, c, g, or t
cctaataatcttaaaataacctttatttttgatacaaaaataaagatgctaactacctttagctacagtttcccacaataacctttaaaatagcaacagattcagtctcaaaaattgcttttcatttgtagtggaaaatgaaagtggagaacatggaacagcaatatttgtgctcttctcataggatgcagttacacacacatatgactggaatcacttcagagtnnnnnnnnngtgggnnnnnnnnnnnnnnnnnnnnnnnnnnnnnnnnnnnnnnnnnnnnnnnnnnnnnnnnnnnnnnnnnnnnnnnnnnnnnnnnnnnnnnnnnnnnnnnnnnnnnnnnnnnnnnnnnnnnntgggcggggtgggggtggtgggcattgtaaaaaagcagttgttcttttagaaggcatcagagagccctctagtgaccacgaaggggagttaatgcagagatgactcgagacagagaagcagtcatgagtgtttacaaaggaaaaagtgagggagggaaagctcttttggttaacagcatatttacaattagttaactgtattcttaaatacttttaacctgagtaacatttataaatatgttataggaaacctcacagtcacaagtcacactagaatccatctgtccagtatctgtgctttccccacaccagaatccatctgtccagtatctgtgctttcccgagtcttcctctctcataagttcccaatgtcagcagagttgtgagcatgcaacaccaagaaaaacgcatcccagcccttcaggtgcactgtcaacaggagtggctagaaataggctccgctctctctcagctgctgcttagacaactctcttacattctggacataaaacacactggatatagaaccttcagcttctgcctctccagaccacttctcagctgttcaaagcttcaagcaataggtttactgtgcaccaagaggcttggaagagtggcaccactgcttgggggtcaggggcttcctaccttggcagaatgatgttagtatatactatgcagtggcaccagaggccctcccgggcatctgaggcatttagatcaatggcttgtccttggcccagaggtgatgcacactgtcataatactcagtgataaaagtccctgctgcattagtaagtcagttttgaagctctcctgttatagcaaggcctttcagtcagtgtggatgcagcatttctgaacagaaaattattttcacttatcatcagaaccagttccagctcctggaaatcttggagtcgagcaacatccttgtccttccttaacagagtattgggtacc

SEQ ID NO: 432865 - DNA, 1449 bp, Homo Sapiens
  misc_feature (28)..(28): n is a, c, g, or t
  misc_feature (36)..(36): n is a, c, g, or t
  misc_feature (72)..(72): n is a, c, g, or t
  misc_feature (83)..(83): n is a, c, g, or t
  misc_feature (187)..(228): n is a, c, g, or t
  misc_feature (877)..(894): n is a, c, g, or t
  misc_feature (1160)..(1197): n is a, c, g, or t
  misc_feature (1282)..(1282): n is a, c, g, or t
  misc_feature (1321)..(1321): n is a, c, g, or t
  misc_feature (1336)..(1336): n is a, c, g, or t
ccaaatgaacgaaaaaactccaatccanccaccccnctgaccttagttccaaaccgttaatgggggccccanttgcctgtaantggttgggaaaaagggtaacccaaaatataagtgaacagcctttccacaggaatctggcccatcctaaattggctcccacggccctttgaaaatttattgggtnnnnnnnnnnnnnnnnnnnnnnnnnnnnnnnnnnnnnnnnnnccatgtaattggactacatattttaaaaccaatagcaattttcctttccaatttctttatctcatttattatcttaagatgtatggatcctagattatcttctcctaattaatcctgtacttcttagcgatctagttactttattttctcccccttgcatcttgcctgggaaacagtgcatcactggttactaagactgaaattcataattcaaggaaaaaaaagtaaaccgtaagtcacattttaagtctcaattgtatcctggtttggactagagatggtgggatataagatttatcaacatcacagtgcatcaaacccgttaataaattactttctgtgtaacaagtaaaagaaatcatttctaaaatggaagcacgaaaggcatggcatagctggagtttaaggttcaagctttgtatcctctatatataatgtattatgtttttcaaaaactttttattaggaaagctataccagaggcataatcactatacaatgattaaacattacctttacaatttataatcactgaaattacagaataaatatatgcacatttcttttgaatctttgtgtgtgagagagaaaacattaaaagtgcttcctacaaagctgttagtgatatatacccagttgctttttttannnnnnnnnnnnnnnnnnagaaagtgcagatgttctccaaaaaatcttggcatcaggatgaagtgtcacaaagagggtgctcatccctaggcgtgtgtcttcggctgttaaaccaccaggcctctacttcagtagaatccagcctagaatgtgacttttcccagggtggtaggagagatgctgtgagctgtacactagcagtgaagggtggtagaactatggagaggagaaaaatggatcaaacccgaactaagcagattgagttgaatggaaatggtatggannnnnnnnnnnnnnnnnnnnnnnnnnnnnnnnnnnnnnccctgcaccagcagaagaaactgcaggtttagggaccatggtctgcagatggatatgtgtatgagagacaagatagtgagtgagnacattcgagcaagacccgccccctccctccccatcttgnagtttccaggcatgnagcaaactgcattgttaatacatgtacagaatctgtgccatgatgataagaaagaaagccacaaatgacaaatgtcaacttgtttcccccctttaaatcaaaactacaactat

SEQ ID NO: 432866 - DNA, 1928 bp, Homo Sapiens
taagaaaagctatatatttttatttattaaatagatttaattatatgtcttctgaaatacaaaagatagaataaatcatagcataaaagggaataagatatgataacatcatgatggccaattaatacacataaatcgactttttctggacagacaccaaattacttaagaggattaagagataacttcagaagcagcactacctggaagattatttggcatttaaatactgatttccaaagtgctagatgggcaagtccaagcaagcatttgtggtcacatgcacatacatctcaacagttacagatgatgagaaactgtcactagtacaatttgaaacaaattcacctactctaactgctcacctgaaatgatcttgaacaaaatctctagaagtgtggcttgcaatttttttcttcagacatattctgcctcattttatcatctaagcaggcaatcctatcaggtctgagtagggcaaggcattgtgtttcttacatgcagaacatggagtttttctatttggttccatcaactcccaagcatttcaggcccacggaggtgagagttccttcaatgctgacaggtttgctatttctaacctatcatcgacagccttcaaggggtcccgtcgaggcatcaagactgctgtctgtgtctgaggccagcgtctgctcagtggacatggatgaaatgtcattgatcgatgaagactgagaaggagtggcgttgctacttactgctgcatctgaaggctgatcttttacaacaccattcttgcttctttcttcccaatccatgacttctttgtaaattagctctttccattcttcaattgcatgttctctttcttccaactgggcatcataaatttgaggtggtggggcttctgcttcggcggggtcataccaaacagtgatgtatgggtgacgcagagcttcgtctacagagatccgcttgtcaggatcaatcactaacatttttgataacagatctctggcttgacttgtttttattttgtctcgctcagattctgatgggaatatccaatctggaaagagttcttcaaatttgattccaggatactttggtctgttttcgacataattcctcacagttggctgaagtttcttcatgaactctgctgatggtgttcccagctgctcaataactttattccactgatcaatatggtcagtgccttggaatatcacacaactttcaccagctctcccatgatgcaacccactgaccagatatcaacgttctctttgtagcccatacccaggatgacttcgggcgcccggtagtaccgtgtcaccacgtaaggggtcatcatgaagttagtgcacgctgtccgggccaggccaaagtcaaggatcttcagggtgcagtctgatttcacaacaatgttgctaggcttcaaatctctatgaattataccagctgaatgcagatgtttaataccacaaagcatctggtaaagaaggtaggacattctttcatgatccagctccatgtgaataacctgacataagttagcatccattaattccataaccaaatacacatcttgaaattcttctagagttttttgtggtgtaaacacatttaacaaactaattatatttttatgattgacacattttaagaggacaagttcacgataagctctctttgcatgagtttggttctgaaaaggacggcttagtttcttgactgcaacatttatcccaagaactgtatcaaatgcagcacaaacaatcccttgggccccagagccaattggtttcagctgctggtaacgttttaggacagtgaaggttgagtctgccacttgcacactataaaactgactgtcacatttactgtcgctcatgatgcagcgtcctgcaatatcccgaagggtgggcaagtttcagatccct

SEQ ID NO: 432867 - DNA, 1045 bp, Homo Sapiens
  misc_feature (95)..(95): n is a, c, g, or t
ccttgaagggtcccacgaacaacaattcagtaacctttggggcctgcctcaggttggacccaggctgtggactgtcctttgccctcggacagtgnctggctgtaatgtgatgggcgataggtggatctccctggtttttctctttgtcttgtcttaaggaaagctgaaaatctttcttttaatctgtaaagaatcatcaaacacgttactataataacaaagatgctgagaaaaatgacaacagcataaaatccttctttgctccagattttgtcccgcttcatgctgcccttgtaaaacatttttctcaggagagacttctgtaattccaaactgggataaactttgatgcaaaacattgatattaagtgaacgaagaacttcctcagagggcagagcatcagaaattcctgtttttcggtttatgggagacacaaacagttcaatactgttcttctttccaatgaggcgattgatgtgcacttgtggggtaagagtcctaaagctgcagccactccttggcggaagatccgaagcaaggttatgttcagcttgtttacatccatttgcagtgtcaccacaattacatttgctgctgggattgggagattttccacttcaagatcttgcccatccatggccagcagattgagagacgggtcatatgcgggtctaggaaatgctgaattgacaatctggtggcgtttgcttacttgagcttcggaagaggaatggtagctatgtctgtagattttttgtggggctatatccaggctcttctcaatgtcttgtgaatgcttataaatgaataccggcttcccactcttcttctgattaattgccaaaaaatgatcattgtttcctgaaaagcaccctgcagcgtgaagattaaggagcaggcacagcgcagggaagcagactgctctccgcatagtgtttgcattgagaggtggaggagaaactccaccacgaccccacttcaggtaaagtgctattagaaagagccaccgccaagggtcttctagtctccgggcccacgcgtccg

SEQ ID NO: 432868 - DNA, 1757 bp, Homo Sapiens
  misc_feature (1510)..(1551): n is a, c, g, or t
cctttttaaaaatcagtcgggcaaaagtttttccctacattctactgtctgatgagattggagagcagcaagaacttgctgtcagcagtcattttacaaaaacagctcaggaggtgggtggcacctacatcatgttgtggtgattgttcctgtcaataatgtccacaggtgaaaggatttccttccggatagcaggggcaggcagggagagcgtcgtcttagtcttgaagaggtcagacacgaagaaaactatgcagcaggccaccagggctccttgagcaaatcctgccagaacatcactgggatggtgcttgtggtctgatacgcgagacagtcccgtgtagaaggccatcatgatcaaggtgaactgcaggaggggccggagcaggcgggctcctcgccaagtgaagcgggcctgcaggtatagcaccaaatacagcatagtgtacatggagaaggaggcatggccagagaagaaggacttcctggcttcctggactttgctgtcatcacctctgcatctgtagttctgaatgtagccttcagagcagttgatctggctgaaatcagggttgcagacactcaagaagtgaggacgcaggcgccctatggacactttggcaatgtctgtgaaagactggctgatggcacagccaaagaggaagcagcccacttgcttatagagtgctgccacgtaggggttctgaatcgtcgaccgcgacttcttcaggtaatagatccggtagaattcccccgtgatgatcgcgaggatggcaatgacgatccccacggcacagagcacagcgtcatttattgtctcaccagttttcagtgggtacttgatgctctcatcattgcagtaaaaccctcggtggtaaggcttgatggtgcttgtctcgatgatgaggaaggggaggcccgccatgaagaggcagaagaggtcgaggcagatgagcagcacccgcttgctgccgctcctcctcgggttgttgttgagcgccgggctgccgccgttcttgctctccgggacgatcgctttgtcgtacttgtagttttgcatggcgctggctgcggcgcgagcctcccgccccgcgaagacgtcccgcaacagcagccacacacccaggcgcccgggtcgcctcctggccgaggctgctgcggatagtggcgggtcggccccggctccgggcgcggcggctagagtgcagccggggctgcctgcctccaactgcagaaggtggtgttttctgctcctcctgcgcgcctctgctttcctctgtcaaccctaaatcgttctaaagtccaaggggaagagagccagatcccgagcagaaacttttgcagagctgcgcagcttggggcgcgctgttgtggcgcgcgtctgagtgcgcgagcgagcgagtgggcagcgcgggcgctcggccaccttcctccgcagctggttccttaatgaatgggagctgcgctgagcccagcaactccggagcgccagccccaactctaactttgnnnnnnnnnnnnnnnnnnnnnnnnnnnnnnnnnnnnnnnnnngctgttggtgctgctgccgcggcggctgctgctgtgatcgcctgggtttgttttctgcacttttatttcacgaggtcttgaatactgaaggaatgacccttaactagatgaaagttcagcacaaaaataactggctattttctcaaaattgccagcgaggtagagtgattcctagatgatacttgtcagcaagaaagatgatctgg

SEQ ID NO: 432869 - DNA, 844 bp, Homo Sapiens
  misc_feature (720)..(751): n is a, c, g, or t
aagactattgtatcctccacttaacatctttatagcatcatgtaaaaagccaacattcaagtcttctttttggaaataggcacagtattaaacaactcaagtctttaccactttcccatccaactaatctgtatgccctatttcggttagacaaaaggcaatcttattaagagaactttcacttaaaaatgctaatgcatgaacttgtaattccgtttattttattctgaaatgagatggttttaaattttttattaaagctcaccagataaaagtctgaattgtacatggatctaggataagtcaataattaccaaggatgattttttaaaagtactataaggtatttaagctaataacgcacaacttctacacacattattttcttccaacaccacgacattatacgcaaaattaagtttcattaggtttttatctctccttccctgattcttcgtatactcgacagagaaaactttctaatattctgtaaaatggaaatcaagcttatctgtctcctagtcctgagacttctatatgtgcaatactgccacaatacgacaccgttaagagtcatttacgcttggttcatctcgacatcattacattacgatcgagttatctgttgcagactatccaaaacacgttctctttcagctacccccggccgtaatggcacgaattcccgggcatatgtcccggtaccgtcgacgtgatatnnnnnnnnnnnnnnnnnnnnnnnnnnnnnnnncggcctcttcctcgctcactgactcgctgcgctcgtcattcgtataagagagggccaatagaacaagtcttgcccttttgtttgttttttgtt

SEQ ID NO: 432870 - DNA, 1306 bp, Homo Sapiens
  misc_feature (220)..(220): n is a, c, g, or t
ggcctgtgtgctgagtgccagagctggagttttctagcttgtaaatctggagaattaactgatctgaagtgactgggaggggtgagcataaaagccggggaacaggactcccagtggtggtctggttttttttgtgagatgagatgagagctaccacctggaaatgctcattctctgcattcagcctgtctcacatacaggattgtatggccatttcagngttgggaaagatctacctgctgggagccagtctagtttcctgcaccacctggaacttccaaacccttcactccttcaacagaatgttgaggctgcctcatttgtgccaccaagtacgggaatcttaaagacagaaacagagctcatgaccttttatgggaaagagagaggaaaacaaaacaacttcacaacagcatggcaaggggggatgtggaaccaaggacatgatacaggcatgggaaaggagggcatgctcaattctagctggttctttcctttcagataaaaatgagcttttctagttggcatccggcactgcagaaaactaaaagtcatccagccatagctttttccttccctggaaagcctgagactagatcccaaagctcagaatgcctctgagaaccagaatcactcctttgagaggcgctccttgcaggaaaaagagaggctcccagagtggtagcctctcagtgaaaatgcatcctaaaaattcaatgtttataccaggctcatgacactaagatgtgacatctggacacgaggggtcagccacgtggatacatccctcccagattgcatctccaggaatcactctgctagcagaatgggcgccccatcccttactatgctgctcctcctcaaagtgcagcccagaaggacccaggcctttgatgcacattgggtgggtctcccactactttagttgaaatgggagcatgctggagtcggcgttctgttgcttctggtgagaaggacatcccattgacccctggccaccaggtccagtattccatccttccttctgtcccagcctatcgccctccccaccaggcccacccccacaacttctcctcaagggaggttgctcccgcagctggagggcttgcacagaccagcagtcacagaaatcattcttcctgctgtactgggccttaactgcctgcaaatgtccagcactactgcataggatgccagagccaccgaaaggaaaacacaagcccagtttaataataataaaaggaaaaatctcagcctgcagaactctggttttgacccaccattggccagatgcacatcttcaggg

SEQ ID NO: 432871 - DNA, 896 bp, Homo Sapiens
tgttaactgaatgacttatgcttaaaaaaaatatagtttaagattaccaaattaccgtttccagaagagataataccttaacaccaaaagttaccctacttaatgtgaacaatatgagtatcaatacaagcaccatgagtaaaccttaaaatttcaggtttttaaagcttacaaagggtgtaactaatgtatcaactccaacacttattcttattacagaatcaaagcttttagacattaagaggaacaagggaggatctgaactattttaggtttaaaagcccatgatcagggatattaattgcagccataaataaactgctgaggccaaataaacaactgcattcctataatcgctgccaaaaacactgcatacatcctcaaacattgagacaaaggatggcagacaggtttcaactctaattgttaagtggctgcctccaacagtatattgagactggggaacaatgtggggcaggtttcaactctaattgttacgtggctgcctccaacagtatattgagactggggaacaacgtggggcaggtttcaactctaattgttacgtggctgcctccaacagaatattgagactggggaacaacgtggggcttgatgtcaaagagaactcagaaggattataaaagcctgtcgtgggcacaagaatgtggtaccttgtgctactcttggcttcagcattaagctgacaaagacttcctactgcaatacctgactttcgtttctattatgaacacgatatttcactgttgtttctcatcaaaagcacctgatgtcaatgtaacaaaatacagagatcatgaaattcttttttgctatgtccgacaaatgaacaaccacgctctcgacgaattcgagctcggccgatttggcctgat

SEQ ID NO: 432872 - DNA, 815 bp, Homo Sapiens
  misc_feature (793)..(793): n is a, c, g, or t
caaaatactaaagtctcatttaattttcctgatcaacttatgttctaataattaatgtgaagggagaggaaagaaagagaaaccaattgagattctaaggtagtaaccagcagcaacttagcgggaataaggggaacatggttcctcactaaccaaataggactgataacgcttccaaaaaataaaatgttaggtgaagggaaatatggaaatatgttttactttctactaatagctgcaggcaggaaggtccaaacgcagggtttaactaagctgggggagtaggggagatgtttagagggaatactgaaagagaatcagtttcaaccataacccccatctactgtagagtatatccagaaatctagactactagtatggtatacatatgccctagaagcaacttaggtagtaaactcccatgaattgtttgtaatttatcttgtccctgggcagtttcttaggaggggtttcagaagcaagatctctacttccttcagaataataaggtagggaaggaagcctcaaaacaaagtggcaatttggaggcagagaaggaataaggtagtggtggggaggaaagggatagcaagcaggttcagttcaggaactaaaggcaaaatcttcatactcataccctgtttgagtccaagaggaagcaggaatgagagtaagggtggggcacataatccttattcaagttacctgatatttgaaaagaaggacacatgaacactagagttaatcttttagtgctactgaaatggctacacagttgatctgaaggcgttancgtgtgggatcctctagggtca

SEQ ID NO: 432873 - DNA, 2335 bp, Homo Sapiens
  misc_feature (1600)..(1629): n is a, c, g, or t
  misc_feature (1694)..(1757): n is a, c, g, or t
gccggtggatgggagtgaaggacggaagaggccctgcggaggcggcggtgcagcgctccggtggaatgaatcttacttgttgaatatcttctggttactagttggattcatttgtgaaagaatcattttcccctgtgtggaagacacttagtggcatatttaaattataagtccacggatcaaaaagctttttgatttcccaaaggagggacataccactatatcagataagcttgacattacagccaagatggtgctgtcccagagacaacgagatgaactaaatcgagctatagcagattatcttcgttcaaatggctatgaagaggcatattcagtttttaaaaaggaagctgaattagatgtgaatgaagaattagataaaaagtatgctggtcttttggaaaaaaaatggacatctgttattagattacaaaagaaggttatggaattagaatcaaagctaaatgaagcaaaagaagaatttacgtcaggtggacctcttggtcagaaacgagacccaaaagaatggattccccgtccgccagaaaaatatgcattgagtggtcacaggagtccagtcactcgagtcattttccatcctgtgttcagtgttatggtctctgcttcagaggatgctacaattaaggtgtgggattatgagactggagattttgaacgaactcttaaaggacatacagactctgtacaggacatttcattcgaccacagcggcaagcttctggcttcctgttctgcagatatgaccattaaactatgggattttcagggctttgaatgcatcagaaccatgcacggccatgaccacaatgtttcttcagtagccatcatgcccaatggagatcatatagtgtctgcctcaagggataaaactataaaaatgtgggaagtgcaaactggctactgtgtgaagacattcacaggacacagagaatgggtacgtatggtacggccaaatcaagatggcactctgatagccagctgttccaatgaccagactgtgcgtgtatgggtcgtagcaacaaaggaatgcaaggctgagctccgagagcatgagcatgtggtagaatgcatttcctgggctccagaaagctcatattcctccatctctgaagcaacaggatctgagactaaaaaaagtggtaaacctgggccattcttgctgtctggatccagagacaagactattaagatgtgggatgtcagtactggcatgtgccttatgaccctcgtgggtcatgataactgggtacgtggagttctgttccattctggggggaagtttattttgagttgtgctgatgacaagaccctacgcgtatgggattacaagaacaagcgatgcatgaagaccctcaatgcgcatgaacactttgttacctccttggatttccacaagacggcaccctatgtcgtcactggcagcgtagatcaaacagtaaaagtgtgggagtgccgttgattgtgtctccttcggcccctcctccctcttttcctctggatgcactctgatgataccatggttaccccattgagctctgtttaaataaatattgtcctttcatgtaaattaccaacnnnnnnnnnnnnnnnnnnnnnnnnnnnnnntatcccatccactaccccaaatatatatacccacatttacccccaccttctaccttttttacccnnnnnnnnnnnnnnnnnnnnnnnnnnnnnnnnnnnnnnnnnnnnnnnnnnnnnnnnnnnnnnnntccccctgccactcacttattattcttttttttccgccctatcccctgcttctcaccgtaaatcttcttatgtacccatttactttcccttagcgcgcttggcggtcgcccacttctcctatagttttttaataaaccggtcgcgctgcactgcccttctcctcctcactcataacacctcttccgttctcccgatgcacagcccccggccaattccttcctcaaacaacaaacattattaccccccggtgcgcggcgcacaaaccaccccctgtcacgtcgtcatccctccccttccccgtggtttgtcacttccgcgctgtcacccctcttccctactattttctgacccgcgcactttgaccactcgcttcgcccccgcgttctttatgcccaccaccttgtctcactgcgccgccctctctgctcttacttctctccattctcctgttatccgccgcgcctaacactctctctctcttaggcaccacccgacgcctctactatcacgtggcacacctctcttcttctcctcccaccgctcgtgtatttgctccccactacccctcgttgctacc

SEQ ID NO: 432874 - DNA, 1787 bp, Homo Sapiens
  misc_feature (220)..(220): n is a, c, g, or t
  misc_feature (226)..(226): n is a, c, g, or t
  misc_feature (228)..(231): n is a, c, g, or t
  misc_feature (236)..(238): n is a, c, g, or t
  misc_feature (240)..(240): n is a, c, g, or t
  misc_feature (244)..(249): n is a, c, g, or t
  misc_feature (346)..(346): n is a, c, g, or t
  misc_feature (368)..(368): n is a, c, g, or t
  misc_feature (590)..(649): n is a, c, g, or t
cgggccggtattgagggcggatgagttacgaagccggatgcagagggtagcgttaagccggggggtgggagcgcacatggtaaattcgggtgtgcgcatgtcgagttcgcggtcgtatcagagaatagcgcgagggggggcgatagttccgggtgtagctgaggtcggtggggggtggggagtatgtgcgtggtggagagtttgtgtgtgttttggtgtngcggtngnnnngtcgnnncnagtnnnnnnacgccagttcaagccgcgtgcacataagatcatactgacgcgcgcctcgagctctctcaaaggttgagtcatgcacgcgggaacgccctgcgcgtcncattcaggggggcatgaggcanccggcccgctggcgctgcagaggacccccgggtaccctggctctgcgagcagctcgcgatgagccggatgactgcaggttcctctggcccagcagcagcttgcgctcctccagcttgatcttctcctgcagctgcttctgctcctccgcctgcagcttctccagcttcttctgattccggcgcagctcacggtccctctgcttctgctccctcttgcgaagnnnnnnnnnnnnnnnnnnnnnnnnnnnnnnnnnnnnnnnnnnnnnnnnnnnnnnnnnnnngctcgctgcctctcctccgcttccttctctctgcgcttttgttcttctctttgctgctccagttcctgaagcttctgcctctccagctgccgcttcttaattgaggcatcactcaggtgtttggtcgaaatcaaaagaaaaccttgatgttgcaggccacggccttgccgtcctcgcccttgtacatgagtttcatcccgcgcagggcgctcatggcctggatgaagcccatgtactcgcggtactgcacataggcctcgaagttcaagtgccccccgaaactgaaggtgtggaagttgcggcccgtcatctcctcccggtaggggtccagcatggggatgtccacattccggatctccccgaacttctcaaacaccttgaccaggacgtcctcgctgggcttctcggagcccgactcctttcagggcgaaccacttgcagggcagcccctccaggtggatggtgtccggccgctcccccggcagggtctcgttcatgtccttggcgtcgcggaagaaggagtcccagtcgtggcgggtggggaagtcgatcttgaactcggccgcgcgcaccttcaggatgtcggagaagccgctgagcttgatggtcttgccgtccaggcaggccagaaaagacttgaccaggctcttgttctccacctccccctcgaagcggatgaagtccatggtgctcttggaaatacgcagcgtggagaactggtggttctgcaccatgcccttcagcctctccatcacctcccagttggagatggacttccccggctgcttcagctgcgggagtgccacgctgatggtcatcttggtgatgggcttcaggtacaagccgtaagcagggcagagctccacggcctcagacgtgtcgtgcacgatggtagccgctgccatagcctccgggaccttgggcctgcgcggggctccgcctgcgtcccaggccgccgccgccgctggcccaagctcccgccgtccctcgacgatccccggacaggcgcggcctcaccgccgggagccgccaccgtcccccggaggcgcctccgacgccgccaccgccgtcgccgcccgccctctatgacacatttccacttccggcgcgcgatccggagaattccggaccggtccac

SEQ ID NO: 432875 - DNA, 1345 bp, Homo Sapiens
  misc_feature (18)..(18): n is a, c, g, or t
acagttttttgcccgcgntctccgcgccgcggcgaaataaaaccaagccaatggggaaaaattttatttaattttatgcttcatatcatgtacattaagtactacataaacttgtctttaggctatcaatatttaacttgggcagtacttcatcttgatttatttggagaaatacagcttaggcatctgcttacctgcttaggcatcaagaggtgccaaattagaaaatagggcattaacaatcaaaatttttaagctgacccacatacttgctactggtttcgcttatgtttaagcatttaaagttggcaaaacatgttatcaatgtattatgcaagagtttacatcttttgcataagtggtccattgggttgcacctaccccttgaccaaacaaaaacaaaacatcactggcaccatactcgaaactacctgtatcctaggttataagattgtgaaagccaacaatctataaggttggagggactctagttaatctttgggcttagaggaggaaaaaaagatagtcccatactgcatttcacatctcttaaaaatagttttagcagcttaaacctttttagttataaaacttattacactagggtttactttgaaatatagtttacaaccaaatcaagtataacatacatacactggcactttagcacaagggcaaactttaaaaacaagttattttggacctttaaaattaggccatattataaaaaacagtccacggtcttacattcagcaaattcatactaaaatactccatttttgtaagataaaggccaagaaaactttacatatgctacaagtttattacagatatttacatggctctttctcccctaggtacttaaaattttcacattatccaactccccaaagcaagctttgcaggaatgatgaggcgagagcactattagaatagcttgtgcagtgctgtaatacaaaaatgtattttgaaagctattgagtgaccattaaatactgtttctataaaaaatggttttggtgtatttgttgacagacacttaatccactacatttaataaacagggccattggggtgtactatgtctcattctaatgagctccaaatgccctttccacccactgtacaattcactaaaatgcaattattacgaaaaattcacattttctttcagcagtgcatcaggttagcatattactggtttgggtgtttctaatatactaaaccttcagatgtttacctaattctgaatccttgtgttagctagaagcttataatccgattcaccaactttcaacaatctactggtccatgaatgataaattactgtcttcccctaacaata

SEQ ID NO: 432876 - DNA, 417 bp, Homo Sapiens
  misc_feature (183)..(183): n is a, c, g, or t
  misc_feature (259)..(259): n is a, c, g, or t
  misc_feature (287)..(287): n is a, c, g, or t
  misc_feature (300)..(300): n is a, c, g, or t
  misc_feature (321)..(321): n is a, c, g, or t
  misc_feature (327)..(327): n is a, c, g, or t
  misc_feature (371)..(371): n is a, c, g, or t
  misc_feature (379)..(379): n is a, c, g, or t
  misc_feature (397)..(397): n is a, c, g, or t
  misc_feature (402)..(402): n is a, c, g, or t
tttggggaaaaattttatttaattttatgcttcacattcatatcatgtacattaagtactacataaacttgtctttaggctatcaatatttaacttgggcagtacttcatcttgaatttatttggagaaatacagcttaggcatctgcttacctgcttaggcatcaagaggtgccaaattagnaaaatagggcattaacaatcaaaatttttaagactgaacccacatacttgactactggtttcgcttatgtttaagncatttaaagttgggcaaaacatgttatncaatgtattatgncaagaagtttacatcttttgncatagntgggtccattggggttggcacctaccccttgaaccaaacaaaancaaaacancacggggcaccatactcnaaacnacccgtatcccaggg

SEQ ID NO: 432877 - DNA, 928 bp, Homo Sapiens
  misc_feature (905)..(905): n is a, c, g, or t
tatttatttggtcaaaattttttattttgattttattaaatgggaagaaagcgagcagaaatagtaaaattcagtaggtttaaaacaatctataaatgtattttatttccaagaaaacttagggtctcaaagcaagattttaaagtgatttttgagaggacttgggggggacaataatagacattcatgtcagatcccatatgggggatttttaaacatttctttgaactttgaggcctgatttaggggtgggattttattgctttttgttttaaaggatgaaattttgtggggttttagtctttgattcagtcagtatttggtttatgttaaataaaaaatcagtatcatggaaaagatatgaccataatttagtctcctcaagtgaaaaacaggagtaatgtttcgttgcactttgaaagatctgcttcaaggcataactcgtgtagttgtctggtttcagggatagctgtttgaattgtcattctaaagtaggtcatcaggttcacttattatccgaccttaatctgggataaaggttttggtatttgcccacttctagatagaatgaatgaaaacaacacaagcgttttatgagcactctttatcagaaaggtatttcctggaccagaaatgggcaatagttacaatagttgatcctctgttctggaagctttgaaatttatcagagaatgaagtcattcagtacatctgataaagttttgttgctgctgatcgtgttgttgctgttttaattgggcaaccctcagaactgaagaggttcatagaacttttcacgtttatactatacctcaagaccacatagattagctactgcttattctttcacattggctaggccctgtcttcttcttcatacctatattctaagtattaccacatanatttttatgttaccatcatcttt

SEQ ID NO: 432878 - DNA, 858 bp, Homo Sapiens
  misc_feature (91)..(301): n is a, c, g, or t
  misc_feature (483)..(511): n is a, c, g, or t
attctggccccttttcgccccaggttggaagtccaagtggtgcaatttggggcttcattgcaagttttggcctcccggggttcacacccannnnnnnnnnnnnnnnnnnnnnnnnnnnnnnnnnnnnnnnnnnnnnnnnnnnnnnnnnnnnnnnnnnnnnnnnnnnnnnnnnnnnnnnnnnnnnnnnnnnnnnnnnnnnnnnnnnnnnnnnnnnnnnnnnnnnnnnnnnnnnnnnnnnnnnnnnnnnnnnnnnnnnnnnnnnnnnnnnnnnnnnnnnnnnnnnnnnnnnnnnnnnnnnnnnaagatgatgggtaacataaaaatactatgtggtaataacttagaatactaggtctggaggaggagaacaggcctagcccatgtgaaagaataagcagtagctaatctatgtggtcttgaggtatagtataaacctggaaagttctctgaacctcttcagttactgagggttgcccaattaannnnnnnnnnnnnnnnnnnnnnnnnnnnntttatcagatgtactgaatgacttcattctctgataaatttcaaagcttccagaacagaggatcaactattgtaactattgcccatttctggtccaggaaatacctttctgataaagagtgctcataaaacgcttgtgtggttttcattcattctatctagaagtgggcaaataccaaaacctttatcccagattaaggtcggataataagtgaacgtgatgacgtactttagaatgacaattcaaacagctatccgtgaaaccagacaactacacgagttatgccttgaagcagatctttcaaagtgcaacgaaacattactcctgtttttcacttgaggagacta

SEQ ID NO: 432879 - DNA, 755 bp, Homo Sapiens
  misc_feature (70)..(70): n is a, c, g, or t
  misc_feature (548)..(548): n is a, c, g, or t
gccttgtgctgaaggctgtgcatgcggtactggcggttctcctccaccttgtagatgtcaaagccaatgnccaggttctcacccttgccctcccggcgcgtagaccgctttggccgctgctggatgcagatcaggacttcatcttctggcttcttgacttcgaagatgtactgtgggttctggaagaaggtgtccttgtggttgatgcagccgccaccgcggttctgtcgcgggtcctcatgcagcgtccaggcgccatgcagccgggcctcctcccacgtcttgtggatgctcaggtgggatgtgttgatcacgcggcacttgatgatgtccgtgaagtaccggcacacgtcctcgaaggtcatccagaactcaccgtcgtcctgcacggtcacacccatcttctcccgctcactcttgctcactttctgccactcctccgaggtgtcactccagggcccgttccactcccgctcgccccaggggttgcgcaggcggatcatgtccaacttctctgacttgaagaaggccagtaggccgtggcccanggcgcaccttgcgcacatcagtgacggcgtatgcgtggccctttaccaggccgcacgccaggcgggcctccatgtcagctgctgtcactgccttgatggaggcactgatgaggccgccccggctgtgcacctttaacatgcgctcaaagagctggttcctcttagtctcatcgttggcaaagtcaccctcggtcaggtcgatgggct

SEQ ID NO: 432880 - DNA, 921 bp, Homo Sapiens
aaaattttatatatatattttttcttccagttaacagtcttttctcttgggtgggtagaccaaacccaagatccaaccttccccttacttcccaccaagtagtaccaaaaacaactttccccctccactaagtccttagggaagcaggaaggctagtgcagcagctgtcagggataaaggcacaggcagagctggggtgacggagttgtctgggacaggctaccactggcccactggagtcacggaacccctgacaccaccctcagcaggggaggttcccgatcaccctcaagttctcccatcccatagttagatcttttaaaggcacatctagaagtggtgcaactggaggcaggggtaagctgtacacagttgccacgcaggggttaaggggctgcaggactccatggtacagaggaatggaagtgtccttgccctcttccagactcggggcagggggagacagtggggagatgggctcctggaacccagcctgtttctgtagagccccagaggggccaacaacaggaaagaccagagtcgtggtcagtagtgcacatgcttaacaggtctttggtgcttgggtagcagcatcttttatgtacaaaggcttttgaagccagcaaagctgggaaagtcatctcctgcacagttgcggcctgactcctctcctggtgctggtcatcggctcacaagcccctgtgctccagaatcagccagttctaagtgaccatttgcacatcctggccattcagaggtttctgcaccctcacctttaacttcagtttccccccggggggcttttcttccttccaggaccttcacaattcttttgatccaaaattcattttcagccggttcagtttaaggtgtgtttgcgccaatccacttggttgcttcctgaaaaaagactcttttttt

SEQ ID NO: 432881 - DNA, 787 bp, Homo Sapiens
  misc_feature (673)..(719): n is a, c, g, or t
acttgtaaatattttagtatgctacagtaatttgtcatatctttaatatttattgtttgtaaagcagtaaacatttctgtattttagaagtcatggagtaaaatcaaatatttatgataaataattggaagtatgttttagtttgaagattgtcctttttcctatcttgctgcaaggaaaaatggacttctgattaggttttacaattgtgaacttttatgtaaatgttaagtgctttcgaggagaccaaactattattaatatataaaatggccttgcccttaaggagcaaattaaatctcatggagattagactcaaaaggcaataaataatcgagggtttatgcaatgaaatagaatttcagaagagtttggatctcaaagattgtccttcactctcagaaacaggcaagtttcttaaaagcccttatagtcgtgtttttattttaaaaatcgtagcactttatttttgaagtttaaaaagcccataaacttaatgagtctttataatcagacacatggaaatatagaaaaccaaagactgatcttagaatatagagtagagagacatgtttgttattctccactagtgactttagtattttgttatgtgatgttttttaggtgcaccttttctcatgactccttttactttatctaatgtcttcctctnnnnnnnnnnnnnnnnnnnnnnnnnnnnnnnnnnnnnnnnnnnnnnngtgaacactgaagctccagctcagacatgttggggaccatttttaataaggtacctagctgatttttt

SEQ ID NO: 432882 - DNA, 1076 bp, Homo Sapiens
  misc_feature (30)..(30): n is a, c, g, or t
  misc_feature (41)..(41): n is a, c, g, or t
  misc_feature (717)..(717): n is a, c, g, or t
  misc_feature (837)..(933): n is a, c, g, or t
tcacccgggtatgatcacatattctggctnccccctaaggntttagaatctgtaggttcaaaaaggtcttgaagaccacctagcatatttctattctgatgagagaaactccatccaagcagctgtactttttcaacttgaaaatctccaaggaaaagagccttttccttctgttgactaatgtttagatgcagaccagggaatctttcctgtcacttggcttttttcccttgctaaaacaacataagacaagttttttttcccctttattggaggatccaagggaagattagctggtcactaaagtccagaaagcaatggagtcttatagctcattcctgggaatgttgcaaataatgccaaactctgatggtactcagactcaacttctaggatttatcattcactaaatggcctgggtgactccttctagtgaaaccaggcaagtaccaatatagcccagactgaggatttacttagaagggttgaatcccatcccatagtatgtattcacagccacatggtataaaaggaagagcatggagtcaagagtgaagcatcctgggttctaggcccacatgggagccatcctgtatgaccacatcctctgggtttcatttttccttaggaggtcagaatcagagattttcatgattccattcgaactaagctctgatgtacagagagaatgactgccaggccttcataatattgttncatcaacaagacaaggtggggcaaatgccttgctggatactacgtactaaggaagaagggcggagtcagtcattttatcggcattaaccttacagggctcttgaagattgttttaattgnnnnnnnnnnnnnnnnnnnnnnnnnnnnnnnnnnnnnnnnnnnnnnnnnnnnnnnnnnnnnnnnnnnnnnnnnnnnnnnnnnnnnnnnnnnnnnnnntgcaccagggcttttatattgcaacaagctagcaacggggttggggaagagctactttttaaaaacctgggaaatagaaaacatggattttttttccctctaaattcccctagttttctggtaactaatgcagtatcctagac

SEQ ID NO: 432883 - DNA, 1201 bp, Homo Sapiens
  misc_feature (127)..(139): n is a, c, g, or t
gagaccatatggactgcaaagcctaaaatctatctggacccttacagtaaaacaatgaccctgggttttcatggcaccccaatgcctttttggtgacttgcaggaatacagattcctatattccagnnnnnnnnnnnnnctccttagcttaaggttcgtattcccatttgcttctgagaaagttaggaaaattttgttttatgttgcagatgctctcacaacaataattgtgctggagatagatacaacttagtgaaattttcctacagaactaaaaacgcaaaattgcatcactcctgaagaaaagaaatttagagtatgaattgagttggttgagagtagaattaaaaagatttctagcactttgagcatgttttaggaaatttgatccttacattttaaaattatgtaaatgacatctttcactggcatttgctcacatttaagtcaatctacagctgttacttactaagctaagaaataagaagatccctatggttctgaatctctcataatattctgaagtaatttatatcaattgaattttcattaatcattttaggaaatattatgttttattttgtggcattatatgacaatgactttctcaacaatagctcagggaatacgcaaacagccagctcttttatgtaagaaagccattttctaatccccacgctttcctgagtgttacgtattttatttctttgaaaagagagggccttgagtaaatgctttcgtttgctttccttacatatttagaaatccaagaagggcccttgtcttagtctatttctgtcacagagaaattgttcattccaaaatatccaccttaagggaagctagtgaccgagatatggagaaaaacataggcattcatgacctttgtgtttccgtttgactttcaacatctgtaaccaaaaggtcacaaatgaaatatttagtagaaagtgcaatatcaatttattaggagtacctaaaattataactctaaataatatacagcaatattattgctctattattacagcaatcaataatataatatagccactaggatacactcgctgtagaactcagaacaaaagatatcaatcttctgccagtccgcatcattatggtgtagcagagactttactggaatgagtgaggggaaagataacaaaatgtagattaggattccacattctccctgcccatc

SEQ ID NO: 432884 - DNA, 796 bp, Homo Sapiens
  misc_feature (685)..(685): n is a, c, g, or t
  misc_feature (785)..(785): n is a, c, g, or t
gcatcccatgaatggagggttgggaaaggcatctttaggaggcacagtccactgtgtgcttccaattttcctgtacactgccagcttgccggtccagctgcagtctgagtatcggcattctcttcattgtcttcaaggtctacctcccaccagtgaaattaaatgtttgggtgctaagggataaggtgcagagaagcgcaagtctgcacagtctgataggaactggccactccagaacttaggctataacagaaaagggcattcagactgtgtgctacttaatgacctagtgccaaaaaatgaaatggtactgtaagcgattcccaataatcatctaccctaccagtgccagggaacctgtgcaaatagaatgtgaaatatcacaacagaccacagctgtcctcgccataaatactatattgtttaaagttctgtacatagaaagcaattcattcaagtcttaagatgaatttagctctatatggcaagtaattttttcctaaagatgaaatcatttagcaagaatttttttaacataaacagtctgcctatttcccatttctttttgaaaaggactttttaggagtctaaattgtatttatttttcccctaaaatgttagtctgttatttcatattaggcacatggcaaggcaaaatttactcttaaatatattactttaatcngggttaatggttttggacatctataattaattgtaggtttcaaacgggtggcaggccctggtctgtgaccgggggggccaaaacctgggggttttcatcncccggaggtgg

SEQ ID NO: 432885 - DNA, 773 bp, Homo Sapiens
  misc_feature (199)..(237): n is a, c, g, or t
tgcatttctgtggaattccaaataagtaaaactgaaattcagtgcagagaaaactttgtccactagtgcaagtcttgatcaaatgacattttgacattggacatatggaattcatagtatgagccacattttgttgtgaaatttatttacctgcttgtggcttcaaatctgaaaattaataagcctgctcgtttaaaannnnnnnnnnnnnnnnnnnnnnnnnnnnnnnnnnnnnnnactagaaaatagttcagtgtaatattaagttagaaaagaagttgctgcccagttaaaggggctccctctcaaataaatctccatccttccctctcccaaaagacatttctgatttctgcttcactttgggcttcctcttcttcgtacacattccatctacctaatcaaacattttcagtccctgatctctcctgtcccttttcctggggatgacagccctaacaagaactgttttttgaatcgttgtgcagctccagggcaatagagtatgtgaagcgatttcagtaggaatcacttactcatcctaaaagaaaacattatcccagttacctacatcggcaattaccttatgtaaagcagaactaatgctgactggatgtttaatgggatgagcattaaagctgcaatctactatagtactccagaactctttcggctttctatgagaaacaccagaagcattacttttccacttctacttacgtaattgcaggaggagacctcacattcaggactggcctagtgaacgaatccat

SEQ ID NO: 432886 - DNA, 966 bp, Homo Sapiens
  misc_feature (720)..(731): n is a, c, g, or t
ggttttcccttaccatagtcttccatggaatgtgtacaagggcctctcaagccccattcatctggtttagccaagttctcagcctggggaacacagtactacttaagtgattgaggtttaccatttatagtgatgcttgatttcctgtttcttaatatatttgtagataaaaattgaacagggacaaagtagctagtttaagaaaggaagtgaaccatgttgggtcatatcattttctttagattggatatctatgaagtccacagcccctttgagttatgctttttaggcatctatctcatcatctcctgatttaaggataattctgtctggtccttggagctctcttccctaggaattagtgtgtggagtctctatatgcttgtgatccttggagctctcttccctaggaattagtgtgtggagtctctatatgcttgtgattcacaactaaatatgaaatttctcaattcaggagcaggaagcaaagtgctggggtacagttttgcagattggttgaaacacttagccaaacttaagtggcctgggtaggaccatcactcccaaagttgtcagcagagaagggccctctgtgtgagtctattcaaacctggcattgctctgaaattgagtcctcatcccatggggaaggtcttctgggggctttacattccttgttactaggtgttctggatattaaccttctgcttcccacttccnnnnnnnnnnnngaaacaaagcttgctctgtcacccaggcatgagtgccaagggtgtgatctgggctccattgcaacctacaaactcccggttatcaagcgagcctccggcctcagcctcccaagatagctgggataacaggggccacaccacacatgcccagcaaattggcaatatagagaacaggacggggtgacaccacgtaggccaggtggccctagaaactcctgaccccacagatgatccc

SEQ ID NO: 432887 - DNA, 1217 bp, Homo Sapiens
tgtcattgtttgtgtgtttccagtaggtcgtgtggtttttctatgtgtgtgtctcggtgctcatttactctggcattcttttgtgtcctgttgtatccctatgtctctacatgtccctgggttgactctccctgggggatctttctcccgggtgtcttgttttggtcgcctacgcgcccctgattcacacttccccttgtggttccacctggagggggcctcagatgatagtatgtatgtagtagacagtatgtagtaatatggatcgttgaagcttctgcagcattctgggccaatcctgtctaagactttccatagtatggcccccatgggtaagaaacttgggctgaggacgtgatacctgggaaagcaacatgttggacctagctaggaaggcaagcttgttgaagaagacagtatgtaccttacctgaccacttcagaggagagggccacctgagctcaggaagatggcctccaaggactcgctgtggcagagaggggagaccccagaagagctggctttttctctgctgctggcggttccctgatgctatcttgtgcctcacaggaaagctggtcagaatctggaagatggggaaggatctggaagggctcacgggctgcatgactgtttgctctggtatccctatagccttgaggaggccctcagaaccacaggatggctggggctgggcgctggagtggcttgctctccagtgggagcttctttggtaggagaacatggcttcagtggatccagagatgcctcgtcttccccctcttcctcttcttccccttcttcctccacttctgatttctgcttacacaggtgatcaaggaaggccacacggtgcagaagtggtagttccttgccttgcaccatattcccagagcaccagggatgaagctgtcgcaacctcccaagctgccaccatctctgaatctgccaaaccacgaataagaatagtgtcaccagatttcctggactctggaagcagcctgctgccgcagtgtctgcacggcttagggcatgggtcagttggccccagagaagccccatatcccccttagccccaagcaggtcctccagcagccattccatttcccttagccttctggcagtttaccctgaggtcatcattgcatcacagaacaaagaactcccatcccccacagaggcctgggcttaacagccttctccctgaatttagaacc

SEQ ID NO: 432888 - DNA, 1718 bp, Homo Sapiens
  misc_feature (77)..(77): n is a, c, g, or t
  misc_feature (148)..(148): n is a, c, g, or t
  misc_feature (1573)..(1641): n is a, c, g, or t
gctatttctctcctcttcttgggcaatgccttgttttctcctctgaatatttgcatttgaaaggattgcttcctgtnctgctcattgatcaaaggtagggccaattaaggattctaaccctaacccagcaccacaaagcccccctggngcatcttcccggctggcaggaccatgccatctctgtggagaaggtgctggggagggaagtccttccagtgccacatggagtgaggccctgcccatgctggggactttggggaggaatttggtattctggtggccttgctcagctctcattgagatcttttcctatcagaatgttagtgaatatacttcgcagctctttgttcagcaataaggaatattctttcaattcctgctcttcaagccaatttactacacccagttgtctttccagaagttcatcccagcggtaatatgttggtgtttgttcttctgttggatttcacatctgttttctggtagaagtgagcactgttcacttgtgcagtcgtcttattttccttcttcctagatgactcagctctttgtaaatgttgtgctcaacttctaggggccagttctagactttggagatgcagtgtctcccaggtgtgcacggacacctggtccgtggaaacaggtgtgatgggcacaggctgctgcccttctgtctggtcgggggattcctcttcttcaagctgctcagctaacccagaagaggggagagagtactccggtggttcccagagcccctcccgttgtgccgcttcgacctgacacctgctcgatgctgacttaggcttcctgccaccaagcaggaaactagaaagagaacatttcagtgtaaggtctgttcccgacagcatggattagcttccgtgttctgaagttgttcttttcatggtgtctgacaccgagggcgttgttcgtccatcaggcgggattggatggagtcttggtgttttgccttctcagggaccaaaaatgtatcattgactccttaacagtgaccttcctcccaaggacatatccgtgttcatttttcataggttttactcatattcataggtagattctgttaatgtgagttggaaagaaaagaccaatttgtacaccagtcacaccacaagacagtttatcatataaaatacctcaattttttgtattcctcatttccacctcacaattgtactggtgatgaattttaagggtctgtcctttagcttataggtgatgtttcacatctggccagattcttatacctccattgtatacttgaaaaggttcagaattacaggaacagcagtgagaatttggcccactaccacgactcatttgtttcattcacattcctcacgtgcaacaacataattatattttaagaaaatgtaactttgttacatcaaaatatgttgtctagtaaaaagttgatattcagtagaacaaggatcatgtaaataaacatctatttcacatgtacccaaaagcatttaaaaagcagaatccagggcccagagcatgagccagggaggggggtgtttttcttcttttctctatttttccctaaatnnnnnnnnnnnnnnnnnnnnnnnnnnnnnnnnnnnnnnnnnnnnnnnnnnnnnnnnnnnnnnnnnnnnnggttcttcaaattgtttctaaaacaccggcactttcagcagtgttctgggtgcctgagatgagagcaccgtgtttaa

SEQ ID NO: 432889 - DNA, 663 bp, Homo Sapiens
gtttcaagacttttaatacagtgtttgtcttattgctgtgggtctccagagtcttccatatgctctctccaaccaccctgtagtagacattatatacacaagatgcaagagggcatttttttgggcctcatccaggtcaaagtcacatccccagagaagtcagctgtccactgaagattctgtactttgtacacagtcaactcatcactgcaggccttttcatcgctctcgtccgagcagtccaggaagccgtcgcagcgctccgagagcacaatgcaggcctccccgtcctcgcactggaactccctgctcatgcaagtcaaggtgctgtgtgtggggcaattggcctcgtcccggccatcctggcaatcttggtggccgtcacagcgcttccagttgggaatacacgtcttcggttggtggcattcgaactcaaatcggtcacatcgcccaagttgggtgggagtggaggcagcagtgacgtttgcaagcaaggggcaggcttcctcgtcagagccatctgcacaatctcggtacccgtcgcacacccaggtgtccatcacgcaggtcccactgctgcagcggtagtaattgggcagacacgtggagggcccaggagtcgagaagggaagaatatgtgaatctccacaatccttctcatca

SEQ ID NO: 432890 - DNA, 878 bp, Homo Sapiens
  misc_feature (62)..(72): n is a, c, g, or t
gtctgcccaaagacacagaggaaatgaaactcatattgaaggcaaaagaagagtacagaagnnnnnnnnnnntggctggggatggattggaaaatgggaagaggagttactgggataagagaaagctggagggtggcctctcctggagtaatccacccaaaataaggccaacctggttaatagtttgccccaataggcctcaatgggcccaacacccacttgaagtagcctctccttttcccatttggcctccttggagacagtcctcagcaagctgaagcggcaatgctatgcgtgggcttaagggctcttgtttaatctgaagcctttaaaaaataaaataaaagaagttgtaactttaacaactatccctaaagcacaaaagttaaagttatttgaggaactgccatcagaggtatcataatgtcttactttaaaaattaagcaaaatgtttcattgtaaagacaaagtgttgttttaatatgaaacatgaatttccatcaacattaacatctttaaggttaaatgtaacaccaccagtctctgtatttggaattcggaacttgtaagaaactgccttttcctgattcatatgaggacacgatcacacctagattggaagattcacatactaccagcaacacctagaatcatctttagataacaatttggatcataggccatggagaaagtttgtcctaaatgttcccttgtgtggccctgtgactatggggaacaaatgctggtgattagctgttttatcaggcaagcaatatgggaagaggtaggaggaaggtggtagagagagagaactaacattttgactggcaactaagtagcagacacttccctttatttcttatttaatcttttcaat

SEQ ID NO: 432891 - DNA, 589 bp, Homo Sapiens
  misc_feature (38)..(38): n is a, c, g, or t
  misc_feature (60)..(60): n is a, c, g, or t
  misc_feature (111)..(111): n is a, c, g, or t
  misc_feature (121)..(121): n is a, c, g, or t
aaccctgggtccctctgaatttttcttcctgccaaacngctttcccctagatatcccaanggacttggttcttttctcccaagtagacttggttcctactcccacagagtnagatacagcncctcatttctaataatcttttggaaaaactcttgccttccccgcggccccccatctttactttcaacacacacacagtccgtcgcagaactgccctccttaaatactctctgattacagacacaagtaggagcaatgaatgatgtgtctcctaggccaggtgtgtggtagggtagctgacacatgttagaaggaagtctgcccaaagacacagaggaaatgaaactcatattgaaggcaaaagaagagtacagaagaagtaaaaaaaatggctggggatggattggaaaatgggaagaggagttactgggataagagaaagctggagggtggcctctcctggagtaatccacccaaaataaggcaacctggttatagtttgcccaataggctcaatgggccacaccacttgaagtagcctctccttttccatttggcctccttggagacagtcctcagcaagctgaag

SEQ ID NO: 432892 - DNA, 678 bp, Homo Sapiens
  misc_feature (468)..(554): n is a, c, g, or t
gggattaaaaaaattcttagaaaagcttatggtttaaaacagggtcagcaaaatatggcccaaaggccaaatccagtccaccacatgggtttggtaaataaaaattttattagaacatagctgtactcattcatttacaagtctgtggccgctttcacgctataattacagaattgagtacttgcaacagagactacataaagcataaaacatttactatctggccttttacaaaagtgttggtaactcccccaccactctgaaaagtttagagccatagagagacagattaaccagaaatactgaagttgtataaaggctgggcaaaacccacacttctggtaaagaaaaaggaaattaaccaataactacacactataatgctacttacaggtaggcagcatttatgaaaacgcttaccatacaacacaggcattgtctaagtttcctcataactgtacaaaaggnnnnnnnnnnnnnnnnnnnnnnnnnnnnnnnnnnnnnnnnnnnnnnnnnnnnnnnnnnnnnnnnnnnnnnnnnnnnnnnnnnnnnnnagatctgaactcaggaagtctgacttcacaggttgtacccttagaaactgtatgactcaaatatattctttagcagtgatttttaattcaaatacagttgcttcttcacattatacagaaatgc

SEQ ID NO: 432893 - DNA, 2016 bp, Homo Sapiens
tctttccttcttaactacgtcttttctcgagactcatccattaaggcatatttcacaattctgccttgggatttggccttaaaagtcaccccataatgtggcacaggttgaccttttatcactaccggttcgtcctcttcctcatcttcttttggtgggcattcgaattctgttcttcaatgcaaaggctggtgacttggggacggtgattggaagtaccttcttttcaggaacacccacgacatcttccaaatcttagtagggcaaggtctggaatgaaattcaaagtgttcatcctctgttttcttctttgattctcgctcctggattcttttctcaatttccaaatcaaagccaataggctcggtgggtggtttcacaggtggtttcttgggcaagatgggcccaccttcaagtattctgggatcaagttcacgtgctttgaatttgtattgttgcaatttctcgagctcctcagcctccagctctgctgtacttttgcaggtcacagcccgtgcacggtgtttggtttgcagtacaggagtctgtgggtctctgcaaatcttggtcacagaagatttggagggtaacaggttaatatcatccttcttgctcctcaaatgatatctgttaggggttcgtttatggaagtcttcaacttgctgtgcaaggggcacatatgtagaaactgtttcatcaaatgttcttttctttccttgggacaggttgaaaggcttaacaatggtacatcccttagtcactcgggcaggagatgaaggatgctttcgtagttcagatgtaaagttcacttccttatattcctcctggttcttaggatgttgtttgattcgctcatctgtgcggaagtggaagtcaactgatttggtgacctggctcactgatttcttcacaggttgccctattccagccagagcaagtttcttgaattcttcattctttttccgcatctccaccacctcttgctgcattttcatactcttctccagctcttgctcctcagtactttttagaaacttctgctttgcaggtggcatacaaggcacagtatgtctacccttggctttctctggggaagatgcattcttttcagcagtatcttgatgagcactgccttcttcctctggcttctttttgttgttagaaactttcattttcttagagggtagaatttcatcgatgattacaggagtggcacatctcttggctttcatttttacatgatgcttttctttctgttccaaatccttctgagcagaaagcctaagagatcttctctgaggctgggctggagtttttcttgatatggctgcctcaacttccagggaagaacaagcatttgacggaatggattgttccacaagattttctttttctgcctctttgtagtaagtgttgtcaactggtttcaaaggtgtgacaatagcttgctgaagattagcctttctcaaaggagttttgccctgaaaaagccctccagttccattcttccccagtaacttattctccaaattggccttctcctcaaaccatgaatctatgttttgagtatctccttcatcatccaaggatgaaaaattgatgaaatccgagggggcatcataggaataagagcttttaacttgtgacattgtctcccacttaacgcagaagagcaggtttttcccagtatttgtaccacttttctcagcaggtcaccttcgttattagccgacagcctcccgcaactctttttttcctccgtttcccggacggacttcacagcaaaatcctgtcgccaagagaagcgtggcccgaagcccctgctcgcaccctgccccgcctaggcggcgaccgagcaccgcaaccgcctcagaagccaggcctagcggcgcgaacggcgctaggggctggaaggtgaacttcagccgttccaaactccgggaggagggagacccgcgccctagctgctccctcttttcttcccacggctccctcgtgccgaattcgccacccagc

SEQ ID NO: 432894 - DNA, 854 bp, Homo Sapiens
gtcttctcggagctcggctggatgttttctggatatgcgtgcctcaactttccaaggcagaacaagcatttgacggaatggattgttccacaagattttcttttgtctgcctctttgtagtaagtgttgtcaactggtttcaaaggtgtgacgatagcttgctgaagattagcctttctcaaaggagttttgccctgaaaaagccctccagttccattcttcccccagtaacttattctccaaattggccttctcctcaaaccatgaatctatgttttgagtatctccttcatcatccaaggatgaaaaattgatgaaatccgagggggcatcataggaataagagcttttaacttgtgacattgtctcccacttaacgcagaagagcaggtttttcccagtatttgtaccacttttctcagcaggtcaccttctgtggtttaatcagtctatcaggcctacaggtctgactcaaagttgcaatcttctctttcaccccttttctgaaatcttgaagtctggcaaatatgtatcaagaaccgttattagccgacagcctcccgcaactctttttttcctccgtttcccggacggacttcacagcaaaatcctgtcgccaagagaagcgtggcccgaagcccctgctcgcaccctgccccgcctaggcggcgaccgagcaccgcaaccgcctcagaagccaggcctagcggcgcgaacggcgctaggggctggaaggtgaacttcagccgttccaaactccgggaggagggagacccgcgccctagctgctccctcttttcttcccacggctcacctagcctcgcctcagatctgacaacgaagcgcgagccccc

SEQ ID NO: 432895 - DNA, 823 bp, Homo Sapiens
  misc_feature (616)..(703): n is a, c, g, or t
tgtcttctccgtctgtaactgacggttctttgtctgcgagaatcaaaggagaaagggcaatatttccacagttcttgcctctgggatttggggcttaaaagggcaccccataatggtggcacaggttgagcttttaatcactaccggttcgtcctcttcctcatcttctttggtgggcattcgaattctgttcttcaatgcaaaggctggtgacttggggacggtgattggaagtaccttcttgttcaggaacacccacaacatcgttccaaaatcttagtagggcaaggtctggaatgaaattcaaagtgttcatcctctgttttcttctttgattctcgctcctggattcttttctcaatttccaaatcaaagccaataggctcggtgggtggtttcacaggtggtttcttgggcaagatgggcccaccttcaagtattctgggatcaagttcacgtgctttgaatttgtattgttgcaatttctcgagctcctcagcctccagctctgctgtacttttgcaggtcacagcccgtgcacggtgtttggtttgcagtacaggagtctgtgggtctctgcaaatcttggtcacagaagatttggagggtaacaggnnnnnnnnnnnnnnnnnnnnnnnnnnnnnnnnnnnnnnnnnnnnnnnnnnnnnnnnnnnnnnnnnnnnnnnnnnnnnnnnnnnnnnnntgacggagcaagaccctgtcttaatatcatccttcttgctcctcaaatgatatctgttaggggttcgtttatggaagtcttcaacttgctgtgcaaggggcacatatgtagaaactgttc

SEQ ID NO: 432896 - DNA, 1498 bp, Homo Sapiens
  misc_feature (36)..(36): n is a, c, g, or t
  misc_feature (43)..(43): n is a, c, g, or t
  misc_feature (165)..(165): n is a, c, g, or t
  misc_feature (905)..(928): n is a, c, g, or t
cccctccagaaggctcccctaaagagcagtttagtnggcatcnatacagcaactttgccatgggggtaaagggatgcaaaaacataacagcaacttctctgctccctctgaaagtaaacagcactaatttatgaagaggccaactcaaatcataaaggagaagcncctgggcctcttaaaggcaaaccacataaaaggttacagggtgcttctcttaaggtttctaggaccataggtgtgtttgggaatgaccaatgggaaaaatccagttagatgatttacacggatgttctctatgtagatttgaatttaaattaaaatgccagctatgcatttgggaaccagcttttagttaaattctctagcacttttagaattatttgattttattaaaaaagaatcattgtctacaaactgttttctaacaatgcaaatacagtaagcaagtcatctgcaatatcaaaatattgtttgtaaatcactgatggcaccaacgatttgaggaatttccaataggacacatattgagaaaaagcaacagattataggcattaaccaaattttaagatcagaaaattataaaaatcattaagtttaaattatccaattttcaatagcttaaatccaatcatcaggaattcagaagcacccaatatgtttgaagttgcacaaatgcatatggatgataggaaagtaatccccatgcaatatcttaagtgttgctatcagatatatttaagtgctactttacagattaagctgggtaaaatcaaaatatattttacttcccattagattttaaaacaatcacaataatttatcaacagttgccatttcacagcaattagaaaagaggagttgataccagttgtaacggaaaggtatcttttcttctgtttaggaannnnnnnnnnnnnnnnnnnnnnnnttcacatacacacataacattatctttaaaattccaagtggttacttttgtattataaaacaattatctccctatgctcaaatactgaaaaagcgcaagctcaaaaaagcaaaccacatttctccactttaacaaaatacattattctctcagtggttctatcttatttaattgattataaagtattatgactcctagtactgtactggacctgatggaacttaaactacacccctttctcagtctccagcaaaggatactcctaacccacccttaaatataataaaatacatgcccctattactgcactgttaaactgggaaatacaaccatgcccacctggaaacatataacgtcataacaagctttaatgtaatcctgtgcggtagagacctacacgaactcagatagtcatctctcttggaatataagctttaggagcttttagaagtatctagactctcctaggcatctagagtagagacacacagaggatcgacgcgtggtcgacgatatcccgagattccggaccgtccgcctgcttttaaccacgtttcattgtccaattgc

SEQ ID NO: 432897 - DNA, 1992 bp, Homo Sapiens
  misc_feature (372)..(372): n is a, c, g, or t
  misc_feature (387)..(387): n is a, c, g, or t
  misc_feature (402)..(402): n is a, c, g, or t
  misc_feature (407)..(407): n is a, c, g, or t
  misc_feature (411)..(411): n is a, c, g, or t
  misc_feature (415)..(415): n is a, c, g, or t
  misc_feature (424)..(424): n is a, c, g, or t
  misc_feature (429)..(429): n is a, c, g, or t
  misc_feature (435)..(435): n is a, c, g, or t
  misc_feature (441)..(441): n is a, c, g, or t
  misc_feature (444)..(444): n is a, c, g, or t
  misc_feature (446)..(446): n is a, c, g, or t
  misc_feature (449)..(449): n is a, c, g, or t
  misc_feature (452)..(452): n is a, c, g, or t
  misc_feature (455)..(455): n is a, c, g, or t
  misc_feature (1633)..(1647): n is a, c, g, or t
  misc_feature (1670)..(1696): n is a, c, g, or t
aggtcagttactccttttttaataaatttgaattcattcatcaacaagtttcatattgtatctatcactcaattttgctgttttttcatgtcaaataataccaaaaaattacatcaatgtgcttaagcaaaactgggtttaaatttatctttacaataaaatgaaatcaacatgagaattgattatgacagcaatcgcctattcctactagaataatcctgtacttaccttaaacacactcactgacttgtgaagtagaaacatgagacaaacgtgacaaaacatgttcatgggggttggtcctagggagaggcatacgggagccactctctggaaggtcattgtttacccgggtgttgggaatttaggtantttcagggaaaacantggcgccttttcaantgcangtangaangagggtaantcaantccaangcgcancancntangcntangtgtcctggaaaaatttaattcacctgggcagctctttgccccaagattcgatgttactctaatggctcacactgacagccagagtcaattccaagagtaacaaaatgtttcaccaattgttcagttttgcttacataaaatggccagaaatatgaactggttttcaggtggagagttaaaataagaattaagtgatggtttatactttcaagccaggagattcaaagttggacacattcttgttagaatacaccaatggtgggacaaacaccaatggattatctactagatgctgaaaatgaacacctacaactgcaatgtgcctgtccccttaaaaccagccccagactcgtttggcatcacctttgagatgatctcctcagtaaaaatgtcaacgctgtgtttggacaagagagaagtgcctttcagggagtgactgaacatgtcaaagttctgggtgctggcgttaaaaacacaatattgcagatgtacaggtagcttccaaatctaatggaaatattatcatgacatactttctagttcgtttgagattcaggggaaatggatgtcgcatggtatagacagtgaaacccctccacagtcccggggttggtgaacaggaataacacttgttttaaggactactcaagtctatcagtctttctctgtagggagttatgtagcagggctcttccattatctcaaggatatctgaatatgggtaataacaaactgtcataacaagattcttctgtagatcttgagcccctgtggcgcattttggaaagacaggactactgagaaaattaactctttattactttcaattgttaagaaagaaatctcattatatccccaatgataacgtttctgtccttactcaagaggtctgggtgtgggtaacagccacctcccaacaacgtcagaggtccgggttcagaattcctcaacgcgactcagtcactggctcaaataactactgtggagtaacgaggggtcattttaacacaacagagactccaattcaactctcttctgttaacacagtcagagttctcttctcaatgctctcacaagttttaaaaatggagaagctataaaataattttgttagaagaaaagtaattttcttctgaaatggagtaaagcaaacacatacccaaggatcttaaaaagnnnnnnnnnnnnnnnacgaggaatatatgtatgtattnnnnnnnnnnnnnnnnnnnnnnnnnnnagttacaaacactatttatagtatagctaatatgttaacttcatcgcagtgtctacaaagttgtggatcccagtcttggtgccaaatgcatataaaaagctcaaaagctattatgactataccatgcaaatttatatccagaaaaccttgggaaggagactgcagctctttggagccccatggggtctctgcctttgatatttgggtacctcaactatgcatcaaaaaagttttaaatcacttttctcccagaaagaattaatgtcacagttctgaatagtataaattatacaccc

SEQ ID NO: 432898 - DNA, 689 bp, Homo Sapiens
  misc_feature (504)..(537): n is a, c, g, or t
acacagcaaatcccaagccttcccagtctcacacctttccacccattcataaaaaaacacacgaatttctcgcaagttccaatatcactgtctctttatcatctaaatagggccagttggacacctcattgaaacaaaaaggctgatctagatgaagtactctttcttttcttcggagttgttctgtcctccttctgcattgattatagctgtgtctgcgtctgctgcgtcatcggctcctttggcttcatgagtgaagtatgtacctttatgtctggcaaaatagcgccccagaatgatgagcaagcacagcatggcgaacaccaccaccgccacgacgccaccgatcacggcatgatccactgccctgatcgagccttcttcacctgctcgggaatctgagaggtcctcactgtccagttcttctgcggaattgggcaactgagtaaggccgtgaactgctggttctgtcgtcgccgttgtgtctgtgatgatggtaaggannnnnnnnnnnnnnnnnnnnnnnnnnnnnnnnnntgttgtgggaggagggatagttgtggggggatcgtatacatacagcagataatccgagtgagctttccccactatgtttgaagcttcacagcggtatgtaccattatctcgttttgtcttaggttattgatgaacagggatggaaaggatct

SEQ ID NO: 432899 - DNA, 714 bp, Homo Sapiens
  misc_feature (179)..(179): n is a, c, g, or t
cttttgccagctctataccgatcccccacaggaaagttacaccagctatcacagtcctggtcgccaccactgtaatctgatgatcgatatccagaaagacactgcggtggaaggtgaggagattgaagtcaactgcactgctatggcgcagccacagccagactcacagactatcaggntggttcgaacagggaatcacagagctaaaaggcaaatcggaggtggcaagagtggtcagacatgtacactgtgaccagtcagctgatgctgaaggtgcacaaggaggacgatggggtcccagtgatctgccaggtggagcaccctgcggtcactggaaacctgcagacccagcggtatctagaagtacagtataagcctcaagtgcacattcagatgacttatcctctacaaggcttaacccgggaaggggacgcgcttgagttaacatgtgaagccatcgggaagccccagcctgtgatggtaacttgggtgagagtcgatgatgaaatgcctcaacacgccgtacttgtctgggcccaacctgttcatcaataacctaaacaaaacagataatggtacataccgctgtgaagcttcaaacatagtggggaaagctcactcggattatatgctgtatgtatacgatccccccacaactatccctgcttggtgcctctggcctcttggtgcctctggcctccttggtgtctctgg

SEQ ID NO: 432900 - DNA, 1202 bp, Homo Sapiens
  misc_feature (31)..(31): n is a, c, g, or t
  misc_feature (992)..(1038): n is a, c, g, or t
gttccccattccggggcgcattaattaatcnccggaagggggaggttttctccccccccataaatgtttttgagaagcgtttccacaaggcgggataggttcccccacttggtccgggtttttggttagagggtatattggaaggaaaccagggttgggccccagaacaagtaagggggctggtgagaggcattttcatacattggatttttccccccaaagttacccatcaccagggtggggggctttccccgaagggcttccacatggttaaattcaagcggcgtcccctttccccgggttaaagccttgtagaggataaggtcatctgaatgtgcacttgaggcttatactgtacttctagataccgctgggtctgcaggttttccagtgaccgcagggtgctccacctggcagatcactgggaccccatcgtcctccttgtgcaccttcagcatcagctgactggtcacagtgtacatgtctgaccactcttccacctccgatttgccttttagctctgtgttccctttgaaccacctgatagtcgtggctggcttgctggccatagcagtgcagttgacttcaatctcctcaccttccaccgcagtgtctttctggatatcgatcatcagattacgtggtgggaccaggactgtgatggtggtgtaactttcctgtgggggatcggtatagagctggcaaaagtatcttccttcatcagaaattgagacgtttgtcaatgatactttgagttcactgctagaaaaattcagcaactgaaacctgctgtccttcaaaggcctgaagtccctgaaataaatggtctgcctgttgggattcagtagctgaatcacagagtcgtcactcttattgacttggcaactgatggtcgcaacctctccctcgatcactgtcacgtctttcgtaaacagattctgcccatcacctgtggggatcagtgccgcggcggagaagagcaacagcagaannnnnnnnnnnnnnnnnnnnnnnnnnnnnnnnnnnnnnnnnnnnnnncactgggatccgctcggcagcactacactcgccatgtcgggcacctgcctcagactggcggcgttggctgcctccggagcccgagcggacagctaatgagatgctaatgacatgcgctggaggcggagtccgggcagaccaatcacagcgccgcgagcccaacc

SEQ ID NO: 432901 - DNA, 2435 bp, Homo Sapiens
ttgtccagaaataacatttattaatcaacagtaaaacacacaatagaaaaggccttataaataaaactatatatttataatgctttatttttttggtccagtactccacaaaacactacagacagtaacaaaataattcaataaatattaaaaactttcaatagaattataggacacttttttatcatatgtgagcatcaacaatgccacagccattagatatactattaaacacagtcatagatatctttcttgaataatggacataataaattttttatcaaggagtcataacatttacacatatccatacacaagataacagctcagaggaaatgaagcagactccccagtgacctggtttcatctgcctgtacatcatttaaagatattacagtgttaacaggatagaagtcaacacactgaagagaaatgttgggatttgcttggggtgggaggaatgaaagtagggtaattaatgaaagcagcttacatattttccattgctctcttagcaatatgctcccttcccttttctgccttttcttggttgaggtattccagcactttcattaacagatcttcatcccagtactgcctatttggggtatcatcattcttcgggggccccacagggaaccttttgctcaccggggccagcttgtcagtctcctgagagctgccttgattcaaatgctctttgatggcctgctcaatttgttcctcttcctgcaggtcatcttcagatgagccttgaccaggaactcgcttcacttggtttgaattaatgatctcagggtatttaactagcatcctggccaagtactcacctaattcttgatccttgtcgttcaggttttcatatgccatctgtctgttttcaacatgtggaatccaggcagctttgggaagctggttcgatctagatcttccagcaccataagggagccttggcagaactttctcctggttatatggattgggaaaatacgacgttttctgatttgctgcactctccatccctaaaagatttaaaatatcctcaacactgagcccgtctggtagggcctcagtcccagcacgaccaggtgttttagggtagccactcttggagagcatcctattttggaacaggtctggatggtctaagtcagcctctgagatgtcatctaggtcaacaggaaggtcaagctcccgctccggttccactgatccattcggcttctccccagttttgagcatctcaattaagtcttctgggggtatctgtaaattccttgagatttcaatcagctgataaatagactgagaatcaagaggtttctcaaaaagcctggtggccctttccccattttgcccattctgtaacctcccacttcctgcagcatttactaaccttttcaaataggcaattactttggagacatcatctgagagttggtctttactctctttccgaagatcttcttcctggatgccaagctgccctgagcgtttcatctcatcgttgatttgttcatttttttctatattctctttgctgtctctcacctcttcctgggtttgactctctattttctcctctactgggttccagtcttctcccccgaccacatcttcataggcaatgttattagccttgtagatatcatcttcatcatccgtataaagtttttgctcctcatccatcctctcacgtttctggttgtttggtcctgtcagtttccccagctcttggaagacagattccaatgtagcaaggctttgaggagtatattgttcctccactatttcatttgtgcgtttaaaggggttatccctggaattctcttcatacataggagggaattgcatgtgcttaagctttctttctggccactgctgtgtctcataatcatcactcatgtccattggaaagttcttttctgaattcaaggcatagggcttattttcttttggtgcagactgaggctcattttcagcctgtctcaaagcttcgagtattattctcatccagtcttcttcactcagtgaatccctctcgggcaagtggctttcatcgccattttctttttgctgaagggggacagagacaccttggtagggattataatctgggctgctttcttccttatgagcttgttgtcggaggttttctatgtactccaaagccctgatcatttcaggactgggaaacttttggacattttccaacctgaggtctggttctttctgaagcagctggtttctctgaaatgaagctgcttcagccccagagatgaggaaaattaaagggataagagacagggctgctccaagccagtgggtctttgcttcagccatgtttgaaagatttcctctttttgtttatatggcagaggagctccacagcatattcctccccgttctccgggcgagcttctcgggccgttttt

SEQ ID NO: 432902 - DNA, 1064 bp, Homo Sapiens
  misc_feature (748)..(776): n is a, c, g, or t
  misc_feature (888)..(889): n is a, c, g, or t
  misc_feature (894)..(894): n is a, c, g, or t
  misc_feature (904)..(904): n is a, c, g, or t
  misc_feature (907)..(907): n is a, c, g, or t
  misc_feature (915)..(915): n is a, c, g, or t
  misc_feature (921)..(922): n is a, c, g, or t
  misc_feature (933)..(933): n is a, c, g, or t
  misc_feature (958)..(959): n is a, c, g, or t
  misc_feature (961)..(961): n is a, c, g, or t
  misc_feature (963)..(963): n is a, c, g, or t
  misc_feature (973)..(973): n is a, c, g, or t
  misc_feature (977)..(977): n is a, c, g, or t
  misc_feature (980)..(980): n is a, c, g, or t
  misc_feature (990)..(990): n is a, c, g, or t
  misc_feature (1002)..(1002): n is a, c, g, or t
  misc_feature (1005)..(1006): n is a, c, g, or t
  misc_feature (1010)..(1010): n is a, c, g, or t
  misc_feature (1013)..(1013): n is a, c, g, or t
  misc_feature (1015)..(1015): n is a, c, g, or t
  misc_feature (1017)..(1017): n is a, c, g, or t
  misc_feature (1025)..(1025): n is a, c, g, or t
  misc_feature (1028)..(1028): n is a, c, g, or t
  misc_feature (1030)..(1030): n is a, c, g, or t
  misc_feature (1041)..(1041): n is a, c, g, or t
  misc_feature (1044)..(1044): n is a, c, g, or t
  misc_feature (1050)..(1050): n is a, c, g, or t
  misc_feature (1058)..(1058): n is a, c, g, or t
atattgcagtgaagctccttttagtagttttgttgttatgtctgcctggctgctgagggaggaaggatgaagggctggcgttgggaccaggaagggggcacagggtggccgggaagggagaagtagttgctgagcaatgccatgggaggagtggttgccgtgcacaatccagagtcttgggtaagagtgaggggcccctcagggggggaagcagaggcagttcaggccccagagcagtgcctctcccactgctgctggagcaaggaggggcagccacactctgctatctccaagggcagttcctatggaaagggcccggctttgttcatttccggggggaatggggtgagagtccacctccatccttcctctccaaatctactcttccttgcagggacccgcgtcctccccaggttacagtcctgggtccctgcatggctgcatgttgtctgcaggccacatctcctcaggactcccgcactcatcactttcccattgctatggaagagaggtgtcaaggtggcacctgcctccctgtccgtagtgctcaggtgtgtggctaccagaggaaaagccactcccaacctttgccgacaaccatcccgtttctgggttcctggagaagtctgggaagctgctctgttgtagaggctgaaaggagggctggtgagagcccccagctgaaaccagccctgccccttacccttcctcacccctctaccttcactctcctcctaacactccaggnnnnnnnnnnnnnnnnnnnnnnnnnnnnnctcaccccagggctcctgcctctccagcctggagacagatttgctttgggattgttacaaaaataataataacccaaatgcagagaagccacggaaaagggctgcagggcanncctcncctcccccgnccntcctcccnccccannccaaaccgagnacaaaaccgcacccaaagcagacanncngnacaggggggngggnggntggggaaaancgggaggggcgnccnnaggngcncngnaaaaaaanggntngtgcggccccncgncccccngggccctngggggg

SEQ ID NO: 432903 - DNA, 1136 bp, Homo Sapiens
tacgaatcgagctcggtccctcgcgggggcgaactggattgccggaccctcacagtgtagcaacagcttctggccctcacgaggatggggagggtctggcctaatcatcgcagttggtgtgtataaaacttcaatgcgttgagaggtggatctgtcagctccctttagagattcatggttcacagagcacacgatgctcgccccatcatcctcccgggtaacctggaatgtcaccgagctgctgacagtgaaggttttaccatggggatcttcctgtatgcgggtgggttctccgtggagttcttggtcaccctttctccaggtgagccgggctgcaggcttgctcccagaagactgacagtttagggtggctgtgtctttttcccgtaatgcagatttataaccagtgatgatgggcttctgtggaattcctagcacagtgacgagggacttggcagttcgcacaggcatagtgaagaattgagcaggtgtactcgccctcgtcgtgccagggccacattgctgatgcctgatgctgagctcgtggggcgtagaggtaaccagctgaattcgattatctcgaagggctctcttctccccaaagtagagagtctgctgagcagggttaagaccatttgcagggatgagtcctcgtgatctttcacttggcacttgagcaccacggtgccaccagccaccactgtttcatcagatgtccagggctggctgtcttgactggccagcatgtcagggctgctccagactgtggagctgatggcctcgtcgagtggagccagagttcccagctccaaatcctgctcctgccagtagccgtcctgggagaggtttgccccgccgggcgcccagcagcaggcgaacagcaggagcaggagcaggagcgaggcggctggggcccccatcgcgcttcccggccggctccctggctgggcgctggcgagcctgaatccccgggggctggggatggggagggggtggactacgatgttgaccgaaagggcgcccccgagccgcttcggagcccggggccgaggtggggaccggatcccaagaattccggacggataccattttgttttttctcagctacatctcttgtgctgatcgtcccgacccca

SEQ ID NO: 432904 - DNA, 555 bp, Homo Sapiens
tttgttgcacttcttgagctgcggaaacatttagaggtagaagctgtagtgtgcaactaagtgagggaatctcctaagccgtgtggggaggtattcattgataccatttccttctccacagacacaccaactgcgatgattaggccagaccctctccatcctcgtgaggggcagaagctgttgttacactgtgaggttcacggcaatccagtgtaagaagatccatttcctggtctcctcgttactttccacattcttcagattgcctttgcttcagataatctcattctttctatcctcgtctggtaattgtctgagcctgagaatctcatttccctgactgtccaataatgtccgcctgcaattagttcttctgcaaagcagcacaaatgggaaggggccactccctaactcagtgcgctgagtttcccacaaaggccaagttaaagtaagatacaagtctggagatctacagcttccccagaacgaaccccaagaggccacctggcgtatagcagctccagtgtctctgccccgataatttctgtacctcat

SEQ ID NO: 432905 - DNA, 1722 bp, Homo Sapiens
  misc_feature (124)..(154): n is a, c, g, or t
tttttttgcttttctcaccccagggctcctgcctctccagcctggagacagatttgatttgggattgttacaaaaataataataacccaaatgcagagaagccacggaaagggctgagggcaannnnnnnnnnnnnnnnnnnnnnnnnnnnnnnattccaaaccgagtacaaaaccgcacccaaagcagacattctgtacaggggggtgggtgggctggggagcaagcgggaggggcggccctgcggttgctctgtacaagtccgggttggtgacggccccagcagtccccacagggcccctggggggcgcaggaagtgggcaggcgcctctagatgaaatattccttcttgtcgtcccctcctgactgcccgccttctgcattgatgatggccgtgtccgcgtctggagcatcgtcggagccttttgcctcatgtgtcaggtaggttcctttgtgccggatcaagtagtggccaaggaagatgagcatgatgagcagcaggaagacaatgaaagccacgatcccaccgatgatggcgtggtaggtgctggaggaggagggcaccggactggggtcattaacattgagggtgtagtaggccttgtagctgcccatgttgctggtggctgtgcagccgtaggtgccactgtcactcttgttgaggaaagggaagatcagggcactctcctgggtcatcttcaggggtggcacactgccctccttctcccataggtactgctgggggactggattgccgcgaccctcacagtgtagcaacagcttctggccctcacgaggatggggagggtctggcctaatcatcgcagttggtgtgtataaaacttcaatgcgttgagaggtggatctgtcagctccctttagagattcatggttcacagagcacacgatgctcgccccatcatcctcccgggtaacctggaatgtcaccgagctgctgacagtgaaggttttaccattgggatcttcctgtatgcgggttggttctccgtggagttcttggtcaccctttctccaggtgagccgggctgcaggcttgctcccagaagactgacagtttagggtggctgtgtctttttcccgtaatgaagatttataaccagtgatgatgggcttctgtggaattcctagcacagtgacgagggacttggcagttcgcacaggcatagtgaagattgagcaggtgtactcgccctcgtctgccagggccacattgctgatgctgatgctgagctcgtggggcgtagaggtaaccagctgaattcgattatctcgaagggctctcttctccccaaagtagagagtctgctgagcagggttagaccattgcagggatgagtcctcgtgatctttcacttggcacttgagcaccacggtgccaccagccaccactgtttcatcagatgtccagggctggctgtcgtcctgggagaggttggccccgccgggcgcccagcagcaggcgaacagcaggagcaggagcaggagcgaggcggctggggcccccatcgcgcttcccggccggctccctggctgggcgctggcgagcctgaatccccgggggctggggatggggagggggtggactacgatgttgaccgaaagggcgcccccgagccgcttcggagcccggggccgaggtggggaccgggagggagccggcgctgctgcagtcgcggggattaaatagggcgctcggagcga

SEQ ID NO: 432906 - DNA, 544 bp, Homo Sapiens
  misc_feature (14)..(14): n is a, c, g, or t
  misc_feature (21)..(21): n is a, c, g, or t
  misc_feature (35)..(35): n is a, c, g, or t
  misc_feature (43)..(43): n is a, c, g, or t
  misc_feature (69)..(69): n is a, c, g, or t
  misc_feature (136)..(136): n is a, c, g, or t
aacccacgaaaagnctaaagnaaaccctcccctcnccccgccntccctcccttccccaatccaaaaccnaattacaaaaaccgcaccccaaaccagacattctgtaacaagggggtgggtgggctggggaagcaancgggaggggcggcccctgcggttgcctctgtaacaagtccgggttggtgaacggccccagcaagtccccaacagggccctggggggcgcaggaagtgggcaggcgcctctagatgaaatattccttcttgtcgtcccctcctgactgcccgccttctgcattgatgatggccgtgtccgcgtctggagcatcgtcggagccttttgcctcatgtgtcaggtaggttcctttgtgccggatcaagtagtggccaaggaagatgagcatgatgagcagcaggaagacaatgaaagccacgatcccaccgatgatggcgtggtaggtgctggaggaggagggcaccggactggggtcattaacattgagggtgtagtaggccttgtagctgcccatgttgctggtgctgtg

SEQ ID NO: 432907 - DNA, 1432 bp, Homo Sapiens
  misc_feature (1390)..(1390): n is a, c, g, or t
  misc_feature (1419)..(1419): n is a, c, g, or t
gggtacgtgacatttagggtagctgatatttttattttgttaaataatttccaagaatagagtatggtgtatattataaatttctttgataagatgtattttgaatgtcttttaatcttcctcctcctctccaaaaaaatcagaaacctctttaagaaaacatgtaggttatatatgctagaattgcatttaatcactgtgaaaagactggtcagcctgcattagtatgacagtaggggggctgttagaattgctgctatactggtggtatggattatcatggcattggaattttcatagtaatgcagatccaatttctttgtggtacctgcagtttacaaaataatttgacttcagtgagcatattggtatctggatgttccaatttagaactaaaccatatttattacaaaaagatattaatccctctactcccaggttccctttatatgttaagatataatggctttgaggggggaaaaaataaacctaggggagaggggagtttcctgtagtgctgtttcattagaggatttcagtaaattaaattccacagctaattcaataaataatggtacatttaagtgttctgattttaataatatatttcacatttatccacacagtaaccatgtaatatgttaatgtaaataaaattggttttgatactcagaaataacaagaatttaattttttaaatttgtttacagtcctgggaaaagtaagaattatttgccaaaataagaggaaagaaaaccttagtattattaatgagtttaccatagaattgttggaaatactgaagacaggtgcaatttactaaacttttgtttttaaactattgtagaggctgcattagaagaaaatgtttataatgacagagcaactatgactatataaaaaagctgaaattagaactgtgtttagaaatagatcagtaacccagtgccaaggatgccaagctgccaccatggtcttggctctcccacaacccagtgtttctggggtaagtttcacagtttctaggccctggaatagcaggcagtgtaagcctttgataactttagttcgatgtttttcttgtttttgtttgttggtttggtgcatatgatagtgggtgttatgctattttgctcttcccatcaaaataaagaaacttccagaggtttactgttaaaaatactgatatttccataaacgggtttaccaagggtgtagtatttcataccgcctggaaatgatcagcattgggcacaaatcaaaattcagccgcctttggaaatgcaaaaatacctttgactaggtaaggtacatcctgggggttttgaaaactttaactaaggggtttaaaatttaccctgtttaaaggacttctgacttttgagggaantctagctttccagtaactaaatgtactgnggtaaacctttca

SEQ ID NO: 432908 - DNA, 659 bp, Homo Sapiens
  misc_feature (577)..(577): n is a, c, g, or t
gcgctcggaagccgttcaggcgcccatcctccgcagccgcggccttgaagtgctcccctcccgccggctttcggtgtcgctcttctccgcccggccggccaggaggactcactgggcagccgcccccaacccgggcatgggcttcggcccccgagggctcgttctcctgggctctccgctgccgcacgaggcgcgacgggggctctgcgcccccgggtgatcccgcccgattccgctcgacttcccgagacgcttcggggctgcgcgccctctccccgacggggtcttcccgcagaggtctcggtgaccgccccgacgcctcgaccgtcccgggatcgctgtcccttggaagaagtgggggtttccccacagcacaagctcggtccccgggctcccgactgggccgccctggcacgggctccgttcctccgggccacactgggactccgggctacgcgcccccggacagcttctacttcagcgcgggccctgctcagtgtacttagaagagcggggagatggctgccgagcgagccagtcccattagtttgcgcccccgaagccttctgccgggtangcccggcagcctcgcgtcgccgagtcctggctcccgggcgatcgagcccgagggtctgcggccagtgcgagcctcacaaacc

SEQ ID NO: 432909 - DNA, 1179 bp, Homo Sapiens
caggcactgtaaatcaaagtacataaaacttttaatgaattaactttacaaaagacaaatggcatcaaaacatcagacgagtttgatacaaaactggtcctaggctgtgaggactaattctggtgacggatggcgacgtgctgctggcatgagacacacggagcagagggacgagagccgtgggtcccaacgggggcccttggacaccactggcaatgagacaatgggtgagcacagagtccacgtgggggacagaatcaacttattcacgaatactgtgtgtttgaatatcagatgagcagatgcggttggcgagctaccatattttccagaaaagaacatgcaccagaagataatatacaccccctagttttattgccttaagaatgtgtgtgtgtttcacctttctcctctgttagttctcccagtgcttttcttctatcacgcgcgctccttttcccttttgcttaggagcaagcacagtgcaagtggcagaacgatctgggcacacatcagacaccaaacggtatgccactgggtcacgagaacgagtctgcagaggctccataggacagacagcacgcacatcaaaaacaagggacagaagttgcagtcagaaagtgtgtgataccttcctgaaaatacagtcttcttgccaaaatgaaggtgactcttcaggatgccacgttgctctgggaaagggaccttgacatttctgtgtttacaaagtacgtcttcaggtccccctttcctttcacgttgattattcctcgacaggtgcacgtgtatccgagggtctgcaggacgaggctcgtctcctcggtaacctgtattttgtccaggactccggtgctgtccatcctactggccacattgacagtgttgccccagatatcatattgtggcttctgagcttcaatcacaccagctatcacaggtccatggttaatacccactcgcaatttgaagtcgttgaaggagtgcttgttgatggcatccagcttccctaccagggcaaaagcaaactccaccatggtgccaatgtgcatgtactgccgctcgggctcctgggagtgctcctggctgggcacagcgctcagacctgttgctgccatgtatgtgctgccaatggtcttaatcttttcaactccactgaattttggcttggaaagaagatca

SEQ ID NO: 432910 - DNA, 1081 bp, Homo Sapiens
ggggggaaaaaaccctttccccgggaaaaaatacccagtttctttcttggcccaagaaagggaggggggggcttcctttcaagggatagccccacgtttgctttgggggggaaaaggggagccccttggcccatttccgggtgttttaacaaaggttagggtcttttcaggggcccccccctttcccctttgcaccggtgggattattccctcggaccagggggccacgtgttatcccgaggggtttgccaggaacggagggcttcgttttccttcgggtaaccctgtaatttggtcccaggaactccgggtgcctgtcccatccctactgggcccacattgaacagtgttgccccccagatatcatattgtggcttctggagctcccaatcaacaccagctatcacaggtccatggttaatacccactcgcaatttgaagtcgttgaaggagtgcttgttgatggcatccagcttccctacccagggcaaaagcaaactcccaccatggtgccaatgtgcatgtactgccgctcgggctcctgggagtgctcctggctgggcacagcgctcagacctgttgctgccatgtatgtgctgccaatggtcttaatcttttcaactccactgaattttggcttggaaagaagatcatcaaagtcagcgatgatctcgttcaggaccgaaggcattccaagccctccttgttcacgtcggattctgtataaaattctttgaaatccaggaatggaggcaaacatgacgcagacgcagtcataggactggtggtatagctcctcattcttcaggctcctggccaggaagtgctcagccacgtgcgcgggaagcacgttctccagcagcacgcggttcaggttctccatggtctctatctcctcccgctcttttttgaatttgttcttccataagaagtctaacctgtctacccagaacaagcagtgtgatgaagaatatagagagagacacagagcccatggtcttcaggtctttccaaatgcctgattctaaaataagacctggctgtagtcgcacagtatcccagggaattccggaccggtcca

SEQ ID NO: 432911 - DNA, 686 bp, Homo Sapiens
  misc_feature (561)..(561): n is a, c, g, or t
  misc_feature (566)..(566): n is a, c, g, or t
  misc_feature (655)..(655): n is a, c, g, or t
gattctgcgtgcgcaaattttatttttcctcccgtactttatctacagctgcattctgggactgatatcctgttccggtgttcctgcgggtaaactatgagctgaagatgttgatcatgatggtggccttggtgggctacaacaccatcctactccacacccacgcccacgtcctggggactacagccaggtcttatttgagagaccaggcatttggaaagacctgaagaccatgggctctgtgtctctctctatattcttcatcacactgcttgttctgggtagacagaatgaatattactgtaggttagacttcttatggaagaacaaattcaaaaaagagcgggaggagatagagaccatggagaacctgaaccgcgtgctgctggagaacgtgcttcccgcgcacgtggctgagcacttcctggccaggagcctgaagaatgaggagctataccaccagtcctatgactgcgtctgcgtcatgtttgcctccattccggatttcaaagaattttattacagaatccgacgtgaacaaggagggcttggaatgccttncggtnccttgaacgagatcatcgctgacttttgatgatcttcttttccaaggccaaaatttcagtgggagtttgaaaaagtttaaggacctttnggcaggcacttactgggcagcaacaggtttg

SEQ ID NO: 432912 - DNA, 506 bp, Homo Sapiens
cctcgcctgtccgcagctgttggttcctccccatctctttcatggttacctcatctttgttcttggaggccatcttctcagcctcacgcggggtcttgaagagcacaggctcgctggctgggctctggccctgaatggagatggcctgcacgtggactatgtactccgtatcctcctccaggtcccagagggcacatgagcgggtggtggtgttcacctcctggatgaagcgcagcatccgcacatccttcttctgctgggagatggcaaatccgatgacaacctcatcctccagaacatcccagctcaccactgcagagttggccttgaggtgcctgacggtgacgttcactggggctgagggactgtccgcctgcaccagcgcgaagcagacgcagcccagccacaggcggagcgcggcgcgggcgcggggcggccaggcgctcggcgacccggggtgtatggtggctcctccggccggcaggcccggggcggcgcagggggac

SEQ ID NO: 432913 - DNA, 1367 bp, Homo Sapiens
  misc_feature (1033)..(1033): n is a, c, g, or t
ttttttttgcagaatttgggtttgtagtgcagcctccttcatctgactaggacaaggagaagagagaactgtgcagctagctgtgcctcctccccactgctgcagttgtccctctccctgtgcccgtgggcctggggaccagctgagaagaaaaatggaatccttctccctgcagacaggcagtcacgcttcaatgatgttcactgagggcttgtttggaaactgggaggaaaaaaatgagagaagcagccaggcctaattgtgaatagccttcttgcaaggctggaaacaggacagaagaaggaagggagcagcagcagggctgtagcctaaataagccaagctcttgtcccttgtggaaagaaaagagaagccctgcctggatgtcttgtctttttgccttttcaaacccagccttcagcctcactcaactgaatggccaagactgggtcctgggcccatggcccctggcacccagtctacccccagcagtcatccctctgagtgcagcctcagccactgacattgttgaggtgcttctggagatgggagttaataagaggcttcaggaaagtgcgccagagagaggacagtaagccagagggtacaaggagatggagggaagagatgtagagagggccagatgtttgttggataatcatcatcagaaccatgagatcctctcacattctctactgtctgtcttcttagctgctgagggcaagcactgaaaaggttttcatatcttgctgcggagaagccccccgccctggtgctctggtgtgctggtttctgatgcactcttggttttttccttgttgttattgggttcattgtccttgatgatgtcatactggcggcagaagagggcaatgacacctgcccacatgaacaggaccacgacgatgatcagcacctcgcctgtccgcagctgttggttcctccccatctctttcatggttacctcatctttgttcttggaggccatcttctcagcctcacgcggggtcttgaagagcacaggctcgctggnctgggctctggccctgaatggagatggcctgcacgtggactatgtactccgtatcctcctccaggtcccagagggcacatgagcgggtggtggtgttcacctcctggatgaagcgcagcatccgcacatccttcttctgctgggagatggcaaatccgatgacaacctcatcctccagaacatcccagctcaccactgcagagttggccttgaggtgcctgacggtgacgttcactggggctgagagacttgtcctgggagagcctcagctgggacctcgacccgttgggagaagagccccggagccagagcacctctctctctcttttctctt

SEQ ID NO: 432914 - DNA, 1105 bp, Homo Sapiens
  misc_feature (91)..(101): n is a, c, g, or t
  misc_feature (103)..(110): n is a, c, g, or t
  misc_feature (112)..(112): n is a, c, g, or t
  misc_feature (114)..(116): n is a, c, g, or t
  misc_feature (118)..(118): n is a, c, g, or t
  misc_feature (120)..(120): n is a, c, g, or t
  misc_feature (123)..(123): n is a, c, g, or t
ctaataggggacaccctttgttcaagaaaaagctgggtccgcgtaaaccttggggccccctcgaggggatactttagaagcggcccgcccnnnnnnnnnnntnnnnnnnntntnnntntnttntcaaatgcatgggctatttattttttgttgcttttccacagatgaagcctttgaggtggagtttgtccccccaaaccatttgatctccttcccatgttcaatggctggactttgttgaggtttctcccttcttttaagttctcgggagccaggattctcatggccaacacttctcattctagtgtttcctagattgtgtcgtcctggtttgtacttcaaaacctcactttgccactcctcatcaaaagcatgagcatcactttcattcatattgatgaactcctggttgacctcttcatctccagtcttcttgttctttgactttttaatgacatgagctcggtcatggatatgatgaccaatagccattttttctagtccactgtcagaatctctcattgctttcctggtttcctttattcctcctggagctcgacgagtttgagttgaggcctgaaaaacctttggcggttcatctcctattttggaataagtcataactgaggaagaacaaaatgaatgtccatttggatccactgaaagttgaccgaagtttctttctaatttctgcatatagtttctcatatttgacaccatttggtccattgtctggaaagagctgacatctgtatgagtcaaagaatcttcaccatcattatgtcctctacgattatgagctctccctctaccatcagagatactgagcaagtctcttccaaagggttcagaaaaacttcttatcatctgtcgcatattttctcggtgtgcaagaatggactcacttaattcccgcgcgaccccggactcctggctcccgtaactcacgagaagaaggggtcatcctcaaaactgctgttcagcatcctgaacattctggctctgtcttgggtggcggcagccgcggacagattggaaaaacgatgttaactcgccgcggccgcgacaagagctagcctccagtacggacgacgcctcactcccc

SEQ ID NO: 432915 - DNA, 870 bp, Homo Sapiens
agcgggagtgaggcgtcgtccgtactggaggctagctcttgtcgcggccgcggcgagttaacatcgtttttccaatctgtccgcggctgccgccacccaagacagagccagaatgttcaggatgctgaacagcagttttgaggatgaccccttcttctctgagtccattcttgcacaccgagaaaatatgcgacagatgataagaagtttttctgaaccctttggaagagacttgctcagtatctctgatggtagagggagagctcataatcgtagaggacataatgatggtgaagattctttgactcatacagatgtcagctctttccagacaatggaccaaatggtgtcaaatatgagaaactatatgcagaaattagaaagaaacttcggtcaactttcagtggatccaaatggacattcattttgttcttcctcagttatgacttatttccaaaataggagatgaaccgccaaaaggtttttcaggcctcaactcaaactcgtcgagctccaggaggaataacggaaaccaggaaagcaatgagagattctgacggtggactagaaaaaaatggctattggtcatcatatccatgaccgagctcatgtccttcaccacagttcaagaacaagaagactggagatgaagaggtcaaccaggagttcatcaattctgaatgaaagcgatgctcatgcttttgatgacggagtggcaaaggtgaaggtttggaagtacaaaccaggacgaccacaatctagggaaaacactagaatgagaacggtgtcggccatgacaattcctgttcccgagaacttcacagaaggcagacaccttcacaagttccgcccttgaacctggcaccgagc

SEQ ID NO: 432916 - DNA, 1631 bp, Homo Sapiens
  misc_feature (6)..(6): n is a, c, g, or t
  misc_feature (13)..(13): n is a, c, g, or t
  misc_feature (48)..(48): n is a, c, g, or t
  misc_feature (57)..(57): n is a, c, g, or t
  misc_feature (396)..(396): n is a, c, g, or t
gctcantgcagcnccgcctcccgggttcacgccgttctcctgcctcancctcccganattatcaggcttccaattccaaaacttctttttagggggccaggttttcctgtgccacaaactctggtctgagaccagtctggggcacgtctccacagtaagttttgcaaggcagagtgcaaacggacgtggggcagtcctccaatgtacgcactctcaaaacactgctcaggcgggcttcccccgactggaagtgactctcatctacttgtgaagacatgaacttgaactctgcttggaaacacggacaggtattgcgcacactatcctgtgaaagggtcttatttagcaaaataagtgacatttagaacttttacatgaaaaccaaataggaaaaanaaaatcccgattttcctcaaatcctcaggccttgaatctaggcaaagcacacaaacaccatatgaaaccaacagcatgagttcagggtcatcttggaaaataaatgtcactctggggtgacagttctttatacaaatagtatgctccccctctcaactccactaccaaaaagggggaaataataagaaattcaaaaatagaaaacaacatcttgttaagtgtaaacttatcctctggagtttttatattacatatgctagaaacatgcatttatttctgctcagatgtacgaaaatatgtctatcagtattacttataaatcagattaatcctcaagacaatggactcactgttagaataccatttcaaaccttagtaaattacatcgttagcaaaattataaattctaaccacaagcagaatgggttgaagttacacccaatgagaactacctctactctttatattgttgctcatttgttagttttctattgttgcaaagtcagtgctatgttaacaaggaacttgttttcttggaaccccagattaaactccttacagaagttaactctgcagactgagaagacgtgaacagagagagtcaaggggagtgatgactatttcagagacaggaaaggacagaagagatgaccaaaggcacccccaagggatcaaggcacagaggaagagggacttcatccacacaggagcctggctcctgcaggccatggcatggctctcggggctgccagcagggctccccatagcataggtgtgctctgcggtgggcccttgggcagggtcctgaggacagtgccagggccaggctccagtgcagcacaatgttgggcaaaggactcctaacacagccacgctggggctactcaacccgacagtggggagggaaggtgtgggtgctcacaaggcaggcatccatagaagacgctgcccaggtccaagtcaaagaactacacgttctcatccgagccctcggcactgaagacctccaccatgggctgacctctctcctgactgccagatacagcaaagcctggcttacccagaaaacagctggggtcttctgcttaactcagttccatcaaactacccaaggggtaacagattctggatgaattttttaaagggtctcaagttaaatgtttcattcatgattcacaaaaggcacttcaaaattccacagagccacagggtcactgttagtaggtcaccaatcc

SEQ ID NO: 432917 - DNA, 513 bp, Homo Sapiens
  misc_feature (475)..(475): n is a, c, g, or t
  misc_feature (487)..(487): n is a, c, g, or t
cttgagaatactttataaactgccatgatacagcaaaatctcatttattcaaagtgcaaacatactgtgtgtctttctgttttgtgtatgcttgactgcaagataaatgacaaactagctaatatccgagatttatttacaaatggccagggaccccatcaggtgaaacacatagcccattgtcttagagcttctccatcggtcctgtacaggaggattggtgacctactaacagtgaccctgtgggctctgtgggaattttgaagtgccttttgtgaatcatgaatgaaacatttaacttgagaccctttaaaaaattcatccaggaatctgttaccccttgggtaggtttgatgggaactgagttaaggcaggaaggaccccagctgttttctggggtaagccggggtttttgttgttttctgggccagttcagggagaggaggttcagccctgggtgggaggtttttcagtngccgagggttcnggatgaggaactgttgttttttttga

SEQ ID NO: 432918 - DNA, 754 bp, Homo Sapiens
attttttggtttttcttttggggataggttcagaattttcacagctgtattcaggtaactgaagattttgtgtctccagaacatcttgtagagtcatttcatttaacacaggaactgagacttttgaaggaagaaatcaattatgatgataaactacaggtaagagttgggtgttctaggtcctgttcttcaggctttttatattcagaaatatgatacatgtataacagcttaggcagtcattgcctagttggtcacattagggtgacaaccaaagattaacaccaacatgtatttaattgtatgatttatagtgtcccttttggcttaacactttcaaacatttttcttatatttggctttcctagttccctattatttttttaaatctggaagttgtcattttttaattaatttctgtcgaactgaagtgattagaaatatcaacatctctttcaggttaaaaatattttgtatcatgcagtcaaagaaatggtgagagccttgaagatacacgaggatgaagtagacgatatggaagaaaattaagtgtgatccagtttgatatttttaggttgttgaactgggattacttaaccttgaatgatgatatgtatgcacactgactttaagcttcataaaaccatcagtgccaagacattctcttttgtagtaatacttggtactgacaccacagcagtatagcatatgtcacagcttctgtgattcaatgttataaaacaggcagacattt

SEQ ID NO: 432919 - DNA, 953 bp, Homo Sapiens
tttttttaccaaaagccaaaccattcatatgtatggatttcataaacatttattgatccttttttgaggtaagtataaatacctttacatggctaaccttctaacacttgaaaaatcaatttcaagggactcttttacttcacattgatcacagaacttacatcctttcagaaagatgatgtatcagcactgaacatttcttaaaacaaatttccataattacggagtttaaaaagtacctgagcaaagggtttcaaccaattatttcaggttgatatataaatttctttcagagtatatgacaactacagtcaagggtatggattactcaaaatctgagtctactcagtaagtatcatagtatcagatgtgatagagtagaatcattccctaggtcagcagccaaaaatatctatcagattcaaagaaaataaagatcctaccttctttagacgtttccatgaaatatttgtttttacatcccgcgactccagatagctacttttcgccacccaactaatatctggctcaagaacagatcagtcttttattaacagggaatggaggcacactaccaactgggaacaaatcaccattcaaaaccctcaaaatgttaacagactttcaaagaggagcaagagaaacagggttttgactttcaacaaaaactcccatctactttgaagtaaaaattatgtaatggtcttatattgttgaatgccaagtgaaggtacggcaacaatgaataagtccttgcttgaggggaagagatattatttgcaaactaacttataccttttgaagaaattcccttatcttgtcaacatctttcccagcataaatatgccacagagcaccaggtatttcacttgagtccttcaatcttttccttaaaatgtcatccaaatcttcttcctcaaatttcttgagattcctgcttttgagagaatgcc

SEQ ID NO: 432920 - DNA, 1538 bp, Homo Sapiens
  misc_feature (1009)..(1021): n is a, c, g, or t
ggtcatccatgtgctatacttttgaaacagttataaggaaggaaaccagatagatggaaacttcatagtggaaggaggtggtgagaaggaagtagtaaactgttaagagcatttcagcattgctgtattgttttaatattctttggctttccaaattattgcagaatgttattttttaactgaagaagctcattcagttgttccattgattctgagaagaaaagatttgttattacaaataaaattgaaatttaactgaacaggatttaccatttccttacttaaattggagtgtctattttaattcatatttcagatttcaaaagaacaaggccttgaagttctaccagaacatgatccaatacgtgaccaaagttggtatgtgaacaaaaagctccgtcaaaggctgcttgaagaatatggagtcagaacctgtactcttattcagttccttggtgatgctattgttttgccagcgggagcacttcatcaggttcagaattttcacagctgtattcaggtaactgaagattttgtgtctccagaacatcttgtagagtcatttcatttaacacaggaactgagacttttgaaggaagaaatcaattatgatgataaactacaggttaaaaatattttgtatcatgcagtcaaagaaatggtgagagccttgaagatacacgaggatgaagtagaggatatggaagaaaattaagtgtgatccagtttgatatttttaggttgttgaactgggattacttaaccttgaatgatgatatgtatgcacactgactttaagcttcataaaaccatcagtgccaagaaattctctttgtagtaattacttgttactgacaccacagcagtatagcatatgtcacagctcctgtgattcaatgttataaaacaagcagaattttaaaagcagcactatatagctgttttgtattatagtgtatatgatgtttgtgaaaatgccagatttaaaatgatgtatttatttttggtnnnnnnnnnnnnnttctatgctatattgttgatcaagtgtaaatgtgaccttgtacagtttactaaaattactgatatttttcactacattgagacagttactgtgagaataggacacaaacaccagctattgcctgcatctgggaaattgctgaatcgcacagcagtcatgtcataatcagaaaattactgccaaataattgtaaaatttgtaaagtataaagtatataaagtagatactaaatacagacacttcaatattttgttgaagctattgactgtacaattaaacattttcaaaaggtgtaatttatttaaaattgtctcattttggtaaaatttatgtgaacttttaaagctaaatattaaacttaatatgctatgtaaatatatacatatatacatttaatgatgtatttttttaaaacattggcttgcttttgttaaagtgcaagtgttacatatggctttgtacattaaagttgaaaggggttttacattttccattaaaaggactttatcaaaaattg

SEQ ID NO: 432921 - DNA, 296 bp, Homo Sapiens
tcagtgctgatacatcatctttctgaaaggatgtaagttctgtctgtgatcaatgtgaagtaaaagagttacagccttttttgtaccattttatccctgaatacttacctgtattttaatctgaagtatgatcatttgtgccttctaaagcagattatttaactgattaaagagtcccttgaaattgatttttcaagcgttagaaggttagccatgtaaaggtatttatacttacctcaaaaaaggatcaataaatgtttatgaaatccatacatatgaatggtttggcttttggt

SEQ ID NO: 432922 - DNA, 577 bp, Homo Sapiens
  misc_feature (60)..(81): n is a, c, g, or t
tcctactccgcattcacactttctggtcactcgcgtttacaaacaagaaaagtgttgctnnnnnnnnnnnnnnnnnnnnnngggccaggggagacatacatttaaatataaaaatagacctgtgccagcgactccggctggaattctgctgaaagggatgtgtcttcagaaaccaggatggttctgctctgtgcaccaggcagtggcttattcaggaaaagtgagcctggatttccctttcacctcttccccctaataaaacaggagactgccttttacctccccttagttttttcttttatgatgaagacaaaagtagttttcattaacggtaggaaaaaagagcaatcctcaggtactttcttctcttctagaaaaacaaactgtgaacctgacgggtgttgctctagatctggtttccacctgctatgggtttcttttcccttccccgtcttctgcttccgcctttcccaggtgtcctcttctttctcgctggtcttcgtgcccttgttttcctcttttcgatccccgttctactgcacagccggccccatccctctggtttcgggagagtggc

SEQ ID NO: 432923 - DNA, 1393 bp, Homo Sapiens
  misc_feature (314)..(314): n is a, c, g, or t
  misc_feature (330)..(331): n is a, c, g, or t
  misc_feature (346)..(346): n is a, c, g, or t
  misc_feature (353)..(353): n is a, c, g, or t
  misc_feature (355)..(355): n is a, c, g, or t
  misc_feature (365)..(365): n is a, c, g, or t
  misc_feature (943)..(943): n is a, c, g, or t
  misc_feature (1146)..(1146): n is a, c, g, or t
atggtggccagagtgtcttgctgtactaaggtctgaataatatccattataggaccatgatctggatctctgagacaagcttctttcatcccatcggcttgaacaggggtcacttaacttatctcctttactccatttttctccactaggtggtctatatgctcttaatctctgcatttcctctttccagtgaggaggagtttcactgctgtcatcatcatctgactcagaacaggatcttgatcttggaggtgtgtgatagcgaattgtgccccttcctttaatcttccgtccagactttgatacagatggtnttctgatcacttacanntgggtgcaacatcangaatggntncaggggtctngcagtaacaacaggcatatctcttctcagtaaaaaatcggttctcaggcactggaggaatctcttctgggcggaccacaggtttttcccttttagcactggaatcaactgaccttttttcattggtatcactcctctcagagtgaccttttgggttcattgcatgtttattccttggctcttctgaactgcttgcttcctttcgcctctttttagaacgtttaacttttggcctcctcttatgtttcctccttctgcttctctcatgttcaagttcactttctgaagatgattctgaagaagaggaggaattggaagaggaatccgagccttctgaatgagttggtttcttcctttttttctcaaaaacatcttttattgattttgtggcaagtactccacagtcaataacttggacatctgcatatgttctgcttgcagcatcgttcttcagattttcaatttgttcgattacttcaaaaccagaaataaccagtccaaagactacatgcaccccatccaggtgtggagcaggctttgtggtaatgaaaaactgggaaccattggtatgtttccttngatttgccattgataaaaggaacgttctgtcatgtttgagaataaagttttcatctttaaaatatccaccataaattgattctccaccttttccattaccttcactgaagtccccaccctgaatcataaagtttttaaccacacgatggaacgtagaacctttataacataacttcttcccagttgttttcccaaggcctttntttcctgagcacaagcaaaggaagtttttgcatgtttttggacatatgtctgagaagagctgaaacataatgcgaccaaccggctcccggttgatctcgatgtcgaagtggcactgcggccggtcctgcgcccccatcgcgaccgaggtggcggcaggagctggctggcctccagcctgagcgggtcccccgtgagcagaagagaaagcactgccactgcagccaaaccccaacgccgctaacggaa

SEQ ID NO: 432924 - DNA, 395 bp, Homo Sapiens
tctacatttcattttttgtttgctgtatgtaaagcatattttatgatattcagtaatcacattttttactctgaaaggtaggcactgaatttagtactaatgtttttattaatgtttcttaaaagtttttgagaaaaaaaggaagaaaccaactcattcagaaggctcggattcctcttccaattcctcctcttcttcagaatcatcttcagaaagtgaacttgaacatgagagaagcagaaggaggaaacataagaggaggccaaaagttaaacgttctaaaaagaggcgaaaggaagcaagcagttcagaagagccaaggaataaacatgcaatgaacccaaaagggtacgtgtaaaacaccaatgtactcttacctaaaaacaaacactctg

SEQ ID NO: 432925 - DNA, 1086 bp, Homo Sapiens
cggctgctggcggcggctgagccgggagaaaggagctgcggccaccgttcgccctacttctgcgcctcggggcgggcgcgccggtaaaaatggcgaaatgggggtaggcggcgctggacctgaagagatggggcgcgcaggtggggcggttgtcagagccccctgacgtgggcgccgggcttttatcggcgatttgatctggcgacctcgggccggcgcctaagaggtcagactgcggagcctgcgggtcgccagcggccccgccgagagccggaggcaatggatgaacagagcgtggagagcattgctgaggttttccgatgtttcatttgtatggagaaattgcgggatgcacgcctgtgtcctcattgctccaaactgtgttgtttcagctgtattaggcgctggctgacagagcagagagctcaatgtcctcattgccgtgctccactccagctacgagaactagtaaattgtcgttgggcagaagaagtaacacaacagcttgatactcttcaactctgcagtctcaccaaacatgacagaaaatgacaaggacaaatgtgacaatcaccatgaaaaacttagtgtattttgctggacttgtaagaacgtgtatctgccatcagttgtgcactttggggaggactgcatggcggacatacctttaaaacctttggcagaacatttatgagcaacacgtcactaaacgtgaactgaagaggtagccaaacgttcggtcgggcgtctcatggacactgatcagcttagttcaagaagtggaaaggaatgtagaagctgtaagaaatgcaaaagatgagcgtgttcgggaaattaggaatgcagtggagatgatgattgcacggttagacacacagctgaagaataagcttataacactgatgggtcagaagacatctctaacccaagaaacagagcttttggaatccttacttcaggagggggagcaccagttgcgggcttgtagtaagagtgagttgatatctaagagctcagaaatccttatgatgtttcagcaaggttcatcggaagcccatggcatcttttgttacccactcctggttt

SEQ ID NO: 432926 - DNA, 712 bp, Homo Sapiens
  misc_feature (41)..(41): n is a, c, g, or t
  misc_feature (53)..(53): n is a, c, g, or t
  misc_feature (61)..(61): n is a, c, g, or t
  misc_feature (72)..(72): n is a, c, g, or t
  misc_feature (98)..(98): n is a, c, g, or t
  misc_feature (109)..(109): n is a, c, g, or t
  misc_feature (404)..(412): n is a, c, g, or t
  misc_feature (528)..(574): n is a, c, g, or t
ggaaccgccaaccccaccatacaagccggagtaattaaacncctaaatggaanggattttnccccccctaangtgtttggatgaaaatgccgtatacncctaaaccccntttcctgtagtttgtgtttttaaataaaggcaatttaaaatttgggagccctgcatttcctcaatcagtccctaacacagcccaggtcagaaagtacgagcccctttgggccagctgtgggggcctgcaggagtggttatctctgtgattcggctgaaataaaacaactatcttagtccttaaggacaaagaaaatataaagttcattgtgacttgaggaagccaaggagtaccattttagagttcaaatttcatttgtttcataataaactttgttaaaatgtgacctggattnnnnnnnnntcatattaacatgaatttaagtaattcaagtctctccagtaaactttacataggagggaaaaatcatgttaaatctttaggaaaaaatttaaacggttaattacttaaaaaaattnnnnnnnnnnnnnnnnnnnnnnnnnnnnnnnnnnnnnnnnnnnnnnnaccgtggaagtgagcagggtagaacagaagaggcctgttactcttgacagttttaccaggacttcagtggatttgtaacagtgtccccaactgaccaatggggcaatgcattcacagtgatccagacactgcctctcc

SEQ ID NO: 432927 - DNA, 844 bp, Homo Sapiens
ttaggctgatcatactagagtatatttattaaatttcaccattatgatcactttgttataactaaattaaccctgacataaactttgacattttaaaaacagagaacatactgatttttcaactattttacttacatgtgttttttaattctcatgcagtgctcataattaggagatactacatattcaccctcacattatgcttattaagaaccaagctcagagggtagaaaagtgccaacttcattttccataaacttcccatacatatattaagccactgttcttctaattatatacttatggtacattcttctgtaaaatgtataactgtagtcacataaccattgttatgacaaggcggcaacatcatttcagattacaacaaatgagaccaaaagttgaagagaccacagcatataaaagtcatgagaacaccacacacatttcaatattttccactttccagtcaaaaaaacatgcacaaagttttcttagcagatagttgtcagaagtgcataaaaaaactggctttcaggtcatatatgttgagtgaggatcaatgccattgaggaaagagagctgtgttcattatcttttaggtctgtctatatcatctatagctgctagaagtttttgtcttgctttcttattgatatgggatcccaggcaaacattcaccagattggtcagctgcttcgttgaatattccctgtgctctttgatccaccggttccatgtcattctcagttaggtaataagctttaatataagtttctacaaattctttatcaggaatgggtctaatatctgttagtttttcaagtttcattaaaaactgttg

SEQ ID NO: 432928 - DNA, 398 bp, Homo Sapiens
aggctgatcatactagagtatatttattaaatttcaccattatgatcactttgttataactaaattaaccctgacataaactttgacattttaaaaacagagaacatactgatttttcaactattttacttacatgtgttttttaattctcatgcagtgctcataattaggagatactacatattcaccctcacattatgcttattaagaaccaagctcagagggtagaaaagtgccaacttcattttccataaacttcccatacatatattaagccactgttcttctaattatatacttatgggtacattcttctgtaaaatgtataactgtaggtcacataaccattgttatggccagggcgggcaacattcatttcagggttacaacaaatgggg

SEQ ID NO: 432929 - DNA, 1402 bp, Homo Sapiens
  misc_feature (1114)..(1122): n is a, c, g, or t
cgagattaaataatttattaccattgctaagatgaacacatatacttaatactcaattttatgcagaactttaaaaaaatagttttaatacagtatcaaaatttacacaagtttattttgtcaaaagaccagtgtcccttgtattagcttctgcaggctctgctgcaggcacaaaagcttattttaaatgtcttcagagggtaggaatacaacaatttaaggatgaaagctttcctaggaaagaaggtgtaaatatagcaagcaattttcttttatagagtaataacattttaaaatataacatttaaaaggggagcttaaattgtaacccaattatgataattagagagataattctatagtaaattaattcataaatattttcgggaaaatagatgattttccatcacagtaacatttttgaaggtttaaccaaaattccttcacagtctcctactagtgacaattaactcgttatgtaatgagcccatctaaaacaacaacaacagagaatatctgccatgaatcaaatctcagaaatttagaacctatccaaaaactgggaattgttgcatttctacttttataatcttaaactaccataaaaacgtagcattcggtcacaggcctcttgcacattcatacaagaaactatcattgcatttggattaacacaaaatacctatcatagcatttccagtacacacattctaatattatatatatgtatatgtataccaaaaataagaaataaactaagcaaagctagcacacctctttttcaaacctcaagcaatctgaacaagagcttttagcctcaataatgaaggacatgcgtcagtttcataaaatgttagatagctgcagtaggcaaagaaagcttttttcataaatgcagtgcaatattttaaagtttacataaagtttattaaatatacagcatgtctagaaactaaattgtagaaattgacatctcacagctcgaaacacttagaaaaattatgtttgttgtttttagttgaaattgttaatattaacaccaatggatacactgaatgaatatgaaggttggtatgccccaagatgtgtctttatgagaaactcattaagatgnnnnnnnnngatatatttatattgatcaattgaagtaaatggtactctctgataagcactctacaacgtcttgctacccttctagctggtagggagaatttacatggtattttttagcacctcagaagtcaaaacaaaactccagaaacttaatcttatcttgcatccataattaattatgcattaggaattactagtttgtttgttgactgaagtgtaagaggtaaatgcccaactctcaaacttgggaagctggaaaatacctcttcatatcttcaatatgatatgg

SEQ ID NO: 432930 - DNA, 1205 bp, Homo Sapiens
ccgggcagagccttgtgcctcccggtaccccagcctgagcagtcctgctcaggcgcctgcccagtgctccgcagcccagctctggcccggggctcggtccccgccgcacttcttctctggcctgaggtgtcctcggcgtcagcctcgaggtcctgagaagtaggcagagtctcgggtagggattcttctcgttgaggccactgagggaggtggagagccgtgtctcgggcccggggccctcaccctctgaggccagctccgcaaaggcctggggctcacacccttcctgcgcctccttgagcacaaactcaggggactcatagttctcggtgtcatagccactgtccagcgctcgcggctgccctccagaggggccagtggccgacgggctgaagacctcatagccaccatcactggctgaggacgggatgtccagggagtccagggagtcgggggtccccacctgcttctgcagagagcggaaggctggcaccacatccggcctcctggcctgcaggccgtcgctggacgtgtcggtgaagatgcctgaggtggcctcagccgtgtcctcatcctcactgctgggtgcctccacctcgggagagctgctgctgccattcagggcagaagccagcttgatggcagacacctcgccaccagtagcaggcgtgggagagtcaggcagggcatcaggggcgtcgggggcactggcctcctccgagggaagtggggctccctcctgggatggggaggggacggaaggaaggggcaggcggggtccggtagtgccctcagcctccgtggcaagcttgggctctgcctgcgggtggtcacccccactactggctgtctctgtccaggagggtgtaaccaggcagggagcaggtgccaggccctgggcagagcatagatgagggaggccggggcagcagcctggctcctgggcagaggctgcctggagcccaagcagaggctctccagggtaccccggctcgggggaggcccgtggggtctgctttggactggggcagccctcagcgtggccgcccgcagagacggggtcccaggactctggacagcggctgccgctgttgttgttggctgacacgttggagcgccagtgcccgcgctgggcggccctccgcgctcccacctcctctagctcatcctcgccagtcaatcccgagaattccggaccggtccag

SEQ ID NO: 432931 - DNA, 968 bp, Homo Sapiens
gttctggggcccaggcgccgcggcccggcacccggtggaatagccgcgcgtacagcccgggcatccagggactacatgaggaaataattgacttttataacttcatgtccccttgtcctgaagaagcagctatgagaagagaggtggtgaaacggatcgaaactgtggtgaaagacctttggccgacgtgctgatgtacagatatttggcagctttagtacaggtctttatcttccaactagcgacatagacctggtggtcttcgggaaatgggagcgtcctcctttacagctgctggagcaagccctgcggaagcacaacgtggctgagccgtgttccatcaaagtccttgacaaggctacggtaccaataataaagctcacagatcaggagactgaagtgaaagttgacatcagctttaacatggagacgggcgtccgggcagcggagttcatcaagaattacatgaagaaatattcattgctgccttacttgattttagtattgaacacagttccttctgcagagggacctgaatgaagtttttacaggtggaattagctcatacagcctaattttaatggccattagctttctacagttgcatccaagaattgatgcccggagagctgatgaaaaccttggaatgcttcttgtagaatttcttgaactctatgggagaaattttaattcacttgaaaaccggtattagaatccaagaaggcggtgcctatatcgccaaagaggagatcatgacagccatgaccagcgggtacagacccgacgatgctgtgcatgagggaccccccggctgccgggcaaatgacggtgggccggagctcctatgggcgcaggcaggtgaagcagggtctcgattatgcctaacttatgtgcccagcaggcgggtcacggaggggcaggtctatccaaaacgaacgccaaaggactcagacgacacacacggaccc

SEQ ID NO: 432932 - DNA, 716 bp, Homo Sapiens
aactttagaatgtcattttattagacatacttgtaaacaagcacctcttggcaataaaagcaaaaacgataaacaacgactaacccaaccaactatagtactccttccactctatgctaacggaagacttctcacaccagccagttaaacaatgaaattcttaaacacgcagcctgctggggctgcatgcagagctaaaatgcaggtgtgctgacttcttggagctggagcagaggaaaacatcaaaaagcatatctggaatctatcacagctttctttcttaagcaaataaaaatgcaaattagtttcataaccacaattcaatttatcaacctttttctgaagaattttcatttaattatgtatacataacaggaaataaatctttttcacaaacactctcaaggcttacgattatcaagaaaatgacaaaagtaaaagcaggaggaatattaaacacatggcggggaggtcaatttccgtttctgctcttaaaaggtaaaaaaatcaccatataattaagtacaaaaacctgcattgaatgacaactgctggtgtatttacttgatcagaaatgaagaccaagaatataataaagccctatgataatattcaccgggagcactcccctcagtgtgtgtacactaacaggttggcaaagtttctggagcattagcttatagaaacacaggagtccttggttagctgcattatat

SEQ ID NO: 432933 - DNA, 533 bp, Homo Sapiens
  misc_feature (402)..(438): n is a, c, g, or t
aaagaaggtcaaggaatagaagacaggctaaattgtcattagactgtgtctgtgttctttgtcacgcctgcctttcctctggactgcctgggaggatgtgtgtgctcctttcttgcttcttgagtagcagggaggaaggaatggatgcaaggatgtgaagattgatcagaaaggcacattattgcacgtgaaaatgagatggatacatttgacccctggctaaatttcagccaggtggttgtcttgcgagaggggcttgtgtgtgggagctagcgggccgactgaaaaaagtggggggagacaagaggcttccttcatctggaaatccgcaggatcttactgacatttggcttcagggagtagagctccaaggacacctgtgtggatctgcctggagatagnnnnnnnnnnnnnnnnnnnnnnnnnnnnnnnnnnnnnagggagaagtaggcatttcatcaaaaatacatttgaaaaatgttggttctaaaattcagtcgttatcaattcgggccaggtaccaaagtcactcc

SEQ ID NO: 432934 - DNA, 445 bp, Homo Sapiens
  misc_feature (298)..(298): n is a, c, g, or t
ggggctatgctccatctgcctgccacagttgttatgtgtatacccctacaagaatactcacctcttgtcttcaggtggcatttttcaactccgctggagccaatgcccaggaggaacaaagggtgtgctgccagcccctggctcacccagtggcctcgtcccagaataaagccagaggtagcggccccagccccagagagtgggggtgagtctgtgtttggggagacccaccgggccctgcagggggccatggagaagctgcaggtgagtaggtcctggcatgggccaacaagggggncgggggggcaggacaaggcaggtgactcctgacatgtgaccccattattttggctccacagcgactttatggaaggagaaggtggacctgaaggagcgggtagagaaactagagcttcaattcatccacctctcaggacagacagac

SEQ ID NO: 432935 - DNA, 407 bp, Homo Sapiens
  misc_feature (55)..(55): n is a, c, g, or t
aaagaagttttcagtcccgggcaccctgggctgtgctgaaagcctctgcgtacantgcgtgagttagttgggaaagagagctcccactgttctcttttagcccttttccttttgtaccacagcaattgctttcctggagatcagaaccgtggctgggtttaacatcatctttggaaatcttttggggacggtgcgtgtgctttgcacaggacgaggtggcagctggcttgcctgcgtggcctgcttcctggagataggatgctcagacccaccgctgctcttcaggggtcgtggaaggaattaatgcacttccttctgtcccccaatctctgtccctttacgtgtctctggagctgagcaggtattctttttctttcttcatctcagtagagaatcatggcagaagg

SEQ ID NO: 432936 - DNA, 988 bp, Homo Sapiens
  misc_feature (193)..(193): n is a, c, g, or t
aggttccccggaggagccccaaaattccccccttgccagagattaaggggggtgaataagtccacgggttccccaagttcctttttattctggtcagccaaatcccagtggggaatctagggataaaaagcctgaggagtcccaccctggttcgtcaggcacacccccagctccctgggctattggggctccntagagtgggcctcatcagcagggttctggggcaatggtcagaatttgccatgcccctccttgtggtctcccacaagctgcaacacctgccccggcagttcctgcaggttcaccttcatctcctcctggtcctgggccagcctgacgatgtcctcctctcccagtgctgcgtctctgacactgccccctggctgatgtactttctccctatggtgtctgtctgtcctgagaggtggatgaattgaagctctagtttctctacccgctccttcaggtccaccttctccttccataaagtcgctgcagcttctccatggccccctgcagggcccggtgggtctccccaaacacagactcacccccactctctggggctggggccgctacctctggcttcttctgggacgaggccactgggtgagccaggggctggcagcacaccctttgttcctcctgggcactggctccagcggagttgaaaaatgccaccgtgcggctcccggggctcccccgcgggccgagccgagacagctcctcaccttcgccgcggagaaagacaataggctgcctctcccccggcggcggcagcagcggctgcggctaaagcggcggcaaccgaggcgagcagtgggcacggcggtctcggccgagccgaggggcttcaccgctgctgctccggctccgcgacagctctgcacgtagccccagccaccccgcgcaccggctacaagccgcccgggggtggccggggcacgcaagagggcctcgtgccgaattcgccacccaggcctcgcgt

SEQ ID NO: 432937 - DNA, 3690 bp, Homo Sapiens
  misc_feature (74)..(74): n is a, c, g, or t
  misc_feature (77)..(77): n is a, c, g, or t
  misc_feature (151)..(151): n is a, c, g, or t
  misc_feature (251)..(251): n is a, c, g, or t
tttacttctcatgccgcgccccttcctgttttacgccttcgacgcggtgatgttgggccgttgcaaaaatgggnatnggcccaaggggccatttttttaatttttgaatcccaaatgttccatggcccctttcttggcaagcccaaccccncccccacaccggttaagggcctggcccccagggaaaaaaccgggatggggaagagaccttggtgggtccccccgtgtgcctttccaaccttttcccaggntgcagccaagggtccccagggctcccagagggtgggacccacagcaggtgcaggtagtgatggtgggtgctggccttgcagaggttacggggaggggactcagctccacagccaccagctgagtcggggaccccgggggagccagccccaggctcaggtgctcagtcctccaccctagccagcacacattccccctccacgcaggagcaggaggagatggagggaagtggtttttgatttaagttcatagagaaggggcgagagtggggagggatcagggaggcagctggcaggaccaaaactggctacccggacagtccctggctccaggtggggaagggaagctgatccccatgctggtcccactgctctggtcccctcacccctcaaaactccagatggaccaggcctccggaacggcactgccgcccacacactcaacacgcaggcacgcgggggcactcagttaccacaaagttaaaattaaggggtggggaagaagaaagaaaataaataaaacagactttccagtgtttgctgctggggaccccagcacacaggttggggcctgtgccctaggcaggggccatatggcattaaagggagagcagcaaggggctggtggctacagggcagggacatccatggagactatgtacaaaggaggggatgcccccgctcagcccccagtagggctgaactggctcatgggggtggggcgcatgtacggagagctgccccacttggagtgtccccacctgcccctttgctgagggtgccctagaaggcgaggggctgggagtgatgccttgcaggcccctgctcactaggaggggggagatgctatatacagaggggaggtgcatggaatgtgggggacagaagctcctgcccccccacctccccatccttaggggctcgacaggggtgggcaccagggcacctggctgccagggagtgtggcagcactaagggcacttgtgccagtggctctgttggggtggggattaatgtctggagtggcccagctcctatggccagtgaggtcctagggtgcaggtgagggtgtggggagagaggtcactgcttcttctctcgggtggtgatggtgaccagctgcttggcagccttggcgatgtcataggcgcactggatcacctgctgagtcagcagctggaagtccactggggcgccgggctctgggggcactgtcttccggcactcactctgcagccggtaggcgctggcgttgagcagccgcagtgagctccgcactggctccagggctggcctctttgggaagagggaggccatctcggtcacagccaaatggatcttctctgagcagggcacgaagctgtcatgcttgaactcctgggctgcccgcaacagttcctgaatgttcttggtgacctgctctgtcttcaagatgacatcctctgtgctgggaagcccaggatctaggtctccatccaggctttccagctctgggtggaagtcttcctctttgcccagctctagaaacctcttcccttccagccccagcagtgggtccccactttgcgtgttctcatagtcactgtcggctccactgccgtggcgggaaagcttgctcgtgtggcggcttccctcctgggagcaggacagcagcggggaggagggagtgaagggcacagctgaggcagacacccctttccggatccggtaaaggccagcagggacgtgcactgaatagatggcgtcgtcctctagctcagtgctgtggaaaggctgcagccgcgtagtgagctcgtccccaggggggcccccaaagggcttcagggcagagccaggttcatacatggaaaaggcctggcgatccctgcggtgtgtgctcccgcctggcgccatgggtgtgtgttccgcccgttcactggggagtggaggtgtgggcaccggccctggaggctgccggagctgcaggttctccgcctgcagcttgtggatctctcgctgcagcctccggagctcgtcgctcaggctactgttgaccttcatgagctgctgcacctttgcctccgatgtagccagggccttcttcagctccaggtactcctgcagcgtcacagccccgtcagacaagtccgaggagtccatgctccgggcccggttgctccgagtggcgccggtgctgcgcaggggctcctggtctgtgtcctcgtcagaggccacgctgtcgtagtcgtgttggtcgtcgaggtcactctggctccgcagagacagctcgaggttgtctgtggggctgctcaggctcttgccctgctgtctccgcttggcctcactgagaatgtcgatgatcaaggtggcaaactctcgggcattaaagcgggccagcttttgtcgcccctgattccgcgtggctgagtattccgggttaacaggcaggaagggcacagcactgcgctctgtcaccagagtgctgtggttttgggtagccagccacactgcatcattttctcttcgatccacctcgtcatacacgtccatggcgagttcctcaaaaagccggttgctgagcgcctgcagcttcttcttagcagctttggccaattcggataagtcaaggctgtcagccatctgtgggatgatgtaatgcccattcttgtgatccggcttgcgtccacagaggtagaaggccagccggtcagtgagctcatattggcactcaaccagcctttccgccagctcatggtgccccgcctgcctggcatagtcaatgggtgtgcggccattaacatcaggggagccagggtcagccccatacactacaagcagctcggcctgcagtgtctgtcctgccttggcagccacgtgcagaggtgtggtgcccttctctgggtggaagaagttggcctgggcacccagggagagcaggcgcagacatgtctccaggttgcctgtccgcacgctcgagtgtagttgcttgctgaggtctttggcggtgactccatcatcgtcccggcagggaagcttgtgcacaaatgccagcatctggtacttggccctgatgaactctgacttgatggggtggactttgtcttgggggtttgctttacgccggccgctctgcacttgtgcggggtccagcagggagtgctcccagatggagttggccccgttgctggcaagcgtgtgcaccatctgcagcagcgtgggaggccaggcgctgtggcgaaggtgcttgacaatggagatgtggcgtcccaggctccggtgcacgctgcagcactcgtcacacaccagcacacccctgctgatggatgcccagccagggtccggggcgctgcagtccgcacacacctccgctcgccgacgcgtggtcgacgatatcccggaattccggaaccggtaccagcctgcttttctttaaaaacccaacgggtgttctactagttcacta

SEQ ID NO: 432938 - DNA, 1498 bp, Homo Sapiens
  misc_feature (298)..(349): n is a, c, g, or t
  misc_feature (528)..(537): n is a, c, g, or t
  misc_feature (587)..(641): n is a, c, g, or t
tatcttcgttgttgtcctcgttccgcctttacctgagtcgctttgctaattgttcctccatccgttttcctcgcgtcgccgcgcctgttgtctcgcttcctactgctactgatatccattcatctgcgcccaatgctgtgcttttttacgccatctgttatcctgatttacggtgttcttcgtgctcatagcgtttggctgttttttctttgtctgattgtttttcgtgttatcctggccaggatacgtcgtactggtcgttgttcgtggttcggctcgtggtggggtttgctggggnnnnnnnnnnnnnnnnnnnnnnnnnnnnnnnnnnnnnnnnnnnnnnnnnnnncttcttgtttgtttagtcgcgtgtgtgttcctctcgggtgtttcttgatttggttttagtttgtcgtcctcttttttggtgtgggtcgcccctcgctctagttggtgtccctcgttctcttgttttatataatagtgtgggttcttcgcgtccctcttttgtgttcgacgtgtgcttcnnnnnnnnnncttctctcttttcgcccccccctagatagaatttgctgcccgcccgttgnnnnnnnnnnnnnnnnnnnnnnnnnnnnnnnnnnnnnnnnnnnnnnnnnnnnnnncatggtcacttctttatttttgatacaaatgtacatgacacgtcttgacagcccacccaccaccacacaggtagggcctggcccccagggaagaagcgggatggggagagagctggtgggtcccaccgtctgcctctccagccttcccaggctgcagccaggttcccaggcctccagagggtgggaccacagcaggtgcaggtagtgatggtgggtgctggccttgcagaggttacggggaggggactcagctccacagccaccagctgagtcggggaccccggggagccagccccaggctcaggtgctcagtcctccaccctagccagcacacattccccctccacgcaggagcaggaggagatggagggaagtggtttttgatttaagttcatagagaaggggcgagagtggggagggatcagggaggcagctggcaggaccaaaactggctacccggacagtccctggctccaggtggggaagggaagctgatccccatgctggtcccactgctctggtcccctcacccctcaaaactccagatggaccaggcctccggaacggcactgccgcccacacactcaacacgcaggcacgcgggggcactcagttaccacaaagttaaaattaacggggtggggaagaagaaagaaaccattcacataaacagactttccaggtgtttgcttgctgcgggaccccagcacacaggttggggcctgtgcccctaggcacggggccaatatggcacttacacgggagagcagcaaaggggctggatggctcacagggccacgggacattccatggacgactagtgtacacacggaggggattgcccccgcatcagcccg

SEQ ID NO: 432939 - DNA, 820 bp, Homo Sapiens
aacaaggatttacaggatttgtagattaaattgcccctgttctccaagaagcagcgggaacagcagcgctgcagggtgatgggctacagaggcctctgcagcagggtggggtctggggagacattcgggtgcctcctgtccacggcctcgataggccagggcgcctgcagcttgggccctcttcccctttcaggtggagggagctgttcatcctctgggggctgctgggcaagaaacatttcttacgtgataatgtgaagcgtcagaggtccctgtttgatagctctactgagatgaagaaagaaaaagaatacctgctcagctccagagacacgtaaagggacagagattgggggacagaaggaagtgcattaattccttccacgacccctgaagagcagcggtgggtctgagcatcctatctccaggaagcaggccagcaggatttccaatgatgatgttaaacccagccacggttctgatctccaggaaagcaattgctgtggtacaaaaggacaagggtttaaaagagaacagtgggagctctctttcccagctaactcacgcagtgtgacgcagaggctttcagcacagcccagggtgcccgggactgaaaactccttcaccagccccctccacaggatatagaagacttagatcactacgagatgaaagcagagcccattagtgggaaaaagttggaggatgaaggaattgaaaaagaaaatttggcaatattagagaaattaggaagactgaaagacaagagcatttaactgcaaactgttgtcgttgtcaactgggttgtcttcctgaagta

SEQ ID NO: 432940 - DNA, 454 bp, Homo Sapiens; identical to SEQ ID NO: 318851

SEQ ID NO: 432941 - DNA, 1029 bp, Homo Sapiens
tccgacaattcccgaaggagtccatgtttcggggcccggtttgtttccgagtggcccccggttgctgcgcagggggttcctggtcggtgtcctcgtcagaggcccacccctgtcgtagtcgtgttggtcgtcgaagtcactctggtcccgcagagacagctcgagtttgtctgtggggctgctcaggctcttgccttgctgtctccgcttggcctcactgagaatgtcgatgatcaaggtggcaaactctcgggcattaaagcgggccagcttttgtcgcccctgattccgcgtggctgagtattccgggttaacaggcaggaagggcacagcactgcgctctgtcaccagagtgctgtggttttggcgtagccagccacactgcatcattttctcttcgatccacctcgtcatacacgtccatggcgagttcctcaaaaagccggttgctgagcgcctgcagcttcttcttagcagctttggccaattcggataagtcaaggctctgagacatgcacttttgccgagatctgtcagccatctgtgggatgatgtaatgcccattcttgtgatccggcttgcgtccacagaggtagaaggccagccggtcagtgagctcatattggcactcaaccagcctttccgccagctcatggtgccccgcctggcatagtcaatgggtgtgcggccattaacatcaggggagccagggtcagccccatacactacaagcagctcggcctgcagtgtctgtcctgccttggcagccacgtgcagaggtgtggtgcccttctctgggtggaagaagttggcctgggcacccagggagagcaggcgcagacatgtctccaggttgcctgtccgcacgctcgagtgtagttgcttgctgaggtctttggcggtgactccatcatcgtcccggcagggaagcttgtgcacaattccagcatctggtacttggccctgatgaactctgacttgatggggctgcatgggcctcgtgccgaattcgccacccaggcctcgctc

SEQ ID NO: 432942 - DNA, 984 bp, Homo Sapiens
  misc_feature (17)..(17): n is a, c, g, or t
  misc_feature (24)..(24): n is a, c, g, or t
  misc_feature (36)..(36): n is a, c, g, or t
  misc_feature (69)..(69): n is a, c, g, or t
  misc_feature (93)..(93): n is a, c, g, or t
  misc_feature (106)..(106): n is a, c, g, or t
aactatgttacaaaaanaaggaancccccccgcttnaacccccaaataaggcttgaaactggcctccangggggtggggccgccatgttacgnaaaactgcccccnacttggaaatgtcccccaacctgccccctttgcctgaaggtgcccctaaaaagcgaaggggctgggagttgaatccttgcaggcccctgctcaactaaggaggggggaagatgctaatatacagaggggaggtgcatggaatgtgggggacagaagctcctgcccccccaacctccccatccttaggggctcgacaggggtgggcaccagggcacctggctgccagggagtgtggcagcactaagggcacttgtgccagtggctctgttggggtggggattaatgtctggagtggcccagctcctatggccagtgaggtcctagggtgcaggtgagggtgtggggagagaggtcactgcttcttctctcgggtggtgatggtgaccagctgcttggcagccttggcgatgtcataggcgcactggatcacctgctgagtcagcagctggaagtccactggggcgccgggctctgggggcactgtcttccggcactcactctgcagccggtaggcgctggcgttgagcagccgcagtgagctccgcactggctcttcctctcagtgacctgtttgtccaccaccagtgtcagccacctggcagtcacctgaagcctccctcaccctccagtcctagtgaagctccccaggttcctcaatcacctgttgcctgggctttgtaagtttcttaatctccctccttctagttttgtccctacaatcctgttccacccagcagccagggtgattttttggatacacctggctgcactaccccttgccttaaggcactgcagtgataacaggtgcatatggcacactccaaaccatacttcatcagaatccctcctcgtccgaattcgccacccaggcctcgctc

SEQ ID NO: 432943 - DNA, 957 bp, Homo Sapiens
cctttgagccatcccagggggtgtgccggccactgtcatgcagtttgagtcatgctgccagggcaggtatccagctcccagctggggagtgccgagagccaaatccactgcagataggggtgatagtcacggtcccacgtcctctatctgtcagcaatccagtggtgatcaccctgctcgtcagcacacccaagctcctgggctattggggctcctagagtgggctcatcagcagggttcctggtcaatggtcagaatttgccatgcccctccttgtggtctcccacaagctgcaccccctgccccgcagctccctgcaggttcaccttcatctcctcctggtcctgggccagcctgacgatgtcctcctcgtcccagtgctgcgtctctgacgctgccccctggctgatgtacgtttctccctatggtgtctgtctgtcctgagaggtgtatgaattgaagctctagtttctgctacccgctccttcaggtccaccttcgtccttccattaagtcgctgcagcttctcgcatggccccctggcagggcccggtgggtcgtccccgtactacagatctcacccccactctctggggctggggccgctacctctggctttttctgggacgaggccactgggtgagccaggggctggcagcacaccctttgttcctcctgggcattggctccagcggagttgaaaaatgccaccatggcctcccggctctccaggtcccctgggatgttcggcatgggccgaagcgcctcctgctcactgtccagatgtcctcctccatctccttcgccgcggagaaagacaataggctgcctctcccccggcggcggcagcagcggctgcggctaaagcggcggcaaccgaggcgagcaatgggcacggcggtctcggccgagccgaggggcttcaccgctgcctcgtgccgaattcgccacccaggc

SEQ ID NO: 432944 - DNA, 996 bp, Homo Sapiens
  misc_feature (255)..(313): n is a, c, g, or t
catcatatacctgtcatttatgattccactgaataatccctttttataactcttgtgatctgtatatgtccctgagctctttcataagtctatctgaagcttgcactgacccagacactgcaccatttaaatggtcttgcctttgagtcttcctaattttctctaatattgccaaattttctttttcaattccttcatcctctgactttttcccactaataggctcttcttccttcatctcatagtgatctaagnnnnnnnnnnnnnnnnnnnnnnnnnnnnnnnnnnnnnnnnnnnnnnnnnnnnnnnnnnnctgttgtcccattctgacccgtgggtattgtttgatctagcatctcaacatccaggtgcttaggaaggttatataaactgcagagttcacatatcaaccacttcaattgctgacgaagccaattgttgttcttagtatcttctagacgttcccagaactgatgtcagatttgggtcttccagaatccacaaaccatatcggtgaagaagatggataggattccgtgatgttgcacgtggagcgtgagcttgcggcggcagcgagtgcgggctgccctgctgcggcaccaggaactggcagtgcagctcgtccagcttcccactgacgatgcggaatcgctcgtggttcttgtcgaagatggacgccaggaacttcagctcggcctttagccctgacacggacatcttcccctcatctccggcgggaggggcgcggaaggggagccgggcgcggaaggggagccgggcccggagccgccgtcacggccgcgaccgccccgcggggccggcctggccgcgctctcgcggctccgcctcgtcgagcgctgctggaaaatggcgaggggcgcggaagcctcggcgtgtggcggcctgggtggcgcttcctttgtaaccgactccagcggcaggaggcggcggccccgcggcttaaaagggcaacagcgacgccgcccccgcaccgct

SEQ ID NO: 432945 - DNA, 765 bp, Homo Sapiens
atgttacacagcctctcctcctgttcacgtagcctctcctcctgttcacgtagcctctcctcctgtctcctgttcaggagactcaacatctgattgttttccacctcagcctggagctgtcttcccacactctctagctccttccttaggtggttggtctcatcttgtagctgctccaccttagatggccctgctgggggctgtggggccaggggttcagccgtctggtttttgagtttgaacaagctcctcccaagcttctgtaccagatgtatctcatgcttcttctcctccttagatgtgcgaaccagtgaattgatgttttcagtgagttgactgattattgcggagcttgaatccagggctactgctagttcttggtactggctatccccaggtgagtggtaaccaccagaaagtggctgtgtcagggctactgccattgattttctttttcctgttagctcctgctggaatgccagggctcttcctctgccaatatgcttttaacttctttgctccaagctgcactctggctttgcctttgactcaggtggcttttatttgcatgatgactgattctatcgagtaggcactgcttcagccctacaggaagaacaaaacatctctagagcacagcagcgttcctgattcccacttgagaaggcctaacaaaatggcatacaacttaacagtagcagaccagtgttaaaaagtctggagtcaaggggaaaaggtaaaattggaatgtttccagaatctcac

SEQ ID NO: 432946 - DNA, 1059 bp, Homo Sapiens
agcggaaaaagttcctctgttacatcttcaggagaagattcaaaaagtcatattccagggagtgagactgataggacattttcttcagagtcaaccttggcacaaaaagctactgcagagaataattttgaagtggaactgaattatgggctgcgcaggtggaatggcagaagactcaggacctatggaaagggtccttttagtaagacaaaagtgattcatgattcacaggaaacaggagagaaggaagtaaaaaggaagagatcgcattcctgaaattggaaaatgtgaaaatctctgaaacaactgggaattcaaagtttagacctgatactagttccaaatcatcagattggggatctgtaactgaatcagatattgactgtactgattatacaaaaaccaaaaggaggaaaacgaaagggaaagcaaaagtagttagaaaaggtaaaacttttacagctaacattatctaaaactgtgagacgtcaaagacaaagcaaacgccctaggttaagtgtggatgataatgactgggaggatttggactatgcaaaatctaaaagagttcttcgacgttcaaaaataaaaacgagaaatcagggtagaaggactgtgagataccatgatggggatgatgacagaagtttagaaaatgtgttagatttcaatggttgcaccttatgaccttgagggaaagccagttcatttaagaggaaatggactggcatttatggtgaaagctggctgttaaaattatttttttgtcttacaattcagggaatatatttatatttttctatgaaaagttatgaatgtgactaaatcatgactgttatttttatttgcacttgctggtctttgtagcagcattcagcacaggtgccaaaatatgcttcattttgggggcagatctattttgacagtatttgactacatatagcaagagtttgaaatatgttaaacactagacatcctggttatcaaaaccaatgagcattactttcatggcagcaagtgtcatgcagttattttctgaatttgtcaaagaggcagtaa

SEQ ID NO: 432947 - DNA, 380 bp, Homo Sapiens
tttttgttcctccccagcattgctgccactgtgctaatggaagcagccacggcagctttgtttgatagagatttttggctgccgtttttaaatactacccaagaagcagctcgtatttcatcaatgttgcgttgacaattggaaaagaaaagtgtaattgcgtacaggcgaaatggcagaagcaaatccccggagaggtcaagcatgaggttcagaaggaatgcggcttccttccctggggaacttgcacttggttttggttttacgtcctaccagctttcttcaacgaacgttcacagacattgggattttggtttagtcaggaggattttatgcttaaaattacccagttgtttatgctgaggctcagttaagtgaat

SEQ ID NO: 432948 - DNA, 2149 bp, Homo Sapiens
  misc_feature (1863)..(2018): n is a, c, g, or t
ttagaagagcaaactgtttatttacaccttggtctgtacagtacagctccccgggaggagcctgccaccaacagcctgttccttttggggcagaagcaggttggaggcaaagagctcagaccctggacagcctcagggcctcacccccactgtcccctccctggggcccacagggcaggtcccaccccagcactaaagctaagcctgtttccagacagagcctcctggggcaaaaaagtcaagttgaatcccacagagtcagaggccatctaacaaacccttgggcatgaggccacatgtgtagttcattccacgtaggcctcagaagacccagccaagaaagtgggaggagctggaagggagcccacagctgtgagtccttggcaatgcaccgtccgctccgtgacatcagttggtatttaatggcactctggtctgagcacctcagcagacaaggaagggctgggcaggtgttcacagcaggcaggggcagcagctagcacctcttccttctgcccaagtggggcccgcagctgttctagacaccagatgtggtggcctcaaggcaggcctgtggccgtgcaccaggaaccatggacagggcttcctctgggggcagagacagtgcacggagcggctgcggtcccatgatatccctgctggggccaatgccccaggttaaagagtgatgctttgcccgacatcactaacaatgcagggaaagctctgtgggagaagctgctttacacaaagttgcccttttctggaatgcaaggctcctaaattagctgcaggctggaggagggactaagtgggtcctagccccccatgcttaagacaataatgaaagattctgtacaaagttaccaagtctacaggctgagcgagccaagggtaagtggggcctgatccttgtggacgaatgtgcccgggagagctggcctcacctgggggaggcacgttgaaaaagtacacatttacagggctcgggaaaggcccagggagatgagacgatgtagaaaaggaggcagtgggcaatgtggaaaatcctgtacagtggcgatggggaagaaaaggcacaaggacaaagaccccaaaccatgcagatgaaaacagcctgtgcagcacagcaaagcggatgggccccagcaggaggcagggtcaccctggggacaacagcacttggatcctgcaggagacatggcctggatgccatccccagctggtagctccggggcagacatctctaccttacagatggggaaaggagcaacctacgaggtcggggcagggaggtcatatgggaaacctcgcctggtgagcatggtgacattatacttccccagggtctacgcttttagaaacaaatctttctagaaggcagcctattttctctggtgggtagcagagaatatggcagaagggcctcagagttgtcctgccatgcaggtagggcaggctcctggttccagcctctcccgcttcctgctggctgccccattcatgtgtgcacccagggcaggaagtgaggacctggcaggtccctaggatcagcgctcaaagtcatccactgacggcatggcccttctaacttgaggccccttggcgcagcagacctcagtcttcctagccagcagcgtcaccctagaggggatttcctgggtcccaaagggagggccagagtctgggagaaaggactgtggaggataccagcactgagtcctaagtggcccctttcctcaatctagaatccacagtagcccttgagaaagagtcgctgtggatctgctgggcaaccaaagtcattttcttggcatggtgaccacgcaaaactttcctggtatgatcacatcgaaagttacnnnnnnnnnnnnnnnnnnnnnnnnnnnnnnnnnnnnnnnnnnnnnnnnnnnnnnnnnnnnnnnnnnnnnnnnnnnnnnnnnnnnnnnnnnnnnnnnnnnnnnnnnnnnnnnnnnnnnnnnnnnnnnnnnnnnnnnnnnnnnnnnnnnnnnnnnnnnttaaatttgctaatgcattaaaccccaccacacacacaggacacagagggcttcatttctcccagtttcacactggccctgctggcccctggaggcttctgctaagtccctcattggaaccaagaacccgc

SEQ ID NO: 432949 - DNA, 937 bp, Homo Sapiens
  misc_feature (850)..(886): n is a, c, g, or t
atcaaatttgattacaatccaaaagaaaatataaaatgtattcacttgtttatcagattaaaattgggcaagttgcttggagtaacaagtttttaaatcaccattttccacctccacaccaaggataaccttctaattaatgatcagccatgttgtaataggatagcactgagacttgaggaaacagaaaaactgaagagctcttccaagccccgaccaggaacatttttatgccttctcatagtggcgaacagcaaccacatcaccaaaagtaagggtcataaccattttgccatccttaatttctcttacaaaatttgtttctttgccatcccatttctgtatgtgaacaagtttgtctccatccaggctaacaacagacttacagtttctatcatctgcagtggtttcatcaaactcttctcccagctggaaactaatctccgtgttcttgaatgtgctgagagtcctgatgaccactttgtctccttcttgactgataattaccgttggtttggtcacatttcccacctgcctagtggcaaagcccacgcctagagccttcatgtactcatcaaagttctgactgttggtcagcttccaggtagcacagaaagcctccaccatccttgccctttcccctctttagagacaggagcggggatcttctggtctaattgccactgcagctcagaagaccctttacacctcagcaagcagctcctgccttcttatttggaaagagggtgggcaaaaatccagtgatttaaattgcaaacacacccctccagtgtccctctttccaagagccgctctcgacgaattcgagctcggccgatttggcctgatnnnnnnnnnnnnnnnnnnnnnnnnnnnnnnnnnnnnncgccgccaccgcgataagctgcggttcgccctatagtgagtctatcatccg

SEQ ID NO: 432950 - DNA, 1105 bp, Homo Sapiens
  misc_feature (677)..(734): n is a, c, g, or t
aagatccccgctcctgtctctaaagaggggaaagggcaaggatggtggaggctttctgtgctacctggaagctgaccaacagtcagaactttgatgagtacatgaaggctctaggcgtgggctttgccactaggcaggtgggaaatgtgaccaaaccaacggtaattatcagtcaagaaggagacaaagtggtcatcaggactctcagcacattcaagaacacggagattagtttccagctgggagaagagtttgatgaaaccactgcagatgatagaaactgtaaggtgagaaactgcttcttcttcagagtggggatggggagaggggaataaagataaagatttccaatgcatgttttttttaagatgttggaaagtgtagaatattttcagtatttcaatccaaggagaaatacaccaaagttagtttaatgtgcatatgttatattttgaacaatgggtacttgctatagcataaatctcagttgtatttgtctcttaccatatactgttcacattttatatcaaacttgtatttcagaaaatatttaataaggtttgtttgaaagagagattgcattttgtttaattccccaggttgcctcagattgactaaatagacagtttgcctcattctaaggctttctttagagggacgactagctgcaagcactnnnnnnnnnnnnnnnnnnnnnnnnnnnnnnnnnnnnnnnnnnnnnnnnnnnnnnnnnnatcaaattatgaattcaaatttacataatagaaaatctagaagtaatagaaataacaataggataattaactgatcatgatttattcaattatacaactctttcaaaaatcacatcgtcttccgtatcagaaatctgaattgtatttattgctatgttctgcattttgttgttggtctcagtctgttgttagcctggatggagacaaacttgttcacatacagaaatgggatggcaaagaaacaaattttgtaagagaaattaaggatggcaaaatggttatggtaagtaatgacaattctccattcttccttgtttttttctcctctccggcacacctctcacctccttccttcttcttccctcctcctt

SEQ ID NO: 432951 - DNA, 1590 bp, Homo Sapiens
  misc_feature (547)..(577): n is a, c, g, or t
  misc_feature (1524)..(1542): n is a, c, g, or t
aaaggatttccaaaatgccgttttcagaacctgggttttaatagccagtattgaatttgtaagcttagtagttgcagaaattgaacactaggtggcactcagttatcttaacaggggaagtactgatacaattgttgacttttcttttactatgtgtaagaaataccccaaacatgaaaagattgttttgatcatatgcatgtatgtagaatatttttgcagagcagaaagattatgttagaagtgtgatttttattttcagaagtcatatacatgtaagctacaattttgagtgctttataaacacttaagatatatatataaattttaatttcatagcaacttgtaaaaaataaaatacttgttgaaaagcctttttcaacatatccctaagctaagggaagaggaaggaataacaactcagtgaaaagatggtctccagtttctgaatgaaaaagctacagctgagaaataaaataaaatgtcatgctgcagaatatgttatacccttattttgtgttaaggatatattttattatgtgaatgnnnnnnnnnnnnnnnnnnnnnnnnnnnnnnngcttgtattgggaattagctttactggtaacttccttatttagtttttagtggtcaactctaataaaatgaaactagggctgagctagttagccctcactagccaaactgaaactctatgcaacattaaaagaagagatccatcatgtagcttgtgacacttttattttattagtcaccggggaacttttcagtgatgaaaatacacagggtaataaaccttcacatggcttcaaaaggaaaacaagcaaatcttctctaatctactcttactataatttcctaagtgtacaccaaactctggatttaaaaatctgaagtactatagaacattaagttgaagaatggaaattaagagtacgtattcatggtttatatttcttattctatggagttcgtgaacacatctaggtggaatgcatctgagactaagggctggtttttaatcctcataagaaaccagccttgaagaattaacaattctcttcattggtattctaaacctcctaagatatttaggcttctgtacataaaagtgtttttgctaaatttacagtatatatagatcctttcatattattttactaagaatgtttgaactttgcatatttgatatagttcctggtaggaatagcacagctcaaacattaagtttttctacttacctcctctaacacgtggtttgtcctggagaagtttctaaaaattcagctataaccccagttcatgtatttactggtgattgttcttgctgaggtagtaacagcccaatcttgggctgttaaatcctaggaaatctcgaatcatagtgattaaaatagttggggtaaagttgtagcttatatgcaatactacttggaggaattcttctactaatttgtatttaatgtggaaattgtatagtttcattgatttaatcataaataatggaaatggtctccaagaagnnnnnnnnnnnnnnnnnnngcttatacactctgattcctataatacagtgctataagctatgcacag

SEQ ID NO: 432952 - DNA, 1034 bp, Homo Sapiens
  misc_feature (88)..(98): n is a, c, g, or t
ttttttttcacgtgtaagatttttattcaaatttgatttacattccaaaagaaattataaaatgtattcacttgtttataaaaaaaannnnnnnnnnnacaaaactttaattcaaattataaaacatgataaattttcagattaaaattgggcaagttgcttggagtaacaagtttttaaatcaccattttccacctccacaccaaggataaccttctaattaatgatcagccatgttgtaataggatagcactgagacttgaggaaacagaaaaactgaagagctcttccaagccccgaccaggaacatttttatgccttctcatagtggcgaacagcaaccacatcaccaaaagtaagggtcataaccattttgccatccttaatttctcttacaaaatttgtttctttgccatcccatttctgtatgtgaacaagtttgtctccatccaggctaacaacagacttacagtttctatcatctgcagtggtttcatcaaactcttctcccagctggaaactaatctccgtgttcttgaatgtgctgagagtcctgatgaccactttgtctccttcttgactgataattaccgttggtttggtcacatttcccacctgcctagtggcaaagcccacgcctagagccttcatgtactcatcaaagttctgactgttggtcagcttccaggtagcacagaaagcctccaccatccttgccctttcccctctttagagacaggagcggggatcttctggtctaattgccactgcagctcagaagaccctttacacctcagcaagcagctcctgccttcttatttggaaaaagggtgggcaaaaatccagtgatttaaattgcaaacacacccctccagtgtccctctttccaagaggctgtcacagaaagaggagaagggaaggagcgctcgagtgaggctccaatcctctttgtgattggctcaggccactgggttaacgaagtaggtcgagttcctcccaatcctcacactacagcccttatgcctgagaaaaac

SEQ ID NO: 432953 - DNA, 1154 bp, Homo Sapiens
  misc_feature (47)..(83): n is a, c, g, or t
  misc_feature (245)..(285): n is a, c, g, or t
aagtatacgatctatagggcgaccggcgctcatcgcggtggcggcgnnnnnnnnnnnnnnnnnnnnnnnnnnnnnnnnnnnnnatcaggccaaatcggccgagctcgaattcgtcgagagcgggcgcaatggtttccaggcagtgaaagagggtgattcagcaagccactcttcttctattttctttaacctccccttcactttttatttttatgggggtgggtggtgcttgctatatgcttacnnnnnnnnnnnnnnnnnnnnnnnnnnnnnnnnnnnnnnnnngtcctcacccctcaattcctaggggcttgagtgagtttaagattgggttttcttggaaatcacctgtccatcgttaattttaaacaatctccatatctccaaagaatctcttccatgttagtctggaatgtggttaatgaaaaacaagtagggaggatttctggggcaaacactgccggatcaggatcgtagttctcaggcacggaatggctagtgtgagaaacaccaacagcaggcccatctcagatcttcactatggcaacttatgcaagaaactgttgaattagacccgtttcctatagatgagaaaccatacaagctgtggtatttatgagcctccatttcttatactactgcagtgaaccaacattggatgtgaaaattgccttttgtcaggtgtgtgttccttacaggtaaaacaagggattcgataaacaagtggatgtgtcatatattgccaaacattacaacatgagcaaaagcaaagttgacaaccagttctacagtgtggaagtgggagactcaaccttcacagttctcaagcgctaccagaatctaaagcctattggctctggggctcagggcatagtttgtgccgcgtatgatgctgtccttgacagaaatgtggccattaagaagctcagcagaaccctttcagaaccaaacacatgccaagagagcgtaccgggagctggtcctcatgaagtgtgtgaaccataaaaacattattagtttattaaatgtcttcacaccccagaaaacgctggaggagttccaagatgtttacttagtaatggaactgatggatgccaacttatgtcaagtgattcagatggaattagaccatgagcgaatgtcttacctgctgt

SEQ ID NO: 432954 - DNA, 1054 bp, Homo Sapiens
  misc_feature (699)..(699): n is a, c, g, or t
  misc_feature (790)..(790): n is a, c, g, or t
aggagaaaatgggccatttttattccaggggacaagctgcacaaaggaatgttcttctatttattttaaacaaatgactgcgtgtactgaatctgactgtgtgaaataatctcagaatggcagcaccactggcatggcgatggtgcaggtgggtgcagttccctgtggtctctattgcttgaagagagaaagaaagttccctattattatatttaaggcagttttcagagcactggcattcttgtttgctctgttttggggatattctatttgccaatcagttcacactcatcaaccatccacttcctgtctttcacttcttcaggtgaaatatcaccactctagtgaggcaccaacatgggtcagggtgcaaataactgtgatggatacttcgaagtgaataagaagggaagcctgattattgctgagatcaccttggtattgccttgtacataaccaagatgtttcacagtgcctccttaagtgctcaggaaagcactttcatttaatttaatttaagctaaattctggagattttgctaaacattgacattaatgcttcatggcttttaagacaaactcatattgctaaaactatttggcagcagtaaatttatgggcagagttattgctcttacatctactgcagtacaaaactcagatgatcagccccttcgattgctcataccttattaaaantaaataaattaaccatgaaacatcagccacatttaaggagtcagggaaacctcctgaggaataacaatgtctctggagatgttggagatgntttcaaatgctaacctgagactcacactgtggtttgggggtttcattcttattattatttttttatttcagaagaggaaagtaatattatttctcaaaataaaactttggcacctaaggaggtatcccactggtacaacttcctcctagcgtttctggttaactatgtgaacacacaggcagacagatcaagccgctatgtgagggacaaataaacatactgaagacctaaaccagcttttctgtccttttttgtcttgcttcc

SEQ ID NO: 432955 - DNA, 947 bp, Homo Sapiens
gcttggattgcggagccgcgagcagcgctgggtaacggccgcggcgaccaccccggacggcccctgtccccgctggcgggcttccctgtcgccgttcgctgcgctgccggcttcttggtgaatttttggatgaagccattaaattaattgcttgccatcatgagcagaagcaagcgtgacaacaatttttatagtgtagagattggagattctacattcacagtcctgaaacgatatcagaatttaaaacctataggctcaggagctcaaggaatagtatgcgcagcttatgatgccattcttgaaagaaatgttgcaatcaagaagctaagccgaccatttcagaatcagactcatgccaagcgggcctacagagagctagttcttatgaaatgtgttaatcacaaaaatataattggccttttgaatgttttcacaccacagaaatccctagaagaatttcaagatgtttacatagtcatggagctcatggatgcaaatctttgccaagtgattcagatggggctagatcatgaaagaatgtcctaccttctctatcagatgctgtgtggaatcaagcaccttcattctgctggaattattcattgggacttaaagcccagtaatatagtagtaaaatctgattgcactttgaagattcttgacttcggtctggccaggactgcaggaacgagttttatgatgacgccttatgtagtgactcgctactacagagcacccgaggtcatccttggcatgggctacaaggaaaacgtggatttatggtctgtggggtgcattatgggagaaatggtttgccaccagcttggaacaccatgtcctgaattcatgaagaaactgcaaccaacagtaggacttacgttgaaacagacctaatatgctggatatagctttgagaaactcttccctgatgtccttttccagct

SEQ ID NO: 432956 - DNA, 1943 bp, Homo Sapiens
gctagtagaagtgaaccatctgtttatttgcattgaaatgtattattcatgaagtatcctcttgcctttatgtgatcataaactttgagcatgccacaaatttgtagaatacaccatattctttttacttatttttgttgggtagggtggggacataaggtggtggtagacgcccagcatcttcaaagacatgctctgagttattctgccatttagatgacggggcttttgccaaaattaagtaggattgcctaccaattcttgtaactaaattaggattggcaagtagcaaatattggaggtctcctaacacgttcatcatttacagtagttattcctgaatataactggctacacgttattttccctcactcctctggggttatttcattgataagcacataaccctgaagggatagtatcatgaacaaaacatctgaaataaattctaatttaaaaaaatactataaaaatcttaaataattcatgatataggcaagtcaccacataatagttgctttgataaacaaaatcttacaaattcagttaaaaaaatcagcagcataagataaagcaaatatgcaaaaaatttaaaccatgataaaataattaggtttacattatacagttaattacagcaaaaaaaatacaatacagttttgttgctgttttgaaacacaacttaggttttaaattacatcacttgaaattaaaaaaaataaactactttactacaaaatgaattctacatttttgaaaaatcacccaaaaataagaccactgaattgttttcaaagtagttctatcaatgactaaccgactccccatccctcccaccccccgatggcccaagtagtcatctacagcagcccagaggcccagctgctgcttctagactgctgtctgtatcagaggccaaagtcggatctgttgacattgaagacacatcattgacagacgacgatgatgatggatgctgagagccattgatcactgctgcacctgtgctaaaggagagggctgcccccgtataactccattcttggttctctcctccaagtccataacttccttatatatcaattctttccactcttctattgtgtgttccctttcatctaactgcttgtcagggatctttggtggtggagcttctgcttcagaaggatcataccagacattgatgtacgggtgttggagagcttcatctacagagatccttttagatgcatctattaccagcattttggataacaaattccttgcctgactggctttaagtttgttgtgttctgagtcagctgtgaaaaggacatcagggaagagtttctcaaagctatatccagcatatttaggtctgttttcaacgtaagtccttactgttggttgcagtttcttcatgaattcaggacatggtgttccaagctgttcaataactttattccactgatcaatatagtcccttcctggaaagaggattttgtggcgaaccatttctcccataatgcatcccacagaccatatatccacgttttccttgtagcccatgcccaggatgacctcgggtgctctgtagtagcgtgtcactacatatggcgtcatcatgaagcttgttcctgctgtcctggccagtccgaagtccaggattttcaatgtgcaatcagattttactactatgttacttggttttaagtccctgtgaataattccagcagaatggaggtgcttgattccacacagcatctgatagagaaggtaggacattctttcatgatctagctccatctgaatcacttggcaaagatttgcatccatgagctccatgactatgtaaacatcttgaaattcttctagggatttctgtggtgtgaaaacattcaaaaggccaattatatttttgtgattaacacatttcataagaactagctctctgtaggcccgct

SEQ ID NO: 432957 - DNA, 3232 bp, Homo Sapiens
  misc_feature (1205)..(1254): n is a, c, g, or t
  misc_feature (3032)..(3072): n is a, c, g, or t
ttttttttgggggtttcattcttattattattattttatttcagaagaggaaagtaatattatttctcaaaataaaactttggcagagtatgaatcagggaagcagcccacacatggaaaacacaatccacaatctgaaagtagtctaggcaggctcatttttttgttgaaggaattcacatggaggcaattctgctcagttccagagagagattcttatcatcaaaagcacacacaataaccttgcttcaccacctgccactttctccagtggcctcttgttgtgaccagtaattgagaaatgacaaatgggtatagagccaaatctctaaaacagggacaccagtgtctcctagtatctgggtaataacctcctttcagtcttagtccacaccacacactaccctccagtctctcctactctttactgtcacagaaaagactctcagcttttattcacacctgccttcagaaggccaaaccattttgtgcctgaaaactgttacccactccccccacactttacataagtatcacatatgttctttctacaaattggtatacaggtgccatttaatccattcaaatttggaagctacatcttcaagggtctgagagagctcactccccccatatattccccctttacatgttttcttataagacatacagtttaatcaattaacaaactaaacagcttatatactggcaatatattacagatgggtttatgtcagagtaatagatcacatgaaatggaccatgtggtaccccagtgcattatgtcttggtagagccctgaggacactgacagtagcatctctaagtaagtagtgctgtatgaatacagacacatgcggatctgtatctacatccatctgactaggccaaggagcaggtagatgcaagatagagacacacacatgctggatggggccactgcacaccttgtcatgccatttaaaagggcagttacaggttgccggttttgcagccattaaaattacactttatggaaaaggcttctctaattgtgtctgatttgctttctgtagtaagcatcattggaagaagaccaaagcaagagcacctagaagttaaatatacatttgagcttagctgccatacagaaccctggggaagaagcaggctgaaagatttatttaattttaggcttggattctctcccttgctgttttcttgannnnnnnnnnnnnnnnnnnnnnnnnnnnnnnnnnnnnnnnnnnnnnnnnntccatcacatcatctcctgaagaacgctgggtttcgcaggcaggcggctagtcacctgcaacaacccaggggtcctgccgaggcttccaggctgctgtcagtgtcagatgccagggtctggtcggtggacatggaggagatgtcattgacagacgaggatggagggagactctcactgctgttcactgctgcacctgaaggagaaggctgtccttttactacaccatttttagtcttttcttctgaattcattacttccttgtagataagttctttccattcttcaattgtgtgttctctttcatccaactgcttgtcatatatctgaggtggaggcgcctccacttcggctgggtcataccagacgttgatgtagggatgctgtaaggcgtcgtccactgatattctttttgctgggtcaatcactagcatctttgacaacaagtccctggcttggctggctttgagtttattgtgctcggagtccgctgggaagagggaatctgggaagagtttggggaaggtgagtcccgcatacttgggccgattctccacatagtttcttactgtgggttgcaatttcttcatgaattctggacatggtgttcctagttgttcaattaccttattccactggtcaatatagtcccttcctggaaagaggatttttgtggcgaaccatttctcccataatgcatcccacagaccatatatccacgttctccttgtagcccatccccaggatgacctcaggggctctgtaataacgtgtcaccacatatggagtcatcatgaagcttgtgcctgctgtcctggccagtccaaagtccaggattttcaatgtgcaatcagacttgactacaatgttacttggttttaaatccctgtgaataattccagcagaatggaggtgcttaatgccacacaacatttggtacagcaggtaagacattcgctcatggtctaattccatctgaatcacttgacataagttggcatccatcagttccattactaagtaaacatcttggaactcctccagcgttttctggggtgtgaagacatttaataaactaataatgtttttatggttcacacacttcatgaggaccagctcccggtacgctctcttggcatgtgtttggttctgaaagggtctgctgagcttcttaatggccacatttctgtcaaggacagcatcatacgcggcacaaactatgccctgagccccagagccaataggctttagattctggtagcgcttgagaactgtgaaggttgagtctcccacttccacactgtagaactggttgtcaactttgcttttgctcatgttgtaatgtttggcaatatatgacacatccacttgtttatcgaatccctgacaaaaggcaattttcacatccaatgttggttcactgcagtagtataagaaatggaggctcataaataccacagcttgtatggtttctcatctataggaaacgggtctaattcaacagtttcttgcataagttgccatagtgaagatctgagatgggcctgctgttggtgtttctcacactagccattccgtgcctgagaactacgatcctgatccggcagtgtttgccccagaaatcctccctacttgtttttcattaaccacattccagactaacatggaagagattctttggagatatggagattgtttaaaattaacgatggacaggtgatttccaagaaaacccaatcttaaactcactcaagcccctaggaattgaggggtgaggacnnnnnnnnnnnnnnnnnnnnnnnnnnnnnnnnnnnnnnnnngtaagcatatagcaagcaccacccacccccataaaaataaaaagtgaaggggaggttaaagaaaatagaagaagagtggcttgctgaatcaccctctttcactgcctggaaaccattgtgcagcgtgatgctgcctgtaccattgtggaacctacccgct

SEQ ID NO: 432958 - DNA, 477 bp, Homo Sapiens
gacccatgcagacctactgcttaattctgcaagccagcattctccagacagcttgaagaattctttaaagatgctttcagaaaaaacagagctttttgtacatgccttcaaggatcaacttgtcaggagtgctcttttagcactctacactgcaaggccaggaggcattcttaagaagccaccctctcctaagagcagcccagaggagagcagtccccaagaccaacccccagtgatgagagggcaggactccataccacatcattcagactatgatgaggaagagtgggacagggtgtgggccaatgtggggaagagcctgaactgcattattgctatggtggacaaactgattgaaagagatggtggcagtgaaggcagtggcggcaacaatgatggagaaaaggaaccttcattaacagatgccattccctctcacccaagagaggactggtatgaacagttgtatcccctcat

SEQ ID NO: 432959 - DNA, 466 bp, Homo Sapiens
atacattttagataaatgagatcttgcagccttttacacacagtaggaattcaatatttttatgaggctaacgccgaaatcacagaagagatggtttcagaggtagggaagatttaaacaaacatattccaaggaacttatctttgggaatgtctttgcttttccacaaagatattaagcttaaggaaaccttgccatttctgtgctttccgttaagttaattaactaagatgtttgattattatgcatattttgtgatattccaagatacattaacattttcaaagccaggcagtatgctaaggaatttctcaataagtgaacaaagtctacccctgaaatcattgatttcagtcatttagtcactgatccaacccatatactcttacggtttcaaagtcatatggtttaagagaattaaacaactgaaaagaatagtaaatatcacctattaaaattccctcat

SEQ ID NO: 432960 - DNA, 1455 bp, Homo Sapiens
  misc_feature (1389)..(1389): n is a, c, g, or t
  misc_feature (1426)..(1426): n is a, c, g, or t
  misc_feature (1437)..(1437): n is a, c, g, or t
cacgggtggtacgccccggagttcgggatatcgtcgacccacgcgttcgccagttctcttctgtctccagcagctatatggtaagactagtacctgccaggagaggtgcccccaagtgaaggggtacagtggcacctgggaaaaggcacctggaaggtttccatgtggcccagcccagcatggaagcagggtgggaactctgctgtgtcgccagccctcactctactcaagtggctttttgagagccctgccatgtctgtgtcaggcctgtgctgcttcacaccctacagctgcctgggaaaggccggccacgctccctgtccacacactccctgtccacacactccctgtccacaactgcagccgggccctctgcctatgggcacccaatccaagcagctgctccagctttgtttggcatggtgatttgtgttttttctcttggtgcttatgtgtgtgggcttgggacgagtgctggtatgcacttaggaccttcttgatagctccctgcactttggaacacggagcagatgagagagggtcacggggcttgccctccaccttggacttggaagaagccccacattggagaggtgaggaccccatggtggctctagtggaagatacgttagtctccagcctaaggaggatgaggcgcagccccagagggagacctcagtgataggggatcaggctaagaaagtgggggaagggagatgctttgtacatattttggggttataatttctctaaattttaggagaacgggtattgattgataaaagggacaggcagtagtgttcaacagtgcatgtgaaggaaagttctgttttccatggttttgacattctttggactgtattgtgactgctgtctggtccacatggtacccctttggtaagtaggcttcagtgcataccagggtatcactggagatgggagttagtgaaggggtgactcgctggcctagtatagtgtgaccctgggactaacttaatgtcctaaagcattttggtgacttctagggaatagcaaagacctatttcattgtccccaggtaagtatgtgatgagcaatgaggaggagtggaaaacaaaacccagaaagtgcggcaggaccagcctgacgcacacgctcctgttgtcatggcagacagccgccttgggtgggcaccaccttggcagttccagcctgtaggggagtgaagggacatggctgagctgggcatgtgctgaggttgacttagggaacaagccctgggattggacaaaagggcccatgctgcagccactgactgggggcagagctctgggtggaagagggaagagatcctaatggaggcgcctccatctgcaaccacagttgtaaggctcatggcacctctgcttnggaaagcacttggtttaagggactttaggagaggtangcacaaaggtntggtcttcttggggttaa

SEQ ID NO: 432961 - DNA, 1867 bp, Homo Sapiens
  misc_feature (1092)..(1092): n is a, c, g, or t
  misc_feature (1189)..(1189): n is a, c, g, or t
  misc_feature (1228)..(1228): n is a, c, g, or t
  misc_feature (1242)..(1242): n is a, c, g, or t
  misc_feature (1264)..(1264): n is a, c, g, or t
  misc_feature (1269)..(1269): n is a, c, g, or t
  misc_feature (1348)..(1348): n is a, c, g, or t
  misc_feature (1357)..(1357): n is a, c, g, or t
  misc_feature (1359)..(1359): n is a, c, g, or t
  misc_feature (1362)..(1362): n is a, c, g, or t
gggatcagcctgccgcagcagccccgggagcacactagcgtgagcccgtgcagccagaccgtgagccccattgcgctgccgttgggctctgggagggtgatggccagagacctgttgagggcgaccacagcggctcccagctggtcctgcaccaccacggccaggcccacctcgaagtgtggcctgaaacccgggggcagcacggctccgtagccggagaggctgcccttgtagacacagaactcctcgcagtggccctggcgacagcgctgcagcagcagggcgtacaccagcggggcgccagcatcctccgcgtcatgccagcccgtgcattcgaagtgcaccttggtggtgagggcgtgcacagcgcccagtgggaagaggctgcaagagccctccagcggcgggcggttgggggacagggggatggaggcgcagccctcctcctcgccagagcggcccagcaccgtcagcgtgaaggtgtatccctcgccgtcccgcagcacgccccgccgcagcaccagtcacatgcctgcgctgcccgtggatgtggtggtctcatccagcaccagcgtcttgttgctgaacgtacgtgcagcccaccgccctcgcttggagccgctgctgcaattgaggcagcggccctccaggtacacgtaggagctgcggctcacttcgtacacggcctgtgccttgcaggacacacactccaaggacacaatgggcacccggccactgcggatcagcacctgctgcgtccggttctcgaaggcattagatgccagcacggtcaggacgtactcacctggggcagcgtaggtgtgggtgacattgtgctccaccagcacctgggccacccgaggggtctggaaccgggaaggactcgttgtacggaggctggaactggtggagggcctgctccccatccccaaaggtccacaggaaggccacctccacggccgagtccaccagcacgcccgccgtcagtgccagcgtggcattgggggacagcacggctggcactgtagagacccgcaggccctgcatcctgttcatccgctccacggtgatgttgtagttcacggtgacgtngctcacgtggttggaggccgtcagtgagagcttgaagaccgccgcgctctgataaatgacattgaagaccacgttctggaaggtcagggactgcttntctgttgatggtccaccggaagatccatgtccgagccgncctccaccacgggnctgtacatcactgggactaccngcagnacacgggccacggggatgggcgtggcgcggagaccacagatgggttcttaccgccgtcacaccgcaggctaaggttggnaccgactgncnatnttttccaccacaacgtccatcacgtgctccccctcaccgagccacggcagtgctaccactgagaacagggtatcattggtctcccaggggcagctgggcacgaaggtggccaccagggcagggcaggcattctcaaagcgggcgctgacactgcccccaggccagcgagccgtggccgtggcgctggcaccagagtccacctggagcaccgaggctgagccgttggtgggcacgtagaggcggccgtcgcggggggcagggtagatgacccgcagcccagccactgaggagaccacgtcaaagctgcaggacaggttgtgcctggacacgccattgcccacctctgcccggacctcatagcgcccaggcagccgcagcccagggttgcctcaggcccagcagcacggtgagctgttccgtgtgcaagcagccgcagggcacaggcagggcaggcccaagtgccctccagctgggctggcaagtggggcagccatgacgaggcgtt

SEQ ID NO: 432962 - DNA, 828 bp, Homo Sapiens
ttttccttgggaagcaggagtttatttttatccttttgtaagtattaactcggtaatcacaacaaacacggagcaatgtcaatgctgtttatccggaggacagtctgcggggtcgtgacgattcttttcttcttgaagtttttccttttcctgaatctcataatgattcttggccatgattctgtcttttcaatgactgtggcttctactcgaacaagatcctttctggcctaattgcactgtgaccactgtctgcatgtccagccctggagccccagacaaagcccagcacttcacagccattacccgaggagtggcttgccaagcagcgtgaagttgtctgccccaacccagcaggaccttctccagtcgaattctctctccacacgcaaggtctagttcatttccaattaagatcaggtcttcagaggtcaccttccactggcggctggcaaagtgcaccacggcaaagagcctgccatactgccccgtgacgatcatctcattcaccttcttcacgacctctgcatggtgtctggtctcctcaactgggtctggcagaacaacttctggccaaggtggtgaactcagggatgttttaggaacatatcctggtagatatgaagtgctctgtgaattgaaccttcgagaagcagaccaaagggaggctgctccgggccccgaaggtctcaggatgctgtggctgcacgcggacgccagccgccctaaggtgaccgtcagggaagatgctgccatggccgcagcctcggccgcctcgtgccgaattcgccacccagcctcgtacctaacctattggtggcacctctc

SEQ ID NO: 432963 - DNA, 701 bp, Homo Sapiens
tttttttccttgggaagcaggagtttatttttatccttttgtaagtattaactcggtaatcacaacaaacacggagcaatctcaatgctgtttatccggaggacagtctgcggggtcgtgacgattcttttcttcttgaagtttttccttttcctgaatctcataatgattcttggccatgattctgtcttttcaatgactgtggcttctactcgaacaagatcctttccgaggagtggcttgccaagcagcgtgaagttgtctgccccaaccagcaggaccttctccagtcgaattctctctccacacgcaaggtctagttcatttccaattaagatcaggtcttcagaggtcaccttccactggcggctggcaaagtgcaccacggcaaagagcctgccatactgccccgtgacgatcatctcattcaccttcttcacgacctctgcatggtgtctggtctcctcaactgggtctggcagaacaactcctggccaaggtggtgaactcagggatgttttaggaacatatcttcgagaagcagaccaaagggaggctgctccgggccccgaaggtctcaggatgctgtggctgcacgcggacgccagccgccctaaggtgaccgtcagggaagatgctgccatggccgcagccggacgcgtgggtcgacgatatcccgttacttccggccggtaccagcc

SEQ ID NO: 432964 - DNA, 326 bp, Homo Sapiens
tttccttgggaagcaggagtttatttttatccttttgtaagtattaactcggtaatcacaacaaacacggagcaatctcaatgctgtttatccggaggacagtctgcggggtcgtgacgactgaaagaaaggatgtcacaggcttgaccacagaccctgactgttgtcatcagttacagcaggggctctgcacacagccctccccagccagcgcgaccccggcaacgtcccctgctgcacatggccgtgtttatctccaggtgtgcactgactgcctcgctagcttgttcgttcactctgttggcaggtgcagaggctgggacacc

SEQ ID NO: 432965 - DNA, 825 bp, Homo Sapiens
  misc_feature (98)..(98): n is a, c, g, or t
  misc_feature (101)..(101): n is a, c, g, or t
  misc_feature (104)..(104): n is a, c, g, or t
  misc_feature (111)..(111): n is a, c, g, or t
  misc_feature (119)..(119): n is a, c, g, or t
  misc_feature (122)..(122): n is a, c, g, or t
  misc_feature (125)..(125): n is a, c, g, or t
  misc_feature (130)..(130): n is a, c, g, or t
atttacccctatttgggggcccccggcgccccccaaacgggaattggtttttagaaaaagccttctcgaaagggccgaaggccggcccgcacaaggtnttnttnttttgtngttttttnttnttntttcnggggaaggcaggagtttatttttatccttttgtaagtattaactcggtaatcacaacaaacacggagcaatctcaatgctgtttatccggaggacagtctgcggggtcgtgacgattcttttcttcttgaagtttttccttttcctgaatctcataatgattcttggccatgattctgtcttttcaatgactgtggcttctactcgaacaagatcctttccgaggagtggcttgccaagcagcgtgaagttgtctgccccaaccagcaggaccttctccagtcgaattctctctccacacgcaaggtctagttcatttccaattaagatcaggtcttcagaggtcaccttccactggcggctggcaaagtgcaccacggcaaagagcctgccatactgccccgtgacgatcatctcattcaccttcttcacgacctctgcatggtgtctggtctcctcaactgggtctggcagaacaacttctggccaaggtggtgaactcagggatgttttaggaacatatcctggtagatatgaagtgctctgtgaattgaaccttcgagaagcagaccaaagggaggctgctccgggccccgaaggtctcaggatgctgtggctgcacgcggacgccagccgccctaaggtgaccgtcagggaagatgctgccatggccgccgccatcttcccgcagccccc

SEQ ID NO: 432966 - DNA, 1158 bp, Homo Sapiens
tgttaccaatatgggaacgccctggatgaggtcagggctgtcaaatttcagctgtacagcagaaccagcaggaacatggttaatacccagtatagagtaaagttagaatgcatagtacaatggtggtgcccactctactgaggccttctctatgttctcagggaatggggaaccactgcaccagaagaggatccaggggtactagaagaaactgaagaagttgatgagtattataaccaccgcccaggtcttcaggacggaggtaaagaggaccaggactacaactcgagtggcaatctcaaagctcctccacaggaagatacagacataggccagaggcttcactcttgacttcatactcatcgtacttgattttgatggctaggatgttgcagcgcaaggctccatacacaatggacaacagggatatggtcatgaggagacttcttccaacagtgacgtcctgctgcatgacacttatgtacagctgtagggtcagctggggggctgagcccaagaaagcctggatcaccgacgcccggctgaacgctgatcggtgggtgattagtttgccttctgcctggcccacctccttctcaatctcctctgagaggccattttttggcatttgcctcttcttggtgatactgacataaggctcttcattgttgcctgactgaaagtagatgcagaagacttcaaaacacctgaaaaggggcccaagttgcagcaggtgcagcagcagtacgagcgggcggtcgcggctgaggtcgcggtgtacgaagagaagcgtgagctgcacgagcgcgcaaggcagtagcgagaaaagcaacgtcagcgcctgccacatgcggtccccgcccgagcggtaggtgctgctcaggctgagcgccgccgttgtctcggccacgaacaggaacacggacgccagcaccgaggccgggaatttcatctccgcgcgtcagcggcgctcaccggggacggacgcagtggcggcggctgtgtggctgtggcggcggcggccgttgcccgaggggctcccagcatgcccagccccaaaccgctcccgcgctctgcgcagcccgccgagggcacgcgggcccggccgaccggcctgggctctggaactggacctggtgggggcggccgacctggctg

SEQ ID NO: 432967 - DNA, 1349 bp, Homo Sapiens
  misc_feature (51)..(51): n is a, c, g, or t
  misc_feature (130)..(154): n is a, c, g, or t
aaaacacggggtgttaaaatatatgaggggtgggacaggaaagaaacgcgnggcggtatttgtggagtaggtggtgaggaattttcttcgccgcgtggagtgcccggggggtgtttgttaggggacagannnnnnnnnnnnnnnnnnnnnnnnnttttttgtcgatgggggtgcgatttataatctattcggggcgtttacgccgcgagaaccgccaccgtaacgcgttaggtggggaggggaggaacctggcccgagggtttttgcctcgcgggtctcagtggttccatgcgcggcgaatttttcgcgagcgcccttgtttgagagttataatttttcccaagcgcgcgttgggggaaatagtttttgcgcgggaatggtgtatggccacttaaaggcggggatacgatggggcatccatggaccgcgggtgcaattggggggtgttttgcaaaggtctctaagggcggggacttctgttttctacaaacaaggccaaatcggcgggtaacagggtgttcaggggggcattcaaagggagcaagcccaattggggcagttgctcgcgttgggggcaggttttttttcccacccgatattgggcgctgttttggcaaagggtgctcatttggccgggaagaatctaggaagagctgcgatccttttgctcgttcggggttagagcttggggtttgggccacccgcaagacccgggaattttgggtcggaataggtttggttctatttttgctccactgagggcacattgaagcggaaagcctgggaggtaattcctttagggcagacagccagttggttgtgctccgccagccccgggatcatgtcgaatttatggatttctttggcatagtattcggactcggtgttttcgtgggtgcagcgttcctccctctccccatgcatctcctccagcagctcccgggtgctgttgtaaagggccaggacctgataggggacgtgggtcatcgccgttggctcaggggggctggtgagcgtgagcttgctcaagatctgtcccctaatggcttccgccgtcttcttcttgatgtggccgaagtccaaggtggtgcaagtggacagagagaggctgaccgtggcaaagttcagcagggccaggaccaccagagccctttgcaagtgcatcttcatgtgtgagctgggaagagaggccagggggacggcaaggcctggagaggaagagaccccagcagacgtgcagaaggagggaggaaaaccaggcggcctccccagatcccaaaatcccgaaattccggaccgtgccgaggggaggtggtgttggttgtgtgatgatagacggggaggaggga

SEQ ID NO: 432968 - DNA, 2536 bp, Homo Sapiens
  misc_feature (4)..(4): n is a, c, g, or t
tagngcaacactcagtagaaaagttgcaattaagaaatgtacattcacatttaacatttcagtccattcactttttttaaaataaaaataggacaaattattcaattacttgtctcaatttaacaatcttgaaaaagactggaaggtaccctacagtgttcagttgacataaaaatagacccgtattgatcatacaaatctatcatgagaagttacccagtgagagtgagttattgtaattctgaatgtactcatcgtgtttctcacttgctacagaaggcatcctcagtgagttgtattgtgcgagaaaatgaccacctttgccccacatcactttccattccatagagggacacaaccctatctagccaaacccagaagaacgcaggcgcttacacaacttttctcggacagtcgggaaaatccaaaagtgggctttgggcttaccttaaataggaatggaatgtaccactacgagatggtcatcataataaggacattgttgtttgagcggggggtgtgcaatcagtataaatgaggatggcggaggaagaggagtggtgactgaagggaggtggtgcataataagtgcacgagctacacaaagctcgagctacacaaagctcaggctccacgggcctcgccttggctcccagggatgctctgcagccagcgggcggatgacctgaggtcgggcctgggcctgtccctttgtgcatgcggcgtgatttcaaattcaaactaagttccacaccattaggagttttcacggcatgcagttccagagtgcaaatggcttgcatatgtgcagtttttacaggtggaaggcaagaccatacatctctcccacactgggcgtgcctcctagtggacagttgtatgcaagaggcggtgatgggctccctcaggatcccccaatgtgggaatggtcccctgagacttgtgcttcgtgtgcctggggcccagagttgggtggggggttgctggtgggaggtgagaaacaagttctggctgccgtcgggccagcttcccactgccctcacctgggaggtggatgcccacaggcaggatgctctgggctactgttgcacagtcctgcacgagatatttattcagcccacaagatttaatagatctcttgggagttcatctaggctattatgtctgtttaaacattaattctcaataagtgcctgaaagctcttttgaaagcaacctatttgaaggtctgaaccgcccggtaccagcaggaaccaatgcccaggagagggtcagagcacatgtgctctggtggttgtcaaatctctcaccatccatcataagccctctgaactcctgctgaaatcggccctttgaacatcctctaacccctgggaaggcacccggacccacctttacctcaccagcagcatatgacaataacattaaatggctctacagcagaggaagatgaaagtaaaagtagcaaatacaaccaatggccttcccatagctcacagaactcctgagcagaagctgagcagggaagaaatggtgtgtagtttcagggtgtctggaggtgccaccatttctccccatttgatgtcagagaggctttacaaaaaaataaggcaacagctcttaaggagattctgtatatttgaaattagacgcaatgacaggtttcgctcaaatatagttttagaatatagtctgatatgacaaagtagggatttttaaagcctaacattttatttccttgctggggatcagttagtaaagaaggaggaattcctcttacccaagaggaattgcattgctttaatttagcaatgtgaggtaaggcctgccagtgccagggaggacttaggcacctgctctgagggcgggcagttggagcgagtctcacccattgcggggacagccttggctgcattcagaacccacctgctgaggtggcccctccaccacttgggcactagcatgtggatgagctagagttctccatcaaaaccaacacaaatcttgcagatgttgctgttagcaaagaggcactaaacataatggaaaacacaagggcttggaactggatagagcaggaatggaaccctggtcctgcctctcagggctgtgtgactttactcaagtccccaacctctctgggcctcagattcttcactgtcaacataaggagtataataatacctccctccatgggctgtttgaagtagagagtgaggtgaagcacacagaaggtgcatagttactgtaaagcccgacttagatactagtgatgagtgtttcctttatttgtggtcacggcaaaagacccatggagactgtggtaaccaggtgggagagcgacaagtgcccttcccctgtggttatcggtgtattaatagaacatattgaatctggtgacgggtagaaggaaactcactaatttcacaaagaatgaaggagttgtgcctaaaatgagtgacccctgtcaggtacaaaaacacagcattaggccaggtggctaccactgtggtcgattttctgatttctttctttc

SEQ ID NO: 432969 - DNA, 685 bp, Homo Sapiens
  misc_feature (606)..(606): n is a, c, g, or t
  misc_feature (609)..(609): n is a, c, g, or t
aggcaagcaattttttccctttattatttttgttaaataagattccagaaagtatagtgcaaacactcagtagaaaagttgcaattaagaaatgtacattcacatttaacatttcagtccattcactttttttaaaataaaaataggacaaattattcaattacttgtctcaatttaacaatcttgaaaaagactggaaggtaccctacagtgttcagttgacataaaaatagacccgtattgatcatacaaatctatcatgagaagttacccagtgagagtgagttattgtaattctgaatgtactcatcgtgtttctcacttctacagaagcatcctcagtgagttgtattgtgcgagaaaatgacacccttgcccacatcactctccattccatagagggacacaaccctatctagccaaacccagaagaacgcaggcgcttacacaacttttctcggacagtcgagaaaatccaaaagtgggctttgggcttaccttaaataggaatggaatgtaccactacgagatggtcatcataataaggacattgttgtttgagcggggggtgtgcaatcagtataaatgaggatggcggaggaagangantgggtgactggaagggaagtggtgcataataaagtgcacgagctacacaaaagctccgaggctacacaaaggctca

SEQ ID NO: 432970 - DNA, 2268 bp, Homo Sapiens
  misc_feature (246)..(247): n is a, c, g, or t
cgggccccctaaaccccatttttttctggctagggactggcaatagttacctttccaggctgggtggctccactcttcagtctctattttctagtccagggtcaaattccccatgaggcccatctcccttaattattacccccacatcaaatcatggtgggaccagtaataacagcatgatgttttcttacaatgtggaccaaaagaaaaaagggaaaagcctgaagtgggggtgggtggggaggnnaacccccaggtggaacgtcggccctgagacaatcccctggccctacagttccaggtccaggttagccgttagtccaaccaggtcccttccaggaggacaggcgtgggagtgcagaggctgcctctggcccaaaacgagaactggtagagctggcgctgagatgctggttcccagcttttgagtgcctggaagaccagatgttggtaagaggaccatccagggccctgggacactgccaaggggagaaaatgattttctccaggcccctcaaccacaaaactgcagccccaaggaaatgaagcgttcctggtagacccagacaaggatgttagaggtgatgggagccagaagcatctcaaagacttgcagtccacagacttcggctggagagatccgaggcagtaggctgaatttggtcactaggatcttctatacaaccaattcctccagaagtctggctgccaaaactcctccgtgggaagcaccaggaaaccacttgcattcctgggggcgtgaggctgtgtgtctgtctcagggcaccaggggcagggtgtgcgtgttttgggtggttcgcatctctgtctctcctgggtcttcacagccagttccaggcaggggaccggatggcggtggctgctgctttgaatatgttttggttgtctgggtttggtttttatgttttggtttcagtgtgggaggcttggtttaccaggggtactgactcctccctgggcgctggcatataggccctgcagttctgaccagatatgccagctctggggctcacaccaagccggcgtctttggccatgctgtagaaaagacctctctgctgcaggaggtccgatggggcgccgtactcctggatttctcctttgtccaagacgatcacccttgtgtagtccatgatggtgttgagccggtgggcgatggtgaggacggtgcagtcctcgaactgtgtccggatggtggactggatgaggtcgtccgtttccaggtccacggctgccgtggcctcatccaacacaaggatcttcgtcttcctcagcagggcccgggctaggcacacaagctggcgctgcccgacactgaggttctccccgccttctgcacattcatggtctagcttgtcaggaagggctgacacgaagtccttcaggtgggccagctccagggacgtccagacttcttcatccgagtactggctgaatgggtccaggttcattcggagggaacccgaaaacaaaacagggtcctgggggatgatggtgatcttgaagcggaggtcgtgcaggccgatcttggcgatgttgatgccatcgatgatgatctctccttcggcagactcgttgatccgaaataagcccaggggtcaggggacgacttcccaggctcccgtccgcccccacgatgccgaccttttctcccccattgatcgtgacattgatgtgcctgagaacgaagtccaggtcctctcggtagcgcaggcagtagttccggaattccactcggcccacctggggccagctgctgggcggagctgtctcctggatttgccagggcgcctccttctcagtctctgaatactccttgagcctctccacggccacgatgttggtttccatttcagatgacatccgaaccagccagttcaagtacgtggtgacctgcaatgagtaagacactgagaggcccaccaagccagcactgaggctgtgcctggagatcaccgcaaacagggcagcaaacagaacgatgcagttgcccacacactccagccgcacggccagccacctgttggccacgatgctggggtaataggccttctggttctcgtccaccttcaggtcactctggtggatgaagcgctcctgctcctcgaaggctcgaatgacgctgacccccagcaaggtcgtcgttgaaatgggaatagacacggggagcggctgaccagactcgaggcagcttcagcctgccgggaggaagccacgtagaaccctcgtgccgaattcgccacccagc

SEQ ID NO: 432971 - DNA, 1798 bp, Homo Sapiens
  misc_feature (15)..(15): n is a, c, g, or t
  misc_feature (51)..(51): n is a, c, g, or t
  misc_feature (104)..(104): n is a, c, g, or t
tgttacttttacagnacctgatactcctaaaacttttaacttatacaaatnagtcaataatgaccccaattttttcattaaaataatagtggtgaattatatgntattgtgttaaaacctcacttgccaaattctggcttcacatttgtatttagggctatccttaaaatgatgagtctatattatctagctttctattaccctaatataaactggtataagaagactttccttttttctttatgcatggaagcatcaataaattgtttaaaaaccatgtatagtaaattcagcttaacccgtgatcttcttaagttaaaggtacttttgttttataaaagctctagataaaactttcttttctgatcatgaatcaagtatctgtggtttcatgcccctctctatacctttcaaagaactcctgaagcaacttaactcatcatttcagcctctgagtagaggtaaaacctatgtgtacttctgtttatgatccatattgatatttatgacatgaacacagaatagtaccttacatttgctaaacagacagttaatatcaaatcctttcaatattctgggaacccagggaagtttttaaaaatgtcattactttcaaaggaacagaagtagttaaccaaactaacaagcaaaacctgaggtttacctagtgacaccaaattatcggtattttaactgaatttacccattgactaagaatgaaccagatttggtggtggttttgtttctatgcaaactggacacaaattacaacagtaaatttttttataagtgcttctcccttctccatgatgtgacttccggagataaaggattcaaaagataaagacaaagtacgctcagagttgttaaccagaaagtcctggctgtggttgcagaaacactgttggaagaaaagagatgactaagtcaagtgtctgccttatcaaaagagcaaaaatgcctctggttttgtgtttgggagaaaaatatcttggacgcactgttttccttgataaaagtcatcttctctactgtgtgaaatgaatacttggaattctaattgttttgtgtgccaggggcagtaatgtccctgcctcttctcccaatcaaggttgaggagtggggctggggagaggacttaactgacttaagaagtaggaaaacaaaaacctctctcctcagccttccacctccaagagaggaggaaaaacagttgtctgctgtctgtaattcagtttgcgtgtattttatgctcatgcaccaacccatacagagtaaatcttttatcaactatatactggtgtttaatagagaatgattgtcttccgagttttttggttccttttttaactgtgttaaagtacttgaaatgtattgactgctgactatattttaaaaacaaaatgaaataatttgagttgtattacagaggttgacattgttcagggatgggacaaagccttcttcaatccttttcatactacttaatgattttggtgcaggaacctgagattttctgatttatatttcatgatatttcacatttgctcttcacagcatgagcatgaagcccagtggcaccaaatggctgggtacaatcaagtgatattttgtagcacctcactatctgaaaggccatgagttttcagatgatttcattgagcttcattgcagcctgaaattttaaagttgtgtaatacgccaaccagtcaagttgtgttttggccagagatttagatatgtccaatttcctggctcatttcattgtgctctatgggtacgtatagcagttctgttt

SEQ ID NO: 432972 - DNA, 606 bp, Homo Sapiens
  misc_feature (16)..(16): n is a, c, g, or t
  misc_feature (29)..(29): n is a, c, g, or t
  misc_feature (61)..(61): n is a, c, g, or t
gtacctttaaaccacngttaaaaaagggnaccccaaaaaactcgggaggacaaccaatccncctattaaaacacccagtatataagttggataaaagattttactctgtatggggttgggtgcctggagccataaaatacacggcaaactggaattacaagacagcagacaactgtttttccctccctcctcttgggaggtggaaggctgaggagagaggtttttgttttccctacttcttaagtcagttaagtcctctccccagccccactcctcaaccttgattgggagaagaggcagggacattaactcccctggcacacaaaacaattagaattccaagtattcatttcacacagtagagaagatgacttttatcaaggaaaacagtgcgtccaagatatttttctcccaaacacaaaaccagaggcatttttgctcttttgataaggcagacacttgacttagtcatctcttttcttccaacagtgtttctgcaaccacagccaggactttctggttaacaactctgagcgtactttgtctttatcttttgaatcctttatctccggaagtcacatcatggagaagggataagcacttata

SEQ ID NO: 432973 - DNA, 400 bp, Homo Sapiens
  misc_feature (15)..(15): n is a, c, g, or t
aaaaagtttttgttntcccctactccttaaatcaattaaatccctctcccccagcccccactccctcaaccttgattggggagaagaggcagggacatttacctcccctggcacacaaaacaattagaattcccaagtattcatttcacacagtagagaagatgacttttatcaaggaaaacagtgcgtccaagatatttttctcccaaacacaaaaccagaggcatttttgctcttttgataaggcagacacttgacttagtcatctcttttcttccaacagtgtttctgcaaccacagccaggactttctggttaacaactctgagcgtactttgtctttatcttttgaatcctttatctccggaagtcacatcatggagaagggagaagcacttata

SEQ ID NO: 432974 - DNA, 618 bp, Homo Sapiens
ctacttcttagttcaaaacagtttaatttcaaccagttctataactattgagatgatgatagggaaactgcagtaaaatgtggatacgaaatgaatttgaaattattttacaaggttgaaatcataagtgtgcacgtgtaataatttctaaaataagagggttcaaaaaggatggcatataaagtaagcctttagaataccctgtttctagaatgttctagaagtatctcaagatataaaacaacaaccaccactgctacaacaactagcttaaagtacagtccaatcttggggaactgattcagggcaaatgaggaagggtctcagaatgatcaacttgctttctctgtattcccaagctcacagacaaagtttatgataaagagtttggaagcttttattataaaagtgggactagctacaactgtattcaagtcttgcttgtatgggaagaatatacaagaaatatttatctatacaagtatttagacatgggtcccacgttcaatataatagtatcttaaagagaagaatgaggaaagtggcatgaaactctaaaagtgagtttgtgaaacgtaagtggacattcctacccagttatgtttccttacttttctg

SEQ ID NO: 432975 - DNA, 870 bp, Homo Sapiens
ttttttattttaatatttttattctaaaaagaatcacaaaattcaatttcaggttaaataatattttagtcttaaaaaattaacaaaggaggaagatttttaaagttttgttttatatccaaaaatgcattcctgatttccagatagctcatgcaaaatcatatgtagtgatattcaatatttaataaaaggacctttagccagtagtacaaattggattccatttgatcagaaggagttctgatccccaaatcccattttgaaagattcctgaaaagacctcgaagccgcagacaaagtttatttgaaaacatagtttaaaattgcacaaatataaatacaatttaataatgtgaaaaagggaaggcatgcttccaataatagtacaaaaatactaccttaatcttgttacgcaaattagaagccaactgagtaaattaaacacatcaatatgataagaggttatttttatggtagtaattttatttcaaagagcaacgcagggaaatactaagatgaagccttaatacccaacagagttgtgctatgatacatattatttcactaaatcactgatacagtatcacataatatgccaatcactttaaaatcccctcccccccattgccattaatttactataggtcacttaatttgaattggtattaatttagtaacgcaatgtaaacatttaaacttaaatttttttcttgttatctatttcagcctgaaaatgaaatcccaagactttaaacatttatgagcatgaggaggaagcatcacagaagaattgtctcaaaacaacatttttagattagattagagatgcaatattcatagatatataaaatatgtagaaatgtcttttct

SEQ ID NO: 432976 - DNA, 1187 bp, Homo Sapiens
ttttaatgtttaaaaggtttttattaaattatacaaaaacaggcagttagaaattgtgttttcttcctgccccattgacatttctaaggccctaatgcatttgttctgaggtttgacagttgaagcccttcaccagtgctagggaaataaagcctcctcaaccttaaggatttcagtgataagagtctgaaagtctagcacttcaggtagactttggatgaactaagaggttccacagtcaccctgtcatataactgtctgacagaaataggggatgaggtctataaaatggaaagggtggtatttcgtttttattggtaatgaatgatttggaatagaagcatacagaactgcaaatttcaaggacgttagtgtacatggcctggcctttgaaatacaaggagaaagttgggtgcagaagaaataggagaaaactacaataatttctgcctcattgagtctgtgaagtagacccacttatggcacatacgttcctgtcttagaggcctggaactagcagatctcgtggaaagagttctttcccatggaaatgacaacacaggcaggtcatttgagtggaggcttaaaattcctcaggatactggatcagggtaaaagctgctccttagattccagatgagaatgtgtatggtgtgttcagcatagggaacacagcttttctggggaaatgacagtgcttccattgtgagccttgaagctcactgaacccaagacggatggcaggtggaagctctgctaaggagaggcccttcttacgcctctttctggggaacctgagcatgttagtgccttttaggtaatgttacttgtgcagcctaactgaaggatgaagtcctccagcttaccaccctagcccaccctggcttgccccgaactaaagatttatgtcactcattcaatcttctgggtctacaaaaccaggagaatggaagagaaatactaaaatgcagttgtctagcagccgtactccaattattagtcattagacctgcatgtgagatttagttacctcttcagttgttaattaacatcactacttcggggagtgcagagtcagggcttgattttctgcaggataaggggaacagatctgtgctgggggaagagctgagttgcagacaactcacaaaggccactgtgactagtattcctttctggcaaacgcc

SEQ ID NO: 432977 - DNA, 439 bp, Homo Sapiens
  misc_feature (373)..(373): n is a, c, g, or t
  misc_feature (400)..(400): n is a, c, g, or t
  misc_feature (418)..(418): n is a, c, g, or t
  misc_feature (429)..(429): n is a, c, g, or t
aatgtttaaaaggtttttattaaattatacaaaaacaggcagttagaaattgtgttttcttcctgccccattgacatttctaaggccctaatgcatttgttctgaggtttgacagttgaagcccttcaccagtgctagggaaataaagcctcctcaaccttaaggatttcagtgataaggagtctgaaagtctaggcacttcaggtaggactttgggatgaactaagaggttccacagttcaccctgttcatataactgtctgacaggaaataggggggatgagggtctattaaattgggaaaggggtgggtattttcgtttttattggggtaatggaatgatttggggaataggaaggcatacaggaactgncaaattttccagggacgttagtgtacngggccggggcccttttgnaattccagggngaagttgggg

SEQ ID NO: 432978 - DNA, 1612 bp, Homo Sapiens
  misc_feature (139)..(139): n is a, c, g, or t
  misc_feature (181)..(197): n is a, c, g, or t
  misc_feature (210)..(219): n is a, c, g, or t
  misc_feature (270)..(279): n is a, c, g, or t
  misc_feature (364)..(423): n is a, c, g, or t
  misc_feature (430)..(430): n is a, c, g, or t
  misc_feature (435)..(469): n is a, c, g, or t
  misc_feature (471)..(471): n is a, c, g, or t
  misc_feature (474)..(480): n is a, c, g, or t
  misc_feature (483)..(487): n is a, c, g, or t
  misc_feature (489)..(513): n is a, c, g, or t
  misc_feature (515)..(520): n is a, c, g, or t
  misc_feature (524)..(524): n is a, c, g, or t
  misc_feature (587)..(615): n is a, c, g, or t
tatgtataggccccgcccgcccgccccgcgggggaataataatttcttcaaaaaacaccgcgctcccgggagaagagaaatccttttgagccgcggcaagaaatgtggcgggtgttttttaccccccttgttccccctntaaaaaaatgtttattttttcccggagaggcggataaattcnnnnnnnnnnnnnnnnncgcccaatatttnnnnnnnnnnacaaagaaagaggttcttccccaaaaaagttccccaaggtgcgagtttttnnnnnnnnnnggggttgtttaaaaaaaggggcccccgccccaatttttaataatcgggcccccttatagggggccccctttgtcacaaaaaaaannnnnnnnnnnnnnnnnnnnnnnnnnnnnnnnnnnnnnnnnnnnnnnnnnnnnnnnnnnntttttgngtggnnnnnnnnnnnnnnnnnnnnnnnnnnnnnnnnnnngnggnnnnnnnggnnnnngnnnnnnnnnnnnnnnnnnnnnnnnntnnnnnntcgngcaataaataaaacttttattcaaacaagtaactgcagtacagggcacaattcagattttttnnnnnnnnnnnnnnnnnnnnnnnnnnnnntatgttcagcactttacatcttcatacaagtgttgctgttttgtgtctacattcatccattgagcatggaatcccctggatttgaaatctttagcggagcgggaacgccggcgcggaagggtctctacacagggcccggtccgcccttgcgctctccttaatgtcacgcggtccgcgtcttgagctgcttcccacacaaacactaccagccacgtcccaggccacggggaggtgtgtgggaggcttttactaaaccacatcagataaaggagcgccgcagcttcccaggggctcccaccagcgggcaggctgagccgggctgtgccctgcactcaattccccagagttcagtgtgggaagagacaataccagtagccactgagtccactgtgtttgtttctaaagtcaccaagacacacaaaaagacgagagcgtttaggaagaaccgggcaggaaccgcctgttttccccaggtggggggcgtgggtgcggcgtgcccagagctgccctcccccaagcggcccggcccgcacaccctgcccagagcagccaggtagcccggggcagcatcgatgccctcacaaggctggtcaaaagaatgtgggggtggggtggtctctggaggtctttggaatgtccgtgtgcggccagctgggcagcgcctgcccccgaccttggtcccgccagtgcccgacgggaggtgaggccactgtgccgcgctgctctatgtacacctggcccgcagtgtccagagggagaagccctcaggtgcccgggcccggtcttcctcacaggagcggccggctttcttaggaggccccttgagcttggcacgagccccctttctgtgtgcacccctccacaggggccggggcggtcagggaccccatcacctttcctgtccggacagaggccattgtaccgttgaagtggtatgcaagatgacattgctcaccgtaattcatgcttatcggttatttgtttttttgataaaaaa

SEQ ID NO: 432979 - DNA, 1222 bp, Homo Sapiens
  misc_feature (892)..(935): n is a, c, g, or t
  misc_feature (939)..(939): n is a, c, g, or t
  misc_feature (989)..(989): n is a, c, g, or t
  misc_feature (1038)..(1038): n is a, c, g, or t
  misc_feature (1051)..(1071): n is a, c, g, or t
ctttctccaagactccggtaaatgactgcgtcaatggcaaggaagtcagtcactgtggctgagtatagttttccatctgcaaacagtgcaacgttggcatgtttggcatcatatgggcatctggccattccgctgaattcatccccgaatggttccaatgtatccatcttatagtttctgcaggaagggttgaaggcattagttccacagacaaacaatgcatcatcgtttttctttagaagaactttaataaagttgtggcactcatccttatgttttcccttcattctgcatgtgtctacatcggcctgtctagatttccatgtcagttttttgctacaataaatttcttccgtgtgtgatgtgtctatatcaacagtataaatatggtccctagcagcaatgtagggggttccgttcatgatcataatcatctggatgtccagcctgtgcctctgtgtggtgttccgtcctggcttgtggcccacaaacaccggatactgttttgtatagttgccatgcgaaatactgattggctcagaatcttctgggaaaccagccccagcaaagcgcccccagtgtgaaatatagcagcaaggcttctgacctcatagaaaatcagcggggagactttatttctctacttcaccttttcggtgcatcgacggacaggcggccggggctcggagcgaactggtacagcgtgtatcccatttagtaatccattatcgaggggatctctccgggccgcgggctgcgctctctccttcgcaagcctttgtcattcctacatgtgtgcttgtctctttgggggaaatagtcgcggcgactactttctgggatgcaaacgcgatgtgttcatctccaatgacgagcggagaaggggagaggnnnnnnnnnnnnnnnnnnnnnnnnnnnnnnnnnnnnnnnnnnnnccancaaggaagagggtaaatgttcaagaaactcttctccaaatccaaattccncttggattccactccggtgagtccccttggtggtgtctgcgccgattancaagtcatttcannnnnnnnnnnnnnnnnnnnnctgaggcaggggtgcaaggctctggcccggctctgcggccggcagcgcggtgccgcgggtgtggtgatgctggccgctgctacacgctgctaagcgggcatcgcgggcgaccggcaccgcggaggagcgccgctgctgggttccgagcgcc

SEQ ID NO: 432980 - DNA, 464 bp, Homo Sapiens
  misc_feature (121)..(175): n is a, c, g, or t
gtctttttaaattttcttgattttaaaaaatgtatttgtgttttgcaggttggaacgcaaacccagtctggccacgtcccgtgaagttgtggacaaaatgtttcagtttctgttcacctcnnnnnnnnnnnnnnnnnnnnnnnnnnnnnnnnnnnnnnnnnnnnnnnnnnnnnnnaaagaccttctttctaaaccagctttatgggaaaacttctattttaaaaatctggaggttcctttttaacctggcggtaacccacattcactgagaaaaacttgtttggatcttggggacccagttggtcccaggccttggggttttttctgccccaacaaactttgggtttgaacaatgccatacccaagagatccatgtgtcctccgaaacctccggttccataaattccaaagagggggatcaagcccggatgctttttgccctgaccaaaaatctggcgggccat

SEQ ID NO: 432981 - DNA, 486 bp, Homo Sapiens
  misc_feature (354)..(410): n is a, c, g, or t
atttactcagtgaatttattgtaaaaataaagaaactcaattattccagttaatggatttcacgttaaatagtttaactttcaatgggctttctgaagagctgttcataggatgatatttggaagagtcctttccttaaggaaaaaaagggtgaacaataaataaagagttacttgcgttaacggtcacgttatttcattaaaagagaggaggagcagaaatctatgacatagttgcccaacatggcatttatctgctgcaacagaaagctgtaacactggcgggcatttcacagtatttgcgcatagtaaacttctgccattgttaaagtctgagttagaattatcaatgaannnnnnnnnnnnnnnnnnnnnnnnnnnnnnnnnnnnnnnnnnnnnnnnnnnnnnnnngcaggttggaacgcaaacccagtctggccacgtcccgtgaagttgtggacaaaatgtttcagtttctgttcacctc

SEQ ID NO: 432982 - DNA, 975 bp, Homo Sapiens
ctactctgttgcctccagaggcatctgagggaagtagtagcttttgggaaaactcatgggcttcatgctaccccattcatcaagctttttcaattaatttattacctgtggtagcaatcctgaagaacatgtctatttcctgtggtgtgttaccaagcaggtgattaatggcatagaaagttgcctttaccgcctgggctcagccaccatctcatacttcatggccattggggaagagttggtgagcattccctggaaggtgctcaaggtcgtggccaaagtcatcagggctctcctccggatcctttgttgtctgctgaaggccatttgccgagttctgagcatccctgtccgtgtccttgtggatgtggccactttccctgtgtacaccatgggcgctattccaattgtttgcaaggacattgcactgggccttggtggcactgtctcactgctctttgacactgcttttggtaccctgggtggcctatttcaggtggtttttagtgtctgcaagcggattggctacaaggttacttttgacaattctggggagttataaactcaaaaaactaatagtatccagtcacagtgaatttgaaagctggaatagttgtctttacaatgggtttctgttcactgtcagttatcattatattttggcctttggtggggatgtctgcttgtttttgcaaaagacgatggcagaatttagacttgacagaggagaaatgctcagggtgagattaggtgtagtaatctgctgtttacctccagttatatgtgcaaactcccaagccactaataacttcagttatgcactctaacacagacgaccacctgaaatgcactggtatttatttctgataattaaaaattacaggggagggaagaactagaaaaagaacaactttagaccaaaggtgtctgagaaaaggagaaagggagcttgttcttcccattgctctttgtgat

SEQ ID NO: 432983 - DNA, 576 bp, Homo Sapiens
gtgcagtcagaaaattactcattttctgacacatttattgaccagcacatattctgcccaaatgctgccctctatgtgctctggtctgcgtagtctgggtacgcctggggcccatcgctagctggcatgtactgtgacgtgcggtggctgtgggggcaatggtggtgcagagctgggagatgggggaacatgaccatggaggcagcaggctgtgcagccccagcagccactagggtcaccggtacccagagatggcaaaagggcagcatgccaggtgcaggaagtcctgtggtgtccatggcaagggtactacgggacgctgtgggaagggccaccacaggcccgtaagaattcatctgagtgggagatccagggacatagaggaagggcagcgctgcaggcccagggacagcggccaccggagtgacgtgagcctggctgccctctgaccactcgccggccggctgggtcactggactgttgtcactcgccacggcggaatcaggcaccatcacaggagttgctggtggagcagagccactcctgatttgggtgttgggaccggccggttcccgg

SEQ ID NO: 432984 - DNA, 1513 bp, Homo Sapiens
  misc_feature (812)..(848): n is a, c, g, or t
gactccccatgcgtggctaatgtaaggatagccatacgtcagaacctatctagcgtcgattcaaaaaatgagtgtacgcaagccaatttagttatgtaagacatggttttaaaccatccctgcggtagtaatagcgcccgccaattaattgtaattgtgttagttatatatttatttattttggttttcagggatactttattgacatgaacaaggagtttactgaaaaacagcacatacaggcattacgttgttgagggcttaggtggtcaggaacatttccagagtttggattgtgttcgatggcagttcacaagcctgcaagcactcggccttcagcggcctccgtctccatcacacacactgctcagcagaggcagctcttgccaagccgtgacgcagggaggaagcacagagcattgctggctctgagggtcagctggcctgggatggagaccgagtttgatatataaatcagacttgcttggaagtgcttatctcctgcgtcctgctgcaaactcaactaagggggaggaagtgggctgaactaatcatgagctgtccaccagctgagattttagagattaagtaaggtttggatgatgctgcttttcagacctgtgactgcatggcacactaaaggtctaggctagagcttgacagagtgggtgcaaaaaagatgttagtagaatgagtggatgatcagactggcaagcacaccaagcactattcagatacatttgcagtgactaggtgaattcactgaattagggatttttcatttacaaaatgaggtgagaggaaggcttccnnnnnnnnnnnnnnnnnnnnnnnnnnnnnnnnnnnnncatgttaaactgggaaaggggaaactaagatatattctgaagtgtgtctagctcttgcttctctttcttcctgcaaagatgcagtgacacagccttttccctcagatttatgtgaggaggactcacagattctgagatggatggaatttcttttttgatccaataattttggggagagaggagggagttgctgtctcctacttcccagcacattcctgctttgaaaagtaactttcctagtaatatttctagttggacatctaaggagaaacctgcaactcagaaggaagtctgggtgtgtgggtgtctgggaatggagaaactaaaaggtcatgccgttaaacaagtggtgagaataaaggctggggtagggacaggcagggagtgtttgggttggggctctgattcaagaccgaggtgacagtgaaggtcagcagggcaaggtgctctcagggccaactggattgagcaatcacattcatggctgtgaagtagtaagaatgggaaaatcagattgagccaagcttggcctttagtgaattgtgttattgaggatcagacatggggaaatttccagcaccaagacaacagatggggtttctaaagtgatattaatagcccttgagaactcttctaagccctttaataagcaacatcatgccaga

SEQ ID NO: 432985 - DNA, 1456 bp, Homo Sapiens
  misc_feature (1378)..(1414): n is a, c, g, or t
aacacaggttacaataacccggagttttacaacaaatgggtgacgaagcacgtgacaacatcggcatttccaacttacaagcaaatgcaacggtgtgtcatagcccatcttgtcggggggtttgaggtacaggtccaccacgtaacggatacgcttctgcagcatggcctcgtcgtcatcagggtacatcagcctcatgaagtcagggttctccaggacgtccagagtcagctggcagatggaagcctggttctctttggcagcaacatgcatcacgttgtacctgcacccttcctgcacgatagtggggttgtctcctgagcctatcagataccgggggttgctccagataaggtcagaaaaggtgtcctcctctcccttctccacagctttccgaagcttggcggtgaggtcctgcgtgcggggatttttgtaactgttcgctcgctctttgttgactgtttctgattccgacaagcacaaaccatctttcaacctgtcattgctaaagagtggagctgttttcacaggagacagtggtaaggacgttttgcttggagaagggaaataatcacaaattcctctagcaaatttctcagcgtcttctctggtagaaaaagctttaaatcgggaccctttgatcatcttgacagcttgcaatgcttcctttttattttcataaacatagatcctttcatttctcgctgggacgtcctcatacactggacacaccccatagtacaggggcggctccttagacgcagtcgctccagctctgtaggtgtcggtgtcactagggggcaccgagcaggtcttggatgtcacagcttcctcctctggaggattcaggcccacactgtaaccaaaatctctgtcttcagaaaaaccagcctgatcagttgggttcccttcagctggcttcaaaatcctttgtgggtcctggctgagagctgtgacacctgcctcatggtagtagaaagaagacagccttcctccttgctccagtaaagcctgagccaattttttctcaaaaatgaaccttgtagttgatgtaatgggtccacatttcaatccggctttgacgatttcttctctaaggtcatctggattcagaagtttcaatcgagccaacagagcatccattgtcatttcacctgaggcgggggcggcggccgcgcttggcggaggaactggggtcccgctgcggcccagacctcccggccgcgggcccagccgccgcaccagccaccgcacagcgatcagcagcaccgaggcgcccagcagctcccaggccagcgccgcccactcggccgccgccagccggcggccacaacatcccgctctcgacgaattcgagctcggccgatttggcctgatnnnnnnnnnnnnnnnnnnnnnnnnnnnnnnnnnnnnncggccgccaccgcgattaatccgagggccccataggctgcca

SEQ ID NO: 432986 - DNA, 1283 bp, Homo Sapiens
  misc_feature (68)..(68): n is a, c, g, or t
  misc_feature (105)..(105): n is a, c, g, or t
tgttcctggttgaaccctttttgccctattccctgctgtgtgaaaaaatccttctaatctttgcaagnccttccctgggaaagacagatcaaacaaaacagcccnagaaattcccaagtaattcaaaccccagggataccccaagctcaatgagctagctcccttcccactctctcaaagcctctttccgggtccgacttcttgacgtggtgaaggaagcctgctttctctcgagttggatttttccagagcttgcgaaaatcttcctgccttggctggaactcaggggccctgcgaaggctctcagggtcagtaccgggtctctggggctgcctccatagcggctgacgtgagaggcctcagccgtctggtctggggaccacagctccccgatgactggagaagaagtctcttccgctctcaggaggggcacgtagtagtggccctttaaatactctctgatccgctccttcagttccacagatttatttttgcttctttcacaaattacatcttcaggtgttttatcatatttattccttgagttttttacaatcaaatggtgtgacgaaagcacgttgactacatctgcatttccaaacttacaagcaaaatgcaacggtgtgtcatagcccatcttgtcgggggtgttgaggtacaggtccaccacgtaacggatacgcttctgcagcatggcctcgtcgtcatcagggtacatcagcctcatgaagtcagggttctccaggacgtccagagtcagctggcagatggaagcctggttctctttggcagcaacatgcatcacgttgtacctgcacccttcctgcacgatagtggggttgtctcctgagcctatcagataccgggggttgctccagataaggtcagaaaaggtgtcctcctctcccttctccacagctttccgaagcttggcggtgaggtcctgcgtgcggggatttttgtaactgttcgctcgctctttgttgactgtttctgattccgacaagcacaaaccatctttcaacctgtcattgctaaagagtggagctgttttcacaggagacagtggtaaggacgttttgcttggagaagggaaataatcacaaattcctctagcaaatttctcagcgtcttctctggtagaaaaagctttaaatcgggaccctttgatcatcttgacagcttgcatgcttcctttttattttcataaacatacatcctttcatttctcgctgggacgtccctcgtgccgaattcgccacccaggcctcgctaccttagta

SEQ ID NO: 432987 - DNA, 710 bp, Homo Sapiens
atcagggccaaaacgttttactttccatttgaatttacaaccatatacagacaatatggtaagattttagagaaaacagatcatcactacgaatatccatattctgatttcttttgagaaccaaggtgccttttaaaatgcggctttttagaatagcatgtgttgtttctgtctgggatctagatcttgtctgctacaaaacaaatgaacacaccctgtgtaacaaaatcgaattttaacatttaaatcttgattccaatattcctgacctatctcttgtcatatgaaagaaagaagcctttttttaaaacaaagtttcaattcagaatttttacaaacaaaaacaatcctgcgtctacttaatatccctgtatatcctcaaaaagcaagttcaggaaatttaaaaatgatttataaaaggcactgaagttagcaaaagcattggtgggttttcattttggattaaacactggaaatgttcacagagaaacaactgtgtgagcagttgcccgtaacacccaggaagaaaccgacctccaggcagcacctcctgaacacctcagcggctcctcacacattccaaccacagaccttcattcaagtcaaggtgaaggctacagtcagcacggcaagaaaccaagatgggactcaaacctctaaatgcaacactctgcatacaggagatcccaactgaaatgagttccaaaata

SEQ ID NO: 432988 - DNA, 879 bp, Homo Sapiens
gtggtggtcagcttttgtccctgtgtgtcatcctgcctgtcaacctctcaggcgacttgctgggtaatgaccctcctcacccttgtctatgtgtaatggggcagagtggcagtcctagggaaagggctcactgtggtagaccagaaccccaggagtcatgccccacttcagatgtaagatggtctcagggtgactctgaacatttctatctgattaaagatctggagcaaacctaggctaaaactggggccccaatatcaatgtctggttctatttaaatagggaaaaaagccccccaagatttacagaatcaggggctatcagagagtcttttatactttcctgccctcacccaaattaggaggtcacaattaatggacccagaagatatccatgatacttaattaaaatcagggtgtggcattatatctaagggcaactgcaagaatccaccttccaaaatgccaccatgaatccacttaggatacccagtggttcccaacgttggttttgtaacaacataggatgtttttagttttctcaaaacaaaatgaattcacattatgcctttacctgcaatggaaggttgagaagttatcagggagcattttggtttcaagcagaggccttgatggtgtagctctggaaagaccagtcagacgttgtcttccctgctggtccagacatgctcctcctccccagagcttcacaaaccaaggctgattggttacgccccctcctgcttccccacatgagcctggaacctaagtatctgtggcttctctgcagacaaagacccgtatagttttgggaggacaacaatagcaaacctacagactgagtgagtatggagcccgtggggataggtgctgatggggt

SEQ ID NO: 432989 - DNA, 2867 bp, Homo Sapiens
  misc_feature (2106)..(2106): n is a, c, g, or t
  misc_feature (2306)..(2306): n is a, c, g, or t
  misc_feature (2313)..(2313): n is a, c, g, or t
  misc_feature (2325)..(2326): n is a, c, g, or t
  misc_feature (2329)..(2329): n is a, c, g, or t
  misc_feature (2363)..(2363): n is a, c, g, or t
  misc_feature (2367)..(2367): n is a, c, g, or t
  misc_feature (2393)..(2393): n is a, c, g, or t
  misc_feature (2411)..(2411): n is a, c, g, or t
  misc_feature (2426)..(2426): n is a, c, g, or t
  misc_feature (2526)..(2526): n is a, c, g, or t
  misc_feature (2557)..(2557): n is a, c, g, or t
  misc_feature (2568)..(2568): n is a, c, g, or t
  misc_feature (2572)..(2572): n is a, c, g, or t
  misc_feature (2579)..(2579): n is a, c, g, or t
  misc_feature (2612)..(2669): n is a, c, g, or t
  misc_feature (2686)..(2686): n is a, c, g, or t
  misc_feature (2693)..(2693): n is a, c, g, or t
  misc_feature (2710)..(2711): n is a, c, g, or t
agcttttcacgttgtccagcaatcctcgagtgttagagaagagaaagatatcctggctggcactctttcagttgacagagagtgacctcaggctgggccggctcctcctccgtgtggccccggatcagcacaccaggctgctgcctttcgctttttacagtcttctctcctacttccatgaagacgcggccatcagggaagaggccttcctgcatgttgctgtggacatgtacttgaagctggtccagctcttcgtggctggggatacaagcacagtttcacctccagctggcaggagcctggagctcaagggtcaggcaggtgcaagggccagtcccacctccaggggagctccccccagccggaggctccttctgccaaagaatgttccggcacagcatgcagactatgggggacacaccagccctgtttctttaatacctcggtgcccgaaaaagagcttctcacacgtggcagagctgctggctgatcgtggggactgcgacccagaggtgagcgccgccctccagagcagacagcaggctgcccctgacgctgacctgtcccaggagcctcatctcttctgacgggacctgccactgcacaccagcccagctcccgtgtaaataatttattacaagcataacatggagctcttgttgcactaaaaagtggattacaaatctcctcgactgctttagtggggaaaggaatcaattatttatgaactgtccggccccgagtcactcagcgtttgcgggaaaataaaccactggtcccagagcagaggaaggctacttgagccggacaccaagcccgcctccagcaccaagggcgggcagcaccctccgaccctcccatgcgggtgcacacgaagggtgaggctgacacagccactgcggagtccaggctgctagaggtgctcatcctcactgccgtcctcaggtgggttcgggcttcaccgcctggccctctgtggtcacagaggggctcggtggcccaggtggtggttccgcctccaggggcagggccttgtcctgggtctgtgtcagcgggtgcaccatggacatgtgtacattgaggttgtgggccttctcaaaccgccggccacactggtcacaggcaaagtccagctcagtctcagccttgtgtttggtcatgtggtacttgagggatgcccgctgcctgcactggaaccaacagacctcacactgggggacagaggcagattagaaggtgcgagggacagccctggggggggtcctgactcacacttactgcaaaggcttggctcccgaatgtcgcatttggtggacgagaaggtgcttccgctgcttgaaggtttgtccacattcgtcacagatatagttccgcacctctgtgtggatgagcttcacgtggcgctgcaggtagcggtcgatcatgaaaaccttgttgcagccagggtgggggcagggccgctcccggacctcctcgtggtgctccttgatgtgcttcttcatgccgtcagcgcctcggtacacggccgtgcagccctggtaaggacacttgtagatggtgggaagctcctccctctcacaacgaagcttcttcttccatccgggcttgggtcccggcttcttccgaattcttggttcttcagacttcttggcttctttgctttcactcttcttaccagagactttcctttctgggtaaggctcaaaggactcgtccgaagactgggcattttgcttcttgtcattttcatcttcactcaagacgtctccgatcatccgaggttgaagatggaagctgcttctcacccaactgccctggggccctgcaaaggggcaggcttggctgaggtgggaagcccgacctgggccccaccgcgtcgctgtccgaaggaggctgggccacatccgtgctgggcagggtcttggtctcagccccaaactggggtccctgtccctctaccctgggaggtctgaggggcatcccccgggttccaccctcggtgctggggcagccgtggcgccgtctctttgtcccgtggccacttgactgccagcgcactgtccagcaagaaggccttgcagctggagctggtatccatggtgtagntcgtggccctggtcgcagccccacacgacctggatgacgccgcagtactcggaggacagtgtcctctgaaggtggggcagggccccgcagctggccgcatgttcatgcccccaccccaccaagccgtgcaggcactgggggccagacacgctcccttctctgcccctggttgggggctgggcaccgacactttgcacaangcttccngcgaccagccgnngangcgttgaccttctgcaggaaggacttgagaaggntgtngcactggtagaactgggcgtggcagntcttgcagacaaacgganacaaggtgggtcctngcggacagccacaccaagcaggcgctggaagtcccgtacgagcacgcgctcctctgcggatggcctctccatgctcgctccaggcaccctctcggagatntgcgcaggcttctcgaggaaaacttcccgtngcagaggcganagtnacccatngcgagagcccggcctgctccgtgggagacggannnnnnnnnnnnnnnnnnnnnnnnnnnnnnnnnnnnnnnnnnnnnnnnnnnnnnnnnngcagaaaggggaggggngccgggntctcacgtagagagggnnctggctgccgcggttagacgcccatggcaactccgtgaggggcccttctcgccagccccgtctcaagacggcgaagaggcccggctccgtcgcgacaacccacccggactctgccgcccccgccactaacacccgtggggcccgcagatcccggga

SEQ ID NO: 432990 - DNA, 440 bp, Homo Sapiens
  misc_feature (368)..(368): n is a, c, g, or t
  misc_feature (405)..(405): n is a, c, g, or t
  misc_feature (413)..(413): n is a, c, g, or t
  misc_feature (428)..(428): n is a, c, g, or t
aaggaaatagctttctgaggtttctttaaaaaccatcctgaaatgcacgcagctgatgaagccacgtggacagtgtataaagcagtttaaagatcttaataaacgaggccctcataggccccttgcttgggcccactgcatggtgaaccatgtgcagaaatgtcttcccagctgtgatggtttcacattgtcatcgtcgtccccccgggaggttggagcatcaggggcctgggactcactggactctcccctctcagaggtgcggaactatatctgtgacgaatgtgggacaaaccttcaagcagcgggaagcaccttctcgtccaccaaatgcgacattcgggagccaaggcctttgcagttaagtnttgagttcagggaccccctcccaggggcttgtgggcnttcggcancttttttatcttgcntttgttccccca

SEQ ID NO: 432991 - DNA, 715 bp, Homo Sapiens
  misc_feature (628)..(628): n is a, c, g, or t
  misc_feature (687)..(687): n is a, c, g, or t
gtaatccactaataagtgcaacaagagctccatgttatgcttgtaatataattatttacacgggagctgggctggtgtgcagtggcaggtcccgtcagaagagatgaggctcctgggacaggtcagcgtcaggggcagcctgctgtctgctctggagggcggcgctcacctctgggtcgcagtccccacgatcagccagcagctctgccacgtgtgagaagctctttttcgggcaccgaggtattaactgcagcagaaaaagacgagcttttgttatcagttccacggggttgccctgacccttgagctccaggctcctgccagctggaggtgaaactgtgcttgtatccccagccacgaagagctggaccagcttcaagtacatgtccacagcaacatgcaggaaggcctcttccctgatggccgcgtcttcatggaagtaggagagaagactgtaaaaagcgaaaggcagcagcctggtgtgctgatccggtgccacacggaggaggagccgccccagcctgaggtcactctctgtcaactgaaagagtgccagcctagatatcttgctcttctctaaacactcgatgattgctgcacacacgtggcaagcatttggcacgactgnggtgctatttgatgtcagatgtgacgacagcacgcccatccaagagaagatgacaaganaactcatagctctctcttcgcagtccag

SEQ ID NO: 432992 - DNA, 808 bp, Homo Sapiens
  misc_feature (208)..(263): n is a, c, g, or t
tccggaattcccgggatgcgggcccacgggtgttagtggcgggggcggcagagtccgggtgggttgtcgcgacggagccgggcctcttcgccgtcttgagacggggctggcgagaagggcccctcacggagttgccatgggcgtctaaccgcggcagccaggcccctctctacgtgagaccccggcccccctcccctttctgcagccnnnnnnnnnnnnnnnnnnnnnnnnnnnnnnnnnnnnnnnnnnnnnnnnnnnnnnnncgtctcccacggagcaggccgggctctcgccatgggtcactgtcgcctctgccacgggaagttttcctcgagaagcctgcgcagcatctccgagagggcgcctggagcgagcatggagaggccatccgcagaggagcgcgtgctcgtacgggacttccagcgcctgcttggtgtggctgtccgccaggaccccaccttgtctccgtttgtctgcaagagctgccacgcccagttctaccagtgccacagccttctcaagtccttcctgcagagggtcaacgcctccccggctggtcgccggaagccttgtgcaaaggtcggtgcccagcccccaacaggggcagaggagggagcgtgtctggtggatctgatcacatccagcccccagtgcctgcacggcttggtggggtgggtgcatggacatgcggccagctggcggggccctgccccacctttcgaggacactgtcctccgagtactgcggcgtcatccaggtcgtgtggggctgcgaccagggccacgactacaccatggataccagctcc

SEQ ID NO: 432993 - DNA, 552 bp, Homo Sapiens
  misc_feature (322)..(330): n is a, c, g, or t
  misc_feature (419)..(428): n is a, c, g, or t
ttttccagaaaagaaaatcccaaagcaaatttgtgctagggttctttgaacttggctcttttacctcatggttgaagatcttgaaagaagtatgtaggataccactgggtgatgtacttgtcaaggccctgaaaagtagcctaccatgccattctcccccactctcaagtagcacttttatgttatgggaatcaaggggtgggaggtatcattattcctggtagttatgggtttttaataaatatcattactgcaatatcagacttcaatcttgccagaacttcaaaaaacattattcaatttttgtcttacgaaacacttnnnnnnnnngactatcacttgagaattttctttgcaatttcctgtaaatgaaaacatttgttaaaaagttcatctatgaaaagttctcacatatcttnnnnnnnnnnttcttctgtacacttgttcccataattatgttgaaattaatggaaaatttaaaaagccaatgtaagacaaaggaaggtaaatactgtacacttgctgacgacctcttccaccataagatcaccc

SEQ ID NO: 432994 - DNA, 503 bp, Homo Sapiens
ttttttaataggagaaaagacatacaaaattttattttaacgtgcatagcacggggcggggaggcgagggggtgggaagggaagggtcacaggagaatgattacccaataacccaatggggtacagaagcgtatacactctttttcataggggaaggggagagatggagaatatagacaattcttctgagggcagcaagtgattcttagggcgaaaaaatggacagaaattaacttgtaaatgattctctttagaatttgaatgagcccgagaaacaggcatcatcttgtgaaaaatccatccaggcgtagttgccttcctcagtcttcttttctgagctagatgagatttcggagaggggaggaaggcaattttgtttcttttggaaagacgttttctcgatcagattaggaaattctagagagagtgcctccctatacttgggagagaaggttagagggaccttgattctgaggcagcttcgaaggcctctcagcatgtca

SEQ ID NO: 432995 - DNA, 376 bp, Homo Sapiens
caacgactatgtgtgcaagaagggggagatcggccgtgagatgtacatcatccaggcagggcaagtgcaggtcttgggcggccctgatgggaaatctgtgctggtgacgctgaaagctggatctgtgtttggagaaataagcttgctggctgttgggggcgggaaccggcgcacggccaacgtggtggcgcacgggtttaccaacctcttcatcctggataagaaggacctgaatgagattttggtgcattatcctgagtctcagaagttactccggaagaaagccaggccaagagctcgcaagacgtcaagggagaggaaggctccgccgccccagaccagcacacgcacccaaaggaggccgcccgacccaccc

SEQ ID NO: 432996 - DNA, 783 bp, Homo Sapiens
aggggagggtcacagattttaaagcacacggaacacagtatcatacttcagttattctaattcctgaaaaagagctaccattccaaaatatctgacaagtttggtttctcctaagggaggcctggagtgacagttacaacatttttctccagaatatcactgttaagcttacatttccagcctccttttacatactttgaattgcttttgtgtatcaaaatgcatatgagtattttaagtatccacaaatgtgatattttcaggttagaattcaggaaacatacatgtgtgtgcacacatacacacatataacccacaatcttaagttccttttcctaagccatttttacaagcagagttactttctgactctctgctttcagttctgcaccaattcaaatgagagaccctagaaaggagcctccagggaactccagctactgtatacatcatctgtggttttcaagcttcttgagccttgtgagtctttgaaaatgaattctaaaactaaaactcactcatagccagcaatccttttagctcagtcagtcatacacagcactcttcaaaacagtagactgtgtcattaagtataatttagtactgttacacagtggtttagcattaagacaaatcagccagagctaatcagttagagaaaggtgtccagggtcattttctaggccccggggaagtcaggcaaagtagatcagctgtggggttttaaaagaactagataagctgattagaaatctctgactggagaggctgcctcagactcag

SEQ ID NO: 432997 - DNA, 1007 bp, Homo Sapiens
  misc_feature (823)..(844): n is a, c, g, or t
tttttggaaatttggaatttaattaaaatattatcactgttaattaaaatattccatgcgtcccctacacacatgcatacacaattgcaaatgagtctcaccaacccaaatctccatgaggatcttattcacagatgtagcctcagtgctgggcacggagcctgggcacatagtaggaacacacaaaaaataaacagtggtttcctattaaatgagctatcgcccataagtgggtaaattctattggtggggtcattctggatcccaagaatttgctctggcagtggtgatagaaggcatattgttggccaggggaaagcgggaatcgcagaaaggaagggaggaaggggccggtcattaccagcagctcctgaggcttgatggagttgtcggtgtaaatgcacagcttctccgcggtcagcgggctggtctctttgagtttggaggccaggaacatgcagacagcacccaggagttgcagatgggacttcggagtcgggaccccagccaagaaacggtccaggtaattcatggccagagggaagacctcttcttcgcacttctgttcctcacagaccttcagcatccaggtggccaccattctgcgcatgtagggtttgatgtccttttgcacgcacttgaagtaggagcactgcggagggtagcgctcctcgatggtgagcaggttctgcaggacgcggtcgtctcggagcaggttgcggtcccgcacggccctgcggaccgggtccacctcgtggcacagcagctccatggccagcccggcggcccctctccctcctgctttccccggcctggaaaaggnnnnnnnnnnnnnnnnnnnnnnggaaggggaggggagagcgttcccctgacctccttcctttggctaaatagggggttttcgggggagaggtgagggcatatagagaaggtggagcagaagggaggcgaggattgggtggtgggcgagcagagccatcccgggaattccggcaccgtaccagcct

SEQ ID NO: 432998 - DNA, 959 bp, Homo Sapiens
  misc_feature (93)..(102): n is a, c, g, or t
  misc_feature (923)..(923): n is a, c, g, or t
  misc_feature (939)..(939): n is a, c, g, or t
  misc_feature (942)..(942): n is a, c, g, or t
  misc_feature (957)..(957): n is a, c, g, or t
aggcaccaaatgctttttattattccgttttcgtaggacctttttctctcacttctaaaagatctttaaatatgatctaggtgggggcagaannnnnnnnnnaagtttcaccctaaaacacaaagaacaaaaacaaccagaaagaagaagagaccagattatggacgcgtctctctctttcggcccaactggcatcctcacaggtcgatatcccgcacgtctgtaggggtgctggcttggtccagttcatcctccgacttggatccgtcacgttggtcctgacggtactgctgcaggctattgaggagcaccgcctcaatctgctcctggcaagctttgagacaatccacgtctgtgttggtgatcttagccagcagctcagtcagggcatcacaagtgagcgagctcacttcctcatcctgctggagcccacagatggctgctcccacacttccagttgcgatcatcgacggtgggtacatggcaaacttaaagtccgtggcacacagagcaatgaaggtctgagcatgcttgcggatcagagacagcttctcccgctgctggggcagcttgcgcaagatgtgctcaatgaagtcatgaggagtgacagctgccaggttccacttcaacttccccagcaccaccagttcccactccagcagctcctgaggcttgatggagttgtgggtgtgaatgcacagcttctgcgcggtcagcgggctggtctgtttgagtttggaggccaggaacatgcagacagcacccaggagttgcagatgggacttcggagtggggaccccagccaagaaacggtgcaggtaattcatggccagagggaagacctgttcttcgcacttctgttcctgacagacctgcagcatgcaggtggccaccattgtgcgcatgtggggttggatgtgctnctgcacgcacttgaantangagcactgcgcaagnta

SEQ ID NO: 432999 - DNA, 465 bp, Homo Sapiens
tggaaagtgaacgggatcgccaacattttgataaagaagttatgaaagcctatattgaagaccttaaagaaagagaatctgttcccagctataccaccaaagtgtcttttagccttcaactttgatatccatcagaagactgcaaatctcactattctctggagctatatataaatctttgttatgatcatgtcatataggaagaatggcttgtgcttaaggacaaagtctagaaaccactatcatagttgctaaaaaaaatggttttcaaatgtcaaatacatgagtatctccctccatggactggagaattgaaaaattggtttgtatattgatatttccaggttcatttgcatatacttttttccaaataatgcacatttaatatgttttaaaatgtcttatttttaagaattataactaaaagaccaaatactgaagttaagtgcattgttttcaggaatc

SEQ ID NO: 433000 - DNA, 483 bp, Homo Sapiens
tttcaccaatatctgtgcattatttttcccaaaccctataccccaaggggaaataaaccaattatcatagaaaaagaacttccagtaggtactgcctctctttcctttcagagagttggtgtttatatttgccttgtttctatggcattatgccctacttccttttctgggagggactaaaacatggtaaaacttgaaccatgagcacaattacacaatgcaataataatcctatttgctttggtctctatgaaaaagtttagatattctcaaaatcatccattgtggttgatgcacctttctctcaaggtaatgtcagagatagaaagactttagacaccaagtggtcttattctctcatttgaaagacaaaggcaggagtgacttgaataagaccattcattgaactagtggcagaacaaacactttgaatcaaggtttcctagttcctgggcccactaccatttatattttctatcataa

SEQ ID NO: 433001 - DNA, 489 bp, Homo Sapiens
  misc_feature (179)..(224): n is a, c, g, or t
gttggaagaaaggttttcaaatattcccattgcaggcatcaccctgtttaatcctctctatgaccccatggggtgaatagtacctgcctctggattgggaagagcagaacctgtgatcatccaacagagaaaaaggtgaattctctccttaaaaatatggggagagggaatgctggccnnnnnnnnnnnnnnnnnnnnnnnnnnnnnnnnnnnnnnnnnnnnnnagtctgccaaacaccatgactatccctattttgtaggtgagaaagttgaggctcacagaagttacgataattgcctagaaattgggaggagctgctggaattcaaacctgatttcagcattagcatctcagtccacaaaggtcaggccatggtccttgggacaactaccatggactgtgtaggccgcctgcacttggaaagttgaatctctgattaatggggtcaggaagccagcatcctgctggacaggggaaccttgccaaag

SEQ ID NO: 433002 - DNA, 1387 bp, Homo Sapiens
tcttttttgagatttataaatttgagactactctacaaaatgaacccactgttgggcttacgataccaatttctagttctacagagccaggctttcgaacacagaaaattcaccagtaagtactttcttgtcatatcctttgacaggtaataatttaccctctccttggggacacccctaccttaagacaagaattctttcaaacttcaaaaacatccatcttcattaataagttcataatgaagacttttcactttaagatgcctaattatctttcacagatatttatgaaatttcaattgtgccaagatttttcacaggcttattttactttaagctggtccttccatttattgaagcttcaattaattagacttcatcatgttatagctaaatggatgtgactagaaagagcagcatacagacatctatgtgtaaactgttacttgttggttaacatttatgtttgaaatggaaaatcaataaaagggaacttatattaatttataagcacattaagaaaagaggggacactatttttgatcccaagatagcaacaaaactaaaaacttttccaaagaagcaaacgggaacagaggtcaataggctgtgacctctattttatgtttaaaacgtttgcacatccactaagtgcactgcagaatcttaaatgcaattaaaatcaatgggcatacaagttatagagtagcttgaggacgcacaaagtcaatcttcattagctattgtagcaaagattccttccaaatccatgggagcaggtgctgtttatactccctttcattgacgcccagaacaatggcatagggtgagcattgaatacttatttgctacgcgcatgaatgaatgaagctacgctgcgaaggcagactgcgtggctgctggtcccgtggctgctggccccgcagcatgtctgccgccttttcagcaggcttgctgcatctcctcattccctcacctttctggcagtaaggagttcccacgtttgccccgcttcagtgtcgtggactggcaaaatgctgtctctaaacccctcgcacgcctcaggtaatccgctcatttctcacacagacgcagctgtttccgaggaatgtccggccgagcccgcagggtgcgggcagcgagtatcctgggaccttcaggggaggaggtggctcccacaccccaataccgtacagagagtccgaagagtccgggcccttatttttccaattcttggtaaacaacaaacatgctcgccctcgcctccccgtgcagacgcctcagggccaactcgggcttcgccaggcaccgagagcagacagaagacgccaaatggctatcaccaggagagagggcgaggcagccgcgcggcgtatagcgctcgccc

SEQ ID NO: 433003 - DNA, 416 bp, Homo Sapiens
ttgactcaacaggttttttgggttccactggttgttttggttctgttgttctgggttttctttttcttccttttggagcctcttgcactggttcctgagcaggagctggggctggaacttcttctggcatttgctgttcattcacaactgccatattaggagcttcagccatcagttgttgaaatggaaacgtataaaaagcttgagcttgctgaagggaatagctgcccgcgttctccgcttccattccccgaggccgctgatgcgggcggctccacctgccgggcacacgggcagccggtctctgtagtaccgcgtggtactcactgcggtaagacaaccccagagacctgggcccgatggctggcagtacccagacagtggctggactcaagctcctcctccaggcttctccc

SEQ ID NO: 433004 - DNA, 630 bp, Homo Sapiens
ctaatctagaggatcccgtgtcatcccccttcgtatcacactgtggttgatgatgcggtggacggtcatccactctggcttgatgccaaaacgatagtacttctcctccatctcagcatagtgcgagtctttcactttacgcttgtcgctcttcccatcatcctcgccggagccatagtccaggcgtgcgggctcatccatgtcattcttccgctggtagtttcgatacataaccaaatggaagatttccagctgaagctccttggcccaggagcagtgccagtaggatagtcctacccacttgacaaagaactctcgctctgatctgccttgaagaggacgggggggtgggacatctggatttccatctgcctgttgaggggctggcactgctacaggtggctccccccaccgccaatgtaggatcttctgcactcgacccttcagcacggggcatgtgcatcggggacacagccattcaccattgggaatgtcaggcaggggagggtttagacaatgaatgtggtaggaggagatgcacgcgtcacagcgcaggagctccccgccgtccttgcatacgcggcagtactccatgtgatcatcctcctcctccttctccccttcttcctc

SEQ ID NO: 433005 - DNA, 491 bp, Homo Sapiens
caagcagccactaataataatttggagtcaatacatcagatgaaatctttatcacccttggaaaatatatttttctgaatctcatctagtttttagcttctcgacttcatctacacatgaatggtgaggctgtagaagtctgtttcttgtgaatgacctacagataactggcaagcttggtaaaatctcatatcagagcaggttgaccaggtgatttgactagggaaggaaaggataagattagttagggttggccatttgccaggacaattgacctcaatatctctaagagctggaacacaaagttgatgtcttgctcatgaaataatccaagttgactccaggcttgggggatgggagtgtatgagttccattctgcacagtcattagggattaggaccaatagaggctctgtcttcttaaacacctgacttcccacatcactgtgggcatttgcatccacctgtggtaagggaaggagcatggaggac

SEQ ID NO: 433006 - DNA, 475 bp, Homo Sapiens
ggatcccccccgccgtaccagttgcgtagtgatcagcttgagaaccaggtggcagtgtccctgcacacgcgaggcactggagcgtggctccagcttgaaccagcggtcgacgccagccacaggcacctcccggacaggtatgttgaggcaccccaggaagtcatcggtgtggtcctcgatgggtcctgctgtcccgtttgcgcgggctgacttgacgatctgtttgaagtacctgcccatgcccttcaggccgatgacttcattcagcttcctgcacgcttctaccagggatacatcgtcgtcatgatcccagatgtccaggtgcagctggtccgtgctcacatcctcaatctcgaagaggaagtgctccttccagacggggttcagggtgctgctcttcacctcggtgacctggatgcacttggcaggcaggggtccaccgcgcttgcgcaactgtacaagcggggcccaggct

SEQ ID NO: 433007 - DNA, 1202 bp, Homo Sapiens
atgacccggttcatcttgatgaagacacagggctgcccagtgctgtaaccatagtgggtggagtccccaatgccggagcagttgcccagctgggtccggttgaattggcaggcacgtttggggtagttgaggactccattatctggctgttcgtaatagcgcccagggcggcagacatcattcttttgggcttggatagagtcgttgtaaggctccaagaacttgttgagcttctgaacatgctggtcccagctttcagtgtcactgacattgacaatgacatcaaggttctcagtcttggggcgaatcatcaagcccggtgtggccagtcggtcctggtacttgggggtatggtcggagacagtctgcagcatcacccacatggtgagggtgaacatggcggtgaggaacccataaaaaacgaggtagaagaggaggataaaggcccagctggtcccggtgcggcccataaactggtgcgtcctcgggttccacacgaactccttccactcctcaaccacctgcccgcagctcttcttctctttctggatgaccatcttggtggcgcggggcgagtccgggcgcggggcggggggttgcggagaagcgggggcgccgcgcactgaagccctccacacacccaaaagcacggggagcgaaggcggcgcgggcaaaggagacccccctcagatatgcagctgctgcagattccggggtgcacgaccacgcgctgcggggtgctggcagcgcggcggaagatgcaccgatcctaggccccccaactgcgatgaaaaggggtgctgtcagagcaggggagaataacaagaggaaggggtatgaatgcagcttcaccccccgccaaaccgtctagaaacaaaacgaaatggggtgcaaaaacagacggctacaaaaaccgagcagaacgcagaaaaaaagcggggtacaaaaaggcagagagaggtgggggagggggccgccccgaaatccaagatgcaaagaagctgtggaacgaagctcaaggctcgctccgccaagcggagaccactgcaccggtggtggctcagccgcgggggtggggcggggacgcgcagctgggggacagccagggatggggggccccccaggcggaggctccgcatcctgtatttccggaccggaccagctaaagattcttcttcatggacggagcgggggagaggaaa

SEQ ID NO: 433008 - DNA, 859 bp, Homo Sapiens
gagtgacggaaccgcaatggacttcaggccgggttgagaagtcaaggaaaaggatttgaggctcagacaagtcatagctctgttatcaaaaatacctttggggtgggtgagggagggatcaggcagggtcagggacattccaggagcatccacaggagagagatggggtgggaggaaggggcctcaggttttgttgatgcggagtttgaaggccacgcggccggcgaacttgtctcgctcatcgtctgtggcgatgttggcggcgttgatgcgacattctacattcacctccacgttgggggtcacattcaggaacttcacagccaccaggggctgtgtgtagttcacgtggaactttttgccatagtaggggaagtacatgaggtcgatgttgccgttggcggggaacatgacgaagttgccgagattctcagcatcttcatctcgcttcccagcacaggtaacattcatgctctggtttgctcctgcatagaagttgatgacccggttcatcttgatgaagacacagggctgcccagtgctgtaaccatagtgggtggagtccccaatgccggagcagttgcccagctgggtccggttgaattggcaggcacgtttggggtagttgaggactccattatctggctgttcgtaatagcgcccagggcggcagacatcattcttttgggcttggatagagtcgttgtaaggctccaagaacttgttgagcttctgaacatgctggtcccagctttcagtgtcactgacattgacaatgacatcaaggttctcagtcttggggcgatcatacaagcccggtgtggccagtcgtcccgactaacttgggaccgagctcgat

SEQ ID NO: 433009 - DNA, 242 bp, Homo Sapiens
  misc_feature (26)..(26): n is a, c, g, or t
  misc_feature (120)..(120): n is a, c, g, or t
gtcattgccaccactaaactaatgantggaaccagttggatagaggctctgatggaaaaacctttctaggatgttcagaggagacttaacaagtgtactgcagaataaactacctctttnaagaaattgctgaaaggaagtaaaaccccatagaagaaacatgggaatacagaatatattctggggtcagcttcttaaattatactactgtttactgctttctccgtctcttttgtattccc

SEQ ID NO: 433010 - DNA, 589 bp, Homo Sapiens
tctaatctccccctattgttttgccaacagtaatttaagtttgtgtggaacatccccgtagttgaagtgtaaacaatgtataggaaggaatatatgataagatgatgcatcacatatgcattacatgtaggaccttcacaacttcatgcactcagaaacatgcatgaagaggaggagaggacggcccagggtcaccatccaggtgccttgagaacagagaatgcagaagtggcactgttgaaatttagaagacccatatgtgaatggttttcaggccttagatgttttgccacaaagaggtgcctcctgagaagttttctttcccatttggaatacagggtggcttgatgggtactgttggtgaccccgagcgatgaaaatgaacattctgccactttccatcccggcggtgccacacacgagtctcttctgactgcattgtctttggcattccactgccatccatgtactgtgtgagcctaatatatgctatgcaggcggcatcatcccctaccagatgtacatgagggtttagaataatagtgtggattggtttattgcttttggacaaagcattttcaaagtagaa

SEQ ID NO: 433011 - DNA, 678 bp, Homo Sapiens
  misc_feature (375)..(375): n is a, c, g, or t
  misc_feature (416)..(416): n is a, c, g, or t
  misc_feature (432)..(432): n is a, c, g, or t
  misc_feature (435)..(435): n is a, c, g, or t
gtctaatctccccctattgttttgccaacagtaatttaagtttgtgtggaacatccccgtagttgaagtgtaaacaatgtataggaaggaatatatgataagatgatgcatcacatatgcattacatgtaggaccttcacaacttcatgcactcagaaacatgcatgaagaggaggagaggacggcccagggtcaccatccaggtgccttgagaacagagaatgcagaagtggcactgttgaaatttagttgatgggtactgttggtgaccccgagcgatgaaaatgaacattctgccactttccatcccggcggtgccacacacgagtctcttctgactgcattgtctttggcattccactgccatccatgtanctgtgtgagcctaatatatgctatgcaggcggcatcatccnctaccagatgtacatnganggtttagataatagtgtggattcggtttattgctcttggacaaagcattttcaaagtagaatccggtgaacatccatcccttccactaaattacccaaagctctcaggttcaaaagcagtaaggcctgggtcacagatcttctgtgtaggctctcaagttcccattgctgatagcctctgaccaggtgcttcagtgactttgataatctcttgctttcgtgctttcacatcctcatcctcaat

SEQ ID NO: 433012 - DNA, 358 bp, Homo Sapiens
tttttagtatttaagatacatttaatgtatttattagtatttaagacaacagtcaataatctatatttaagacacagaagaaactgaaagtgtaagatttagaaacaagagaatccccaccccaaaaaattagagattaaatgatctacatgatagataacagaatactatgcatggattgcttatactctaaggattcctattcctactataaggaacttggggactaaacttgagccagttctttcctgtgtgcctcaattttaatatgtgtttcaaactgcatttggaatgtttcctacccaaataacaaaatcttaaacatgaagctaaaattatccatgtgcccacgcgtccg

SEQ ID NO: 433013 - DNA, 368 bp, Homo Sapiens
ttttttttagataagcatacacttcctttatttatttttcttaatttaagtattgtgtggttatggatcgtttacagcagtgtatgaaactttaagatacctagaaaaatgcaagttaaattaagacattataggtatattttaggtttgtgtagcacatagcaaatagtctagatgaacagatgagacacgtaacaacactgaatagttacagctgtgcactattttaaacgaatgaccagacactaaaatttgattattttttccatttgtagttatgcagaagttagggctgaaagacgacgagaacttggcattgaagagtctcttcctgagacagctgctgacaaagtatgtttcttataatt

SEQ ID NO: 433014 - DNA, 1252 bp, Homo Sapiens
ctcagccagcccgcatccttctctgttcttccctccccccgcctgccacggcgcgggtatccgcagccacagcccggggccggtgaggcggcgaagggggaggggaggaatcaagggatgagcgccggaagggcgtcgggggccctgagccgcactaggacgcccctggagccggaaccccagcagaagccggaaccagaaccaaatcaccggtaccgggtcggccagctgcagccccctaaacccaggaggcgccctggcccgcgctcgccccccagggcctcatgtcggaaccacagcctgacctggaaccgccccaacatgggctatatatgctcttcctgcttgtgctggtcttcttcctcatgggcctggtaggcttcatgatctgccacgtgctcaagaagaagggctaccgctgccgcacgtcgaggggctctgagcctgacgatgcccagcttcagccccctgaggacgatgacatgaatgaggacacagtagagaggattgttcgctgcatcatccagaatgaagccaatgctgaggccttgaaggagatgctgggggacagtgaaagagaaaggacagtgcagctgtccagtgtggatggcccctccaccctgacagacgggagccccctcccatcttcacccagtggcacctggggttcctgcagcccctttggctcccatttgcagccccaacaaaagaggcctccccttggccccgtcaggggaagccttccaagggaaaggaaaaaaacctgccccctcggaaccggggggaaacacccctgggggtccccttcggggggcgaagtattctcacgctcgtcatcacccactatgccgtgaggctctattcgcgtcctcacctagacatcccccgctgcgtgccacaccgccatcgccttgaatgcgcaacggtacacactcctggtgtgacgctgtccaacagaaatcactccaatagatccttacagtaccccctatccatcatgcatgcccccctcaccctgacactcgacccatagtaatgatgaccctaccacataatgtgtctcgcgcacccttcaacatatttgcgctgcaccacccggtcgtgtgactcgccagaacgaaatatgaaccgggaatgagcacatgcgctacatcgtggcagtatagctgcactttctacagacgacatcctacaaccctcggttctggtacccgataagtaccttacccgcccgcccccgtacatcacgccc

SEQ ID NO: 433015 - DNA, 968 bp, Homo Sapiens
ggtagcccttcttcttgagcacgtggcagatcatgaagcctaccaggcccatgaggaagaagaccagcacaagcaggaagagcatatatagcccatgttggggcggttccaggtcaggctgtggttccgacatgaggccctggggggcgagcgcgggccagggcgcctcctgggtttagggggctgcagcggtgatttggttctggttccggcttctgctggggttccggctccaggggcgtcctagtgcggctcagggcccccgacgcccttccggcgctcatcccttgattcctcccctcccccttcgccgcctcaccggccccgggctgtggctgcggatacccgcgccgtggcaggcggggggagggaagaacagagaaggatgcgggctggctgagagcggtggcaggctccgggcaactccggcctgggtcagggagatcgcctccgcagccgccctggcttcccaaatgccttcacccgtcgcgggcccaggaccagggggcggagcgcaggtgtgcggggcggagagcgtgagctctgcgcgcgcgtgactgcgctgggcccccccggggcaatgtgcggcgccgagtctgggtccgggtaggggacaggcggtccggcgtgggtgttgtccactggtctatccggtacgcctggcgcagctcctgccctcagatgccccgaccgagcggagagtcaggaatcttctccgagggctgggggaagccggctttccgcacctttgagggacggagtggcgggatcttcggagcttcctagagaagtgaccacggcctgcgcccggtttggggcaagcggctggatgggatggctcggcttcccgaggatctgacccccggccggagacaaatggccctcgcatcctaggagctatgctgccagttccctgcccaacccgggacgctcaaagccccagataccgatcccgagaattccggacc

SEQ ID NO: 433016 - DNA, 690 bp, Homo Sapiens
taggtagattccactcagggttgtactgtttatcaacttttttgaaaatattcctacttgtagttccatacaaattcttcgatcacttcaaatccagcaatggtttctcaaaacataaagctaggcagtactgactagtaagaggcaaagaattaacagtgtcatttgatgttgtgtccaaaatcctcatttttcaaactactgttctcatcaaagggctgatgtcttaattttctctggacacatgtctttgggttggttactatcttcaagcacgatgtaattcagcattagtaaatggttttctttgcttggctaacaaataggctacttgtaaacattttggttgcagcctcatttttattacttttgtgaaattttgctgtgatgtttcatttaaattttctaattcttctgactgttgctttcccaccagttgggaatattgtgatgttagtctgatactgtcagtctattcttttaccagttatggtgacactgcattataaacacaatgtaccagcatataataaaatagtccatattccagtgtgccttgaaagtgtaacattcaaaggtacttttcttgttctgagatacagggcatgaactggtagcagaaaaagtaataaatctagcaatacacagggcattccaaatgctttcaggtaatatctgcatcaccatgat

SEQ ID NO: 433017 - DNA, 976 bp, Homo Sapiens
  misc_feature (80)..(97): n is a, c, g, or t
  misc_feature (125)..(125): n is a, c, g, or t
  misc_feature (596)..(596): n is a, c, g, or t
  misc_feature (829)..(845): n is a, c, g, or t
ttttttttgtgagaaacagaagctgaatatcctgatttgatttgccacacaggcgttcaatggcttagcagtgctaaagnnnnnnnnnnnnnnnnnngggctctgggctgacattggaaattttnctgaatgagaaaaaccatcctcaaccactgttttttaacactgagtaactttggaaattaacttttgccacagacttgaaaatgtttcttaatgaatttgacctgaaattacaaggtacaacaacataatatggtaaattcatttcaataaaaactaaaacttaagattgtcaagctgctttatatactttctgtgctatgagaagtcaaaacagcgctgtattgccaaatccatttttagtggatatattttcctgtagcagttttttggaccttgatgcagtgcaaagaaaatttttaaattttaaaagcatttaactgcaattaaatgcttttaaagtttcctcttaatcttctgttggaaatgaatcatcttgaatgaatgacatgctaaagggcaaatacccaaaaagatgaatccctacaaatgcccttacaagtgatgaatatgccttaactaaaatcacatgnctcatgggtggatgtgtcagtatttagcagtaccttgacctgtttgtttgtgtgaaaagacattttcaaagatgaaatacgtgaaatcccattacacatcagcattaacagattaacattttctatttattccaatgaggggataccaactttcagcccaaattgagcaaaatgttacctcccgtcccctgccaaaaaatcccattattcccattagtagaactctattactnnnnnnnnnnnnnnnnnttgtactcaatattttgagttttcaatttttagaataaaaatttggtgaaaagtttccttgagtacctaaataatgtccttcattttgtcttagcttgcaaagcctctaatatttgctacctgcccttttc

SEQ ID NO: 433018 - DNA, 564 bp, Homo Sapiens
tttcattgaaattttactttatttttaatttttgtgggtacatactaggtgtatatatctatggggtacatgatatattttgatataggcatgcaatgtctaataatcacatcagggtaaatggggtatccataacctcaagcatttatcctttgtgttacaattcaattatacctttaaaatgcacaattattattgactgtagtaaccttgtgctatcaaatactaggtcttagtcattctacattttgtgcccgttaacattccccacttccccctcaccatgccctcactgcctttcccgcctctggtaaacatccttctaccctctataagttcagttgttttcatctttagctccaacaaatacgtcagaacatgatgtctgtcttgctgtgcctgggcttatttcacttaatgatctctagttccatctacaatgttgcaaatgacagggatctcattcttttttatgggctgaataggtactccattgtgtttatgtaccatattttatttatccattcatctggctgttagacacttggggtgcttccaaatctg

SEQ ID NO: 433019 - DNA, 376 bp, Homo Sapiens
  misc_feature (230)..(230): n is a, c, g, or t
  misc_feature (255)..(255): n is a, c, g, or t
  misc_feature (313)..(313): n is a, c, g, or t
gtaggtgcatagtaggtatatacatttattcatggggtatatggatactttgatacaggcatacaatgtgtaataatcacatcagggtaaatggggtatccatcacctcaagcatttatcctttatgttacaaacaatccaaatatacacttttagttatttttaaatgtaccattcgattattattgactatagtcacactcttttgctgtcatatattaggactttantcattgtttctgaccattttttggncacattaaacaccccacttccccctcactggccctcactacccttcccggcctctggnaaccatccttctactctctatctccatggggttcaattgttttaatttggtagggtctcacaa

SEQ ID NO: 433020 - DNA, 455 bp, Homo Sapiens
  misc_feature (389)..(389): n is a, c, g, or t
agtcctatcccacccatggaccaatgcaccacacacttgcattttcacctgttattgctttggccaagaagactgcagcatccataacagctttgatatgggaagccatcccggagctctccaaaccggagtagaaatcattgacaggaaagccctttaagtgccattgacttccaataatttctgaaggctggacctcatgacatgaatattttcaattccaacaaactgaaatctaatattggaatagttgtcttcattttcataaccttttccaggctgctctgttggccattgcattcaggttttggcctggtatccatgacgtacatatagcgattgactggattggctttactaatggcttgaagcaaatgttcatcctccanggcacctggcactgaatccagagagtggctgactacatcgacaaatggcagcctccttatcttgat

SEQ ID NO: 433021 - DNA, 490 bp, Homo Sapiens
  misc_feature (29)..(29): n is a, c, g, or t
  misc_feature (86)..(86): n is a, c, g, or t
  misc_feature (339)..(350): n is a, c, g, or t
cacagggtaaggtaatgtggctctgccanaggtggggtctccctgggccatgaggcctctacctttagggctgctcccagcccagnctgaagcggtccaagtcctgtccttggcatggagggagagcgatgattataccagtggccatcactatgggtgagcacaaggggtgactgcagccctttggcctcctggggtctttgtccccttccctccaggctggagctgggaaaggaatgtcctggagactgaggtggggttgggccaggcatggaaccaacattcaaaccgttacacacaaagagaggaggaaagaggaggaagagggaggcatggttnnnnnnnnnnnnaggctccatcgagatcccactgcccttgactggcagctggtggaaagagggaggagggtaagtctaacctctgatgtcctcgtcatccccttatacagcctgttgtggccctgaaggggaagccactgggcctgttgcat

SEQ ID NO: 433022 - DNA, 1165 bp, Homo Sapiens
  misc_feature (929)..(960): n is a, c, g, or t
gtcagaattttgtttaattacatagttaccatttcatcacatgataacaaaagtataaggaaaaccaagtaatattacggtgttagctttatgaaataacttgtgggtaaaaccatcaatttagttgttcaaaatctcagccatgcaaagttgtgatgtaaagtagtatttttgaactgctttacctttaagtgatggagcaaactttaatagtgcacaacctcatagcaatatcatttgtaaattttttagaattatgaataagacattgttaacaataggtttatttattgatggttaagattaaaaactacgacttcagaagaaggtaatttttcaattatgtatttcatgtatttttaccaaggggaaaaatcacacagacagatttaaaaataatttaatttcctaattttattattgcctcattattataatattttctgttctgctagaaattcacatttcagttccagggacagctgttgctttgcatctcatcccaaaacgtagttcagctagtttttaagtacagatgtccccaaattatcatttatctagaatagattgttactaaaaatgaagtatgccaaatcatgtattttccaacagaagcaaatttataatgggtgttttatttcttaacaagggcctaatgtccaaagttatttcttatcaaaatgatcataaacattatattgaaccaactacagatgacatcgctttatgatgtacagtataagacttcacaaagtatatataaattaattaaataaagatttacaaaaagcaaatatataacacattatttaatatattttagagattcatagggataaggattttgcaggatggggtaattctgtgtgaatctattaaggaaaagataacttcagtggaacacacagagtgggtcaaaagccaaaaannnnnnnnnnnnnnnnnnnnnnnnnnnnnnnnagcatgcactaaggttggggtggagggggcctctgcaggtcttggaaagtctcctgtcatctgcagtaaagatggaactggcttttatgtcagggagcagcctgagttgttgatgtcagttatgtactgcttgctataactaaagtaatactagtatgttgtaaatggaaagaatcatactttgttatcagctttcactacaaat

SEQ ID NO: 433023 - DNA, 628 bp, Homo Sapiens
cctttcctgcctgggaagtgatgactcgcaggtcgggcttgcggctgggggctccaagctgggtgctgtgggtaggtgggggcggagacttggcagggatgaccttgtttaggctgttgccattggccacagggaggaggccaggggaagcccgagcacttgacgtagccattcccaacagggctggggcaggctccgttagcactgttcaggtcaccccccagcatggcccccgcactagctggccgctggggcaggccaggagacacactgttcctctgtagtgctggctgctggggggacaggagccgcgggtccgtgagggatgatgtcaccagggaaggggtgaccagggagccgctgggattgctgaactgcagtgagctctgattggacacgggcaccgtgacaggcatggcaaagttgggggccgggacagttgacccatagcgccggaagagcccgtcgagctcctcgctggcgcgtcggtacttgtcctccagcagtgggctctgttccagcgaggtcctccccgtcgggctcgtggctgtcgcagccattgaagcccttcttcctcagggtctcgatgatgtcggcgttggtgcggctctcgtgtggctcattgtac

SEQ ID NO: 433024 - DNA, 751 bp, Homo Sapiens
  misc_feature (68)..(113): n is a, c, g, or t
  misc_feature (499)..(499): n is a, c, g, or t
  misc_feature (528)..(528): n is a, c, g, or t
  misc_feature (553)..(561): n is a, c, g, or t
  misc_feature (628)..(628): n is a, c, g, or t
  misc_feature (645)..(645): n is a, c, g, or t
  misc_feature (660)..(660): n is a, c, g, or t
  misc_feature (693)..(693): n is a, c, g, or t
  misc_feature (724)..(724): n is a, c, g, or t
tcggtacctacttttccacaggataactggtgtgtgggaaaagccttagacccagagttcatctggannnnnnnnnnnnnnnnnnnnnnnnnnnnnnnnnnnnnnnnnnnnnncttaaagagttcgttcggaactaactaaactcaaatgaaaggcaaataccaaaagtgagacagatcaagcacaaacgccagcatcccttacagaggacagtctcaactcagatgcagccaactgctgtcatgaagacctgttgttgctaagaggtcagatggttcaagagaaactggaaatttggattttgacatgaaacctctggaatttaaaatactggtttaaaatgcacagtgcctaccaaaccaaacctatctgcaggccacccctaactcacagattgccagtaaagacctctaaatcagatgaacattaataccctctaggtctattactctgtggcagtgcagtgctgcatgactaaaaatcttcactgaatgaatgngtttctttaccactaaacaggcagcgtgnttttactcaaccttgacatatgacnnnnnnnnncattatgaatactcatgaatcttaagacctgagatctgcacagagtctttactcgaagaagtactgncataaacagagataggntctgccgaacatggncggaccgaaaaatcagggagcaattttccaggnacacaatcgagtaagaactggctcaatctgnctttcagacatattaatccacaagata

SEQ ID NO: 433025 - DNA, 426 bp, Homo Sapiens
  misc_feature (323)..(355): n is a, c, g, or t
gtaacgcggcagctccaaaccccgctgagagtatatgcatgggaaaactttctgaaatcaaaaatattccgaattctggcaacatactgggccccaagtctttcggatttaactctgcctcggccgttttattcagttaaggaaactgagtcactccatcccaaagccagattcccgcggttctaagctgaagctgtctcgggtgcatttgcattccaaaaaggcgaagggtcccgctattactgctcctggtacctggagctgccaagcacccctgcgatggggcgccccgggggctgtgcgccaggctgggagtatccttnnnnnnnnnnnnnnnnnnnnnnnnnnnnnnnnngccacctggcccggctccggccccgcccgcgtcagctctgcgcggtgattcactccctccttcgccccggg

SEQ ID NO: 433026 - DNA, 1069 bp, Homo Sapiens
  misc_feature (892)..(892): n is a, c, g, or t
  misc_feature (1041)..(1041): n is a, c, g, or t
  misc_feature (1043)..(1043): n is a, c, g, or t
gtagcgaggcctgggtggcgaattcggcacgagggcccatcctggagaagttttgcttcactccccacacggaggaggggtgcctgtctgagcgcgctgccctgcaggaggagctgcaactgtgcaaggggctggtgcaggcactgcagaccaaggtgacccagcaggggctgaagatggtggtgcccggactggatggggcccagatcccccgggacccctcacagcaggaactgccccggctgttgtcggctgcctgcaggcttcagctcaacgggaacctgcagctggagctggcgcaggtgctggcccaggagaggcccaagctgccagaggaccctctgctcagcggcctcctggactccccggcactcaaggcctgcctggacactgccgtggagaacatgcccagcctgaagatgaaggtggtggaggtgctggctggccacggtcacctgtattcccgcatcccaggcctgctcagcccccatcccctgctgcagctgagctacacggccaccgaccgccacccccaggccctggaggctgcccaggccgagctgcagcagcacgacgttgcccagggccagtgggatcccgcagaccctgcccccagcgccctgggcagcgccgacctcctggtgtgcaactgtgctgtggctgccctcggggacccggcctcagctctcagcaacatggtggctgccctgagagaagggggctttctgctcctgcacacactgctccgggggcaccccctcgggacatcgtggccttcctcacctccactgagccgcagtatggcccgggcatcctgagccaggacgcgtgggagagcctcttctccaaggtgtcgctgcgcctggtgggcctgaagaagtccttctacggntccacgctcttcctgtgccgccggcccaccccgcaggacaagccccatcttcctgccggtggacgataccagcttccgctgggtggagtctctgaaggtcaagccctggcccaccttcagggcccaccccaccttccaacttggcgagngngggctgacccttcccgacccgctgta

SEQ ID NO: 433027 - DNA, 1106 bp, Homo Sapiens
  misc_feature (109)..(109): n is a, c, g, or t
  misc_feature (129)..(129): n is a, c, g, or t
  misc_feature (441)..(441): n is a, c, g, or t
atgtggagcgtctaagagaagattagggtgagatacgataaaacgaggtggtgtgcagtatgcctcgcgcgatactgtaaagggagagggagagaataggttagtaaanagtgcggggcgaagtcgtancgcgtagggcggtatatggtataagagtgaacaagaggacgcgcgggcgacataaaaggcgtagggagggataatgacggcggtgatgtcaagagtgggggttgggggggagatagggtaagtgccagccagggaccccacgcttgcctgggccccaatgaatgggagacaagtgtgcccctgggaaagtagcgccctccgtggaagccgttcgccgggcgctttgagaggtgttcaagaggaaggggcaaccattgttaggggattggggaagggtgtacccattagggagggcccagggcccccggggtnttttgggccaacgcggaaaagccccacccccaaacccacaggggagcccctcttcgtggcccaggctgaagtttacaagggagctgcgtctgcgtggctacgactacggccctcatttccagggcatcctggaggccagcctggaaggtgactcggggaggctgctgtggaagggataactgggtgagcttcatggacaccatgctgcagatgtccatcctgggctcggccaagcacggcctgtacctgcccacccgtgtcaccgccatccacatcgaccctgccacccacaggcagaagctgtacgcactgcaggacaaggcccaagtggctgacgtggtggtgagcaggtggctgagggtcacagtggcgggaggcgtccacatctccgggctccacactgagtcggccccgcggcggcagcaggagcagcaggtgcccatcctggagaagttttgcttcactccccacacggaggaggggtgcctgtctgagcgcgctgccctgcaggaggagctgcaactgtgcaaggggctggtgcaggcactgcagaccaaggtgacccagcaggggctgaagatggtggtgcccggcctggatggggcccagatcccccgggacccctcacagcagcctcgtgccgaattcgccacccaggcctcgct

SEQ ID NO: 433028 - DNA, 1369 bp, Homo Sapiens
caagactgtcaagaatctgacagctctgctaacgaaagctgcagaccctcggttcggttccatcgccctttctctgggctggtgtgtgaagctccgaatctgtgacctcactagaatcagtgtgcgcaaggggatcagcaatgcagggcaaaggtgactggtgagacacacgtctacacaaacgcatacaggtatacaaaaagcaacaagagtttaattctctttttacatggccacaggctctcttcagtcaggggaacttcagctggtgcctctctcttgcagctatgaggcgacagtgtggtgacatgcctcatacagactgtcccagtaagccaggacaagtcaccattaaaatcttgcatgaacagccctgggcacgtgggaatgttaagaaagagccaccgcctccttagtcagcttaaccacagctccaaacgcagtttgtcccagctggcaaacgcctcaaacaccaatcatgcgtcgtgctcctattctgggtttttataaaacacttttatatagagatatagatagcacagtaaatgtgcttctgatgcactctaacatagaggacaggaatacacactgtggggcgccgccccagccatctccacagtggagaaagtgcgagggttaaatacacgtggcggggtggcagacggcaggaagttacagagcgccacgctccacgtccttccacgcgactgactcatccaacactcagaactcgccttctttatccccttggtgggtaggagcagtaacaaaacaatgtcagtcattttctaagggtggaggatgtcaaactgtctggtaccgagagagcaattcttatccagaaatcatctagaaataattgttgaaggtcagcctgacccatggccccaggctaagggctgctctgtaaagggcgggactggctctgggggtctagggctgatgcagtatctctcagacacttgcacattcacacacccacacgccccaggggaaagtgcacttccaatgctgatacaaaaatagattggcacactctttgacacaactgagggtatcttttaaacagttttcccccaacttctgcagactctcttcccccgtatgctcaagcccttcacactccaagttggaacagatctggagaaggccctggaccacgcttgcaaagtttgtgaatgccggggagaaagactgggctggggcagctagggattctcgctagtggacagagggcagggcctctctgttctcagcacacacctcctcttcccgtgcttgaggagtccatagctcatggctcctcttggctacacacccaagactccttggaaagtttctagtactgcttctccccaaactatgtccc

SEQ ID NO: 433029 - DNA, 591 bp, Homo Sapiens
gccattaaatggcccggatggaaatttaaataaccttttggaaccaaagggggggaattccaaaaactgttgagaatgtttgtcatgttatgatggaaccagggtaactctggttaggcatttggaatttcacagtaagagagtgatgattatacgtaaatggtaagtcaataagttatgttggctgagtatcacttatctaaaaactgcttataacctggtagaaaagtctgccattatgtagatttaaagaaatgtgttgaaaacaggaatgcaacacttgaaagtctgcttgcataactaccattttcaaaggccttccttcccaagctcaccctaaatgctcagcaagagtcacattctaaaaactatgctggtgatgttaaaacaaccgaaaaaaacctctccactgtatcaaaattgcatcaagttctccatgaacaaaattttttgatcaggctccaaaacaactcaagaaataaatgcctactctcaccaaaagagaaaaataccaatgcctatttagggtgagcacagttccatttttaacgtatcacctgaatgaagcctttttgtaattatgtaatgccc

SEQ ID NO: 433030 - DNA, 775 bp, Homo Sapiens
  misc_feature (99)..(99): n is a, c, g, or t
ctgaaagataagcaattaaaagccccttaggaatgcatctattaactaaaaaggtgcatctcaccaatgtgcctgttttagaaatatgtataagagggncggaaaggaggataatgtcagatgctttagaaaacacaaaatatgcatctagaagtgaactaaaagaatcatgatgatcacagatgtgagggaaaggagtggaggctttttgagagatgcatgctatgacaaggaagatagatactgatcacttcaggtaatgacagaagtaattgctctgcagtgaatataattttcatagtctagggtgagcttcaaaatggtgaataattttccttatatttgataaatgaaatgactacgtcctcttcagtatctaagaaatcaagaactgggcacttttttcccttttcatagctgcattaaagtagttctcaatgacatgcaccatttcctgtttttacaataaaccaccttgttcccttgtttttggaagtgttgcttatgtgtcctttactttggaactccaaagggaaacttcaggcagtgagaaacacggcttcatcagaatcccggtccttgccactatcttcactcggtgcatgctcaccaccacttggagaccgacagctcaaatcctccaccccggactcttggtcactgttggctgacagatctggatctgaacttttcagattgtcttgggttagaatcagagcagaatcttcatcgccttgtgaagggctccgggatggaaatgatttcatattcccac

SEQ ID NO: 433031 - DNA, 668 bp, Homo Sapiens
aaaaaaacaaaggattgaaaactttggtccatgtaggatgaatacattctcaaaaccggaaaaaagggagattttgaggaataagaagccagctttccttttcttctgaagcgctcaaattagaactgtggaaagtttatgcaccctataaaaggcaaaatgatgtaggtttatgttttaaaagacagatgtaataaaatgaacacattcttttcaatagctatttgagaagtatataaaccgaggttaagacagtgtggtcaaatagaattttataaaacattccttgatttagttatatataaaccagtttgatctcagtcttgcagaaataattttagcaacacaaaagtagaaataaacctcaagttaaagacagattacaaatggaatatatttgaaacatcttggcatgaacagtaaaagtaatgaaaatggaatactttgtgggcatggatttatatcaattgttacaacttgtggaaaatgtgatcaaatattaaacttctggaaaatgtacaaagcagaaatatttcaaaagacttcactgtccaaatgaaccagtttccaaacagactttttattacaagacatacttttagaatgaactaaaataaaaatcattacatttttagtatcaagaaatacaggaaacattttttttagcc

SEQ ID NO: 433032 - DNA, 574 bp, Homo Sapiens
ctttgcccttaccaggcccagtttaccatatcattattctgtgatattacactccacactagtcagctgtctctttttcttttctccagcctagtcaacaaacttgtaacacattaatcctcttcattcctttgtctacaattttaattatactacactcttgattatgccaagtgcactggagacatataaaatatgagcctttcatttgtctccctgaccaagagacctaccttgactcgttattgaataaagttaaagaatgtgtttttactgttcaggttggaatgggagagagagggttctagaactttctagctaagcaatgcttgtcaaagtttttaaaagtccaagaactttctttatgtaaaggtgggtataaaatttacctctcaaagttacagtgtgattgaatgaaactgagaaaacataaggcactcagcaagaatagtcctcttccttttctctctaagcccatctaacttttttcctccatgactaccccaagtctcagatagattatgttacagctcttctgtgaatataatccataagaccatctgctcttcttttg

SEQ ID NO: 433033 - DNA, 426 bp, Homo Sapiens
ctaggctggttttaactggaatgacttgggtgacttgactctgctccatgtgcctgatcctcaaataaggcagcccagatatggtctcatgagggtgggagaggtgcaagagagaaattcaaaccagcaagcacttctccaaatgcctgtatgtctcatgtctgctaacatctcttagtcacacggaacagagtgtagagatggagaaagtcaaagaattgattcatgcattaatctaacataggatcccaaatctcataattatctacattgacatggtcccaggaaactacagccaagaggaaggtgacaagtagggcttagaattctttcccttaatttgcttcatttagaaaaccaccagttgtatgaaatttcaccagctgggaggatgattggaagacagaccatgcaatgaatttctgg

SEQ ID NO: 433034 - DNA, 676 bp, Homo Sapiens
gaccttgctgctctcacagcattgcagactggctaggatctgactctcgatggcctggacccaggcatcccgctcctcaaaactggctgcctcaaagtgccacgtctgacccgtgctggacacgatcaggaactcaaagttttcctctgctttataaatatttcttaaactaccaaaggattttagtttccacattttgcgcttggcttcagcctgcccagccgagccttcagtcttggatggtgttgtcaattttttcctcctctgcttcttcaccatgggagaaggagggggttcccgactcagggggctcaggtctccagatggggtacagtccgtgctgagggctcgggccaaattccggtctggcttcagcaggtgtttggatgtctgatctggtggtggctgcagggaactggggctggggctagggcttggcatgggagtagtggcttccaggccttcacccatctggacagtgctcatgtccttgacgagcccgttaatgctggctgaggggccaaaggcagagatggccctcgggggccgcttgcccgggactttgactgttgttcgcagcaagtccatctccttgccgtgggtactgtggatgtaatcgttaatactggggtggtagagtagaaagccattactggacagggttacatatttcttc

SEQ ID NO: 433035 - DNA, 726 bp, Homo Sapiens
ataggctaggacgaggctgggtggtgaattcggcacgaggctgaagtctgactcaggaatgcccagacctgtccctgtccctcctcagctctagggtgaaaggcgagaggttgcacaggacatggacagagcagcccttgggtttgtatctggtaggggagaaagcagcaggacagtggaggtgtgtggaaggcactctttccacctctctccaggcattatccccaggtgctgaaatggctgtggccccagcacctgaggcaggggtacgctacctggggtagcagtagaaaggtcttggggtctgaatgacttggggcctccattcataaccaaagttgtaggggcatggaggcagtggcgccttatggataggttatctcagcccaaagggcctccttggctggcatggttctgtgttacgttgaagccagagtcttataacacctcccaagaaagataggggaagaagccagaacccagactctgctttcctctcttcgtggtttgtcctccctcttttattcttgtgtaatgatgagacataattaagggtcatctacaatggacaattttcaaggtgctgatgtgatgtcacaacctccgctacatccctgagtaagtcagtgtccccaacagcagatgaggctgggtctttcctcatttctgcttctgggatgacatcagtgggagagttgagatctgggaattctaagggaatgtctc

SEQ ID NO: 433036 - DNA, 1727 bp, Homo Sapiens
  misc_feature (152)..(166): n is a, c, g, or t
  misc_feature (397)..(504): n is a, c, g, or t
  misc_feature (1445)..(1502): n is a, c, g, or t
tagaaattttttattgcagttttaactagggcaaattaaaattaaagggaaaaaggaatagggcctagggggtttaggtttagttcccctttgtgatggtttccattttgctggaaggttaaaggattaaaactatatacgggagtgttgtnnnnnnnnnnnnnnntgggaaattgagtttggttggcgttcaggtgcctggtacagaaatggatttagaatccctattggtttttttctaatgttagtttcggccgggggctttttatttttgtgaatccaagatccaagtgaagaacaggattctccgtaggaacagggatcgagcagtttcccttttcaattaggtctcgggggccaaatgtgaagggttaggaagcttttagaggttttaggnnnnnnnnnnnnnnnnnnnnnnnnnnnnnnnnnnnnnnnnnnnnnnnnnnnnnnnnnnnnnnnnnnnnnnnnnnnnnnnnnnnnnnnnnnnnnnnnnnnnnnnnnnnnccattttcaaactgactttaatcatgttttgctgcccaaatactgtacatgcagaagccatgtgaagaattttctcctcaagggaattggcaagaatgttgtacgaaacagccggcagtccctcccagctgtgcacctgccacccgggaaccacaacaagttaggaaagatgctgcacatagaaaatgtatagagcacagatataaaaggctaattgcttcttatctaaacagtgtgcttgtcagtccctatcagctatctctctctttgcaggatgcatttggaaagtctaaaaaaaggggttcttgccttctgtgagtttacatgctaaaggagttggttgagctatcaggcccactcttcctaaggaagcagctgccccaccttctgaaatgatgtctggttaaagacattttggagggaggagtggtcttaagaagcaaactactttgaagggaaataagttccctctctcctcccatcagagaacatttcctttagaattctcagatcttcaactcttcccactgatgtcatcccagaagcagaaatgaggaaagacccagcctcatctgctgttggggacactgacttactcaggatgtagcggaggttgtgacatcacatcagcaccttgaaaattgtccattgtagatgacccttaattatgtctcatcattacacaagaataaaagagggaggacaaaccacgaagagaggaaagcagagtctgttaggattcccagagttcttgtctgaggcagcatctgggcatggaccagatgagagcctgcacccagcctgggcatcaggggctgaaggaaaccagcccacggagacaggaaccaggtgcaccaggctcgcaaccctcatgtgctccagatcagagacttttaattaaaactgggagggaatcatggggagagcagctaatgctctgnnnnnnnnnnnnnnnnnnnnnnnnnnnnnnnnnnnnnnnnnnnnnnnnnnnnnnnnnngtttctggtaaaactgtacagaacagcctttgattccctgtagccagctgtccctgtccagatcactggctaatggggtggatgctcagttgcccctggaattcccaagccccattctgttagccaagctgactggaacccaggctcagggacccttcctggcatcattgtgaactccttggaggcccaaggccctgtccctcgtgctggaacgccacccaggcc

SEQ ID NO: 433037 - DNA, 3464 bp, Homo Sapiens
  misc_feature (2992)..(3049): n is a, c, g, or t
cagacctaaccccacctggcctgcccacaggacaagaagtgggtaaggtcaggaaggaaatgaacggagttagctcccaggctcctatctctgcctgagcctctattcttatattatcagagaaagggaccattgggtgcatagagatggggaggaggccactgggctgaattttctctttaggcggaaatgctctccccaggcccattgcgttcgtcaagttcttggaaatggacaaagggctctgtcctcctcgaccctagtgggggatcaagaaggaaactccgttgcaaaagggtattttaatctcctgtttatgatatattcacctctagagcagtcactgtcagggtgttgcgaaaatactctacacctttgggatgatagggttgttagtgacccacaggacagtatagatgtttgtggatgtagcactgagtggtgatacccagaccagcagtcaccccaggaagtgggggctacccataccctcattcctctggtggggagctgcctgcagagaggcctgccactgggggttccaggccgtggtgacccttgcctctggggaagggttagcacaggggaggttctagctggaggaggggtctgatgtgctggtaacttgggctgacctacctacagtccctggctgccaaaactgctcagcagttgggccactccactattccacctctctaaaagaaggtaatttcctccccaaattgaccttggggaattattcttttaaccctttgcaccaaataagttactcatccccacctggattttaccccatgagggtaaagttgtgtgaggctgacacgtctgtgtgatgcagtgtggctgcacttaagggtctgtttctcagcatcatggatgcaggggcttgtctgaaaagccactctggacctagcctgtctcagaagaggagaatgcacaagtgtaactcctggttgtttgctggggtgggggagcatctgctgtttgaggacggggggtggggaaggaaggaacatgatccctccagaagtctcccaccctggggccaactcactgccatgttcagtgtcccggctccaaatgcccccttgcccagatgaaaccctgcagtggttacaggaatggagctctttgtcattccacctcctctggtcaggcgaggttcactgtgcatatggcagagacaggagtggccctgcagtgatgttgggttgtgggcagggacagtgatggatgactcagagcgtctgtctttgtatttctgctctgttcattctgtcccactttcttcatagactccttttccctgcaatgggtttttggtatgaaaaaggctccagtaaatggagccaagtcttggtttgacaaggggaacttgatccttcagggaagaatcatctccaaaatgactccccatctggtttcttctaccacccaattctactaggaaaggagcacttaggaggctcttgggatgcagcaagtcccaggcaatgccagcctttcatgggggctgaggcagaacccaggagctccaagaaaggccacccatagagctcatcctctgtggaatcactgccggttagaacactgaggtcaagccagtcctcccatggtcatgccacccaccagggaagcatgcctgatctcttctttactgccagccttgaggagagcagaagcctccatttttaaagacaataaagacctccaagggtacttctttggaaatgaaatgtagcacaatcttagcctacgttaccaggagccctgacatgcaaccagggtccctcttccatgccctgctgcccaggagttgctgagctcctcttcccctggggttccagccctcctaatacctcatattccccatcttcctcagcccagaaagcaatggggctttagtgatgctcctcttttgtgtctctctggttgcctctagcactgtgcaaactctgcaagaaattgctgcctttgcttgatgttgtagatgagttgccctccacctggctggagagatggcacatcattcagggccagaaggttgtccagcagtgtttctgcagtggctgcagggagatggaaaagaagagccctgcttccctgcctcctcctacctttctcttccactcctcagagttttcttctccagtatcctgacatgtaaagagattctttaaaatgctgcttcttctactggactgtctttcactgagtagtcagggaggagatgaaaatgtggacacatccccccgccttctccctcaaccttttcactcacgtcagaagaggttggggcaaaacaaaacaagcatgattgaagagcaggggaagcccacacaatcaggtgagccctgatgggggctggactggcctggtctggctgggaaaggattcttttaaaagcgtgcctgagcatctcagagcaatgtcagtgatgccaaagagagcaacttggcctccttgggcaccaactctgatggctgagttgcacaaacgtggctcagatgttggcatgcccgatggtgggaccttgttctctgataaagggcttaatctttccatgtagcaaagcaactttccctccctcccctccccccgaaccctgagcttgggcttgtgtgggcccagcatggctgtgcctgttgagggaagccacatcagtgagagaaagttgcattctctcaggggcctagattggcttggggcaggtgcttgttgaaaagcatgagtgtttctgctttgggaaacccttccaggggctctggttggaaacttggccagtaaggacagggccttgggcctcccaaggagttcacaatgatgccaggaagggtccctgagcctgggttccagtcagcttggctaacagaatggggcttgggaattccaggggcaactgagcatccaccccattagccagtgatctggacagggacagctggctacagggaatcaaaggctgttctgtacagttttaccagaaacnnnnnnnnnnnnnnnnnnnnnnnnnnnnnnnnnnnnnnnnnnnnnnnnnnnnnnnnnncagagcattagctgctctccccatgattccctcccagttttaattaaaagtctctgatctggagcacatgagggttgcgagcctggtgcacctggttcctgtctccgtgggctggtttccttcagcccctgatgcccaggctgggtgcaggctctcatctggtccatgcccagatgctgcctcagacaagaactctgggaatcctaacagactctgctttcctctcttcgtggtttgtcctccctcttttattcttgtgtaatgatgagacataattaagggtcatctacaatggacaattttcaaggtgctgatgtgatgtcacaacctccgctacatcctgagtaagtcagtgtccccaacagcagatgaggctgggtctttcctcatttctgcttctgggatgacatcagtg

SEQ ID NO: 433038 - DNA, 662 bp, Homo Sapiens
cagccaaacagcttttgtaacggcagcttttgaaggagtttggaacgtaaaaacacaaaatatgcaacacatctaggattagtaacattttcacttttgtgacattggacaaaatacatttttgcttgtagttcaggaaaattctatgcagacaaaacagtggaaactacggaaacggtggtcattcagcttttggctaaagcatcgattttcaaatacagcactatggcaactaacaccaaaggcgaataaaattgtgtcattctctgtaggccaacattttgctctcccatttgctgtggccatcacctctaatccagtcaatgagagttactgaggattcaaactctgcaatgtttcatgaggaaacaatgacaatgggccacagacagtgggccggagaggaagatttctcagctccttcacgattcctgtgacctttacagagctggaacagagacctctgcgagaactttgccttcaatacatctgatagctatatcactcaacacatttacagagggcagagggactaagaaattgaagagaaaatggctaaaaggaaaaacaaaagcatatcaagagattttataacattttgaaattcacaggtaaatttgccagaagtttggcagtagaagatattatctaaaaccaactac

SEQ ID NO: 433039 - DNA, 2123 bp, Homo Sapiens
gttagcgccaaaacaaaaataggtgttggcggggcgagagacacgagcggcgacgtaatgtgcgtgaaatgcggcggcggtggtggcggggtggtatggggcgagggacggatgcgccctaatgtgcagggacccgggggtggcccttgggggagaacagcggtagagggggcaatggttccatttgcgccggggtggggaccggcggcgccaagggggaggggtttaggaaaagcttgtcgagggaccgaaggcggcccggacaagttattgttttgggaggatcggtttggggggcaccaacagatggtatttattggctgaagggtactttgggagacattaaaacaccaaaggcagctgtttgtcctacagcagaagtcctaaaagattccaggacccactttatttacctctctttcttctaatcccgagtctcagcagcccggatgtcttcctaacactctgcacatcattcttctcttccgaagctgatgcacctatcatatctgtgtccaaagcttgcctttcttattccctcacatttattattctcaagatattttacatgaagaggtccatttctaaggacttcgtggaacttgagtcagtgaatcataaaataataagggcaggatactgtgaacctgatactcgattaaccctacttacaacaaatgagttgcagaaccaagatacataaaagagagtggcattgttcttttccaacggggactcctggctgctttcgcactggtataggggaattcatgtagcctgtgttggaaacactcctcatcagacactgttttccctaggacagaagttaaatccccccaccgagaagaaaacctcagatgggacgttcccccagagggtagggcatgcactaataaaatcctaaactaaaccatcccatctgcccctgtgtgtcccccacatgttacattctttacagtgttaacaggcatggctcactctttgcagtgttagagaattttgttttattgttttggtggcatgggcataattggagaaaccattggggtattcactagtaacctacattgttagtttccttggttccagcaggtaatacactgggttccgtcaccctggagatggctacggggaggctgagtgacttcccaaagtaataaagagtttggaatcagaattccaggtctgactcccagcagactgttctatttccttacacacctgcactttcatcaatcttctccagctccaatttcttgtgccccttcaacagcatctgcaggcaggatgatctttccgataaaaaccagttgcagaagttcctgttgcttccctttggtttttcctcagggtagggagaacagagcagctgcattcacatggccccatttccctctgcttccccttcccacttgattattcaggcaagtgggattgtaacatcatggccatcgccatagtaacggagcttgaaagatgctacactgccctggaacagacgtcttgctgggtaccaggagagagccagggatgccaagccaaggggaaggggaaagtcctggtttggtggcacacaggggcgaatgtcctgaatctacggcggggcagggggaaggggacatgttaatactgggtgacagggaggtggctacaaagctcctccatttctcctggggcttgcatggtaatctgcccactagccacacagattgctttctctgtaatgccattggcgccagcctgttgtgctgaggttgacaataagagaacagacttgggaggaggaatagggcaggcaagattctggtggcttctgcgtggtcacctgtgccatctcatgccagatttcagagcagggaacatttcagaggtggagaagtggctctgtcatagagatcacagaagcacagatggttacggtgctccatgccactaccctggttggtggaaacatccataacataggttgtcctgtttgctctgaaggctaccagaggggatggcaatgtccacaggagctgctgacaggcctgagacttaagtgagggagatgacagaataggaagaggagaaagacataaagacaggagaccaaggggtaaccacatctgggccaaagctga

SEQ ID NO: 433040 - DNA, 2151 bp, Homo Sapiens
  misc_feature (129)..(187): n is a, c, g, or t
gcaaatgggacaattttaattcaaccacaagtcaaatagaaagaagttaaaagaatgtttatgcaaacacatgagaaaagaagggtgcagatgagaatgggggttggggagagaaagaggaggagtaannnnnnnnnnnnnnnnnnnnnnnnnnnnnnnnnnnnnnnnnnnnnnnnnnnnnnnnnnngcggatttggcccaaggtcctatcttggccgcatctctctgcttcttccccctgatgcttggtttgttgacaacacagcatcctgtgcctggactcccaattagcttgttcctggactgtgccccaggtcctccctcaggagggcacatgctgtcagtccagaccaaactcacattaaataaatttcaatatacactgtacaagaatgccaggcccatccctcatctcactggctgcctgacccccaaaacaaagctcctccccagcttctctgtgcatcaagggacatctgagggccgaagaggaagggaaaggaatagcttggttcccaaatcggcctgccatgtccatatataaagctaggggcaccatgtgacacctccccacccccaggagccccctgcatggaccaggctggcttagggagcagtggccaggcagcagcagtccccctctgagccatctttgtcaccgtcaccctgtgtccatagcccagagtcccctctgtccagctgcagcctgagcagtacagccaggggtaggggtggggagagggcgtcgtgcaaagtggcaagggaaggtgactccccttggccttccccctggaagacccacatgcccaacagcaaggcaggggaggtacatggcaggcaggggcggaagacgcaggcaggtggcccccaaccctccgtcactctgcaggtgggtgggccagattggccagaaccttggcctggtccacagcgtcgagcaggttcttggcgtccacagccagggtgtgtgaagccgtcagcatctgcctcttgcactcctcactcagggaggtcacggcgttctgctgcgccagccgcatcttgttgatgagctctgccaggtctttgttgagcagtttctgggtgccctcgatctctgtccgtgaagatgacggcaaggaaggcaggagatcatccacgctcccgatgacttccgcagggtcagccccacattcttcaccaccaccacgtagcctcggggggcagctgacagagctcattcttgagctccagcacggcccgcaccagctccatgacattgaggtacaccaggtcatcggtccggtccaggttagctgtgggctggatggactgtgcgcccagcctcgggggcttctgtgggggccctgtgaactccaggtagccgacctccttctctggcgtcaatggggacttatcattcatataaaccatggggtccagggacttctcctcctgcctgagccactggtagtcctccaccatctgcttctgctgtttgtccaggatttgccgcattttgaccttttcagcctcccacagctgctgggcctcttctcggctgctgggttggatggaagtcctcctcccgcatgctgtggcgtttgaagacattgtgccggtggagaggtggggtgtgcagtgagttaacgggagatggatactccatagggctggtgagcgtaggagagctggcacacagaccctcaggaacctggaactgcagctttggagccaggaggttggtttgcggagggggtctgtacttaggtcggctgggcttgggtgggggttcctggaaggctgtgggctccaagattttgggggttcggtagcgagcattcctctcttgctccatggcaatgtccttctccatctgataaacgtcactgaggctgcacaccagctcggtgaagcggggccggtcactggggtcgtagtcccagcagcgggtcatgagggtataaaggaccggtggacagagatcaggcttgggcagccggtctcctttctccagcaccccgatgacatccttgttctccagccagaagaagggctgcttcccaaagctcaggatctcccacatgcacacggcgaacatccagacgtcactggctgtcgtgaagcgtcggaagttaatggactctggggacatccatttgatggggagac

SEQ ID NO: 433041 - DNA, 531 bp, Homo Sapiens
agagagctccatcatttcagggccatcagcgctatctgacagcatgagtatcactctcttttgtgtaatcccccagctacacaataggcatcgccaatggtctccaccttgtagacatccagctctccacattgctggtcgaagcgagtgtacagtgcattgagcatggtgatgacctgcagcggtgagcactgggagcagatggcagtgaacccaacgatgtctgagaagagcatggtgacattactgaacttcttggcttgcacaacttgcccttgccacagctgctgagcaacctcacagggaaatatggagcacagaaggtctactgtctttttcttctcctcctccagggcttggtgggcttgctcaagggtagccttcagcttccccagcctcttcttcaggccatcttgagctcgggcttgttcccctattaagaccacatccctcagtgcattgtgaattgggatgtctgagaggtagagccctcgtcctgtaaaatcttctaatctgtccacacagggtgac

SEQ ID NO: 433042 - DNA, 295 bp, Homo Sapiens
agcactgaatgacttcattgtttatggattcacttttgcaccttactcaaactattaacatgttatttctcaattttctctaacgcttgggctactgctaataaagctatatataccagctcccaccatcagagtcaataaagagaccagctggaattcccatacagatcatatatagttaacacagaaaagaagtttgaggttggctgtatctttgaagtactgaggctctatgctggggacacatctggatctaagcaacatcctgaactaaacaggagttactgtcatcttt

SEQ ID NO: 433043 - DNA, 728 bp, Homo Sapiens
  misc_feature (64)..(64): n is a, c, g, or t
  misc_feature (67)..(67): n is a, c, g, or t
aaaagtgttttgatcacggggcctagcagtggcattggcctggccctctccaagcggctgctgncgnaagatgatgagcttcatctgtgtttggcgtgcaggacatgagcaaggcagaagctgtctgtgctgctctgctggcctctcaccccactgctgaggtcaccattgtccaggtggatgtcagcaacctgcagtcggtcttccgggcctccaaggaacttaagcaaaggtttcagagattagactgtatatatctaaatgctgggatcatgcctaatccacaactaaatatcaaagcacttttctttggcctcttttcaagctgaaggcctgctgacccagggtgataagatcactgctgatggacttcaggaggtgtttgagaccaatgtctttggccattttatcctggtaaagaagctgtgggcttaataagctaatatttcgtgtgatagtttctgtaaagctctgggcacagggcattattatagttgagcagccagttaactgatttaatctcatgtttgagttttcttgattgcatttgccttgtttattgtgagcatggaatacttctggaagctttcctagtagatttttctttaataaatgtactaatagtttttgatttacagaattactgcaaagatagtacagagactttctgtatgccctacacccagtttccccattattaacatttcgcattggtatgatgcatttgc

SEQ ID NO: 433044 - DNA, 876 bp, Homo Sapiens
  misc_feature (850)..(850): n is a, c, g, or t
atcaggccaaatcggccgagcgtcgaattcgtcgagagcgttggggtgcacggaatatgagcaaggcagaagctgtctgtgctgctctgctggcctctcaccccactgctgaggtcaccattgtccaggtggatgtcagcaacctgcagtcattcttccgggcctccaaggtaacttaagcaaagttgcaggtttcagagattagaccgtatatatctaaatgctgggatcatgcctaatccacaactaaatatcaaagcacttctctttggcctcttttcaagaaaagtgattcatatgttctccacagctgaaggcctgctgacccagggtgataagatcactgctgatggacttcaggaggtgtttgagaccgatgtctttggccattttatcatggtaaagaagctgtgggcttaataagctaatatttggtgtgatagttcgtgtaaagctctgggcacagggcattattatagttgagcagccagttaactgatttaatctcatgtttgagttttcttgattgcatttgccttgtttattgtgagcatggaatacttctggaagctttcctagtagatttttctttaataaatgtactaatagttttgatttacagaattactgcaaagatagtacagagactttctgtatgccctacacccagtttcccctattattaacatttcgcattggtatgatgcatttgtcgaaatagatgaatcaattctgcctacattattattaactaaagtacaccactttattcaggttctgtttttgcctaatgtcttttttcagttctaggatccccattcaaggatactacattacatttagcagtcanggctccctagggctctccttgggtga

SEQ ID NO: 433045 - DNA, 1595 bp, Homo Sapiens
  misc_feature (214)..(500): n is a, c, g, or t
cggcccaatcttttttctcatatgcatacacatacccagtcttggagataatcccaaaaggaaggaaaagagagtcatagttcatagtttattacaaatgcatattatccaactcagtagaaatccatgtaccccagaatgtacagaaggtatgcaatgttccagagtgtcattgtcagctctggctttacatatatattaaatgtatatatgnnnnnnnnnnnnnnnnnnnnnnnnnnnnnnnnnnnnnnnnnnnnnnnnnnnnnnnnnnnnnnnnnnnnnnnnnnnnnnnnnnnnnnnnnnnnnnnnnnnnnnnnnnnnnnnnnnnnnnnnnnnnnnnnnnnnnnnnnnnnnnnnnnnnnnnnnnnnnnnnnnnnnnnnnnnnnnnnnnnnnnnnnnnnnnnnnnnnnnnnnnnnnnnnnnnnnnnnnnnnnnnnnnnnnnnnnnnnnnnnnnnnnnnnnnnnnnnnnnnnnnnnnnnnnnnnnnnnnnnnnnnnnnntgattatctgttttttgaatagtgaccctaatgtgcttttccagttccagtaacttttgataaaattttttcagcagtgtcttcatctaggtccatcttctgggtcataatgtaatttcttccaaagccagtggtggcactcagatatttgatcagaggattgagagattcaggcttttggtggaaaagccataccagagcttctgttccattatatggtgtcaaagtgaatgcatttgcaaaaaagcgaagtagcaatattgccggcatcaacagcgtccatataaacggaggcagaattccatatgtcaaattggtcaatgctgtacctggacaggccacattggaatagagaccctgctggttgaagttcctgttcaaagccacactcaaaaggtcagtggcatatttggaagagctgtagggttccttgcctttgctgtgctggaagtcctcgaggctgaaattagatttccttgcactgcgagatgatgtccagatgagctgagatggattgtcactgtgacagaggagaggctccagttcccgaatcaggataaaatggccaaagacattggtctcaaacacctcctgaagtccatcagcagtgatcttatcaccctgggtcagcaggccttcagctgtggagaacatatgaatcacttttcttgaaaagaggccaaagaaaagtgctttgatatttagttgtggattaggcatgatcccagcatttagatatatacagtctaatctctgaaacctttgcttaagttccttggaggcccggaagaccgactgcaggttgctgacatccacctggacaatggtgacctcagcagtggggtgagaggccagcagagcagcacagacagcttctgccttgctcatgttcctgcacgccaaacacagatgaagctcatcatcttccgccagcagccgcttgcagagggccaggccaatgccactgctagccccggtgatcaaaaccacctttcgcatcttcgcgcactcacacttccaagcagtgaagcaagacgccaccgctgctttcggaagtcctacgatttcgggccgcctcacccgtcaccaatcaga

SEQ ID NO: 433046 - DNA, 683 bp, Homo Sapiens
agcggcactgtcttgatatcttatttgcttttacaaagcgggttctaggagagagtggagagatggatgctctacgaatacagatggaagagcgattcatggcttccaatccttccaaggtctcctatcagccaatcactactactttaaaacgaaaacaagaggaagtatctgctgtcattattcagcgtgcttacagacgccaccttttaaagcgaactgtaaaacaagcttcctttacgtacaataaaaacaaaatcaaaggtggggctaatcttcttataaaagaagacatgataattgacagaataaatgaaaactctattacagaaaaaactgatctgaccatgtccactgcagcttgtccaccttcctatgaccgggtgacaaagccaattgtggaaaaacatgagcaagaaggcaaagatgaaacaagccaaagggaaactaacatgaaaataaataaaaataattgggtgacaaattgtttacagcctgtgaaggtgatgtatttttatcaacaggactcctttaggaggtcaatgccaaactgactgtttttacacaaatctccttaaggtcagtgcctacattaagacattgaccccttgtcagcaaactgtgactctgtgtaaaggggagatgaccttgacaggaggttactgttctcactaccagctgac

SEQ ID NO: 433047 - DNA, 2008 bp, Homo Sapiens
  misc_feature (1030)..(1030): n is a, c, g, or t
  misc_feature (1032)..(1032): n is a, c, g, or t
  misc_feature (1075)..(1075): n is a, c, g, or t
  misc_feature (1147)..(1210): n is a, c, g, or t
  misc_feature (1982)..(1982): n is a, c, g, or t
ttctctccattgtaggaatgtttctggctgaactgatagaaaagtattttgtgtgccctaccctgttccgagtgatccgtcttgccaggattgggcgaatcctacgactgatcaaaggagcaaaggggatccgcacgctgctctttgctttgatgatgtcccttcctgcgttgtttaacatcggcctccttcttttcctggtcatgttcatctacgccatcttagggatgtccaattttgcctatgttaagagggaagttgggatcgatgacatgttcaactttgagacctttggcaacagcatgatctgcctgttccaaattacaacctctgctggctgggatggattgctagcacctattcttaatagtggacctccagactgtgaccctgacaaagatcaccctggaagctcagttaaaggagactgtgggaacccatctgttgggattttcttttttgtcagttacatcatcatatccttcctggttgtggtgaacatgtacatcgcggtcatcctggagaacttcagtgttgctactgaagaaagtgcagagcctctgagtgaggatgactttgagatgttctatgaggtttgggagaagtttgatcccgatgcgacccagtttatagagtttgccaaactttctgattttgcagatgccctggatcctcctcttctcatagcaaaacccaacaaagtccagctcattgccatggatctgcccatggtgagtggtgaccggatccactgtcttgacatcttatttgcttttacaaagcgggttctaggagagagtggagagatggatgctctacgaatacagatggaagagcgattcatggcttccaatccttccaaggtctcctatcagccaatcactactactttaaaacgaaaacaagaggaagtatctgctgtcattattcagcgtgcttacagacgccaccttttaaagcgaactgtaaaacaagcttcctttacgtacaataaaaacaaaatcaaaggtggggctaatcttcttataananaagacatgataattgacagaataaatgataactctattacagnaaaaactgatctgaccatgtccactgcagcttgtccaccttcctatgaccgggtgacaaagccaattgtggnnnnnnnnnnnnnnnnnnnnnnnnnnnnnnnnnnnnnnnnnnnnnnnnnnnnnnnnnnnnnnnntaattgggtgacaaattgtttacagcctgtgaaggtgatgtatttttatcaacaggactcctttaggaggtcaatgccaaactgactgtttttacacaaatctccttaaggtcagtgcctacaataagacagtgaccccttgtcagcaaactgtgactctgtgtaaaggggagatgaccttgacaggaggttactgttctcactaccagctgacactgctgaagataagatgcacaatggctagtcagactgtagggaccagtttcaaggggtgcaaacctgtgattttggggttgtttaacatgaaacactttagtgtagtaattgtatccactgtttgcatttcaactgccacatttgtcacatttttatggaatctgttagtggattcatctttttgttaatccatgtgtttattatatgtgactatttttgtaaacgaagtttctgttgagaaataggctaaggacctctataacaggtatgccacctggggggtatggcaaccacatggccctcccagctacacaaagtcgtggtttgcatgagggcatgctgcacttagagatcatgcatgagaaaaagtcacaagaaaaacaaattcttaaatttcaccatatttctgggaggggtaattggggtgataagttggaggtgctttgttgatcttgttttgcggaaatccagcccctaggacccaggtagatttgtttgtggggtagggcccagttaaatctttggccgggtgccaaactttcattccaaatgtttnggggttccataaatggtttatggttt

SEQ ID NO: 433048 - DNA, 1358 bp, Homo Sapiens
  misc_feature (145)..(145): n is a, c, g, or t
  misc_feature (302)..(302): n is a, c, g, or t
  misc_feature (322)..(345): n is a, c, g, or t
tataatttttccctttaagaggctttttaaatcttctggtaaggtaagttttgttcccaaattaagtttccccacccccacgaaggtaaaggttccctttcaccaaaagatcccccaaagttagccagtttttcccccagtccanggaggttggtaaaaagggaccgggccaggtgccctaagtttataaatacgggctcccttttaggggcccccttttgtccaaaaaaagcttggggtcgcggtaaactttgggcccccttgagggataactctagagcgggccgcccttcttggagggnccgaggcggccggacatgtnnnnnnnnnnnnnnnnnnnnnnnntttgcttattaaactagttttactttagcaccattcttagtggagcaggattcttgatcatggggtggaattttgtgtatctgggcttcatgggatgcataaaattttccagttggtaagtagcaggtgccgagggtctggatcagaaaaaaaggcaggcagccgggttcccactcgccttccatgagctctccgcagctcaccggccatcacttgaagcaaacactcctgagggagctggttgaggaagggcagacatccggcttcttgccctggtacaactggcagacaagggtaaggagctgggtctgatcttccaagggtttcccattgacggtgacccagggcacatactcgtgtggtggctggagagcatctgtccgctgggcgttggcgtgcatgagctgcatgccgcggtcccccattgcacactccatgatagtgtctggcgacagccctggggcgtagagctgcaggcatagtggcagacttctctccatgtcctcaaactcttccatgcagacaatggtcaggaaggctagctccatgtcaagttcatccaacacgcaggcctccaccttgttgaatttgcactcctcttctccatgctggcacttgaactcccacctgccactgacattttgttcctgtgcgtttccgtagggcaccagcgtgacattgaggatctccatgaccaacagccatgttgggaagagctcccggatcaggaaggctcggcagccaccgcacagtgcttcatagtagagggtcacattgacaagcggtgcattggacttcttcaggggcccccgcaggtatagattgcctgtcttgtagttaactggtggcccattcccaaagaagtctaacgcttgcagaggggacgcctgcaccgccgccgtggggacgtccagcagcagcagcagcggtggcaggaacagcagaagtggcgacagggtcatcgcagcaggggcaaaggtgtggcgactgcagatcccgggaattccggaccg

SEQ ID NO: 433049 - DNA, 834 bp, Homo Sapiens
gttttttcggcaggttccaccgggcctttcaactggaggcaaaacatttcctgagggaagttggttgaagaaagggcagaccatccgggctttctttgcccctggtacaactgggcagaccaagggtaaggaggctggggtctgatcttcccaaagggtttcccattgacggtgacccagggcacatactcgtgcggtggctggagagcatctgttccgctgggcgttggcgtgcatgagctgcatgccgcggttcccccattgcacactccatgatagtgtctggcgacagccctggggcgtagagctgcaggcatagtggcagacttctctccatgtcctcaaactcttccatgcagacaatggtcaggaaggctagctccatgtcaagttcatccaacacgcaggcctccaccttgttgaatttgcactcctcttctccatgctggcacttgaactcccacctgccactgacattttgttcctgtgcgtttccgtagggcaccagcgtgacattgaggatctccatgaccaacagccatgttgggaagagctcccggatcaggaaggctcggcagccaccgcacagtgcttcatagtagagggtcacattgacaagcggtgcattggacttcttcaggggcccccgcaggtatagattgcctgtcttgtagttaactggtggcccattcccaaagaagtctaacgcttgcagaggggacgcctgcaccgccgccgtggggacgtccagcagcagcagcagcggtggcaggaacagcagaagtggcgacagggtcatagcagcaggggcaaaggtgtggcgactgcagcccc

SEQ ID NO: 433050 - DNA, 850 bp, Homo Sapiens
gctcggtaccctttccggcgggccgcgggcaaagggaggcccttgatggcgcccagtaaccgcgggggcagagcacccagttgcggggctgctaaggcgttcacctgcgtacctttccgggcctgctgaaaagctcacaccatcctccatgcatcagaaggggaagcggaaagtgaaaggatcctcccccgagtctactctgcattctgcccacccagctgcttgcccccattccagggcccctgcaggacaggccaccccaggaggcctccactcatttgagatttcagaagattcagggaccctggagcttagggagggggagcacccaccacttccttggtctgctgatgaggtctctgctgctctctccctggaggggagtgggtggaaggtcaagaggggagagatggaagtaaaagcagaaaacaaaaccaaaccagaaaaccaccggtttgtaaattggcaacaagacctgcctgctggctgccctgaggcccacgggtctgctcccacagaggaaggaggcaggaagcggctggcaggctccagctcccgcccggccccgctgagggctggccagcctcatggctccgaggccgggactcctgccatgcgcctaacaggtccaaggtcctctccggtctgggagctgccctctgcgcccctcgagcattctcctggatcccggcgtctgctcctaggtcttctcttcccggtctgtttttctccttgttatgttcctgggtttaattttcagagacagttcccatagggcctcctcagccaggtggtcactgaagtcattgaagaagtttataatgtcgtcgttcctccgcatgtcatagtg

SEQ ID NO: 433051 - DNA, 330 bp, Homo Sapiens
aatgaagcttgactctggactgtgatagcagaaacaaatacaggcagtgcctcagagaatacaaaatatcaagcaaatcctaagtgttgaagctagaacccaggtgagtgcactctgcattactgagaatgtgctccctgccaaaaggctcctaccctattccaaccaagccggaaatggcaacagaccaaacgtgaggagtgagtgcctctgtgctccttgaggctgtttcattacagataacaaggttacctagggcagttgtgaagatgaaatgaggatgtgtgtggaagggcagagcagatgcttgatgttctccatctgaacact

SEQ ID NO: 433052 - DNA, 799 bp, Homo Sapiens
  misc_feature (720)..(720): n is a, c, g, or t
gatgctgcagttttaccacgttgtcagcttaattaaaaaatgattttacctgcaataaactaccaagaggttattagtgtgtcctttcggcaatgacacctcactttctctctttcactacaggaagaacttacaagaaaaagtatcaactccatcaaaatggcagaaaacatactttgacattaatattcaaaattctactttctgcttattaccataccttgtaagaactgtgttacacttattaagaaaatacgttttcttaaataaattagatttgaaaaacttaggtttttcttaagtaaatccagtgtttcaatgtattctcatcatgttttgtttctggtacaatcaagcagccctgcatcctatcgattcttggttctatgtatacaatatttaataaattgtgttgtacttatacaagagatgcaactttgtagtgtgctcagcataacaaaactaacaatactaatgggaacagaaatgaccaaaaggttgttccatcctgggttgtaattctgcttcccctgtgggcaatactaaatgatcataacgaccactggagttgcaagattcacattttgaattgttctaagtagatggagtcaaacttaaatgtcttaagcggctgtatgaaaatgcaggttgatttccaactttgtcccaagtctgtctcttttagagaaaccctcgaactactaatgaattaaggagtgntgatagcactttcaatctggacagtggggatttataaattgccaaatagcagacaagtatttttagtctttcttataaa

SEQ ID NO: 433053 - DNA, 1768 bp, Homo Sapiens
  misc_feature (178)..(178): n is a, c, g, or t
  misc_feature (220)..(220): n is a, c, g, or t
  misc_feature (274)..(274): n is a, c, g, or t
taagtatgcctgatgaagctagattcctaaagctcccttaagctccaagaaatgagtatcttccttctccatcgaattcaagtgctctcaagctctctggtcgtgcatagcagaccttaggaggtccaaatttcctgggtaggtcagcttccaatccacgtcctggacagtcctgcgnaataatccctaagatcttcagtgctagaaactcctggtaggnagatagccaatgctgatggctttgatgtgaaactctctacttgctcttcatcgncggtctctgaaggcctgttgctctcaggtttgtttgtaagagcactgatcagctggagtttctctcttagcttggatacctgagaatttgaactatcttctttctttatgctttggatttttactgtatctgttctgttggtgacttgatccaaagactgtcttttcagagtggcagatctatcacccatcatgctgaaggacaggtttgctttcttttctaccttgctcatagcaaccacatcgctttctatcaggttgactctctgggtaagattactgactgtctcgttcattccctcgagtttaagatcattctgtctctggtaccccactagggcactgtttacctcctctaaagagttgtgaaggtacaggatatcctgtttcaaattctcactgtgggttttattgtcaagttctgatgtggctgaaggtgacggaatgatctggttgcttccaggagtctccttcaagaagtggctgattcatatcactctgcagtaattccatcgttttcttgtgttcatcccacagttttctgtagtgcttccacagctagatggacgctgtttaaagtattgccattggaagctacactcttctgaagtccctctacagtggtaggcaggctaatcaagtctgcagctgacttaacatgggctttgaggtggtttcactgcagaagtcaacagagaaatctgcttattcatttctgtgatgtttatccagactttgttcaaacccatctctccagattcaatcttctcaagttgtttttgcttgctgagtagttcttcattaagtttggggatttcttggaatgagcttttctgattagattccattgttcgaaatttttccttgagggcatccagatcctccttgagagcaacctgcatccacaccaagccaacacaggccacaacacaggcagcaaggatgacaaaaccacagagcggataacagatcttgcagcatcgtaaatagtctcccttggcaaagcgagagcgatttccaaccacaccgaattcctcttcctcttcggagctggactcagagtctgagtcgggaggctcagtgcgaagcaggcggtgactgcttgggcctttcttgggcttctttctccggctgtccccagccaaaccatcaatgcattgagctctttgcgctttttcatctttttgtgtggggtgagtggagccccgactcctgagctgccaggttcgtacccgatgcccaattctcttcctgccttggagctgccttccagggttgggaatcctgggccagagccccctggtcactcccacctaggggtgggactgaccagatccgccagggactggagattggagcccagaggaaactggaactcagatgggtgggggaaatcacatagaaatggccaaggagctggtgaccccaaaggataaggccttgggtgcagagtgttagtagagggtggagagggacctttatctcccaaagggcg

SEQ ID NO: 433054 - DNA, 622 bp, Homo Sapiens
tttatatatagtcaaacaagttatttcatctcttaaggcaaagagctctctgtctgtggttcaacacattgttatccattgggcaaaaatgatcattgccatgctctgatagttttaaaatgatcagacaggaaattcattatattgcaaactggtgttcagaaatgttaggattttcagtatttttattttccaaacattattttaaaagaacattaaaagcattagaaatacaaatcttgcctaatggttaacatacgaacaattattataaaatgtttaaaatacgtcacatactttgcatcacagtaagcatcaagagaactaattaacatatcctgataattaatcatattcaactgaattctcattacttttagttctcattttagcccttatgaagagataagttatatatttctacctccacctgtatcatcatgacacctttattatgataacacaggtagaagtagacatatataacttacgaagaaagaagttatgtctctatagatatagagatatagatacggaccggggggctattgaatcgagcccactatgtatttcatggcaatttataacaataatttttttaacttttcttttggagattatt

SEQ ID NO: 433055 - DNA, 739 bp, Homo Sapiens
  misc_feature (220)..(252): n is a, c, g, or t
tacttttagttctcatttttagcccttatgaagagataagttatatatttctacctccacctgtatcatcatgacacctttattatgataacacaggtagaagtagacatatataacttacgaagaaagaagttatgtctctatagatatagagatatagatacggacgggggctatgaatcgagcccactatgtatttcatgcaatttataacaataannnnnnnnnnnnnnnnnnnnnnnnnnnnnnnnngatgagcataaagagacaatacctcatatgcacctgcttagttttctttgtgctgtaatttttacctcccaatgatgggcctcatgccagtcaaatcatctcaaactcaaacgtcacacagaaaacctgccattttaaattttataaatagaaattacttttgtgttaatattttattgtatcacatttgaaatgcctagccaatttttgtatttttaatagagacaaggttttttgcatagccaaaaaaatagatatatgcctttaaaaatgtgatgcttgattaatgttgtcttcattataaagctgtttggcacactggggtaaataccaggttttgaattaagacaaaaatctaattcctaatttgccacaattctttgtacgatcttgggaaagaatattagatttcttaattctttgttaaaaagagataataggccagtgcactggctcacgcctgtaatcccagtacttaggtaggccg

SEQ ID NO: 433056 - DNA, 789 bp, Homo Sapiens
ccatgcagcttatttgtggattcttgaggtggtggtttaccaaaggtcacacataatggctgtggctgccctagctgcttgacgatatctttccacaatagtttccaaagtgaagtttcgaaacagaccattgattcctcgttctccaagatccacatcatgctcacagccagggcaagggaaaacagttgtcctcggggtcaatgaattgcgcttccagcctctccaccccacagatctccgttgtgatgctggtctgttaattcggtcaattttatccatactaggggaggggagccgaagtcgaggactgctttgattggagttgtctgatcccacatcgttgaatgaatcatcgagagtcagcaggagttcttttacacatttatgacagatactatgttggcaagggagaatcaatgggtgggtaaacagctccttgcatgctgggcaaatgagctccctttcgatattcttaatggtaaccggcgaatctgagccatcgccctccatggctgccttctgccaggtgtcatcagcggcacgttccactcacaccggctaccgagcgcagggtctggtgggcgggtccctgcggcggccgtggagcctcggtccgaagctggaagatgagctggtcagctgtacgtggccagcggaccgacgcggggagaagtaagccggggcaggcaaaagcacaggcgcgggagaagcgagctttgctcccagcgactaccccgggaatcccgcccagctgccggctgcagcagcggctcctgcgactccgct

SEQ ID NO: 433057 - DNA, 539 bp, Homo Sapiens
cagctggtaaagtgctgcttatcactgagtatatgcacaaaataaagaactatattttttatcacatatgcttgattaattttattgtcaaatatttttgggaaagttggctttcctatttataagttcaaataatttacagattgaagcaatcagcatggattgcttcatggatgagttcaggcatctatacttcaatgcctatcatctcacaggaactggcaatttgattccttgcttgattattttaatgtacaatatattacttttcagaggttcaaatcatgcaaaacaaactaattttcttcattacattgcaaggtattctaagtaccaggagatattgcagagtgtaaaccaatttaagtgtacagaacaacatgttgggagtttgattttatatcatagtttgggaataagcctaatgacctattcttttaattgttataagcaatttgtttgaattgtacactacaaacagccctttttgattgagttccatttttgctccagtatgattacctactcataggtagatg

SEQ ID NO: 433058 - DNA, 685 bp, Homo Sapiens
ttgcaatgtagaaaggctatactttattcagatagagtacactcatatattggcttgtctatggcacatcgatatcatgccaagaatgtaagcactaagagagaataagaggaaaatccaggctttatccctattgaattatttatcccactattagaatattagtgaggtaggtgtggccacactgtgatggcaaattgagcttcggtcacaaacatgccttactgttccccccagtctactgacatcagcttcctttacatagcggtagatgcacaaaagtttgcacagttgagggtattgtcatcatgttttggtatgtactggaatcctggcagcttcttctctgattcggagaggcgcaaacattaaagacacaaagaacaactcgagtctgtcctttggggtgatttagggtggctgtttaaatttgtagtggttgaaaagtcttgagattgtcacacctagcaactcttatacttttcttctctcagctgcagcttgttcttttcacctgtgtaacaagctgtcttctcttctcacagaagcttagcatttcttcctctgccccatagcattttttcaatacttaatttaccaggtgctgttaatgttgtaggcacctaagtacttataccagtgagataacatgtccgaagttcttagaacagagcttggcctatgg

SEQ ID NO: 433059 - DNA, 497 bp, Homo Sapiens
agaaaaactaggaacaaaaaagatatatataagtctctgatacttacatatatttggagaacatgttggagaattggaaggggaaagtcggcattcaaaaatgcaaagcaacttcactttataacagcctgctctcacaggaagtgatacttccagaaaaataagtttgtattgagcatgcactacatgcaaggcaattttattttatatgggatattggacctaataagaagaggagcttgatgaattttaggcagaatgacttaagggctgtagactaaataaaaagcaaaaaggatagggacatttctatgtgttttgatatgaaataaaaaactaataataaggcttacaaacttaagtcatcccaactggcctcacaaaactcaagtgtggtgccaggtagagagccaaatagcagtggaagatttggatggtaggtcaggttcccatttattatgttagtctagtacaaggaatagagagaattgaatgga

SEQ ID NO: 433060 - DNA, 2361 bp, Homo Sapiens
  misc_feature (836)..(836): n is a, c, g, or t
ttttaagtgtacatcatacatttattaccaacaaccctctcaactccaaaattgggcacagggattaaaaataaaaattcattgcactacttagtaaagcattactagtaactttcataaaaaatgtacaaactttgttaaaaatttatcaagccttcaaatgatttggttacagatatttataatacatacatttaaaactatatgttaactgatacaatggaatatgatttgagaaaatgactcagcaaatgattccaaaaaacacccctgtgagctttcacaatctgaaacggcaaaatgaggtaaccaaatgtaccaacagggggacaaacaaacagctttctaatgaaaaggcccaaagataatctgtgaaaaatattctcacaagtgagtcggtagatctcattcaaaattattctaagaggcccaaatttaagaatcttaacaaatcacatttcagatagtatataaaatctaaatatgctttcacattttccagattttgctcaaaaaattaaggacagaaaatcctaatatgagatcttgaatacctggaggccttatttttttgaggggctgggggttaaaaaaacaccaaagatgacaattcatgccaaaaaacaaacaagaacccacaaaaaacccacagctgagttaagatggtaaagccaatattattttaggaggaaagaggacgaaggccaatgaaccaacatctgcctgctatctggtgcatcaccaaaggtgaccaatggctgggcacaaataaacttctcttttgctagccacagagttgctcactgtggcaagcctgagctggtcagaacacctgntgtgtgtgttcctgatacacactaaccacaataagcaagtctgcacacatctctatgagccccatgcaaagacaagacattcccaaagatcagtcactagagtgcaacaacgaaattcaagatttgaccaaaacagaccctgctgcctcctaaattgcccattgcctctcaaaaacttacagaaaaagggacattataagaattcatagagggagagaagaaaaagctgctactcctagtcattagtacaatgtgctgtgttaattagatacctctatataaattagaaaaagtgctttacttgcatgcttcaataaatgaatactgagtgtcgtagtgttagatctgtacagatattaattttttgcagctatataaaagtgtataagatgggcttttgccattttaaacatgattttttttcattaaaaaagattaaactatatgtgatttgtatgtagctgattattatgccaagaattttggtctttaacacactttttattcatcaggaacaggtgagggatatcctaatgatttaaaagtaacatgtgcattaaccatgtgcatttttaccactatttagaagtatttctgatgcactgacaaccctaggggcaaacacagtatgcaaaaccctacttgtaggactagatagaggcaacaatgtctcgcaaagggcaaaattgtgcttctgtgaattgactttacttaactctaggctgtgatgagcttatagacacttcaagggagggcaagcagcatggcagtaacaagtagttaacactgagtggaaaactgacacagagccaactgaaagttgagtggggctggcagcaagttatcacagtcctgactggaataatgcagcttgtgctattgcaaacaaagcaattacatcaactgcaggaagaggcagacaatgttgaatacactaaaagaatgagaaagtaatttaaacattgctggaaaaatgactttaaagtgaattatgctcaaagaacttactaaaaaaaaccccatacagctatgtattacatcaactaaatgaaggtcaactcctgtttaacagcattatttttttatacaaaaaccaaatcttcatttatactgcaagtattctggacacctgttgtattaaacttttctcattcaaacaaaaattaaaaggaaaggcagtaaaatatcaaaacaaatcaggtctaaggaacatgagctgtaacagcacttgatccatcctgaaaccagggtttcgatgagaagcacgtgtgatgaaggaagaactagacaactttcagaattggagtctggcaagtgaattaatatgaacagaaatagagttttcttaaaacaattgagttgcccacaggagcttgaacacagaacacatatgagaagtcaagctgaattaacaggttttgttctggtggaagtcaacaaggtgagacttcatgggactagtggtcttcttagaaatatattaatcaaatatcttcagaatagactagactacaaatctaaacat

SEQ ID NO: 433061 - DNA, 434 bp, Homo Sapiens
  misc_feature (11)..(11): n is a, c, g, or t
  misc_feature (70)..(70): n is a, c, g, or t
  misc_feature (93)..(93): n is a, c, g, or t
  misc_feature (264)..(295): n is a, c, g, or t
gccccgcctangcccttttaaaaagccttatagtttaagttaaaaggtaaaatgtaaaaaactgattaanccctatacaagtctggccaatgnagctctgccatgaggaaatggaaggaggaatattgaaaatgattcctaggaaagtgaacgtaagaaaggaaaatgggttttcccttttctgatcatgggcctctggaaagtattccatggcctttacccagcattcagtataaaccagagataaggacatatgtacttacnnnnnnnnnnnnnnnnnnnnnnnnnnnnnnnntattctgaacagcttgtaaatattgtagttgtttaaaatggaaaataaaagctgagttcttttggcaaatatattgcatcaaaaatacagtattgacagtggataaaacactgaggaaataaattttttttcattttgc

SEQ ID NO: 433062 - DNA, 545 bp, Homo Sapiens
  misc_feature (509)..(509): n is a, c, g, or t
  misc_feature (531)..(531): n is a, c, g, or t
cgctcttctctctccctctctccacacggggggtattaatcccatagaggtctgtactaaagaggatgggtagaaacacatatgtatataccttttctttacctagaagtgccatccattgtccttgaattattatgattaaagttactgttgcatttaggaggctccttgaaagtaacaccttttccaaggacaatggcaacaatgtcaatgtcaacactgagtctaattttgaccacatttatagtggtatagtgtcaatactgcattttcatgacaaccacactccactgttgaaacactgtgccagtgagaagtgcaacatccagtgggcagatgaaaatgatgcatggccaagttcagtggttacagataaaactgctgtgggtcaagtgcttccttccccatcaaatccttgataaggctttgtgggaaaatgatctaaaatattggtttaaattttaaacctaatttattcactcaatgaacattcttacctaacaaggctntaaaaggaattctccagtttgnccccccttaatttg

SEQ ID NO: 433063 - DNA, 421 bp, Homo Sapiens
acttaattatagacatatatgcaagaaatggagtcatctaaatggctaaacaaaattcccaagtcttgagtatatcataaccaagtcaaactttacccccaaaagctcttctttaatcatattatttgctagatacatttatgcattatttttaagtgagaattatgacaaacccatggttactttttaaagtacgtaaagaaaggaagttttaaaaaaagaaagttagcctagtgatggaaagaaaggagaaagagttaaattacctgtaggcagactggggctgtgcctgaatccaaaccggtgcatttaccattcattatacagctgcattattgggggaaggggagtttagaagggcactgaccccgaaagttctccatacttctcactcatcatcaggaagggggaagaaggaaag

SEQ ID NO: 433064 - DNA, 511 bp, Homo Sapiens
  misc_feature (17)..(17): n is a, c, g, or t
  misc_feature (460)..(460): n is a, c, g, or t
  misc_feature (470)..(470): n is a, c, g, or t
ccatacaattatatagnatctcatttgagatttaagaatataaataattttcttttaatctttattttgctcaatatttaataggaagtatgatttcaaggactactaaaggaaggcaatatacatgtgaaaaccataaaatacattttttgcattctactatttttaggggcatgaaatgaatgaaagctttagcacttttttgcccctacatatgagacaacatattttgtatttcactcaaggctctgccagtaaaaagtaatgaaattgtacctttctaatgacatctatgcagcaggggtctatcgccttgtggatggcaccaaattatccaagtgtattaggagacctggggcttttttctttaatcccttcttattaatgaagtgcatagtgctgctcccggggagaccactgctgacagatacacagaggaggagatcagagggggaaaacnggggaagacntaatggagtttttacccagcctggaaacatggccactgtct

SEQ ID NO: 433065 - DNA, 1284 bp, Homo Sapiens
aaacatgagtgagtcacactgtaactgctcttaaatttagtgttcattgcacataacattttttgaaatgtattttcacaggctataggtagtcatttgcaaagatggccacaatttttgatccttgaattaaatgtctttcatttatttcagagaattatgagtttcaaaagctactgctcttatggggcaatctgtagagtactaaactcacaaaatttgtggtaacaaaagagagttttgttacattacactttccaaatagtaaccacatcttcctactaattttcatgttaaaaacactttaggaaagacagaattacttttaggtataaaatgttctgaatttgcaaattctatagtgcttatgagaatttatattggcttttatattgtttgataaggttgtctgtgccccccagacttccatcttcagttgccacaaaggcaaattctctgtgaattgttcgtaacgtgaggttggtgtcaacatgctgcaatcagaggccttctaggattcatcttaccatttgaatttactgctctagtttggaattttcctgtcattatcgagtttaaaccaatacatgtgttgtctggtttcatggtctgagaacagtattctgtgctctttggaatcagatctctgataaatcatatagctcaatttcatcacatatgttttccaaagatttctaatctccttgtaaagtcttcaatactgagcagcagctctagctagcacctatgagctgcattaggaaaaggctcagataataaaaagatagtataagggtttaggaaaagcatcaatggcagaaataaagtgtaggaatcttaaatttaggcaactacttaagtccagaaaatatttccttccagtacaaaaggttaaggctctttgaagaaaatgttatcttcaacaatggaaacatacattgaaattctggtccccaagtttttaagaaagcctgaaagcttaaaataagactctttcccttttgtacacttttgacaaactatgtgcgttttcagtgtagggaccacctttcaattttagggtacttgtactcttccttagggaagagacagttggcattgtttcatggctgggtataattcatttatgtcttcccagtttttcctctctgatctcttctctgtgtatctgtcagcagtggtctcctgggagcagcactatgcacttctttaatcccttcttattaatgaagtgcatagtgctgcaggagaccactgatctcttctctgtgtatctgtcagcag

SEQ ID NO: 433066 - DNA, 967 bp, Homo Sapiens
ctcattgagatttaagaatataaataattttcttttaatctttatttgctcaatatttaataggaagtatgatttcaaggactactaaaggaaggcaatatacatgtgaaaaccataaaatacatttttgcattctactatttttaggggcatgaaatgaatgaaagctttagcactttttgcccctacatatgagacaacatatttgtatttcactcaaggctctgccagtaaaaagtaatgaaatgtacctttctaatgacatctatgcagcaggggtctatcgccttgtggatggcaccaaattatccaagtgtattaggagactggggcttttttctttaatcccttcttattaatgaagtgcatagtgctgctcccaggagaccactgctgacagatacacagagaagagatcagagaggaaaaacttggaagacataaatgaattatacccagccatgaaacaatgccaactgtctcttccctaaggaagagtacaagtaccctaaaattgaaaggtggtccctacactgaaaacgcacatagtttgtcaaaagtgtacaaaagggaaagagtcttattttaagctttcaggctttcttaaaaacttggggaccagaatttcaatgtatgtttccattgttgaagataacattttcttcaaagagccttaaccttttgtactggaaggaaatattttctggacttaagtagttgcctaaatttaagattcctacactttatttctgccattgatgcttttcctaaacccttatactatctttttattatctgagccttttcctaatgcagctcataggtgctagctagagctgctgctcagtattgaagactttacaaggagattagaaatctttggaaaacatatgtgatgaaattgagctatatgatttatcagagatctgattccaaagagcacagaatactgttctcagaccatgaa

SEQ ID NO: 433067 - DNA, 753 bp, Homo Sapiens
  misc_feature (721)..(721): n is a, c, g, or t
  misc_feature (731)..(731): n is a, c, g, or t
ttttttttaccttttaaaacatccaaatgtttattttcacaagcttagtagtacaagatgcaacataattcaagaaaatcaaccacagtgctaatactttaatatattattccaaatattagacgttacagtttaaatctttttaacattagctctaatgttggaataacatttaagttaataaataactgtgaatataaccatatgttcagtctattctccccagtttatcctaaatgacaattttattgtgatttgggtcataaaagtgataaataattgtttatatgttttcataaattgcatgtttatttaattaatcctgaagagaacctagaaatacattccaatgggttacataaattagacgtattttttagctcttcgattttttttaaacatgagtgagtcacactgtaactgctcttaaatttagtgttcattgcacataacattttttgaaatgtattttcacaggctataggtagtcatttgcaaagatgggccacaatttttgatccttgaattaaatgtctttcatttatttcagagaattatgagtttcaaaagctactgctcttatggggggcaatctgtaggaggtacttaaactcacaaaatttgtggggtaaccaaaaggggaggttttgtttccattacactttcccaaatagggtaacccccatcttccctacctaatttttccatggtttaaaaaccncttggggggnagggcagggattacctttaggg

SEQ ID NO: 433068 - DNA, 467 bp, Homo Sapiens
gaggaaaaactgggaagacataaatgaattatacccagccatgaaacaatgccaactgtctcttccctaaggaagagtacaagtaccctaaaattgaaaggtggtccctacactgaaaacgcacatagtttgtcaaaagtgtacaaaagggaaagagtcttattttaagctttcaggctttcttaaaaacttggggaccagaatttcaatgtatgtttccattgttgaagataacattttcttcaaagagccttaaccttttgtactggaaggaaatattttctggacttaagtagttgcctaaatttaagattcctacactttatttctgccattgatgcttttcctaaacccttatactatctttttattatctgaggccttttcctaatggcaggctcatagggtgctaggctaggagctggctgctccaggtatttggaaggactttacaagggaggtttagg

SEQ ID NO: 433069 - DNA, 482 bp, Homo Sapiens
ccgacggacctcttttaccagggcaactcccagacagtgagagagtggctcaacgtggccatcacccggaccctgcaccagggcgaggagagccttttagagctgacgaaacagatctgctctttcctgcaggtagaagtctaaagctcatgttcctgcagtgtggttaccatttttaactgggagtctcactggcttgctgaaaatgactcccctttcccttccaagtccctattcctctcgatttccttttcctagaagcttttctgctttatctcatctgtagcttgcttccttccagagggctatttagtcgtttggctgatttcctgggccatgtgagatgagaagatgaaatgctgtccctgtgtttagcccgtggctttccttattcagtgtctctttgcagacagcaccggagcagttcccctccgaagagttcccactttccgaatccaaagtcacatggacgtgaatttccc

SEQ ID NO: 433070 - DNA, 1676 bp, Homo Sapiens
  misc_feature (814)..(864): n is a, c, g, or t
tgattccgatttcggaggtgcggtaacccgccttatgggaactgctccgccacggacctcttttaccagggcaactcccagacagtgagagagtggctcaacgtggccatcacccggaccctgcaccagggcgaggagagccttttagagctgacgaaacagatctgctctttcctgcagacagcaccagagcagttcccctccgaagagttcccaatttccgaatccaaagtcaacatggacgtgaatttccccggggcagcttttgttgttgtgtcttgtaaagaaagtcaatctggattccgcaaagactcctctctgtacaaggcaccgtgggcacgggtgctcgtatatggcctcggccacaaagtgaagcgaaatggccagctgaacctcatcgaggccgcctggttacccgcgggacgcgtccccagccaacactgggcttgcacctccccccaccgctgaccagtacccctctgtggtcctctccacagacagggtccacatcaaactgggggtgtctccacctcctggagcagtcctggtgttacattccctgcccctggagttcccactggctatggccttcgcagagcagctgctgtcctggaaatcagaggacagtgaagggaagtccgaagatgagcctgacaccattccgacatccgtcctcctgcaggtggtggagctgctaggaaacttcttgtggaccacggacatggcagcctgcgtgaaggagcttgttttccatctcctggcagagctcctgcgcacggtgcacaccctggagcagaggcggcaccccgctggnnnnnnnnnnnnnnnnnnnnnnnnnnnnnnnnnnnnnnnnnnnnnnnnnnnggccttgcagtcggagctccacaagctgtacgacgaggagacgcagaactgggtctcaggcggcgcctgcgggggctccgggggggcggcggccggtgaccagggcaggttctctacgtattttcatgcactcatggaagggtgcctggctgtggccgaagtgaccctgcctactaacatgagtgtcacagccagtggggtgacctcagcgaccgccccaaatctcagtgactcgtcctcctcctcctcgtcctccccaggacagaccccacagagtcccagcctcctctccaagaggaaaaaagtcaagatgaagcgggaaaaggcctcctcgtcgggcaagcgccagtcttcccgcaccgtggactcggaccccaccgtgctcagcatcggaggcagcaagcccgaggacatgctgtggttccaccgcgcactcaccctgctcatcatcctccgccacctcaccaggaaggacccacaggggctgggcgtgacgagtgacgccatcgccgatgcctgccaggccctggtgggccccaccgcccacagccgcttgctggtgatctccgggatccccacccacctggacgagggcgtagtcagaggcgccatccgcaaggcctgcaacgcccacggcggggtcttcaaagacgagatctacatcccgctgcaggaagaagacaccaagaagccaaaagacaaggccgagggcggggacgggaaagttgagcccgagaagacactggccttccccggcacagacagcatggaggtcagcacgtccagcagcctgagccccacagagagagcgt

SEQ ID NO: 433071 - DNA, 726 bp, Homo Sapiens
  misc_feature (472)..(511): n is a, c, g, or t
cttttgaaagagaaatgacagacacaaaagactgtaaagaaaatgggcgaatttctgatagcatttccccaagggcagaggcaaaacccagatcagacctgggggcccaatagtgatgtggcttccatagtacgttgttcaccaaatctaaggtcacctggtctggccaggccaatgctgttggcctttggggaagcaggtcaccctgcaggctctgcagccctccacacggacacagagagagttggagatctctcccctacgaccctccagctccatccagtgctagcccctttctccttccaccccatggtcttgctttaaatctgtttccttcctgggggtcttgttccttggtctgatatgtgtgagcactgggggtcctagagccagagagaccttcgggcctgaagccctcccttccagaggctcttagcactcatgggttggaaaagcatttgttccacaattnnnnnnnnnnnnnnnnnnnnnnnnnnnnnnnnnnnnnnnncaagtcctggggaggaagagctatcctgctctttaaagctcccaagtctggagttggtcggtggtgcagttccaagagaggccgaaggcgagcaccaagggggtgtccagctgttgctttcaggccccccaggagtgtctgtggtcagattcagggagctggcttcagctgctgtttcatgggtcctcggtttaccgaggactcatctgcgtccc

SEQ ID NO: 433072 - DNA, 486 bp, Homo Sapiens
  misc_feature (54)..(54): n is a, c, g, or t
  misc_feature (75)..(100): n is a, c, g, or t
  misc_feature (146)..(146): n is a, c, g, or t
  misc_feature (374)..(374): n is a, c, g, or t
ttagtcttcctaaattttattggcactgaaatagaacatggattgagcataaancccctccaaaaacaatttttnnnnnnnnnnnnnnnnnnnnnnnnnncccctgaatacaaaatttaaccttttcccccagcctccctaagggntaagttactgactttaaggcagttattaatagattgccccacaattccaggtttcaatttagccaatataggacatatcaccaagtgagctaattcacagcaatgcacacaagactcctcaaggtcaggcacagagtggggggtggtggccagggggaattgagggaggctctaagctaggggcactgcatggtgggacaggatggccccttgaggactgaaccctgnggagaagacaaacagtaataataaaaacaaataacaagtactttaagaatggattgtatgacctatagtgacagatgacatcactaatactgaaagcttcttatattaataa

SEQ ID NO: 433073 - DNA, 4011 bp, Homo Sapiens
gacatgcattgttatgtctttattccaacattgagtcggttaatccttattgaagtcttcctaaattttattggcactgaaatagaacatggattgagcataaacccctccagaaacaattttttaaaaaaccctaaaagtacacaaaaaacccctgaatacaaaatctaaccttttcccccagcctccctaagggtaagttactgactttaaggcagctattaatagattgccccacaattccaggtttcaatttagccaatataggacatatcaccaagtgagctaattcacagcaatgcacacaagactcctcaaggtcaggcacagagtggggggtggtggccagggggaattgagggaggctctaagctaggggcactgcatggtgggacaggatggccccttgaggactgaaccctggggagaagacaaacagtaataataaaaacaaataacaagtactttaagaatggattgtatgacctatagtgacagatgacatcactaatactgaaagcttcttatattaataattttggcaaaatgtcattttgtaatatagtatatgctttccaggtgtgggggtggtaaagtaatgaggccaaaatcatcctgccccaagactaatatcttctaatggtgcattagcaaggaaggcagaaatcaatatttagatatcagtagagtacataatactgtagaaagaagaagagcacacatgagacagagaaggaggtggatgctcctgggttgagagcaaggggtgggggtgtggaagggactaggccagaatccccagcagctctctggtttacagctccaagggacagaacagctggtgtcaagacctgggttagaggtttgtcaaacagaggcagggcccagtcacctctttggaggggagtgatgagaaggggattttggtcacctgagagggttgagtaaacttggatcagggcacaggcttctctcaccatactcagctttttgcactcactccctagttgagcctactggcatcaagctctagatgccaaggctgggatggctgtggagcaggagctatggcccaagtagctctgagaggggaagagacctaaaacccctagcagggaaaatactgacgctaggtgtgaacatatcctctcttttcacaagagtcctgatggggctggctgagcttttgggtactcatccctactgttatagctggagaggatttgggtattgaagcagggaggggcagatcccacgaagtgactgcagatctggaataataagtaaggggtagatctgcccatagagctcactttagaccggcctatactcctacaaggaattggggtaggatcttctactcagccttgccacaatagaatggccaatgcccttctagtatgtttggtgaaggtcttgaaggcaccatttcccccatccaccctggggagaaattgagtccctaaagtcaacgacaaggcttattgaggctgagtttgcaacagatccgatctgggaggtagaaacaaaaatgactgaacatctttttatcccccaatcgttacaaagcctaaataactctaaacgggatgggagggcaaattttaggtcagttgacatcctggagaagatatcctaggtcctgtctcattccctagaccgcataacactccaaccgtgtaaatctcaggaccctgaagaagacagtggtaggggagaggaggggagctagcttccaacctactccacacttgactcccataggacaacagtaagtgtaagggcatttgcaaaatcaagtggaaagtacctctaggctggagaagtaggatattctagccatacagattcaatggaacagagaagagaaaggaggttccattggcaccatagtgagccattcatttgcccagggaagtgggtgggggctaaggggctaggtttggtcccatggctacattaaatgcttggcatgactccagggctgctctagttagtggctccagcacagtatgagttaggtgagttaggtgtaggagtgtggggacaaggaaaaagggaggaggggtccctagaggctgggtgcccattacatagactcaaattcgtcaatgcgctgcttggtgttgccctgccggatctggcgcagggtcttgtatttgtctcggcccagtcgcatgttctcagcatggatcatgtcattggcagtcttcttggactcatctctggcattggccagctccgaagtgagggccttcaggtgcttctgcacacgctcattcttctctgcctcagtggtacgttcctcctcactgcggtccttggccatagcatcagcccgtaggtcagcactagcctctgccccattctcatcctgctcatcctgctcattctcagcaggctctgccacatgaggtgtactcatggcagtcttcagctcagcacgggtcttctccaagtcttcctgtaccatctgggccttctgctgccactccacagcctcactctccttcttctgtcgggccatctccagctgggagattcgagctgtcagctctgccatttccaaggccagctgttcctgagtctttttctggtcccgggaggcctgcagcaaggcctccttggcctcttcagcttcttgacgctccttggccagcttttcagcctcgctctgggcacgcttccgttcctgctcaagttccagagccctacgggtctgttcttccagttcttgctgagccttcttagtctgttcctcgatctgcttcagcctctccatcagctcctccttctcccgttcaatcttctctttctccttctctgccatttcacgcttcttcttctcattttccagcatagcacgctccatctgcttctggtgcttctcctcccgggcctgtgccttcatctgctgcacctcaatggtatcaggcttgcgacggcgcatgtatagttcatggttccccatgcacaaggccaagatccgcttgttaatccgcagccggggagcatagaagacgaagtccggggcttttttgtcaatgggcttgatgacaaatttcttatcattgaaagagatgttcctgatttcactccaggggaagcctatcttgggagttagtctgtcattctgctcatagatgttgagacccagggcatccacccccagccacagctctgagcctttcttgttcttgatgctgaagtagttcacaccatacatctccagatcttgagcaatcttcagatattccaggacagcatcctccctgagcatgccacggtgttcctcatgccacacctggatccgctcctcccactggtccttgttgagtttgtgctgttccaggactctctgcgggagcaacttgtctccggccaggtagccagacttatgcacttccttattgaagtcgccatacttagactggacagcatacgaggccagcagcacagcggtctcaggcgggcagtaaatatcatcattgagaatgccctctttcacttgcagaaagaacaggcgctgagtgatgtcctgaatcaattcctcggacacatcctcagggtagaacttggcacggaacttaaagagcagggggctttccttccgcacatcctgggcagtcaccttcttattgagtttcagccaggtggagaaacctttagtgtcctggtactgcagaccaaagaaccaaacttccctcaagccaatagttttcaccacctggtcaaatagctgcttcccggtggtgttgggctggatggcaaactccagctctgcatccatggtggtcacacgcacactgatcgttttgggcatggtggcggcaaaggcagcggagttggcgaagtttagctaggactgtcgggcagtgctgagcacgcagtacacacggcttggattcggctggccggggactcagattgggtccctcactagcgtcggggcgactgttaggcttcctgctaacgggccacgacttcacaaaccccacccaggaaagagcc

SEQ ID NO: 433074 - DNA, 428 bp, Homo Sapiens
ctcttgtgaaaagagaggatatgttcacacctagcgtcagtattttccctgctaggggttttaggtctcttcccctctcagagctccttgggccatagctcctgctccacagccatcccagccttggcatctagagcttgatgccagtaggctcacctagggagtgagtgcaaaaagctgagtatggtgagagaagcctgtgccctgatccaagtttactcaaccctctcaggtgaccaaaatccccttctcatcactcccctccaaagaggtgactgggacctgcctctgtttgacaaacctctaacccaggtcttgacaccagctgttatgtcccttgcagctgtaaaacagagagccgctgaggattcaggcatagtcacagccgaatcctcacgtaaagctaccaccacagaagcagtcatcac

SEQ ID NO: 433075 - DNA, 709 bp, Homo Sapiens
  misc_feature (490)..(535): n is a, c, g, or t
  misc_feature (674)..(674): n is a, c, g, or t
cccaacaacaacaaaaaacaccgcctttttgaaagagaaatgacagacacaaaagactgtaaagaaaatggggcgaatttctgatagcatttccccaagggcagaggcaaaacccagatcagacctgggggcccaatagtgatgtggcttccatagtacgttgttcaccaaatctaaggtcacctggtctggccaggccaatgctgttggcctttggggaagcaggtcaccctgcaggctctgcagccctccacacggacacagagagagttggagatctctcccctacgaccctccagctccatccagtgctagcccctttctccttccaccccatggtcttgcttaaatctgtttccttcctgggggtcttgttccttggtctgattgtgtgagcactgggggtcctagagccagagagaccttcgggcctgaagccctcccttccagaggctcttagcactcatgggttggaaaagcatttgttccnnnnnnnnnnnnnnnnnnnnnnnnnnnnnnnnnnnnnnnnnnnnnncaagtcctggggaggaagagctatcctgctctttaaagctcccaagtctggagttggtcggtggtgcagttccaagagaggccgaaggcgagcaccaagggggtgtccagctgttgctttcaggccccccaggagtgtnctgggtcagattcagggagctcctcgttccgaatt

SEQ ID NO: 433076 - DNA, 1925 bp, Homo Sapiens
  misc_feature (1840)..(1876): n is a, c, g, or t
tgatggaagtggggtgatctcagagctccatgttagcaactctgggagtgtgggccggtccatctgtctgtctgcccaccctggcaggacaatcaggcctaggaggtctggaggagctcgccgagctgggcggaggaggcaggccagtcacatgctggaggggaccccacggccccttctacagggcaggagagtcctcagctgaagggcttcaccagcttcatggcagcatagttcgggaaggcgtagatgaagatggccaggaacagcagcaggatgaagaggatgatgaagaggatgatggcccaccggaaacgccgccacaggatgaacttcatggtcttgtatggggaggtaaaccacaggaaggaggtgtcggggcgccttgggtcctcaagcttagggttcatgttgggctcatcccggccctggccagcaggccgctcctcatgctcactctctgctacaatctccaaggtcatttccagcttgcccgccagtattttcttctcaccctcttctgctacacagggccaccagcccttcactgttttctgctcaaaaagggacacaaaccattctgggtggaaagcatcatccagctggtccaaggagcacttcttggctgtcttggctggcttgggcatgcggttgagatcgagctgcagggagcccagaaaatcatcaaaggagaacttgtcattgtcccagatctggaacaccactcgtgctgggattttgctctcagtcttgtccagcctccagaaggcatccttcttggcaatggtacagacttgctcagctggcaggtagtcgaaggggaaaatgaacctccagttgaagttgccttcacctcccagggaacgataatgcacgtctgtcttttgcttgtgttcttcaaagccaatcatccaacctttcacataaatgtcgctcatcttctcccccgtgaggctcaggtcatccaggatcacatctctggtattccagataatacaacgcaggaaaaaccttctggctctccgtggggtgatgttgaagggaggtccagccgccccagggccttcggaaataggtcgacccacatctgcagcttcccctgctcgatgtctggctgcagggggctgtagaggggccgtgactccacgtgctccgggaccaggccctgctgctgaagcacatgcagagccagacgctcctccactgggcccaggtgtgggtttgggatcctgccagcctctatctcttcaatggaatattctttatcctgaaacattacacggtctgtccggtacacaggtgccttgactctatgctgctggcagaagaggtggaggagctgggaggggcggagctggtcccgccactggttcggtccagagacacagtaggtctgtgggagtccacagcgagccccaaacttggacagcagcctgttctccaggtcgacgaccgtctcaccgatcttttcgtccttggagaggaggtcatagtcatagagagtgatctttaggtccttctccagaggcagagtgcaggtcagctcgaacatctttccaaatacgggctccagcgtgcaggggatgtagttatcctggtcactcactgatttcttccctatggagatcttgatgtaaggatcacactttccattggggtccttgggctgcaggccaaatgctcggacaatgtagatacggaccaagcactcctggggtccctgggcggccagctggtggaactgtcttgggggcatggggatggctgggtcttctgggaggggataaattttgaagaggccgctctcgacgaattcgagctcggccgatttggcctgatnnnnnnnnnnnnnnnnnnnnnnnnnnnnnnnnnnnnncgccgccaccgcggttaagctccgattcccctatatgagtctatacatt

SEQ ID NO: 433077 - DNA, 863 bp, Homo Sapiens
  misc_feature (852)..(852): n is a, c, g, or t
atgagaaagaaaaggaatgcaagagaaggagatgtaatgacagagagttctggtgagatacccggagagaaaaagagagagcagggtggggtaaggaggagaaaataagccaacaattaggtctgcattttctcaggcagtaggcattctttagtctacataggccaagttttccatttttgtcagtctgagtcatcaaaaagagtcttaattttctaaaacaagttggctagaagaaagtaaaaagaacaacacttgttatgagggcatgtgatattttcacatcttaattaagctccttcagtttgaaggctgcacactgacataatgtagtgagtgtagactggccatgcaagtggtttgggccccattcagaactctcagactctaaacacacaagtagattgatctaaggcatgctcccagcatttgtccacccacttagtccactctgagtcgattaacctgcatgcagcaacacccaagtccaccccaattaactgaagcaaataccaaagcagttgggagtacatatggtagacaatttgccttaggaagtgacttgaatgtacaaagatacttgatgcacttattttttaatgtgagacagcaagtttataaaacatccatataggattatagatacttaaaggaacacgtggggtgagcgtgtgtgggggtactagaagctgatctgattggtccaacagtttgatgctgagtcatgcgtgttgaatcccacttcagtgcacctgtggcctctcagtcaaacaagttgtgcctttcacagcttctttactactgcaagttcaagactgaaatggcttctatgatcagaactgggaaaacagngaatcttatgg

SEQ ID NO: 433078 - DNA, 1021 bp, Homo Sapiens
ttttttcagttcacaaagtaatgaaatgattcccaactattttctaaagacaatcaatgtgcatatctttaacatcattgggaactcgtgtcttttatcaaacttgatgtattgaaatgcatttaaattatcattcttactgacggtcaaagtgtgtcatctttagccagtgggagtccattcaagtcagctgttgtgtcctataaacaccatcctatagttctggatagtcttgaattcttaggaaccacacagctttcatcaggaaaaatttcaaccgtgtactgtctcttcctctccatcacactccagtcgttattgacccagttttggcgaagttcgtccagtaggtcatgaccacggcgctgagcatgacgtcgttcttggaaaagttacaactgaagagctcggtgggaccgatcatggggatgccgaagacataggggacctcatcaccatgggccgaatctgcccagctgggcttcatttcgctttggcagtgatgatagaaggcatagaagtaggtgggggagccgtactgcgcgtgcaggtcggcggtggccacggcgggggccaccccactggtggtcagtaaagagagccaccagggttttccgccgcgtctccgggttttccttatcggcccagtctgtgtacatgaacttgatagtctcccgcaaagtgtctttcccttcagggtagccgtaaaggttgtccacgaagttggacacggagaagtcaaagtcgttgggcgtcacaccgtcctcgttatccacgatgccgtccacgaacttcaggccttccccttggttgacgcccagcatgatgtcgtagttgaggaactcgccttgctccatcaggatctgggggtcgtctgggatgacgtcgccgtcgatcaccggcccaaaggctatgtggtaggtggccggggtgatggtctgctggatgagctccttgtagttcttgttcttcagacattctaccatgtccgtggtgtccagcatgttgcagccgaccttgt

SEQ ID NO: 433079 - DNA, 468 bp, Homo Sapiens
ggtggaccccgctcccagaaaaggcaatgcatttctatttcaagggtatctgaaacgtaaacattcaaaactgaaggctgactgacttgagatgtttgcaggtggctggagagaagagggaaggtaatagagacaacttagtcccatgggagcgcagcaaccgtgtcaggttctttctcctgtcccattagtgacctcagtaacatgcagggtacgtctggcttctgcatggccagtgctgacactagcacagctgttcttctccttctgttgaacctcatcttctgaagaaaggccaagtggcccttgtccatacacttagctgcattaggatgaatatcacgcgtctcacatctttaatccagcctttcgtgacatgttggaaagatacatgtgaaacctacccagttaccctttctgaattgggaggaaaaccaaccaatgtatgtatgagaaactcagaagtct

SEQ ID NO: 433080 - DNA, 1228 bp, Homo Sapiens
gctgctgctttatagattatgacagaagactttcaacagacctgatttttaaaaaaccctcaacaaatctaatactaagggaaagcaactagatttaatgttgttacctgtcttccataaataccatagttaaatgttttgtgtgcatacatgttcatatgtgtctataaaggtattgatatgcttcccaaataatcctatatactaacattggaaatggtttataaagaggctttacagtcgcatgtcattcagcaggagggaatatactggtctttatgattacatgaaatatgctgtgaagctacagactccattataagtaaacccatggttcaaagtgtaagttataaattgaaacaaaatcaaaatctgctagaagggagggtgggtagacagccaccagccttgtttataaattcaaacaaaataagaatctgctagaagggagggtgggtagacgccacccgccccgtcacaggcactttggtttgtttggtcatgtgagttacccacaagttgtatagttccatgaaacaagctaaaagctccaatttaaattacaaagctatactttccttaatatatttacacatagttttaagatgttctcatggctatggaagccattttcagcatatagcttataatatacacttaatcgtctacatatgtgcattctttctttacagacacacacagcctacgacactgcaacagagcctcacctcacaggaggtctgggggactcttaagtacagaaacctgcttttaacagtctaaacaggataaaaattgcataacaatatcccaatattaaggtcagtcatggcataaagtgaggcagcctgggaagtggctgctgagaacagcaggggccgggctcgcagctgtggcgcccccaaccctggtggtggccagtgcacatcggctcaaaggtcccacatcctatgtgtgaggtcacactgggggttcctgacaataatcagattgagctttcaatttttaatgcaatatcctgtctactcactccaatctacctcacaacctttaaaaggacaacgtgtaccttcctttttttataggctgggaaaacattgaaaattaacaaagctcatgactgattgtttgacaacagcttaattgctaacattgaaagtctgctcttacagttgaggaaaagtacaaggtgtctgtatactgtttcatgagtaagttacaacagcaa

SEQ ID NO: 433081 - DNA, 1457 bp, Homo Sapiens
  misc_feature (195)..(208): n is a, c, g, or t
taatcttcattgttttaattctgaagcataacgtgccacagggaaagtgagtttctttactgtttgccagcagcaaggacaaaaagtgaatggtgggggcccaggagctcccagcttggagagaaggcccttccagacccaggaacccggggtttggggcaggaggcaggaaggatgggagggtgtgatcaccgnnnnnnnnnnnnnngttctctctcttcagggaagggttttccagaagcatttgcccatactctgaatgaagtattttcatgccaagccaaacctcctgaagagaagtgaattcatggctgagggagccacgtgccctggctggggatgcacctgaacgctgctcttcagcaagtgagttcatagcatccaccagagcttcccagctcctcaagctgaagacaggctgagcaaaaaccaggcaggccatgaggggattcaaagaaacctaataggattgggtgcttctattttaatctgaacttggaaacaccttcctactttaaggcacaggatcaggataagaacccacatgtacgagctaacagagctgcacttcaaatttactaagttaattaattttcccttcattggcttggctcaaggtagaaaagtttaaaattcccttttctttagataaactgattatttaaacctgaaaattaacgttttgacaactcaagagtgtctgacgtcgctgggatcctggagtgctgaggtgtggcttcgatggtggcttcactcctccacatctgggaggtacttcagtgcctcagaatcaccccctttttttaaaagagaatggaggcagctactgggaggccaagcacctccaggcactcaaggccctggggacagcgctactgactccactgcctcagggcaggcacggtgctgctctaccacttcctctgggctttgtacctttaattgtgtctactctgcctaagtgcttaaataaagcattccattaagcaaaatacacatggagcggattacacactggactgcagaactcagatgtatgggatgttggtaaaaattactggcatgcctacaatttcccatgagtgctgctgctttatagattatgacagaagactttcaacagacctgatttttaaaaaaccctcaacaaatctaatactaagggaaagcaactagatttaatgttgttacctgtcttccataaataccatagttaaatgttttgtgtgcatacatgttcgtatttgtctataaaggtattgatacgcttcccaaataatcctatatactaacattggaaatggtttataaagaggctttacagtcgcatgtcattcagcaggagggaatatactggtctttatgattacatgaaatatgctgtgaagctacagactccattataagtaaacccatggttcaaagtgtaagatcgcaagaattccggaccggtccag

SEQ ID NO: 433082 - DNA, 573 bp, Homo Sapiens
  misc_feature (33)..(33): n is a, c, g, or t
  misc_feature (121)..(121): n is a, c, g, or t
taagagtaagattaaagttttatagctagatgnaaaatataatacagttatctgtctttgatccagatatgatagaacattatttttgaaatatctcacatacactataaaatagcaattnccagggtggaaatggaactcattataaaacgtcagagagtactgctctaattcgacacatttcttttctgtctcttcctcaagtagaaaatagcacttgagctggtgatttttatttctccttttggcacatgtgcccacacactgccatcatttctcatcaggttactgagactatgtgagcttttcagtgtacttagggtaatttctagatatttctttgtgctgcctttgtgtatatgatccactacacatctgagttttcatctcgcagaagggcatccagactgcaatgtcttctaagctctaagctggctacagactgtggctgagcagtagaagatgcgtagccctctctaaccaacgcggaagaacctgagggtcatctggaaaccttagcagtggaaatgctaggtttggcccttgggcttttggctagcccagggtcaagtg

SEQ ID NO: 433083 - DNA, 896 bp, Homo Sapiens
agcggactgtgccctgctcagaagccccgggctcgtcagtcaaaccggttctctgtttgcactcggcagcacgggcaggcaagtggtccctaggttcgggagcagagcagcagcgcctcagtcctggtcccccagtcccaagcctcacctgcctgcccagcgccaggatggccaccatcacctgcacccgcttcacggaagagtaccagctcttcgaggaattgggcaagggagccttctcggtggtgcgaaggtgtgtgaaggtgctggctggccaggagtatgctgccaagatcatcaacacaaagaagctgtcagccagagaccatcagaagctggagcgtgaagcccgcatctgccgcctgctgaagcaccccaacatcgtccgactacatgacagcatctcagaggagggacaccactacctgatcttcgacctggtcactggtggggaactgtttgaagatatcgtggcccgggagtattacagtgaggcggatgccagtcactgtatccagcagatcctggaggctgtgctgcactgccaccagatgggggtggtgcaccgggacctgaagcctgagaatctgttgctggcctccaagctcaagggtgccgcagtgaagctggcagactttggcctggccatagaggtggagggggagcagcaggcatggtttgggtttgcagggactcctggatatctctccccagaagtgctgcggaaggacccgtacgggaagcctgtggacctgtgggcttgtggggtcatcctgtacatcctgctggttgggtaccccccgttctgggatgaggaccagcaccgcctgtaccagcagatcaaagccggcgcctatgatttcccatcgccggaatgggacactgtcaccccggaa

SEQ ID NO: 433084 - DNA, 846 bp, Homo Sapiens
acatcttcactgtagaaaatttatttgcctttccatggacaacaatcatttgtattattatcagttttctacaacacgtagagttgtcaaatagcttaaagacaaggacaagtatagacccttctagaatcagataactcctagaaaggtcttctagacaatctgtagtgaagttaagtaataccttcaagatttcacaactgtaaactcgatctggaattcaaaccagatctatatgtttctgtaaatccaggctcttttttctgtatcaagaagcttttggactggaagagtgtttttcagcaggaattgtggtattggccacccatcaccccatttaattaaaaatccctggcctcaggacctacagcaatgtactgaagaacttcagaacctcaattagccatttgccatcttgagagagtcttgtccatggttcaagtgttcccttggaactcctgaagggcttggagcttagtctgagccatgggaaatggccaaagagtctcaagattcccactgtatcctgtgccttggagcaggcaaggagaccatggcagcccctggccccggtcagttcttggctttggcagttccgggaccaggacgctggtacagccggattatcccttcatcgtgtagccgcttccagacttctctctccagcttgaagtcatggtttatgtaaaagatcagccgcttccatgatgtatcatagtagtgatcagaaaagcgctcatggccctcagtgatgaagccataagcactcacctggtcacagagctgaagggcagtgagcagcaggaggggcccagtggtggggcggtatatcctccagtgggcacc

SEQ ID NO: 433085 - DNA, 1249 bp, Homo Sapiens
  misc_feature (82)..(82): n is a, c, g, or t
  misc_feature (1008)..(1008): n is a, c, g, or t
  misc_feature (1017)..(1017): n is a, c, g, or t
  misc_feature (1093)..(1093): n is a, c, g, or t
  misc_feature (1098)..(1098): n is a, c, g, or t
  misc_feature (1101)..(1152): n is a, c, g, or t
tcttcatagataaaaaatcttcccaaaattaggcaaatgtcccccttagatgtttcccagataccaaagatcaattaaagcncagccctgtttatataaaaggtagttaactcccagccaatcagcatcaagtgtactaatgactgatccttttcttgttactttcattgacaggatgccttcctgataggcgcaggaggttgaatcatcatcaaaagcattgaagactgtatacaatttgttatctgaggcttctccctttcttgatttagaggaagtagggctgccattttgttccatttgatactgtccactttcatgatgaagttcttcctcaattccgctttcagatgactgcccacttaacgtcccttcattccaacttctacagttttcatctgaaccgtgtctcacatgtagcatcgattctatatctccatcatggttggttccattgcagaatttagatggagaataatgctgtgatatgaatccaacaaatttcattcctcttttagcagcgacattaatcttttctatcagttcttttgctgcgtcatttgtttgtgcctcagaagttaggggacattcctcaatcacgagccttgggcgtctttgtccactgggtgctgccgaattctttgggcttaatttcaagcgcaatagcaccactctgtataggtaacttgcaggtaggtgttttcgctgccccacaggttgtataacaggatgaatagccccgacaatttatcctttaagataatagttttccacttttgttactatatccagaattgaatttatcttgatgacttctgggtttgatgaagcttgtagagtaaaatccagcaatacatattcgtaagcaaattctgtctttcgtttccacttgcggtctcttcagggtagaaaatatttttccagggctgctttcatcagggtcttctagctttctaagtccgcaccccatggcaaaatctgtaaggaattaaattgcaggaaaggggngggggggcngcaaattctgttgtttaagctgcaaaaagaaagttacagactttactgctttgattttgttttcagctaaactatngatanccnnnnnnnnnnnnnnnnnnnnnnnnnnnnnnnnnnnnnnnnnnnnnnnnnnnnccatctgggtccaaagaaaggagttgaagaatttttctatccatttttctgtaaagtcattgaacccatgattaagctacagctccaggatcccggg

SEQ ID NO: 433086 - DNA, 991 bp, Homo Sapiens
  misc_feature (9)..(10): n is a, c, g, or t
  misc_feature (19)..(19): n is a, c, g, or t
  misc_feature (27)..(27): n is a, c, g, or t
  misc_feature (34)..(34): n is a, c, g, or t
  misc_feature (37)..(37): n is a, c, g, or t
  misc_feature (39)..(40): n is a, c, g, or t
  misc_feature (42)..(43): n is a, c, g, or t
  misc_feature (47)..(47): n is a, c, g, or t
  misc_feature (51)..(54): n is a, c, g, or t
  misc_feature (57)..(58): n is a, c, g, or t
  misc_feature (69)..(71): n is a, c, g, or t
  misc_feature (73)..(73): n is a, c, g, or t
  misc_feature (79)..(79): n is a, c, g, or t
  misc_feature (98)..(98): n is a, c, g, or t
  misc_feature (103)..(103): n is a, c, g, or t
  misc_feature (114)..(114): n is a, c, g, or t
  misc_feature (122)..(122): n is a, c, g, or t
  misc_feature (126)..(126): n is a, c, g, or t
  misc_feature (137)..(137): n is a, c, g, or t
  misc_feature (139)..(139): n is a, c, g, or t
  misc_feature (191)..(191): n is a, c, g, or t
  misc_feature (206)..(206): n is a, c, g, or t
  misc_feature (210)..(210): n is a, c, g, or t
  misc_feature (219)..(219): n is a, c, g, or t
  misc_feature (228)..(228): n is a, c, g, or t
  misc_feature (324)..(324): n is a, c, g, or t
  misc_feature (403)..(403): n is a, c, g, or t
  misc_feature (540)..(594): n is a, c, g, or t
cattttttnnccccaaaanttgggganatccccnaancnngnncctnggcnnnnttnnccactgggtgnnncngaattntttgggcttaatttaaagngcaanagcacccactntttatagntaanttgcaggtagntnttttcgctgccccacaggttgtataacaggatgaatagccccgacaatatancctttaagataatantttnccacttttnttactatanccagaattgaatttatcttgatgacttctgggtttgatgaagcttgtagagtaaaatccagcaatacatattcgtaagcaaattctgtctttgttnccacttgcggtctcttcagggtagaaaatatttttccagggctgctatcatcagggtcttctagctttctaagtccgcnccccatggcaaaatctgtaaggaattaaattgcaggaaaggggagggagagcagcaaattctgttgtttaagctgcaaaaagaaagttacagacttaactgctttgattttgttttcagctaaactatagataaccnnnnnnnnnnnnnnnnnnnnnnnnnnnnnnnnnnnnnnnnnnnnnnnnnnnnnnnccatctgggtccaaagaaaggagttgaagaatttttctatccatttttctgtaaagtcattgaacccatgattaagctacagctccaggaggctgggcttgatcttagagaaacatgcaagctgctacaacttagcggagaatttccatgccacgtcaatttacagccagccccctaccagagttctgtcgctcagggcaccagcggtgctttgtctattccagttggctggatgataaaaagaggtgtccaaaaacggaaataaaaaggcaaaagggcaacttggatgtaattatctacaagtagaagatatattcagacatagtggcacacaatttttttctgttttccctctcctctctgtcctgcgcctaccctccttcctctcaactactac

SEQ ID NO: 433087 - DNA, 1138 bp, Homo Sapiens
aagtctccacgcgtgtgaggggttacagggagcccccaggcagaggtctgaggtgcaggcagtatgccgcccgggcggggggcacgggttacaagggcccgtatttggtctcatacttggacacgatggtcttgcacttgcccacctccttgcgtagctcggccacctccgtccgcagggctgtgttctccttctccaggaaggctgcccggatggtgatctgattctctttcaggcgccgggcatcccgtgaccgtttagctgccacgttgttcttcttgcgtcttgtccagtacttttcatccttctgctcgtcggggacaaagaccttcttggcctttttgatcataggctggggcttcaggtcctcctcagcaaacttgtgcttccgagggttgaagagctccccgcctggcacactggagagcaccaggtcggcggggtccggattgaagttcacatccacttccacacaattggggtcgatgggactgggagtctccctctccttctccagggaagattctgtgctggacacggtttcagagggctgaaagatggcagtggaggaggatggtggggatgctgtggaagagctggcagactccttcccttctagctctgctacaggcagcagcaggttgtgggccaggtgggtggggctggcggggatgccattctccagcaggaactcatccaggtccatgtactccaggtggaaagattcgccatcatatgggatggtcttgtcccagatgggtggcatgagggaggctgagacagccatggtgctggcggctgcggcctcgtcctcctccagcttttccttccccttttccttatcgaggcgcgcctcgcgcggggggttctccatcagcttcttcaggaccagggggaaggaccccgacaggcccctttccccagctgcgcgccccggccccggaccgggtcctgcctgcgggtccacaggcggcttctttccgccgcccgcgtcggacatcgtgccccggactcggctcgcgcacctcgcctcccccgcccgccccccgagatgggccggagccgtgcgacccgctgcagctgccgcgacgcgtggcgacgcgtggtcgacatatcccgaaacttccggaccgtacca

SEQ ID NO: 433088 - DNA, 1254 bp, Homo Sapiens
aaaatcaattcttttaattgctgaaattaacatacataattgatgtaggtgagagagatcacaagtagttggatgaaatttatagtaaatcatcctattgctggagacagtcattgaagagctccatcctgttgatctgctgaactgaaagggactgttcattcagccttcaaggacatgcacatcataaaggaggccaagcaaaaatcaaagcaaacaatagctacatgtttggaaaaatatacatcgaattacacagacaggaattatgaccagttgtgtacctgctcaagtgggaacattttaaaatgtgacagtcatctatgaatactgaaatgtgatggtcaagtggtccatcatcaacacaaatacaaatggaaatcattaaactttctggaggggccatttgaataacaatgtcaaggcctgggtttttcccagcgggattttggtcttcttatctggataagcacaggcagagatgggctgggtagtggccggtttctggatgcagctgcacgctggctggacttagcactgcagctcctcctccttggtccgccgggagcctcctgccaagctctgggcactggcatgggccgtggagctgaggacctcctcaaaactgcctccattagggttcgtaccgcctactttcgtctcatgtctccgaacttcttgctgatggccgttccaacgttgctgaaagctgcagttgccttttgccctgcgtgactcagggtttcatgtgttttcttgtaggcagtggtagtctgcatgtcatgccagcttttgctgaagttctgttttaattcattcatcaggttcatgccgagtttttgttttatctcaactagatgcctttctttcgctgacaaaacttgtcgtagtgttgtaatttcgtcttctagctgaactaactctgcttttaactcttccttttcctcctcagagagcatgctagagaagtcagcactggctactgcatcttcgtctgttccttgcaacggttcagtctccaacaaaccttgtgcctgcgcctccatggtggctgacttcgagctgagggcggcggggacaccctggtgcttcccagagcagatggcagctgcgcccaggctcagaacgcagctggccccgccgctcgctcccactcctggcacgcgtgtcgcgagcgctgcgcggagggggttggggacgcaggcagccgccactagccgcttctggtatggaaggaattccggaccggtccag

SEQ ID NO: 433089 - DNA, 1126 bp, Homo Sapiens
tacatgtttggaaaaatatacatcgaattacacagacaggaattatgaccagttgtgtacctgctcaagtgggaacatgtttaaaatgtgacagtcatctatgaatactgaaatgtgatggtcaagtggtccatcatcaacacaaatacaaaatggaaatcattaaactttctggagggggccatttgaataacaatgtcaaggcctgggtttttcccagcgggattttggtcttcttatctggataagcacaggcagagatgggctgggtagtggccggtttctggatgcagctgcacgctggctggacttagcactgcagctcctcctccttggtccgccgggagcctcctgccaagctctgggcactggcatgggccgtggagctgaggacctcctcaaaactgcctccattagggttcgtaccgcctactttcgtcttgaggcttgtgacagttgtctcaaccctctcctcaaatgatttgaaagtaggagaattcctcatagcaggcatacttatggaatggcgaatggagtaaccgatggagtgagacctcatgtctccgaacttcttgctgatggccgttccaacgttgctgaaagctgcagttgccttttgccctgcgtgactcagggtttcatgtgttttcttgtaggcagtggtagtctgcatgtcatgccagcttttgctgaagttctgttttaattcattcatcaggttcatgccgagtttttgttttatctcaactagatgcctttctttcgctgacaaaacttgtcgtagtgttgtaatttcgtcttctagctgaactaactctgcttttaactcttccttttcctcctcagagagcatgctagagaagtcagcactggctactgcatcttcgtctgttccttgcaacggttcagtctccaacaaaccttgtgcctgcgcctccatggtggctgacttcgagctgagggcggcggggacaccctggtgcttcccagagcagatggcagctgcgcccaggctcagaacgcagctggccccgccgctcgctcccactcctggcacgcgtgtcgccgagcgctgcgcggagggggttggggacgcaggcagccgccactagccgcttctggttac

SEQ ID NO: 433090 - DNA, 1057 bp, Homo Sapiens
  misc_feature (956)..(988): n is a, c, g, or t
  misc_feature (1044)..(1044): n is a, c, g, or t
ggcttacataaagaaatatattataaatcaacaacactcatgataagtttacataagacatgaaaatacacctgaatcaccaaccgggaaaaatgattgaagagcttgaaattaagcctaagtgtaagtctctgttaagcttacaacattacaatagttaaatcgaaggtagaaagaaaatggtagacattgctccttttcctgtacttaccaccattacttaaagaaagttctgaataacaacaactttgagcctttttcattgttgtattcatggatgacaccaacacatactacttctgcttaaaaatcaaactcattcatcttgacttgttcccagaaacatgacacagaagatcattttttgaaaaagtatttttgtaattaccatctgcatacacctgagagactgtttctaacatgttttggtcatttttaatcattctatctgcctttctttgttataaggatctatttttaattttattcactcctaacatagaggggaagtgcataccttcaatgacgcaaagtaactagttaatgttgtttcagaataatatgcaaaagggaagggaggaaacagcacaaagtatatcatatttttacacatcagacaccttcaggaagaaaggacatttctcatcttagtgtgacagactctggccaatatcccctttgaacatctgctttcgctggttggtaaaaaagtgtcattttaaatttagtgttactccttcaggctattccctctctcttcttacttgcagggccaaagcaacgtctctttccaccttggtcaccttccaacaacgatttcttcggacgcctttgttaatcattcccctaaaacctctgcccggctccgcggaatcgtcccagtactcctaacatggcggccgagtcccctttgctccgctctcgacgaattcgagctcggccgatttggcctgatnnnnnnnnnnnnnnnnnnnnnnnnnnnnnnnnnatgcgccgcacacccgccagttgaaatcccgcatgggcgcctcaataattgagttnctattaaagttct

SEQ ID NO: 433091 - DNA, 1031 bp, Homo Sapiens
ttttttttatgggtcaatgattgtttattgaataaatttactactggagtaagaagtggcttagagtccagtgtaacatggtggctgggagtgtgagtggatgaatggggggcccgatataggaactggggcctcggggatgaggccgagttccatcctgccttcttccacgaccatccttaccttcccacccccaccgctcccattctgcagatgagaaaaccgaggctccgaaaggaaaaaccactgcctggattcccacgcctcttctttaactcatttgcaggtgagggcagggaaggaaaatcctagggtcagcattggggagggggggactctcctaaatttattgggcaacaggctgcaggtgagggggctgacaggaggagggtcggggtgtaataacttaaaaaccgtaggtgacagcggcagctcctcaagagacctttgcagaggggagggtgtggggtatttacaaggatttgtacaaagtgccccgcgccagcctggggcaggaagtgggggtttgagcgtgaggggacgggaggggaaggaatctgcctctctgacccccactcccagtcccccagattctccagtctttaggctcagcagctctccctgcccctgcccaaggcctaattttgagctgttgggaggaatggaagatttcctcagtttccctccctgcccctgccctgtccccaaagtctcctcaggtgccctcttggtagggcgagggaggacaggactggctggaggctccaggaaggtgccagctccccccgctgagccccctcatccttcttctgtgctgagcggccccagagaacagcagaggggacaatctttgcccccaaatataattcagggaaactgaggtgatgataaagggagaatcccctcctggccccttcccctcctgtagaagtgaaggcgacaagggagaggaagagtaagggcctgggaccgtggtggctcagagctcgaggtcgttggagatgcgggtgacgagggtgcggaagccaggg

SEQ ID NO: 433092 - DNA, 1796 bp, Homo Sapiens
tggaaaatgacaagcagtggatcacatatgtgtttatagcagatacaggagctggctatctagaagttggcagacagaactgcccaaaggcagagaaaaggtggatataagatcttcagagtcataaacttcttaggtgaaaaccgatttactaacttgcttcttcccatacctggaccatacataactagttaccacgataaagtaaggaaactttccattggagtagagaacttcttcagtttctatccatagttcaggttatttcctaaattctccttttttctcccccttttaaataacttgaatgaaattttggtagaagactgtattttagagtatatacttcatcaaggaatcaaaatgtataagattctgcagttcacacaaaagcttctgtatgcatatttctgtagtaggcacatttcaagccagtgaagaatttaaaatgcttagaaggacaaaccttttaagaagaatatttttatttcacatgctagttacctttattctgtttgaaactatcaggatagatgatgtaaaaccatttcttctcagacaaatgtttctttactaaataccataaatataattttgttggacaaattgaggatggcaaacttggcctatatgttcttctaaaatttgaagctgtgattaggattgagccctaagtgagctgcgttaatgtaccatcattagctaattttcaaaaggaaataaatagaggttcaaagtgtaaaaacatgactgaatgaggtcacgcagtcattttagtgtttactttctctgatgcacagaatttgtatcctgtgccaaattatgtcaggtaattggatgatgaaaaatatgttgattgataaaacagtatcattattattggatgtacttactgaatcctcagaggtagaagacaaaggctgggaaatttttaattttttgaagattaataattaataactaactagcattttatattttagcaataaaaacgttcacttaagaggccattttcatttcactgagagattctaggaataatgccttttttctttagtttttacacccaagacaaattttcctgttttgggcaaactacccatattttcaaacagttgttgtaccttgtattcaagaactactgtaatgcattagtggtctggcttcattttgtatgatgccagatccttaatttacccagcacaatcatttcagtagtttcctatgggctcctgcaaaaaaatgcaaacagaaaaccaccacaggaacagcccccttgtctgcctcctgttgctgaggtaagtagtcggctaaagaacacattgaagcgctctttaccaatctatatttgaaaactagaacttctgtagaaacacacagatcccgatcttagaagttgtacaggacaatctggtaaaactgacataattgtgatttattaacatgaattaaaatgcccaaccagtgcttcagtgtgacagtatatttaaaataaaaaagaaattaaaggtcatatactgtactactttcacaaagatcacacagttttgcaaaagacttgtcatatgtacaatgctatatatcaaatgagaaaagctgtaagcaattatatacgcaaaagaaatgcagtatttacagtttgtcaggagacattagaaatcatctatacattaaattacattttgcttgcaaataactggtaaaacaaaatgagccatgtccacaccaaaatataaaaatctgtattgcatttttatacctaagatgcattcacagaactgctgctgacaggaaag

SEQ ID NO: 433093 - DNA, 888 bp, Homo Sapiens
  misc_feature (121)..(197): n is a, c, g, or t
  misc_feature (294)..(309): n is a, c, g, or t
  misc_feature (411)..(469): n is a, c, g, or t
  misc_feature (579)..(591): n is a, c, g, or t
  misc_feature (601)..(768): n is a, c, g, or t
agaagaaaaaattattggtgttacttaaacacacaattgtgggggggaggggtgccacccggcccaaaaaaattattttgtcgcgggcacaaaagagtaggctttgtttttcccaccactnnnnnnnnnnnnnnnnnnnnnnnnnnnnnnnnnnnnnnnnnnnnnnnnnnnnnnnnnnnnnnnnnnnnnnnnnnnnngagtatttcgccgccccggttgtgtaaaagtctgttccaccccgcgggggagtgttttttggggggacaattcatcagcccataggggcaaataaannnnnnnnnnnnnnnncttaatggtttttaaagatccccccggggcgggtctcgggttagggttcccccgtgtggggcaacaccctcccaggtctgggggaatgttttctaaagaaannnnnnnnnnnnnnnnnnnnnnnnnnnnnnnnnnnnnnnnnnnnnnnnnnnnnnnnnnnggtgttcccctggggttttttggtggataggtgtcgggctccgtggctttttttcttcccggggggggtcgcccccgagcggttggtgttttcgggcggtttttttgttnnnnnnnnnnnnnccccccccgnnnnnnnnnnnnnnnnnnnnnnnnnnnnnnnnnnnnnnnnnnnnnnnnnnnnnnnnnnnnnnnnnnnnnnnnnnnnnnnnnnnnnnnnnnnnnnnnnnnnnnnnnnnnnnnnnnnnnnnnnnnnnnnnnnnnnnnnnnnnnnnnnnnnnnnnnnnnnnnnnnnnnnnncaatagaaattaggtagatccatttattttttaaatacaagtataattttggaaggggtatttgacaaattcagcattaactgccaactctatagacatgttttaacaaaaagcaaaaca

SEQ ID NO: 433094 - DNA, 1214 bp, Homo Sapiens
  misc_feature (480)..(493): n is a, c, g, or t
  misc_feature (591)..(605): n is a, c, g, or t
cttatgtggacttcttttaaacatttattaaaaaagcaaaatgtatgttcatctcaaatctaacagttaaaaatggtaaagcaatacaaacaatgtgttactagcagcatccagtcgttagaatctctcaccctgcttctcggtctgatctgtgcaagctcagtctcttctgagcctgcagctacctccatccctcatcgtagtgcaggccaaaccaaattttataaaattaacaatttaaggttaaataagcttaaataagggtgttaaatacaagacacttcatcaaagcttctgtacaaagataaacaaatctggcattgtacaagtggttccgctggctcacagcacacagggaagttctagtgagtaagcagattcactctcatttctttccagcagagcaactatacaaaagtgaactaagagttgaagtgactactgaccactcggtgagccatttacaaggcatatgtatcnnnnnnnnnnnnnnaatcagaacactgttaatattcaggcaccatttgttcctgcaaataaataagtctctaaggtaactgcatctgaactagtgttaaacacaacagtgcnnnnnnnnnnnnnnnaatccccccacaaagcttttccaactatgtactatgcctcctttcttattgctatggtaatgtggctgtggaaataaaactactgtacatccaaaaaaatagagcacctttaacattaaagtatatgtctgattatttgttctcatgtttattttacaatactaaagcccaaactatggtaaattgctttacatctctaccaggtcacctgatatacaggaaataaaactcaactatcttccctcttgaggtaagcccaagccagagcactgttttagcagagtctaaaagaaaaaggtctcaactgtcgccagggtttacattcatcttcacaccaggagttacattcattcatcttcacatcggcgctgctctctgccgtggttaccgagaaagagtcgaggctccctatcctgctgtggtgaatggtgctacacagaatggaacagcaaaaacatctacgattggttgaaagcacacagaaaaaccacatgtttgtgacttcaaagggacaaggggcatttcccagtggtcccttgatgaggtgcggattggctaagattttttgtcgatggtggtgaaaaaccattctgtgaatttccgcagctg

SEQ ID NO: 433095 - DNA, 973 bp, Homo Sapiens
ccgcggaaagagaaacaactaacggctaggtacgaggcctggtggtgaatcggcacgaggcgctggatcagtccacggcttggggaaaggcatccagagaaggtgggagcggagagtttgaagtctttacaggcgggaagatggcggactggagctgaaagtgttgattgggaaacttgggtgattcttgtgtttatttacaatcctcttgacccaggcaggacacatgcaggccaaaaaacgctatttcatcctgctctcagctggctcttgtctcgcccttttgttttatttcggaggcttgcagtttagggcatcgaggagccacagccggagagaagaacacagcggtaggaatggcttgcaccaccccagtccggatcatttctggccccgcttcccggacgctctgcgccccttcgttccttgggatcaattggaaaacgaggattccagcgtgcacatttccccccggcagaagcgagatgccaactccagcatctacaaaggcaagaagtgccgcatggagtcctgcttcgatttcaccctttgcaagaaaaacggcttcaaagtctacgtatacccacagcaaaaaggggagaaaatcgccgaaagttaccaaaacattctagcggccatcgagggctccaggttctacacctcggaccccagccaggcgtgcctctttgtcctgagtctggatactttagacagagaccagttgtcacctcagtatgtgcacaatttgagatccaaagtgcagagtctccacttgtggaacaatgggtaggaatcatttaattttttaatttatattgcgggcccttgggcctgactacacccgagggacgtggggtttgacatcggccaggcgatgctggccaaagccagcatcagtactggaaactttcgacccaactttgatgtttctatttccctcttttctaggatcatcccagacaggagggagggg

SEQ ID NO: 433096 - DNA, 908 bp, Homo Sapiens
  misc_feature (201)..(201): n is a, c, g, or t
  misc_feature (379)..(389): n is a, c, g, or t
cttgtggtgggcttccttcccttggggggaaaaggaggcttcgccacttttttcaggcatttcgccagttttaaactccagacccaaagggggcaagaccgtggaaggcatgccgggggccgggaacgagtggggggaaaatgaaagttcttgaaaggcagacccccacttctggcccgcttctgcttcagcacccagcgncgggtggcgcagtggcctgagacactgtgagaagccggtccagggcgaacgagagtcatctgaacacggaggaaagtggctggcctgaccccacacacctcccacagcggagcaacggcatgccgctgcctccatacctgcggttcacgcacacgttgtgcattttctggttaaaagnnnnnnnnnnnggcagctggggccgggtgctgtgtgagagagcccagcacctactggcagctgggtgggcgacatccagagctgcaccagcccccgtggctgccacgtgttgcagagctaagtgactacatgcactggccaggcctcagaggagccgtccctgtgctcaaaggaagcagaggatttgggattggaggcgccaggcagccagtccccatgcccaggaaacccacgtttgtggcatcagccggagagttcatcgggagtagagccgtgcagcggcgcggttatctgaagctccccacgtggatggagagagaagtttccggggctcggggccgggcaggcgtctctgcactggagaggatgtagctgctctgctcatggagggcttcttggctgcagagacacagacactgtcattgactcatggatgcagtgggtgtcagggtgaggggttcacgaagaccccaaaatacactccaattttataggccaccaggacgtgcactttgcaattgcacagacag

SEQ ID NO: 433097 - DNA, 848 bp, Homo Sapiens
  misc_feature (771)..(807): n is a, c, g, or t
ggccactgcatcaataccttccatgttaataattttcacagaagtcaaatgcaattttagaagatactctacaaagtatatgcacatatatttacagataagtttaacaaacttccaaccttcagctttttgtaggattttcatggcctggttcagctgccttggcctatcagtgcacatgcagtgttgtagcacagctcatgtgtgccttcttggaggcccaggttctctggaaccactttttcccaattgctttgagctgcaacaactgctgaaaggtttgttttcctctcctcatcataatcatcttgggagtttcggacgagatctctatacactgctaagcattcatcatagcgttccgaacggtataacacttgtccataaagctccttcagtttgtctgtctgctggttggcactttctattgtcttcaaggcattctcaattctgttcagcctgtactcgcaatatgccttttcaaaggagagagagttattggctaacactttggtgtgagtattgatgacattcaaagctccttgaaacttccattctggataaggcataccactttacaatgcagggcagttacgtcatctttgttgatctgtagtatcttattgacggtcttgagagcgcgcgtgaagtcgccgttctggccataccggttcacttcactccacagcgcaggtactgacaccccaccgctgccgccgctcgccatcttccgctctcgacgaattcgagctcggccgatttggcctgatnnnnnnnnnnnnnnnnnnnnnnnnnnnnnnnnnnnnncggccgccccgcggtgaaacccaggcccctatagatattcc

SEQ ID NO: 433098 - DNA, 2284 bp, Homo Sapiens
ttccagtccctccataatctgtacaaagcctatgaggccaacccagtaggcccatacctcactaggcaagactttgaggaagatgtttcccctatttgaaacacaagaaattatgaaaaatatggagatgaagagggagtagttctgtgcttcttgctgtgttacctttattatattccctagtgtcactgacactagtttaaaaacagcctgcaacaagaatattctcatcaccagccaccttttccacctttcttctttttctgttgctgtttcttttttgttgctggagcccctgcaggtttctggtgtcttgggggtatgatgttacttgtagaggcagatactgttgcagcactgccaggtcttggggaggtgggtgggctgctcacagttttactggcatccagttcagatgaagctcctgcagttgctccctgggtcccttttccaatctgatccttctttttacccttctttcttccccggtagtaagaacgttctcgcattggcagccatctttctggatctggggtaacttttgggtcataattcttaggcaattttcccttctttttctttttcttctttttcaaatctccctgtccttgttcctttggttgactatctccagtaacttttccacccttcttccgaatgtatgtagcaccagcagaattttcaagagcctcaacatctacttttagagacatactatctgacgatggcaagtgtttactaagagctttggctttctctggatctacaagtgagtaagcagaaataagctgtgccagggtgtgaatatcttttggattttgtttccacagctgttgtaggtcactaattgcctccttcttccgcccatatttgagtttgaagtttgcagcttctcttatcaaggacaaatgagcaggagattttggctgatggttttgataccactggatagcttgtgtgaagacctcaatggcactatcaatatcttcttcatggctatacatggtaactaatgcagataccatgcctggtttatgctttaactcctctatgcttctcaatattagacatgctttagaaatattaccttgagaaattttcaactgtgccatggtcagcttaatttcagctgcattttctggatgctgatctgaaaattcctgaagcagctctattgcttttgtgtgctgcttttcacggcagagctgggcagcttggattaacacaggtaagagatgctcgggactttgggactgtaaactggcagatattttgcggcattgttcagcctggtttgtgtacatagccaagtaaagcttttgttaaattcctatagcttgtagttgtttccttggaaagcttaaactttactcctttcgcatttggttaatttcactttcttcttggagtcaaagacattttggtccttgttaatggtaatgatgttatttgcaattacagctagtaatccccacatctgttggttttagttttattatttgattgtaaagttgcaaagcctcctctgttcgaccctgaagctgcagaatataagccatctgaccatgaatgatggccagttctgcctgtgggtcttcctcagtcccatcagtgtcttctgataatgaacggcggcaaagatcttcagctttttgtaggattttcatggcctggttcagctggccttggcctatcagtgcacatgcagtgttgtagcacagctcatgtgtgccttcttggaggcccaggttctctggaaccactttttcccaattgctttgagctgcaacaactgctgaaaggtttgttttcctctcctcatcataatcatcttgggagtttcggacgagatctctatacactgctaagcattcatcatagcgttccaaacggtataacacttgtccataaagctccttcagtttgtctgtctgctggttggcactttctattgtcttcaaggcattctcaattctgttcagcctgtactcgcaatatgccttttcaaaggagagagagttattggctaacactttggtgtgagtattgatgacattcaaagcttccttgaaacttccattctggataaggcataccactttacaatgcagggcagttacgtcatctttgttgatctgtagtatcttattgacggtcttgagagcgcgcgtgaagtcgccgttctggccataccggttcacttcactccacagcgcaggtactgacacccccccgctgccgccgctcgccatcttggaggagacgaggggcggggcggggagac

SEQ ID NO: 433099 - DNA, 1910 bp, Homo Sapiens
  misc_feature (55)..(63): n is a, c, g, or t
  misc_feature (160)..(168): n is a, c, g, or t
ttttttcactgccacaagcggcccccccatggggtgtgggtgaatgaaccccccnnnnnnnnnattttcagggggttcccatgcaagggcccgttttgttgtggtgcgggtgttttcaatggtgggggcgacagaaattgcttttaaattggaacttttnnnnnnnnngggtatccgtcccatatgtaagctccccccagcgcgcccgtgggtgccccttaaatctttagaaattatgggaagcgcttcccccccggggggaatttgccccggtttgtaattggcacccccccaagtaaataggaccctctcaagagaaaccttcccatttttgggggattttttgttctcaaggaagatcccactctcgggtttggcgcgggccgcgggggggctttattcttaatgtcgggcgggagagattcccaagagccgcttagttccaagggccccagggagtttttcgttagggaaacacaggcttatgggccccatgtttcccctttaccctaacaggggccccgggggggccaaaacgaaatggttttagaaagtttctcgagggcccgagggcggccgcaatgtttattcgcccattgctgtagtgcggttggtttaatagtacatgaggttttattgactacattgcaagcaaaagcatgaagaagaaacaatcatttaaaaacaccaaagacccttacatagcaaaggttaagaaataaattaagactcctattgggttgtgtctgccagggaggatacaggcctcattcgctccggtccttgggttcccggtatttccactggatgtaatcaaagatgtctttttcactatccactggcaggggttctcctgcaactccagtgactcccaagggacggatggtgtactcattgattgtgaaacccttttctagggcatgagccctcatattcttattgaaaatatcactcccagtgaaatagagaacaccacagtaatactgatctttgggtatcaacctgatatcaattcttctgtgtggatattctttttcatcatttttactgggaagctggcaaacacccatgaactttgtctcaccctttgacagggtatctgtgataaaatgaaccttttgtaactgctccacaacctgatgtaacagttttggctgtttggttgattctgaagtgaagctgggatgggtcaggagaacatccatgtcaccactggactctgcacctcttctgaaactgccacagactgtagcaatgtattcagaatccacttttttaacttcatttagtacaatatcttgcatttgtaacatctcttcacgaggaattcttttttcaaagtccccaaaatatttcagcccaattcgctgatgatggttcaatttatcttcattttttctgagatcttctagtgttttaattccttcatctacaaacttccttgcagcagatggaccaatgccactaactcgagtcaggaaattgatggatgaactcgtatcatcctgccgaatcttttccagtttacgtaattttccagttgctaaaaactcatcaatcttttcagcaatttttgttcctactccaggcaatttcttagcttcagctccactctttattttgtgtgggtattttgctataacagatgctgcttttctgtaagcattgtacttgtggatagcttggctcacgttcttctcaaagtttgcgagttctgtgagcatgtcggtgattcccccgttgagagtctcctgcggcgccttccgtttgctcatggcggcctgcacccgagaaccccagagtgttcagaaccagggactagagccctctcccagcttgaaggaggtaccaggacttggagacgggagcaggagcaacccagctccggcgcatcccgggaattccggacc

SEQ ID NO: 433100 - DNA, 724 bp, Homo Sapiens
  misc_feature (135)..(135): n is a, c, g, or t
ttgtttgattctgaagtgaagctgggatgggtcaggagaacatccatgtcaccactggactctgcacctcttctggaactgccacagactgtagcaaggtattcagaatccacttttttaacttcatttagtacnatatcttgcatttgtaacatctcttcacgaggaattctttggtcaaagtccccgaaatatttcagcccaattcgctgatgatggttcaatttatcttaattttttctgagatcttctagtgttttaattccttcatctacaaacttccttgcagcagatggaccaatgccactaactcgagtcaggaaattgatggatgaactcgtatcatcctgccgaatcttttccagtttacgtaattttccagttgctaaaaactcatcaatcttttcagcaatttttgttcctactccaggcaatttcttagcttcagctccactctttattttgtgtgggtattttgctataacagatgctgcttttctgtgagcatgtcggtgattcccccgttgagagtctcctgcggcgccttccgtttgctcatggcggcctgcacccgagaaccccagagtgttcagaaccagggactagagccctctcccagcttgaaggaggtaccaggacttggagacgggagcaggagcaacccagctccggcgcgaccggcggaacaatggttgcccccgatggggggcggggtgcacccgct

SEQ ID NO: 433101 - DNA, 728 bp, Homo Sapiens
ccaaaggacgcatgagggatgctactagctgtgagcatgcatatgttaggccacttgtttaggccaagtgacacgacccacaaagtctgcaggaagggtggtactttgcaagcagccttggagttcacttgtaaaggaagcctggtgtgcatcttttgtaaagcagagcaggtttttgtaaagtggctaactcatctcttttgcagactttgacgtctacgtgaaagcttttcttagaatacagcccactactcagagaaactagattgaccaagtgcactgtgaaaacaaaacccacacttggttcttcattcacctcattctactgcatgttggaatgaactctggaatcaggtagaatacttccgcttgtgggactgtggagggagactggaaggacctgtcagtatacaaacggtcacagaatcccatctaacatcaagctgttttagttgtcttgttgaagattgtaatgatctcagtttgataaatggcattgtttcacttttgttcagaaaaacatttttaaaaagtgagaaaaaatacttgaaatatgatagtaccagaatgttagaacttactgtgtctttgggactggccaatttttatagctgatgccctaggacttaggatctgtaatagctatgtagaggtgtcacagaaaatgacttcctatttaggcttgatattttcgaccagtgctatgtgaaaattccaggccttcaaac

SEQ ID NO: 433102 - DNA, 1506 bp, Homo Sapiens
  misc_feature (1389)..(1418): n is a, c, g, or t
tagaatatcttcacctccggttagcagatgggggaggtattttaaagcagaagagccgttacctaaggacctattagtcttcccaaagtagatgactgtctacttgtagggccagatcaacttctgaaatcaaagtttcactttaaagcagttttgtctcagcacccaatggttcaacataaactctctgagacactttgttggtacagattttaaattacaagcttgatttgataccctcaaatacagttcttaaggaagattagttacaaatagttgtcagtactttcaaatgacagaaaaaattacattttagtaaaactggatgaatttttcatgtgtgaaataacaatcctttcaccaccaggtggaattactccagttcatgcaatagataactatgacatttttaaaaactgccctaatttttctagttgcgatttcatgcctattgtaagtcaaaacatcgttatgttcccgagctcacctcaccctccctgggaagtggcgaggacacccatggtttctctgagacaccactgggcccctgcttagcaagctattgtctcagtgctttcctcttgctgcgaaggtccccaggagatgttgggttcagaggaagtggctctggtcgcctatgggcaaatactacaccagaggttacacaggatagagacccaagaggtgaacaggagggaagttttaacttattttgacataaaattggcaaaaaataggcatcaccaaatttctgtaactggaaattgaggataaaacagagggaggttttgtctatgatgaggatgtccatcacagtagaacttgtgaatagcttttatagaaccacttaattatagtaccgtcaacattttacatattttacatacaatttgaatacaaattcttaaaatttataatagaacattaaaataatcttctaataaaatcagccttaagtataaggaatctaaatttcattatcttgtacatttctaaataaatatctttgatctataacccttgaaaatattacagtttatggtgacatgatagagacaagtcaaacagtattataagtgaaaatgaaacatcaatttaaaatgaacaagtgtaaaaacacgcggaactgaaattatagaaaatcaaaacactaaatacacagtaattaaatatctagcactggaatcaccaaatgcatgcgcagtaacacactttcaactgatataaaaagccctttaagattcacataatctaaataaataagcagaaacacaaagggaggtactgtgccagccagtaacaactagaaagtaagttctccctttttctttcaaatgatcctaacagaagacaggagataaagatcacttgttaaaaactataattcannnnnnnnnnnnnnnnnnnnnnnnnnnnnnaatgctgcccgataaagtcaaagcaaggcttcctaaatgttagaccactacacctcagataaggaaaggccacctagatgtctaatag

SEQ ID NO: 433103 - DNA, 907 bp, Homo Sapiens
  misc_feature (181)..(181): n is a, c, g, or t
  misc_feature (360)..(360): n is a, c, g, or t
  misc_feature (757)..(757): n is a, c, g, or t
agctgtgtaatttaggctttgcgtattatttcacttctgttctccacttatgaagtgattgtgtgtttgcgtgtgtgtgcgtgcgatgtgcttccggcagttaacataagcaaatacccaacatcacaaagatgatctttcttcttttaacttgatgatgatgtgcaggcacaaatctttngagaaggcttaactgtggaatagatgaattctagaactcttgaccctgcaatgagaaactgtgacagatctgtgtcaattaacttgattagccagaaattaatcacaggcctagagaccaaagaaaaagctcccctgagtctcagggcaacagttttgtcacggatgcaaagcttcctngaaatcatgaatgctggactcagtttggcaaacgcttacacctattatgttctgagattctgagaaccagaatgcaaacttaagtaagatacagttcccactgtaggtgttttaatcctggtcttatatagaataaaccagtactttgctgagtgaaatcaccatatagaattcagtattaacagatcatgcattcagatgcttgaatgtgcattcttgttgtgggcttgatttagatcctattgcggggtcattacgcgaaaattcaatcataccttccatagacaaatgtctgatttttgtttaaatctgtccgttagtggcctttccttatctgaggtgtagtggtctaacatttaggaagccttgctttgactttatcgggcagcattaaaanaaaaacaacaaagaaaaaccaaacatgaattatagtttttaacaagtgatctttatctcctgtcttctgttaggatcatttgaaagaaaaagggagaacttactttctagttgttactggctggcacagtacctccctttgtgtttctgc

SEQ ID NO: 433104 - DNA, 691 bp, Homo Sapiens
  misc_feature (56)..(56): n is a, c, g, or t
  misc_feature (66)..(66): n is a, c, g, or t
  misc_feature (72)..(72): n is a, c, g, or t
  misc_feature (78)..(78): n is a, c, g, or t
  misc_feature (83)..(83): n is a, c, g, or t
ttactgtggttggacaacacagatacaggataaagttctattggacagcattgggntaggagaagnatgtcnaagccncccanatgtcctgtaaagctttctctccagacttacctgctgtcgccataaacttagtcaaggccaccatgctgtttctcagccctgcatttgttcataatgctactgccaaggaattctctctcctccaccttgtccaccatccacaagccaggctgcttcccgatgcaccttttctcctggggagtgcccagacgagcgccatctgctcctgggtcagaggagtccctgcagagtcatcgacttcctcatttccaaaagccccataggttgcactggagtcccgaggcgaagcgccgacacttcatctgcccgtcacctcccgatttttgcaatgtgtttcttctgaacaagaatgtgtgccctggaagccaactcaagtcccagacctaggtttctcgacatttccccaagtcccacctgcgtcaggttgtaggctccggggccagtccctttcgatccgcatcaaaaaacctggcgatcccctttgggcacaagagctcagggcgttggtccccgcgatcgcggaagcccacttccagaaaaactcgaccacataacagtaagcttcaggggtagcaaaaaggggcagaagggtttgcatcccctggcg

SEQ ID NO: 433105 - DNA, 1126 bp, Homo Sapiens
attcccagtcatgcttttctgttgaagaccgatctcttggtcgaagcggcgggactggaggtggaacatgtgggggaggcactggggaggacgcatccttaaaggcattggggctgttgtcggagtggcttttggaaagaggtctgtaggtttgggtctttgcagcagggtgtgactgagcactgtagggtgggttgtacagacctgcattgtatgtataaggagtattatacatgtctgtgtcatcatccggcttgtgcaccatgtgaattcgcttaaacatcgtcttgtaccagtccttgggccggtcgactgtcgttctaattgctgtggggattccggattcatccacgggcaccgatccttgggtcatgcggggctttgatgcttgtcactctcttctcttcctctgaggatcggtacagggggatagagcctgctggtggttgccatccagagactgcgcatgctggggatatgtgtctgtggaatcgagggatgtgccgtgctgcatgacaatgctggagttgagtgaggctgggagagaatatgctgagggggaaaacggcctctgatagtaactcatgggactcacggcacctcctgagtttccattcactgttatctggctctgagttggtgatcttttatcttgtaggtttggtcgaacgcttctaaaaccttttgctgcaagagaggaatatgtagcatctccgttcagtgtctcctgattgccatcattgtaagatctccaagctgagtctggtgactgagaatcacgccctgtgttcattttcaccttggagagtttgttattaaagtcttcagttttcctacaggcagctgagttcaacagttgctctatacagaggaagtaggagtcagtggccttttacatgtagagattgtttatttagccctttttaaaaggtcttgaactccagaggtttaagattaagtccaatccaagtgtctttggatgggcacattccagcacaggaaaatcgctgtcttgtcggctgctgtgcagaatgagttgcttgggcaggtattcctctattctcagctcccgggtctgccttgtagccgcagccagcctagggagcatttacggcatgtacgtggt

SEQ ID NO: 433106 - DNA, 1173 bp, Homo Sapiens
tgggtggcgaattcggcacgaggattttacttatggaaaacagtgtggcatattctgctgagcttcgccctggaagaagcctcttttatacatctcttcagggaagagagaagcaatgggcatgttagtatacaatgatcacagccacgcaggcctgcaagctgccttttggacaggctgttgactgccgttccaattagctgattggagaatgtggaatgcagagtgataatgctgcatatctgctatcaggcagcagcaaaggtttttgtcttgggaaggcaagctttccctgcaatattatctcagcagctccctagctgcttaccctgaaaacgagggatccaaacggagggtgttgcactctgctaacgctggtcctgtgcgtggctgtggcatatgagcggcaggtctgaaaaagcaggtgtgtgctgggacgggcactggactggaacgcaggcggacgctctcgggtttacctgcttcctgttaacagattgtgggctcccagggcatatgtctgcacgctgaggccgaggcggagaaggggcttcctgagcgtcccagtacactgacagagacacttggattggacttaatcttaaacctctggagttcaagaccttttaaaaagggctaaataaacaatctctacatgtaaaaagccactgactcctacttcctctgaatagagcaactgttgaactcaacttgcctgtacggcgtgattctcacctacccaaactcagctttggagaactttacaatgatgggccaatcaggaaacccttgaaccgaaaatcctaaatcatcccctctccttgaaccaaaagaatttataaaaagcgttccaactcaaacctttcaagaaaaaacaaacctcccatctccaaacctaaaaaaacctcgcaacaggaaattcccagacacctgccccccaaccccacttgaggtattgaccccaccgcccgctctcccccctcgccttatattctaccccatctgtccaccgcaaatcacagacaatagcgtcttaatatatgatcaccactgccccttcaaattccccacaacaacccaattccctaattatgcgactactaccccattcacacgcacctaacaaatatgtcaatacatcctgcccttgcgactgtatctcgtaaacgataa

SEQ ID NO: 433107 - DNA, 873 bp, Homo Sapiens
agcgtgctcatttttgtatttttagtagagatggggttggccatgatggccaggctggaaaatgaaacataatttcacaattattcctttttccaccttaaataataagagtagaatactttctgtgtttttatcttatacacatgaataaatgctatggcttatcacagttacaatgtgttttctgaaagtaaagattattttaccttgaaattacaaaaattattttcagttttccaaaattctatcatctttaaacctaaataattcaatttcatggatgcacaaatgtttattgagagtctcatattcatgcttttcttcacagcactataaagttggacttggaaaatttggacagccatttgccattgtaatttttattcttttttctcctgattatttgacaaaacttgtatccacattgtagctgttcatgtgtctgcttctattgcatattgtaaaattattaactacttcccaaaatagtatttctctcagcagatatttctttggtactaccatgtattgtgtaacttttgggaaagtaaggtggcttccctgctctcagtgaagcattttattaaaagaataattataattaaaaaaacacgatacagatcagtgcatatagtatattactaatagtatgctgttaattgtgtaagaaagaaaggaaattagaaaacatatttgcataaataaaagctagacaaaggctaagaaactaatcaggtggtttccctggggtagtaggataatggggaacagtggggctgggaccgggtgggagaaagagttctcagtggttcctttctatacagttttaacttttgaaatgtgtgagagtgttacttactgaaaactgaaagg

SEQ ID NO: 433108 - DNA, 1805 bp, Homo Sapiens
ttcctcctcctcttcttcctcctcactgtctgatgagtgggtagaggcataggagccactctggtcgtcttctaaggacaggtcactgtcggagtccgtgtcaggatcatgctgctggtcttgaccttccaggaacaggctgcctggatcccccaggccagggggcccttggccagggttcagtgcggactcctccctcagcaagaaggggatgtagctgggctgactcttgcccgagcgactggtgctgtgcagagagccggccgagtctccgtagggctggtacagccgcccatctgcgtaggggctggggcagttgtaggacgaggtcagggtggacttggtggtcagagcagggtcagggctgggcttgcggctgcaggcaagcttgagtgctttccggacctccttgctaagcaccacataggagaggaagatgaaggggccctggatgcaattgcaggtagcaaagaggtagtggaagaggagggtgtcgctgttgacagagagcagtgccagcagccacgtggcgctcagcagcaggaggacggcgaaggagggctgcaggcccgagacaggacctttcttctcaaagccctgccgctgggcagcacaggaggcccgggccgccaggatgtacaggaagacactcatcgagacggcaaaggccaccgggccagcaaaactccagatgagcgtgtcatagatggagagccagcagaagtcagggttcccgtagccctcggggtccaggcccacggctagccctgtgatgaaggcaggcacgccccagcccagcatgtagtagaagcgcatggggccggtgttgacatcgcgcacctcagtgagtgcccggtacaggtgcaaggcctccagcagagcccaggaaaaggtgcagaggtacaggaagtgcagcaggatggcaatgactgtgcaggcaaaagggaggtcagcctggttgattcccaggaggaagaccagctgagccaggcccagggcagctgtcaggttacgtcggatgccgtgttggttggagcgcaggatacgcaagagagtgaggaagaagaaggtgagcagaagggcagccaaggtgacacctagagccacgtatgtcagtgtcttcagtggcaggatctccccattctcccgccgagaaacgtccatgagcacagcgaagctcgtcatgtggttgcactggcagctgacgtggctctcattgcggaagacgacttcacagcctctggccgaccagccacctgtgccactgaccaggattgaatggttccagaagacacagatgggcttggtccgctcctctgtctccagcaggcggaactgcaccgtgacgggtttgtccagggcccggggcagaagctcctcatcatcatggacgctgatgctcaccacgggtgtgttgatgatcgggcgtttggggactctcaagctgcgcttgtcagggtcatagttatgagtcagtagccctgccagggtgcggtagatgatgacgctggccacagcctcaccctggctcagctccgggtgccgtcgctgtcgccgtgccagctcctctggctcctgggcctctccggggcctgcgggcctgaccacggggggcgtctctctgaagacagactcaggtagaatgactgttgtctcaaggtccgggggctgctccccacgcagggcctcgtagcggggcagcttggccccagcaaagttccctttgtccaagcgcactacggagatgacaatgttgggcgtgacgatggtgaaggggcttaggtaggtgtgccgcattacgcttg

SEQ ID NO: 433109 - DNA, 543 bp, Homo Sapiens
cgggggcacagggcctgtgacttgggcaccccccgccttccccaggccggtgaggtgacatcctaaaggagccacgaagcctgaggtccatttttccttgctctttatttccaggcacatgaacttcccagccctgccgtggaagctgcctgccatgtcctccccatcctcaggtggaggcttctctgttgaggggcctcggagaccgccccccagccctcagcggaccatgctggctgggagctccgccctggggcttctgctctgctcaggtagggggagtccttccacggagctgtggccgcagcaggtgcactcttgggagtcggggaggcgggtggtgctcatgcgtgccagtgagggaggggcctcgccaccctcctgtactgtgagcctggccctgggcagccctctgccctggccagagcctgaccgtagccacgggctaacaggctctggaaaaatttccccaggactgccgcaggctcatccgcaggtagactccagaaccacggcccagcaggtcacacgtgtggctgtggc

SEQ ID NO: 433110 - DNA, 828 bp, Homo Sapiens
ggtaccctctaccacactggctctctcctgggaaaaatacacatgcaggagtgttgtcgaaaacaatacctaactggacagcaaacagggaaggccaacattatacctagattgagataatggctgggggcagtgtcaaaggggacgcgactggttccaaagctcgagaagaccatggggtcacttgggctacatgagaaaacgccccagtgtgctggttcatcattccgactcctgcctgtctcttcccgtccaaggaacatggaccctaagtcgtgcaggtgcagatgaccatgggcagaattaggggccgtggcacaaaagttcaccgacacgggagttccacagaaggtccggtggatcttcgcaaatccagagacatggcaatgggacccagggaattagagcctcacaggcacctgggagacttttcaggcataatgcctagagtagcaagacgagctgaaaaaggagccaggcactgaaggacaaagcggtattgactttcttcatctgtgtttcccagtgcggtccaattcactgtggtagaattcatgtatttattttccgtcggcttgtatttgcaaacttttgatgttattgatttttggttggagagtttcggtttgaaaaagtagatattctgaagatggaggttgtccaagattgtatctcaaggtgagtctacttgatgccagcgaagcatactttgacatataatgcatatgtttgaattatattttgtcttttttaccacattttaaaaaatcacttcgtgaaaaatgtcagagttagatacaccaatgttaaatttctcatcacatgtcc

SEQ ID NO: 433111 - DNA, 1643 bp, Homo Sapiens
acaagcagcccaactgctgtgcagttggggcagaacctcagatcacaatcagaaaaccacgctcctggacagtggttctcaaaatagtctctagaccagcaacacagcatcacctggaaacttgctagaaatgttaacgttcttggtctcccccaaaacctattgaaccagaaacgctgaggcgagatctggcaatctgattgcatgagccctccaggtgattctgattcatgttaaagtctgtgaatcacaggcctgagaaaaggtacaatttcaaatcagaagtaaagggacaaagttcttccagctcctatggactagtcttcagttcccatcgacacactgacgctggatccagctcctgctgtgggcagtgcatgttggcactgcagggaggagaaggccccagagacccgagaaggaaggtagggaccgtggcttcctctttctttattgggcgctttgtagatgtcacgcaggtctaaaagttacactgctaaataattatttaaaaactgaccaggacgaaggtcctggtccggagctccaaaccagaagcaaaaaggaatcggggcggtgggctggggggtactcctccaacatcaccaaaacccagaaaacgaggatcctaagctcctccgcaggccaaatccagggcttgggcccctgggctaacccgcaggtgcctctgactgcatcacactcagagtaagataaccagcaaggggctggagggaacggccagccgagtccagacatggacagatgtaactggaaggaggacaggaaacagacaggtactgtccagctgtaggtaagagagtgcagctaaggcaggttgaggggcaggggagaggctgggggagcagtattgcagcaatgcaggagtgtagccccagggtcctgtcctgagcggctggtcaggttagcagctgttagttcccagatggagctcctgacccgaacccaggtagagggctcacacgttgtgggtcctcttggtgagctggggctcctcatccaccagcttggacttgaggtgctccttgtaagccaggatgtctccaggccacttggtgattgtctgcttctcacagacccaaatttcctgtgcaacctgctgaatgagtctgaagtcatggctgaccagcatcataccaccctcaaactcattgatggcatctgccagggcgtcgatggtctcgatatccaggtgattggtgggttcatccaggaagagcatgtgggggttctgccaggccagccaggccagacacactcggcacttctgcccgtctgacaagttccggattgggctcacctgttgtttcccagtgagaccgtatcgcccaatgatcttcctcatttcttccttctccttgatctctgggtagcacttcatcatgtactccaaaggtgagagatctaagtccagctgctcttgtaaatgctgatggtaacgccctatcttgacatgagagtgttttcggatcatgccatctgtgggtagtagctctccagttagcagcttcagaagagttgacttccctgctccattgggccctaaccagagccactcgtgtgtcaaggtcaattccaaattctagattattgtagatgcaaggcccatcttttgtatactg

SEQ ID NO: 433112 - DNA, 641 bp, Homo Sapiens
tttttcttaagtgacccacttaggaccaccaataaagagaaggtgacagctgcctgaagcaaaggaagaaggcttttctcattccattcactgggagggaaggggatggagtattcaatgcttgtaattgatgcaccctcagcaatcagtgtgcaacagcaaacacaagggaaaaaaaccagtgtacagtactagtgctgtttaaataacacaccagattatacattgcagcataattaaaactacacacacattcttggtacatgctggtatataggatctcatacacacgttagctaccatgccctcacacaagtagttgcacacactcacacagatacacttatcaccaacagtcagtacgctgcgcattcatttccactcacagtttctgaaggctctatataaggtagattgctatatcatctgtagctaccactttttataaaagcacatgctaaaagatcacgtccactgtaatcttgcagcaacactcgggaatgatcacacaaaaaccagggaatgttagtgcacacacaaaattaagctaaagaaaaagtctttggagttccaatcacacgggttagtataacaatcccataactgtgaagactaattgtaagcttttatagttgattaag

SEQ ID NO: 433113 - DNA, 2251 bp, Homo Sapiens
  misc_feature (660)..(688): n is a, c, g, or t
  misc_feature (2180)..(2192): n is a, c, g, or t
cttttcaccggatgctattacaccgggtagctgcctattttgggatggaccacaatgttgatcaaactgggaaagctgacatcatcaacaaaactagtaacacaagaatccctgaacagaggttctcagaacatataaaggatgagaagaatacagaatttcaacagaggttcattctcaagagagatgatgccagtatggaccgagatgataaccagatcagagttccattgcaggatggaaggaggagcaagtcaatagaagagagagaggaggaatatcaaagggtccgagagagaatatttgcccgagagactggccagaacggatatctaaatgacatcagggggaaccgtgaaggactgagccgcacctcaagcagccgccagagcagcacagacagcgaactcaaatccctggagccacgcccttggagcagcacagactctgatggctctgtccggagcatgcgaccccctgtcaccaaagctagcagcttcagtggaatctctatccttacccgaggtgacagcatcggcagcagtaaaggcggcagtgcgggaaggatctccaggccaggtatggcactaggtgccccagaagtgtgcaaccaggtcacctcatcccagtctgtccgggggcttctcccttgtactgccnnnnnnnnnnnnnnnnnnnnnnnnnnnnnacttcctgctctcccacccacgcctcagcaacagccacccttgaataatcacatgatctcacaggcagatgacctcagcaacccctttggacaaatgagccttagtcgccaaggttctactgaagcagctgacccatctgcagctctattccagaccccacttatctcccagcaccctcagcagactagcttcatcatggcttccacgggtcagcccctccccattccaactattccacctctagccatgcacgacctactcagcaagttctgccaccccaggggtacatgcagccccctcaacagatccaggtttcttactatccccctggacaatatcctaactccaaccagcaatatcgacctctctctcacccggtggcctatagcccccaacgtggtcagcagctgcctcagccatcccagcagcctggtttacagcccatgatgcctaaccagcagcaggcggcttaccaaggcatgattggggtccagcagccacagaaccagggcctgctcagcagccagaggagcagcatggggggccagatgcaaggcctggtggttcagtacactccactgccttcttaccaagttccagtgggtagtgactcgcaaaatgtggtccagccgcctttccagcaacccatgctggtccctgtgagccagtctgtgcaaggaggcctcccagcagcgggggtaccagtgtactatagcatgatcccccctgctcagcagaacggtaccgagcctttctgtagggtttctgcaaccccctggctctgagcagtaccagatgcctcagtctccctctccctgcagtccaccacagatgccacagcagtactcaggagtgtcaccttctggaccaggtgtagtggtcatgcagctgaatgtccctaatggaccccagccccctcagaacccatccatggtccagtggagtcattgtaaatactacagcatggaccagcggggcgcagaagcctggagacctgtacagtcctgacagcagcccccaggccaacacacaaatgagcagcagccctgtcacatctcctacccagtctccagcaccctctcctgtcaccagcctcagcagtgtctgcacaggactcagtcccctgcctgtcctcacacagttcccccggcctgggggtccagcacagggtgatgggcgctactcccttttgggccagccattacagtacaatctgtccatctgccctcccttgctccatggccagtcaacttacacggtgcaccagggacagagtggactgaagcatggaaaccggggcaagagacaagcactcaaatctgcctccactgacctggggacagcagatgttgtcctggggcgggtgctggaggtgacagatctccctgagggcatcacccgtatctgagcgcggacgaactcttcacgcagctcgccatgtctggcgccaagatccagtggcttcaggatgctcaggggctgcctgggaannnnnnnnnnnnnacaacagtggggactgcttaaaatggccccccactcgggacctccgctgccctggtaca

SEQ ID NO: 433114 - DNA, 480 bp, Homo Sapiens
  misc_feature (410)..(438): n is a, c, g, or t
  misc_feature (469)..(469): n is a, c, g, or t
cagaatttcaacagaggttcattctcaagagagatgatgccagtatggaccgagatgataaccagactggccagaacggatatctaaatgacatcagggggaaccgtgaaggactgagccgcacctcaagcagccgccagagcagcacagacagcgaactcaaatccctggagccacgcccttggagcagcacagactctgatggctctgtccggagcatgcgaccccctgtcaccaaagctagcagcttcagtggaatctctatccttacccgaggtgacagcatcgaaagcagtaaaggcggcagtgcgggaaggatctccaggccaggtatggcactaggtgccccagaagtgtgcaaccaggtcacctcatccagtctgtccgggggcttctcccttgtactgccnnnnnnnnnnnnnnnnnnnnnnnnnnnnncttcctgctctccaccacgcctcagcaacanaccttgataat

SEQ ID NO: 433115 - DNA, 986 bp, Homo Sapiens
  misc_feature (2)..(3): n is a, c, g, or t
  misc_feature (8)..(8): n is a, c, g, or t
  misc_feature (10)..(10): n is a, c, g, or t
  misc_feature (12)..(12): n is a, c, g, or t
  misc_feature (17)..(18): n is a, c, g, or t
  misc_feature (33)..(33): n is a, c, g, or t
  misc_feature (82)..(83): n is a, c, g, or t
  misc_feature (87)..(87): n is a, c, g, or t
  misc_feature (89)..(90): n is a, c, g, or t
  misc_feature (102)..(102): n is a, c, g, or t
  misc_feature (156)..(156): n is a, c, g, or t
  misc_feature (158)..(158): n is a, c, g, or t
  misc_feature (395)..(395): n is a, c, g, or t
tnnttttntntnttttnntacctcatttttttngttccaatcccctgttagatagttcacatctcagtgcatcatacaaaannaaantnnaagataaaaggnaaactttaaaaatccactcccaactagagaatgtaggttttgtatgtgcctctnanatatgctgctgtgggaaaaggaatgagaatagaagattgcttattttattgatttttttggtgtgtttttggtgtatgagaaaagtacaaggcagtaacatatacagtttcctctgcctacaagccagtaagtgagatggaagttatgcgcaaattatgcagcatattcctatgtataaggggcaggcaataatctacccccagtatatacagcctagacatcctcttatataacanagattacaaaaccaataatattcacagatgagtatcatatagacgcataacctagggtattgattatcctggctgtcatatacacactgaggaaaggataccaagaggcctcactttctttgcaagcctggaggtgctcctagaaactttctagtcactcttgcgaggtagaaatcgcttctcaccccagaatcagtggatggacagccaccctgctttatgtaccctattttttgctgagtactgcaaacattttttttcacatcctatgtatctcatatttttaagtcaacaaaactgttattttaagaaaatgggaattaagtgtcaaatctcctttcagaatactgtgtgtgcagtgatgtgctaaggtgtttgtactattcttaccatctgtttgagttcaggctattccttcatataaaaataatctcacaaaacattccagtgctttctcaatagaataataaatctgctaatgaatacagtctgaattgattttcatgactgcccacaaggagggcagaagagaaaagaagcagagggagaatatgattgcaaataggggaaggagagagggagggagggagt

SEQ ID NO: 433116 - DNA, 454 bp, Homo Sapiens
  misc_feature (244)..(282): n is a, c, g, or t
ttacggagattctgctatactttattccatatcatgttacaagaaaacaacagtgacagctgacaaaccattacatctttccataatacagacaaattacaactggtaacaaatatgcaacatgtattattccattctccttactatgtgtcatttgaaagtataatagttttctgaataatgctaccacgtttcttaggtaccaatcccctgttagaaagtacacatctcagtgcatcatacnnnnnnnnnnnnnnnnnnnnnnnnnnnnnnnnnnnnnnntccactcccaactagagaatgtaggttttgtatgtgcctctaaaatatgctgctgtgggaaaaggaatgagaatagaagattgcttattttattgatttttttggtgtgtttttggtgtatgagaaaagtacaaggcagtaacatatacagtttcctctgcctacaagccag

SEQ ID NO: 433117 - DNA, 1319 bp, Homo Sapiens
  misc_feature (13)..(13): n is a, c, g, or t
  misc_feature (23)..(23): n is a, c, g, or t
  misc_feature (293)..(293): n is a, c, g, or t
cacgtgctcccanaacacgggangctgccctaagctccggaacctccctcccatctgttcgaatccctgttgtccccggagatcccaggttgaaccagtgagtaagagcttgtgcaggcccactcagactctcctaggaggttgccctgcccaggtttaaggtcttgatgttccccagcttggtgtgaagcccttccaaggaggagagcttgttgtaggacaggtccagatgcacaaggttatacaggtgctgcagattgtccaacaaccagcaaatccattgtgactcaggntccaggaactcaaatctttgggaatcagtttcaacagactcgtcgatctcggaagatgctgttgtggctcaggtcaagcgtggtcaatgcctgccaagtggggatgacggcagtcacagggccttctagggttgtgccttcaggctcccactcatcaaattctgaggcttcaggaacaaggacttccttcatcgaggttgctgagaagcggacactcagcgtggctaaggtgggcttcgatgcgaccagccctctgatgtgcttagcatcacagtgacttatctccacctgatgcagggacttgaatattgataggtcgaacggcaggagctgctcctgaatgttgctggtcccaaaaggtccttctgtgcccagaaaccttaaggtacttaaggcgacaggtgaagtccaggatgtgcccgaggtcggtcttggcatccccactggcgcacgtgggctttccctgctgacagctgactccgtgacggcatacagctgcaggggtccaatggcaaagacctcgccggcccccaggagctgttctcctttctcaaagagctcttcagccagtgccgcggtgatgccatttatctcatagaagtgaaaatgcaagaagtgggccagtactctgggggtcacgccagggaaggcagccaggagcttctggaggtagacctccagatccttctccctcttctccaccaagcttcttgagtttttcccaattatctttttgggcggaagcaggtttttatcaatctttctctctgcaacgagcttttcatgcaggtcatggaagtcgctgtagcggtgctttactgtccactcatggctgccatcagtgacctggatgatgtaaaccgtataagtgtccacaagctccgagcccacgacgcgcgcttccttggccggctcggcttcccgctcgggcccgaaggtgcgcgcggtcgccatgttcgggtctccgccgccaccgccgcccggcgcagactaccagcagcagggggcggggtcaacgtcccaccg

SEQ ID NO: 433118 - DNA, 672 bp, Homo Sapiens
tttttttcttaacagtctggctgttgtttgaattaaactcttaaacaggatgtttagttagagggtaattgttgagtaatgatgcatacaacagcatacttccctttcttgctgggggtgcagcttttcagttttcttgttttactttgacagtgcaaggggaactgaaaataatttccattgtattatttatcttagttcagctgagggctttatgagacagtggatggggaggcagtaagacggtgatgagataaaatgtgtgtgttgcactgactgtctataaagttatcctttcttcatgaaaaagtagcatttaaatctggatgagtttataaaggattacaaaatgctgatttatagagtaaactttaaaatattaaagactaaagactaaaagaagagtaataatgaagtaatgtaggctgtcacttctctagatttgtattgttgaaaatttaactttggacatctttatagattattattttagacctacaaaaactaccctcaactctgtggctacagctagaatatgaagcatcattgctacaccagttcttactttctagatattgttggtgtgtcataatgtttgaggctgtatttgtaagtcttgcaagtgtgagaaagagccgtatcttttgacatttatacttcaggttaaggttt

SEQ ID NO: 433119 - DNA, 1262 bp, Homo Sapiens
  misc_feature (83)..(125): n is a, c, g, or t
ggaagggagtgtcatctgcccttccccggggacactggaagaggagaggtctgggagagggacggacggatgctgccttcctnnnnnnnnnnnnnnnnnnnnnnnnnnnnnnnnnnnnnnnnnnngcccgggcattctagcctacagcccaagacagatcaggcggacagcagctgaggctggggagagggggccagtgctgtggacacccatgcctgaggaagccccagcctggcaggggagagggtgggggtgagaggtggggagatgtggccgttcgctctgaagttgcgatgacttttgtgaacaagcaggttttcttgatgcaggtacagaagtgacggtggtggggtgatgacatgggagaattccagcaaaatccacctgggagaaccagcagctccactccacggacagagtggatctctgcggcacagcaacgcagcgaccccagcctggtccctcagtggggcaggacggagggcgccccagatctgtggaagtggacgatctgccatttgccgtcccggcggtgccagacacgggtctcctccgactgggcggtgcgtgggatgccgccagcgtccaggtactgcgtgatgcggatgtaggcgatgcaggctgactcgtcgcccatcaggtggatgtggggattcaggatggtggtgtgcacgggcttgctgttccgggaccacaggttttcaaaatagaatcgatggaagtccaggccctcaaccaggttccccagggcctcaggttcgaaggctgtcatgccagggtcgcacatcttcgtgtaggactcaaaatctccattgcttatggcttcaatcagctgctctgtcacttttataatttcctgtttccgcactttggtgtcttcatcctcgatggtggtgttggtgctctctgaggattccttcacaccatcgctcttcttgtttcccccactcttccctccggagaagttcctggtggccagcatcgtggtgagaatggctcccttcagtttcctcctggcattgaacttcttcaggcagtccacggtctcctgtctgtgcatgcaggatgccacggtggagcggtgcgagatccaggggtgcttaagggcttcggcagctgtgatgcgtttggatgggttaatggtcagcatcttattgatcagatccttggcttccggggctgacagtgtcccattccggacgcatgggaaatcataggcgccggctttgatctgctggtacagccggtgctggtcctccgct

SEQ ID NO: 433120 - DNA, 904 bp, Homo Sapiens
  misc_feature (812)..(849): n is a, c, g, or t
tcagtcggtcccgctctacccgacggggtggggtgggcaggttaatgttaggagtggacttcaccagaaggaagcagaaagcaagtaggggcacctgagtagggccacatcccccacaccgagggaagggtcagaccaccctgaggtcagcacaggaggaagaagacttaggggagcactttgaggcaggaggctcctggcgtatgctcttctccccactccttcagtgcggttggcttagggggaagggagtgtcatctgcccttccccggggacactggaagaggagaggtctgggagagggacggacggatgctgccttcctcatcatgccacccctccgttctccccagcccctggtgggcaccagcccgggcattctagcctacagcccaagacagatcaggcggacagcagctgaggctggggagagggggccagtgctgtggacacccatgcctgaggaagccccagcctggcaggggagagggtgggggcgagaggtggggagatgtggccgttcgctctgaagttgcgatgacttttgtgaacaagcaggttttcttgatgcaggtacagaagtgacggtggtggggtgatgacatgggagaattccagcaaaatccacctgggagaaccagcagctccactccacggacagagtggatctctgcggcacagcaacgcagcgaccccagcctggtccctcagtggggcaggacggagggcgccccagatctgtggaagtggacgatctgccatttgccctccccgctctcgacgaattcgagctcggccgatttggcctgatnnnnnnnnnnnnnnnnnnnnnnnnnnnnnnnnnnnnnngccgccaccgcgagtaagccggttcgccctatatgatcgtatacattcggggttc

SEQ ID NO: 433121 - DNA, 172 bp, Homo Sapiens
gcttcaatcacctgctctgtcacttttataatttcctgtttccgcactttggtgtcttcatcctcgatggtggtgttggtgctctctgaggattccattaactgaacgctggaactggactttcttttcttcacaccatcgctcttcttgtttcccccactcttccctccgg

SEQ ID NO: 433122 - DNA, 467 bp, Homo Sapiens
ccggtgtcataccggagtcatggggtaaggtgaggccctcttcagcctgatgggacacaagcgtggctgcagccacaggctttggggctgaccgagagatctgtgtcttgtaggggcagaggcggtgtcatagcggagtcctggggtaaggtgaggccctcttcagcctgctgggacacaagcgtggctgcagccacaggctttggggctgacgagagttctgtgtcttgtaggggcagaggcggtgtcatagcggagtcctggggtaaggtgaggccctcttcagcctgctgggacacaatcgtggctgcagccacaggctttggggctgatgagagatctgtgtcttgtaggggcagaggcggtgtcatagcggagtcctggggtaaggtgaggccctcttcagcctgaatgggacacaattcgtggctgcagccacaggctttggggctgacgagagatctgtg

SEQ ID NO: 433123 - DNA, 1900 bp, Homo Sapiens
cgagtatatgtgcaggttcgactctaaagagatgccccatcatgggcgttcctgggatagagagaatcatagtgaaatcgataggcgcagacgtgaacaagatgactcagtacatcacggagctctccgagatggtcgcacacattcagcgcactgtgtcggaagctcatacgagctcaccatcctctgcatggtcgtctcgcacatgaagtccatgaggggtacagggaacaagtccaccgatggcgcgtacaagccttccttcctcacagagcaggaactgaagcatctcatccttgaagcagctgatggatttctgtttgtggtggctgctgagacagggcgagtgatttatgtgtctgactccgtcgtccctgttctgaatcaggcccagtcagagtgttctggggagctagattgtatgaacaggtgcgttctgatgacgtggagaagctgagagagcaactgtgcacctcagaaaactcaatgacaggccggatcttggacctgaagactgggacggtcaagaaagaagggcagcagtcatccatgaggatgtgcatgggctcgcggcggtctttcatctgcaggatgaggtgtggaaatgctcctttggaccaccttcctctaaacagaataaccaccatgaggaaaaggttcaggaatggccttggccctgtgaaagaaggagaagcccaatatgctgtggtccactgtacaggatacatcaaggcctggccaccagcaggaatgaccatacctgaagaagacgctgatgtggggacaaggcagtaaatattgcctcgtggcaattgggagactccaggtgaccagctctcctgtatgcatggacatgaatgggatgtcggtgcccacagagttcttatcccggcataactccgatggaatcatcacatttgtggatccaagatgtatcagtgtgattggctaccaaccccaggatcttctgggaaaggacattttggaattctgccaccctgaggatcaaagccatctgcgtgagagcttccagcaggtggttaagctgaaaggccaagtcctgtcggtcatgtatcgatttcgcaccaagaaccgggagtggatgttgatccgcaccagcagcttcacattccagaatccctattctgatgagattgagtacatcatctgcaccaacaccaacgtcaagcaacttcagcaacagcaggcagaattggaagtgcaccagagagatggattgtcatcgtatgacttatcccaggtccccgtccccaacctaccagccggtgttcatgaggccgggaagtccgtggaaaaggcggatgcaatcttctcccaggaaagagatcctcggtttgctgaaatgtttgcaggaattagtgcatcggagaagaagatgatgagctcagcctctgcagcaggaacccagcagatctactcccaaggaagcccatttccctctggacactccgggaaggccttcagctcttcagtggttcatgtgcctggagtgaatgatattcagtcctcttcttccacgggccagaacatgtcccaaatctcccggcagctaaaccagagtcaggtggcatggacagggagtcgtccgccctttccgggacagcaaatcccatctcagtccagcaagactcagtcatctccctttgggattggaacgagccacacctacccggcagacccctcttcctacagccccctctccagcccagctacctcctcgccaagtgggaatgcctactccagtcttgccaacaggactccagggttcgctgaaagtggacaaagtagcgggcagttccaagggcggccctcggaagtctggtcgcagtggcaaagccagcaacatggccagcagagcggtgagcagcactcccaccag

SEQ ID NO: 433124 - DNA, 540 bp, Homo Sapiens
tcacgcatcattgtggtttttttcccccttaattctgtctcttctagccagaagcatctggcttaagcatatttcatcaacttctctgttatttcttttaaagatctttatctctgaaattttcccagaagatacaagttttggtaatattatcaataggaattttgagacttgggcattcatctttgtctcaaaaacaaacagaaagccaaccttcaaataaaacaaatttgaaagttttagctcaataatttggggacattttacttaaattacaaaagaacataattatgattttatgatcgatattagtgttaggtttatttccacacttactgtcattaatttgtcatttacatatttttatttgctttgtagtttaatcataacttcaccatttacattttaatggaaagcatacaaggtcacatgttagcctcttgaattctgtaactaactcatttttctcatgatgaaactgctttgatgaattcctgtgtgatgaattctgctatatttccttttgacttttctcagttt

SEQ ID NO: 433125 - DNA, 708 bp, Homo Sapiens
  misc_feature (178)..(178): n is a, c, g, or t
  misc_feature (246)..(316): n is a, c, g, or t
ttttggtttttttcttacccaccggaggggtgaggaggccacggggccccaaaaattcttggggttttagcaaaatttcccccctccctcgcggatgttcaaagcaatttcctcccgcctttagcccccccgggagaagcgggggattagggggccctgcccccaataaccccccaanaaattttttgaattttgaggaggagacaggggttttcatcaatttggcacggggtggtctcgagaacnnnnnnnnnnnnnnnnnnnnnnnnnnnnnnnnnnnnnnnnnnnnnnnnnnnnnnnnnnnnnnnnnnnnnnngcacgtggcttagatgaaagtttttaaaagcctgggctaataaaatcatccaccaatcatttttcttatggttaaagcagccaaaaagctgtcacagcatttttgagatgagaacataaggcttgtgtggctttatgatagatgctgttagtcattttatttgattaagcccttggtcagtcatctataccttaattaatatttgttcttatagaaaaatacaatccattttatgagtttctagaaataaataatggagaaaaatagatactacctgttcctaatggtctctctggaaattacagcttttgcctaggaagatacacatatagaatataatttaagttcaaaatatatttcattatattctatcccttttaattttttgtttg

SEQ ID NO: 433126 - DNA, 573 bp, Homo Sapiens
cttttagtggagcaacaaggctgtttattcacttgggtgcaagtgggctgagtcagagaaaggagtcagcgaagggtggtgggagtggaactggttctataggtttggggtaggtagtggaaagttacagttaggggcagtttttttgggcaggggaagaatgttacaaggtgcatagtcacaaggtgggggaagtcataaggcacgatatcacaaggtggatggattagttggggaagggcaggaacatatcacaaggtggatggattaattagggtagggaaggaacatatcacaaggcggatggattagttagggtagggcaggaacatgtcacagtggtggatggattatttagggtagggcaggaacatgtcacaaggtggatggattagttggggaagggcaggaacatatcacaaggtggatggattagttggggaagggcaggaacatatcacaaggtggatggattacttagggtagggaaggaacatatcacaaggtggatggattaattagggtagggcaggaacatgtcacactgggtggatggattaatttacgggtaag

SEQ ID NO: 433127 - DNA, 940 bp, Homo Sapiens
gaccaagaggactctgtagctgaccagtcacccaccagctggctggtttgacctcttccatctcagagagtttggcttgaatgaggcacagccctgggaagacgaagatgaagcaggcggccaggcctccaatgactgagatcaccttgccgatgtcagggatgaagagcgccagcagcagggtgagcaggaaccagaccagcgtctgcagcactcgccgccgccgctcccgccccacgtcctcctccactggcaccccctggtagcgcagccacaggccttccaccaccgcccgcccacagaagtgcaggatagggtaggaggtgagcacgctcaggatgatgaaggctcgggcaacggccacggccatgtcctccgagggataggacaggagcacgtcaggatccacagcagctccaaaggtcaggaagccacagatgcctgtccccatgtagacagcgagggctatgaccatggcagctgtcaccactccaccccaggtcttcacttcaggctgctgcatgctgttgaagacgggcacactgctgacgtggcactgaaatccgaagcagatggtgggcatggcattgaacacagccatccaggaagccggcctggtcaggatgttccctggggtcatctctttatctggccagatgtacttgatgataacgatggctgtgacgtaccaggtacccacgacgctcaggaagctgctctttctccctgatgggctgtgccagaggcggttgctccttctccccaaaggtctgggatctgattctcctcacttccctttctggacccaatttcttctttctcaagactttgcctaaaatttgctgtcagcagagggaagagtttgggctacttctgtgctggcttcagcagagctggaggaaactgagcggctctcacgcttactcatgaaatggagctt

SEQ ID NO: 433128 - DNA, 1388 bp, Homo Sapiens
tcaaggccgtgccccctcccgcttctttcgccatcacagcataatctgtcctgctggtcgccaatgatgattagggaaggcaatgcaggtgccaaaaggtgtagacagcgatggccacctcaacaatagcacacctgtcagctgtgccaacacacagcccataccacctcctggtaggtcctctcattgctggcctgggagcagtaggccaggatgacaaggccactgatgatgaaaacccagcatacccatctgcagtgcgatgcctgctgccacgccccccgcagtgctgaaggctgctgggaagttgagtaaccctgcacccaggcacgcgttgacgacgatgaagatggccccaagtgtggaagtggtgcctctgtccagacccccaggagaggcttcccactcactcttgggggctgtgtccacacagggactctgcagcagccgagcccgctccccggcatccgtgctcaagtcccactcgctgtagtcattgttgatgctgacctgggccatggccccgagagccttcttcctgcaaggtctgtgggttctgccttacaaccacatgcctcagggagctgagcaacacccacctgtttggggctgttagcttaggactcttctcaacctgctctttctccctgatgggctgtgccagaggcggttgctccttctccccaaaggtctgggatctgattctcctcacttccctttctggacccaatttcttctttctcaagactttgcctaaaatttgctgtcagcagagggaagagtttgggctacttctgtgctggcttcagcagagctggaggaaactgagcggctctcacgcttactcatgaaatggagcttcaggacagataggaaaacaggcccaggagggagaggttagactaaggtcacagtgggtagctggcagagccagaatagaagcctgatgcccacatgctcaggccagcgatgtaggcccctcagatcccaactggagtgtgctcccagtccagcctggggttggagccctgagatagaaagggtgggctgctttgtgagctgaggctttgtgaggtgagccagggcgcacccgggccaggaggccggggcggggcgattcccaggcctggagcgagaagggtgggctactgtcggggtaacctgcggaggagctccgggacccgatcccggcctaggactgggtggagaccctctggctgggtaaaggcgcggcagagctggcgcaacagagggacgggcgtggggcgaggacgccaggatctggacccctgcagggaaagggtctgagcttttccgcggtggcggggactgaggggctccacagacctcggggatctaacacttccaccctccagagcctgtctccg

SEQ ID NO: 433129 - DNA, 901 bp, Homo Sapiens
  misc_feature (88)..(115): n is a, c, g, or t
  misc_feature (484)..(510): n is a, c, g, or t
tgattgttttatttgaaaaccctaggatatgtcccctccctcaccacacccaaccccccgcccctgccccaggacatgacgatgcctnnnnnnnnnnnnnnnnnnnnnnnnnnnnaggccgtgagctgcacgcaggaacatgggctgcactcacgacaacattgaaaaaatatacattatatatgtacacccggggcccccacgtcccctcccgtccccgcagcctggccacaccaggtcacggaggaggggccggggctgcaggacctcaggactgcaagggcaggaagggaaacaggacaagaaaggaaggaagttggaaaggagggagaaatggggtccccagactgaaatggaaatgaggtggggcgatcataagagaagcagggacgatggtccagctgagggagccctgcagagggggaaaagcttcccatggacaggagagagaagggaaggggagaggagagggtttccttcaatnnnnnnnnnnnnnnnnnnnnnnnnnnnatccattgcaatcggcaccctctccccaacacagtgagtgctaagggggcagctgccattgggggtagaaaggcagttgaagtccagaccactttacaaccccagcaggcccagggcaagggggcacacccatgagcatgacaggccctcaattgagggatgtggggggccgccgggagagggcatgggccggacttacataggagcccggctgagggttttggaaatggaattggaggacttgggttctagagagccttctcttccctctcttggttctcctgtgtgttcaccagtaaagaagacttcataccattgtgtcggagaagggcccgtgctcaccaagtggcgggatatcttctcctcctttggtgttgtgtgagtcgtaggc

SEQ ID NO: 433130 - DNA, 2190 bp, Homo Sapiens
  misc_feature (1675)..(1706): n is a, c, g, or t
  misc_feature (2076)..(2103): n is a, c, g, or t
gaccctttgtcgatccaccactacttccatggctacctggctggtttcagcgtgcgctcaggtcgcctggagagccgcgaggtcatcgagtgcctctatgcatgtggggaggggctggactatagggatttcgagagcctgggcaaaggcatgaaggtccacgtgaacccctcacagtccctgctcaccctggagggggatgatgtggagaccttcaaccatgccctgcagcatgtggcttacatgaacactctgcgctttgccacgcccggcgtcaggcccctgcgcctcaccactgctgtcaagtgcttcagcgaagagtcctgcgtctccatccctgaagtggagggctacgtggtcgtccttcagcctgacgccccccagatcctgctgagtggcactgctcattttgcccgcccagctgtggactttgagggaaccaacggcgtccctttgttccctgatcttcaaatcacctgctccatttctcaccaggtggaggccaaaaaggatgagagttggcagggcacagtgacagacacacgcatgtcggatgagattgtgcacaacctggatggctgtgaaatttctctggtgggggatgacctggatcccgagcgggaaagcctgctcctggacacaacctctctgcagcagcgggggctggagctcaccaacacatctgcctacctcactattgctggggtggagagcatcactgtgtatgaagagatcctgaggcaggctcgttatcggctgcgacacggagctgccctctacaccaggaagttccggctttcctgctcggaaatgaatggccgttactccagcaatgaattcatcgtggaggtcaatgtcctgcacagcatgaaccgggttgcccaccccagccacgtgctcagctcccagcagttcctgcaccgtggtcaccagcccccgcctgagatggctggacacagcctagccagctcccacagaaactccatgatacccagcgccgcaaccctcatcattgtggtgtgcgtgggcttcctggtgctcatggtcgtcctgggcctggtgcgcatccattcccttcaccgccgcgtctcaggggccggcgggcctccaggggcctccagtgaccccaaggacccagacctcttctgggatgactcagctctcaccatcattgtgaaccccatggagtcctaccagaatcggcagtcctgtgtgacgggggctgttgggggccagcaggaggatgaggacagcagtgactcggaggtggccgattcccccagcagcgacgagagacgcatcatcgagacccccccacaccgctactaaggcctacacctctccccacgcagagggggaattctgccctggtgaaacagacactccagacatgggagaaggactttctgggaacacagagaccaagagggagagaggcttcagaaccagtcctcctttcatttcaaaaccccagcgggccctctggagttcgccctgccccttccccggccccccatccctcacttttggggctgtcatgctcctgggtgtgccccttgcactggggctgggctgggttggaaagtgggcctggacttcagctgccttttctacccccaataggcagctgcccccttagcactcactgtgttggggagagggtgacgattgcaannnnnnnnnnnnnnnnnnnnnnnnnnnnnnnnattgaaggaaaccctctcctctccccttcccttctctctcctgtccatgggaagcttttccccctctgcagggctccctcagctggaccatcgtccctgcttctcttatgatcgccccacctcatttccatttcagtctggggaccccatttctccctcctttccaacttccttcctttcttgtcctgtttcccttcctgcccttgcagtcctgaggtcctgcagccccggcccctcctccgtggacctggtgtggccaggctgcggggacgggaggggacgtgggggccccgggtgtacatatataatgtatattttttcaatgttgtcgtgagtgcagcccatgttcctgcgtgcagctcacggcctnnnnnnnnnnnnnnnnnnnnnnnnnnnnaggcatcgtcatgtcctggggcaggggcggggggttgggtgtggtgagggaggggacatatcctagggttttcaaataaaacaatca

SEQ ID NO: 433131 - DNA, 642 bp, Homo Sapiens
acatctcagccatctgtgcacgttcgatggccagatagttacagagcccgtggtgactctgctgccctttctctgcaggccaaggggaggctggactgaaatacatttaccaaattagaatgtattttgctgtgggaaaatagaccccttgccattgcccctcggtgttgactacagaggtttttgaaaggtggcattgacaggcatccgatccgtgccagggcacagcactgtaggctggatgccgagtgctgttgccgcagatgtactcgggcctaaagtacctcctggctggggcgtgtgtgagctggaaatgcacgcgctctcccactcccaagctcactccacttgcacgccgtgacctggacgtgctgtttctggacaaggggaatggcactcccttctcagcgaccggctactcctgttgggacccagtagctgccagtccgtactggaattgtccccccatgcccagccaagccactggtcctgggcccatagagactctgtctccctttctggagtcagacagtttgacaggggcactcgcccctctgcttcctgccacctggcccggggcgcctcagtcagcccctccagatctgtttctttaactgagagcgggacaccttcccccccccc

SEQ ID NO: 433132 - DNA, 346 bp, Homo Sapiens
  misc_feature (77)..(77): n is a, c, g, or t
  misc_feature (171)..(171): n is a, c, g, or t
  misc_feature (321)..(321): n is a, c, g, or t
ctgttcgggtttttagccacagttccatttccactgggattttgaagcatttcctgtcctgaacacaaagcctgttnctagtcctggcggaacacactgggggttggggtcgggggaagatgcggtaatgaaaccggttagttcaattttgtcttaatattgttgacaatntctgtaaagttcctttttatgaatatttctgtttaagctatttcacctttcttttgaaatccttcccttttaaggagaaaatgtgacacttgtgaaaaagcttgtaagaaagcccctcccttttttctttaaacctttaaatgacaaatntaggtaattaagggttgtgattttt

SEQ ID NO: 433133 - DNA, 781 bp, Homo Sapiens
gcaacattccaagccccccccggtcccctatccaaggacaaatgtagggcctctaggatgtcccagacccacctcggagggccagtcagttcaggtaggtcaggcccagttctcttccctcccgacagaccccgggcccgggaagcaccgaagaccatgatgctggctggagtgaagacactcgtttccgtatcaagagctgagcctaagaaatgctcatcgttggtcaggctgggtctgggccaaagggacagacagaaagaaatactgtctccacgggaggaagagggagaggagggaggatggagagcggtgggcatgcagggaacttggcagggcagggtggaagaaggtgggaccactgggaggggaccgaggtaagagtggctcttcagagccaggtgaagagtctgtggcctaacggaaacagaaaggagcgcccccaacccccactcctcttggctcatcactagtggccctgaggactccctcccaagggatggaatgcaaatccaaatactaaaacagcctagggaggagcgagcgcccgctgtggcagtggcatctggggcatggcttcgaggcggtgagggccgggcctccatgctcacctgcaggccggctgcttgctgcactccctggaaagccagggccccatcttctcgggactctgccagtctcttttcagttcacaaaggcgtctatggagcgctgggtgcacactggacgcttagacgtgaacatctttctcagctcatcacctgaggttggagggccccaa

SEQ ID NO: 433134 - DNA, 3675 bp, Homo Sapiens
  misc_feature (241)..(314): n is a, c, g, or t
  misc_feature (690)..(705): n is a, c, g, or t
  misc_feature (1023)..(1032): n is a, c, g, or t
  misc_feature (1506)..(1506): n is a, c, g, or t
  misc_feature (1660)..(1660): n is a, c, g, or t
  misc_feature (1682)..(1721): n is a, c, g, or t
ggggaaaatcgacgacgacgaaggcgagggtagattaatttttgggaaggaacaagggaggacgaggtgggatcacaaaacgttctaggggaacaagcgaaacgagaacctttaaggagttaaatttaggcgaccacagggcaggaaagaaacgggcggagggaattttatcaggcttgcgtggtcggacgagggagtactaagtcgggaggtgtggtttgaaaggtggggggtaaggggnnnnnnnnnnnnnnnnnnnnnnnnnnnnnnnnnnnnnnnnnnnnnnnnnnnnnnnnnnnnnnnnnnnnnnnnnntttggattggttgttaccaagaagtgttttatttttcttgcagtagctttgttaattgcacaaaatcatgttttgtttttgccatttaaacattatcacacaatcctattctgaaagacaaatgttcattaaaaacaaagcaaaaataaaaattcacaaccttaattacctagatttgtcatttaaaggtttaaagaaaaaagggaggggctttcttacaagctttttcacaagtgtcacattttctccttaaaagggaaggatttcaaaagaaaggtgaaatagcttaaacagaaatattcataaaaaggaactttacagaattgtcaacaatattaagacaaaattgactaaccggtttcattaccgcatcttnnnnnnnnnnnnnnnnaagtgtgttccgccaggactagaacaggctttgtgttcagacagaaatgcttcaaaatcccagtgaaatgaactgtgctaaaaacccgacaggcatcttccctgccctccccccactcgtcttctgcaatcctctaacccagtttctaatctctgaaaggggccaaagctgtgaggggggaaggaccccgccctagtgtggccaccctatatataattacatattgcatcgtaaatgctggccttccttctgcaaattatgattttggaaaatccaacccatgcagagggataaaaaactgacatcccttgggtaacnnnnnnnnnngcaacattccaagccccccccggtcccctatccaaggacaaatgtagggcctctaggatgtcccagacccacctcggagggccagtcagttcaggtaggtcaggcccagttctcttccctcccgacagaccccgggcccgggaagcaccgaagaccatgatgctggctggagtgaagacactcgtttccgtatcaagagctgagcctaagaaatgctcatcgttggtcaggctgggtctgcaggccggctgcttgctgcactccctggaaagccagggccccatcttctcgggactctgccagtctcttttcagttcacaaaggcgtctatggagcgctgggtgcacactggacgcttagacgtgaacatctttctcagctcatcacctgaggttggagggccccaagggcccctctgtctggagtctgtactggctcatctgggcccaaggcctctccttgtagggaatccantgggggatggggacatgactacagcctcttcgctctgggggaagctgtgggaaggcttccaactctcgttgctgattctagttccttgactggaaggggtttgagataagacaagctcggaagaaaaaaagccaggcagcagtttctgggcagnttctatcctggggcgagagccnnnnnnnnnnnnnnnnnnnnnnnnnnnnnnnnnnnnnnnnaacacacagccacctcgtccggggggccagtgcccagctcaagagctttcccacacgccaatcctgctgacacttgtcccctccccaccggcctcaggggaagggtgctgctgtgtgctgtgctgatggcaagtctcaaagtctgtataaaaggaaatggagataggtgggctggtccagaatgaactcccaggcccccgaccccatgtgaggaagagggggtcagaaggggggattggaggggtgagggcggggtgtcgacagcttagtgtatgtaggctcggtacacggcggacatatcgttgtcagactggtccagcgccttggctcttttgtacacctcatttgctgcagctgccatgggagtcggatggttgaccgcatcacccagcgcaatggctaagcggagatccttctgaatgtatttcaggtagaaatcaggcttaaagtttccttgcaggatattttggcacttctggtccaggaagatgctggccaactgtccctgattgaggatgtccaagagtgtctgctgggactggcctgtcacctgggccagggtcagcccctcggcaatagtggccatgaagctcccttggaccatgttcacgatcagcatcatcttggctgcattgcccacttcacctaggaagaaggaggtcttccccatcgcctggaagcagctgctgcagtcctcatataagcccctgtctccagccgctaagatcaccaacatcccgtcattagacagctgctgattccctgagacgggggcttccagaaagcgcccccccctggacacaatcacctgggccaagctcaagtgacggtgtcagcgtccactgttgacatgtccacgtagcacttcccagggcggatcccttgcagcacaccactggggcccagcaccaggtccttggccgccttgggatccgacacgcaggcgaaagtgatgtcgcaggttgagacgacttcagcgggggttcttcccagacgggccccctcctggatgaacaaatcacatttctctgcagtgcggttccagacagtcactgtgtgacccatttttagcaagttggagacgattccacttcccatgagaccaaggcccaaaaatcctatctttttgtctgtgggtgtgatgctgccattcacggctgtgctgtcagctgcctggatggaggtggagccagtttcctcttcacatattttcaacttcttcgtgattgcctggtaacagacagctggcttctctgtttggcttagcaggaaatgatggaaatgaggatctgcatctttaacaggctcgcttgcggttggctgccatttaaacgcggccatcggtccggccatcatccccttcacggtactagactccgggatggtgagatccttctcatcctttgggggccgaccccgcttccggggactttgctcttgggctcttttcagaggggatttggagcctctctctgaagagcctgaagacaccctcttctttccttctcccatgttcttcttcaccttcccttcagacaggctaagtttgcgcttctcatcacctgagtttggcctacttctctcctcactggaattacgtcgattcttgtcatcagaagaattgtgggatgacgtctggtctttccctttggctctcctgaggaactcttcgacagcatctaccgcttgctggaatcgtttacccttgttaatttttatcatttcctctttatgagcatgatatggcttcagctgttccactttgatccaggcatgatcttctgttccaaaaaatttcacaaagaagcatttctttccgcgaggtttcttcaagtcctttggtggattaacaatctttcctggccaaggaggatatcggccgagtttcccccacaccaagtcgccgagccgcagactcacagccgccatcttaccacccaaccacgcccccgct

SEQ ID NO: 433135 - DNA, 2546 bp, Homo Sapiens
  misc_feature (28)..(28): n is a, c, g, or t
  misc_feature (49)..(49): n is a, c, g, or t
  misc_feature (226)..(226): n is a, c, g, or t
  misc_feature (263)..(263): n is a, c, g, or t
  misc_feature (1653)..(1653): n is a, c, g, or t
  misc_feature (1755)..(1755): n is a, c, g, or t
  misc_feature (1818)..(1818): n is a, c, g, or t
  misc_feature (1844)..(1844): n is a, c, g, or t
  misc_feature (1889)..(1889): n is a, c, g, or t
agctaccagtacttctggagctttcttngggtgatttaactgggtaaantttatcctttcttaattcttggataaaacttttatttaagcaaacatccacatgcacattgaacagggttagatctgaagtcttttgttctacgttacaaacaggacaaactagagcttggcctgttttcacttccacattaagtaaggctggccggtattctttgtctaaatgatnccaacatcttcgttttcccaatgaaacagtagaaganagatttttgatgacagtgttcaatattaaaagacttgcttgggagactagaacattcttccttgctatgcttattacttaaagcatctatgctttctgctttagatgagttatctatagtatctactaaagctatacaatctactgaagatatttctttaatttttggatgggcttcataatcttgcttctcacaaagtgaagaagcaggaacattttctttcttgttaactttggtagcagaaacatgtgaacacgagaacattttaaagttttcactgattgaaggtccatcaagacattcatctacatgtttattcaaggcttccagactgatgcacccttgagccctaaagcaaacaggacaggtaagtatctgacagtcatctgaattctctgatatttccaaattctcattcatcttcttctttaaaacttggaatggttgtgatgtctggaaactttgtttattcacggcttcacatttaaatgtatcttggtgactccatttcctttctgatcgttttttatcaaagaaactcttcttatgagacatttctagaggttttacaaacttatctttgtcagttttctctaatgtacactcagtggctgacagggcttggtttccagcctgtaaaaagccaataatgctcctttgttggtgtttcctgtcctcttcattgggaaaactagatatccgaacacccataagccttaatctcaagggatgtggaaaatcagcatcaatttctgtttttagcaattccttagcaatggcaaatatttcttctgcagtagaaacaacagatgaaactgtagatgcacgagtttttacttcaaaattcacattcttcaacttaatggtaacagttctacccttaagtctttctttctgtagatcctgagcaagctcactgcaaagttcttgacataggctgtattgctcttccgctttatttatctcactgaatgtcctctcaacgctcatacttttcctctctccatccctcgtcaggtgtgttgaacctagaccccaaggagatatgaaggaaataatgccaagatgtttcagagaaaaggagagaaagcaatgccctctgttggtaaagttctgtacatgtaataattccaagggcctttaacattttctctgtaacttttcctattccagaaacctttctaatgggtaaatccttgatgaagtccatcacagcttgtctattgggaagaatttggtattgtccatttggtttattcttatcactgcatacttttgctaacattgtatttggggcaatgcctgcactggctgtcagtgttgttttctgctcaattctgaaacgaatttcctttaccacttcctgggctgatgttccaaaaacaactgngttttggagtatttggggattgttttgttcttcaaagttcacttggaaaggatctcctgggggctgcacatcagaaggactctcttcaaaaagtagtggagngatggatcgttcatgctcactcagtttattaacttcctttcctggattatcattttctacagngcttcccattttgatgaaataccttnttttatcctcaggccaattttgtctttcttctaagtgctttgttntattcaagtaggcttcatcaagactcatggccataaaattgggatcataatcggcaaagtatttgccttaacctctttactcacagctcggtatttgtcaaagttggggggcactattataagttgtgggcacagcctcttagcaataaatcctggcatggctgcacgaacaccaaatctccttgcatggtaatttgaagtagacagcatactcattgatcctacagcaatgggtttatccttcaattctggattgtccctcatttctacagctgcatagaaagcatccatgtcaatgtgcactatggtattgctcaaatttcggctttgttctaattccattgcaaatctgtcaacctgtaattgtgcttttcttagctgttggctggtgatttgagctttttgttgcatcatattttcaattcgttggttgacttgcttttctttcttgagctcatttccataaaatctggaccccttcgtggcttccattataattttgttaattttctctttatctaatccttccattcctgctttattatcattaagtcccatcctaagcagaagatcatctttgtaactgtcacacttctcccttgtgctatccatggtataaacttatccgttacctcaggatcgcgactacaactcccc

SEQ ID NO: 433136 - DNA, 1018 bp, Homo Sapiens
gtgtgagccattgtgcctggcctaactaattattttttgagaagaactcattgatagcacaaaagtacttggagaaactacttaagctaactactattaagctgtcttctttcacaaatattaataaaagtactgatagaaatgtaactaagatacataatgtgttttaatacacattaatcttttgaattacacattttctcttgaggattataataaaatgatggtacaatttatccttctttatagatttgtggaaagtaccaacataattgacaagaaatgaaatactgccatttaaaagtcctgtattaaaataaaactactttgaatcatcttagactaaatattttaaaaactgattcaagtgcttattcataagataatggaattttaaataagaaaagccaaattaaaaattatattttaggcaaaaaccattttaacacagataatactgtgatatttattttcctgaagaaaaccacttatgctagttacattaatactcttcatagaacttaagataaattttaattatgaatgctcatgaagtatttaaagacactaggatcaatgccaacaaagtagttaagtgctgaaaaattcttatgataatataggcatgtgtgaatctttgagagcccttacaaatgtttttatattcagtataaaaataataaaaaaatcaccttcttatcccattcctaatttcccttttaagaattatctcttaacaggattgatttccaattgatgtataatggaagtaaaattctcatggttataaaaaaagatacacagaatcagtatatgtatcttagaaaagcaaacatcatctgaggaaggattattgcacttgccttcactaaataaatctgcaaacttaaaatcagaaagaacaaattcattgattataaaataactagtttcaattaaaaattaatgataaaatgttcaatgtttacttaaaaaatatatcaagggtatgtttgggattgtttggttttattttctt

SEQ ID NO: 433137 - DNA, 738 bp, Homo Sapiens
tcccttcagctggctgagatcccataattatgctggtcgtatcatttattattcacatggacaattttgagagtgaaaaaggagttttattaataattacacgctgagactgtctgaggcaaattgggtcatatggtctaaacgataatgttaaccataaagaactggagcacatttcaggctattttgctgctgtgcaaactgttccttctatatattttctcaagagactaaggaaaggcttttatgtatgggtaagcaagtgggtggaacagatggaaaaagcagaaaacaaaactggacacagagtgtctactgagcatgatatttatctgttgggagtgggaatagttctcttcccccttactctctactcatttttgaactgcccaaaatctggatcatcaaggtaaaatggataaaatctagacagcttagtagagtggaaaaagcttgaatggccaggaaatactcaggaaaatcatgaaagtttagagttggaaggtatctttcaacaaagaagaaaaagttaagaacatctgtttacagaagttgtattgaggacaatgttcagagaccggaattcttcatgcatgcttgaagaacatgaatagctagaatgctaatcacaaattaataaactgtcagttttgtcatggctgtgcctacaccagtggatttaactaggtaagtagttaactaggtaagtagttaactaggtaagccggggtgtaagac

SEQ ID NO: 433138 - DNA, 461 bp, Homo Sapiens
  misc_feature (332)..(385): n is a, c, g, or t
gtaaatacgggcttttattcactgccagctccaggatggaaggagggggtgaatcatgcacagccttggtctaccctccaacactaggcagtgctggacaggggactcaaaaagggaagcagagtgggctgttgatgtctggaaagctccctcaccagagtgcccagtgggtcacacagcatcatgggggatgagctggggctggagtcggctgtatctgacaccagaccctccattcaagctcccttgatgacaacgcccacaacagggtctggctgatgctccgttctgccacgactcctgctgggtgatcgtgggacaggtctccgccnnnnnnnnnnnnnnnnnnnnnnnnnnnnnnnnnnnnnnnnnnnnnnnnnnnnnnccagccttctcaaggctggctgagggagaagccacgtaaaagcgcttggcacacagtaggtgcttaataaacagtc

SEQ ID NO: 433139 - DNA, 464 bp, Homo Sapiens
catctttgtaaatacgggcttttattcactgccagctccaggatggaaggagggggtgaatcatgcacagccttggtctaccctccaacactaggcagtgctggacaggggactcagaaagggaagcagagtgggctgttgatgtctggaaagctccctcaccagagtgcccagtgggtcacacagcatcatgggggatgagctggggctggagtcggctgtatctgacaccagaccctccattcaagctcccttgatgacaacgcccacaacagggtctggctgatgctccgttctgccacgactcctgctgggtgatcgtgggacaggtctccgcccctcggctggggtctcagctgctttgtctgtaaaatggaggtggctctggacttctcaggggctgggtctcttgggcccccaaggcggcggccccggctggcatccagaggccttggtgtggagtg

SEQ ID NO: 433140 - DNA, 987 bp, Homo Sapiens
  misc_feature (333)..(386): n is a, c, g, or t
  misc_feature (476)..(535): n is a, c, g, or t
tgtaaatacgggcttttattcactgccagctccaggatggaaggagggggtgaatcatgcacagccttggtctaccctccaacactaggcagtgctggacaggggactcagaaagggaagcagagtgggctgttgatgtctggaaagctccctcaccagagtgcccagtgggtcacacagcatcatgggggatgagctggggctggagtcggctgtatctgacaccagaccctccattcaagctcccttgatgacaacgcccacaacagggtctggctgatgctccgttctgccacgactcctgctgggtgatcgtgggacaggtctccgccnnnnnnnnnnnnnnnnnnnnnnnnnnnnnnnnnnnnnnnnnnnnnnnnnnnnnnccagccttctcaaggctggctgagggagaagccacgtaaaagcgcttggcacacagtaggtgcttaataaacagtcaatgggattagtcnnnnnnnnnnnnnnnnnnnnnnnnnnnnnnnnnnnnnnnnnnnnnnnnnnnnnnnnnnnntgaagctgaaattcaaacttgagcctcgactgggttttctggcttgaacttcatcccagagaggctctgacatatggagggaacccctaacaggtatttcagacacatcacggccaagggcttactctgctgggcctcaaacacacggcatcttgtccagggtagactggacaaggccaggccaaggcagagcctgaggggaggggacactgagtgtttctggaagtagctggacgtaatcccgcaggactggcatactggagcgtgccccgagacagccgagcatttctggaggctgcccttggcagttccaggtgaggcctgtaccttcctttatcagtgcccacctggggagcggatgacccctctgcccagatccggtgaacacctattcatccatcaaagctccagctcccatatcccttcccccgtagtccgagatcctctagagt

SEQ ID NO: 433141 - DNA, 1420 bp, Homo Sapiens
  misc_feature (887)..(946): n is a, c, g, or t
  misc_feature (1036)..(1089): n is a, c, g, or t
gcgtgacacttgggcccagcctaatttattactttttataagcgatagccgtactgagccgccccctgaaggcggctgccaggtcttgccccaggcacctgggactctgtttgcaggccctgccctctgggttgagaaggatgcactttggacaagtcatctgtgtttgtgttttccagtttttctgtactttttaagtgttttgtgttacctggtctcattcccctccccacacctacccatttgaggggatggagttgaagtcacctggtcacctgtaccggcccagttcggctacaacctggagtgtccgtaaacaattcctctcacccacaaaacaatgtaatcccagcgatggactggattctgaaggccacttcccaccatcatagctgccatgcccaggcagtgcctgctctatatatagagtctgcctccaatcctgctggcttcagcctggagaagggatatgggagctggagctttgatggatgaataggtgttcaccggatctgggcagaggggtcatccgctccccaggtgggcactgataaaggaaggtacaggcctcacctggaactgccaaggcagcctccagaaatgctcggctgtctcggggcacgctccagtatgccagtcctgcgggattacgtccagctacttccagaaacactcagtgtcccctcccctcaggctctgccttggcctggccttgtccagtctaccctggacaagatgccgtgtgtttgaggcccagcagagtaagcccttggccgtgatgtgtctgaaatacctgttaggggttccctccatatgtcagagcctctctgggatgaagttcaagccagaaaacccagtcgaggctcaagtttgaatttcagcttcannnnnnnnnnnnnnnnnnnnnnnnnnnnnnnnnnnnnnnnnnnnnnnnnnnnnnnnnnnngactaatcccattgactgtttattaagcacctactgtgtgccaagcgcttttacgtggcttctccctcagccagccttgagaaggctggnnnnnnnnnnnnnnnnnnnnnnnnnnnnnnnnnnnnnnnnnnnnnnnnnnnnnnggcggagacctgtcccacgatcacccagcaggagtcgtggcagaacggagcatcagccagaccctgttgtgggcgttgtcatcaagggagcttgaatggagggtctggtgtcagatacagccgactccagccccagctcatcccccatgatgctgtgtgacccactgggcactctggtgagggagctttccagacatcaacagcccactctgcttccctttctgagtcccctgtccagcactgcctagtgttggagggtagaccaaggctgtgcatgattcaccccctccttccatcctggagctggcagtgaataaaagcccgtatttac

SEQ ID NO: 433142 - DNA, 608 bp, Homo Sapiens
taactaacagctgcctcctgggtaaaataactaaactaaaaaagtacaaactatattccaattgaacaagtaaagctaaaacattatcccacagaatataggaagaattgggcaatgtcaagtaatacagataaattctgctacacagtggctcagaatgttaaaaccaagacaaattatattttaacatgccttgcattaactataaaaaattgcaaacatcaacctaatgactcttaagatttagaatataaaatacatttctattttcccttccccatttgaagagaattaaaatttcaattttttcattctttttactccactttacaaagttattaccaataagcaagaaattacattccttttatttctaaatacttcagtttatgactgagaattctatttcacaatatcaattcattcatgtatttattgaccatttatctacattcaaagcattatatgaatgcagaccaaccaactcaatcctgatttctgaagataaatactacgaataattgctaaaggcagacttttctcaagactactgcagttgccaaaaatacctattattcctataatttaatcaatgtgtgtgtgtaatc

SEQ ID NO: 433143 - DNA, 1363 bp, Homo Sapiens
gattcatagactttatcggcttcttctccacccagcggtttctgcaatgacaaccgcgcctgtacaatacacatggttcactctgttaaagctgcagggcaacgggagggggctgggggtccctgggcaggcatcaaggctaggggtaagcagcagccaagactgggccagtgggtcccagtgtccgacccagagggtggtggcagctggagttccaaggctgttggaaggggtcaggaggaaggctgggaagccaggggctgcagggagaggagagtgcatcagcagtagcagggagggggcagggagcagaagggggcccatgggacactgtcagggcaagagggcatgggacacagcacctcctatgtccatagaggatttttgctgcaggaacaagacagatcactgtatataagggtctgtacaacattacctatgatacaatgttcacatatgatacaaggctctttccctctttgagttttaaaaaataaatgtacaattccagagctttgggtaaaataatatatacaccctcatagcaggagcagcagctgcttttgctacggctgttgctgtctcttcaaaagggaaagaggtggtgccagaaagaagggtgagtctgtgccaggaaacctcacccagtagctgccaggagcccctgcacccctcaggccttgaggctggtgatgggagagggaggggagtaaaggtaataaaggccttgccagagtccagtggcgcctttacagtctctgccatccccctctccgcactttggggctgcctgccccaggtatagggatccaccccaccccagctctatggggaggacaaagggagagtcaaagagagagggacagagaccatgttgttggtgtcagacacatgagccagaagggggatgtcaactccctccttagcagttagatatccctaaaagcaggagtgtgggcagcagacaaccctagctcctgatactgctctacccgagcccactgcaaggcagggggagggtcctctaggcagctgaggcctgtgtttccctgagcatcttttaccctctcatcagagcccatccctggaccttccagaggcctgagtgggggacttgcaagggctgatgggtaacccctcccacctgctgctactcctgccccaaaaagcagcttggctcacaagcctgggcatgcagggcagcacgaggagctgagcagggagtgtgggggtggagaaagcaccccgcaccatccaggggcagagtagacaagggtagcaccaaacagaaggaccccttccccagcacacacaacatccaccctcaattaccaagatgcactcctgctccctaaaagaagac

SEQ ID NO: 433144 - DNA, 195 bp, Homo Sapiens
ggtgctgtcagtcatcaaactaaatttaaaaaaattatttgttttgatgacaaagcaattatcattgaaacaagatgattttcaaatgaaaatacgaggttaatgcagtccagtcattagcagggaaaaaaagaataaatatttaaggtttttcttgttaggttgctttgcacattggagtagaaaatagttttg

SEQ ID NO: 433145 - DNA, 930 bp, Homo Sapiens
gaggagtacagtacattctggcagactgtaaatattaagggtaacagaattttgatttaaaagacgctttcaaaaaagcatttcacaaatgctctaagtatgtttcaaaaatacacttaaaaatatgtttccaacacactgaagggatttaactaagatccccaattacagttacgatacaaactgtaagctaaaaggcagcaacttaagctgagacagttactaacatccctcgagcagcgttttttgttgcgattcggcgccgcacccgtcaccccgccctccggggaggaacctagaaaggaagggtggtacatttctaaaccaggccacccacacatgaatcaagcggcatcacaggctgtcaacaaccgggtctctattttctctcctcctccggcgccccgcccgtgcgggacatcagctcccaggatgcgtcaatcgcagatcgcccaagcgtaagaggtggcgagaggccaccacggttgcccaacagttgcgttcccaggctgcctggtgtgacgcagcagcccccgcccggaccctgaggcctggcgctccgactgagccgaggcctgtgctacccgacactccttgcgacccggccccttaggcttattcagcgcggcccttcccggcttcccgagtcccatcgcagtctctccccacccccgttcctccccggttccttgtcagtgtccgccgcgatgtccttgcgcaaccatcccaagtgacattagcgcccatacccgcacggagcgagcctgaagctcccacttcccggaattcaacgccgggccgctaagggcgggcacccaagcgaggatcagcggactaaggccgcgaccagagtccagcggtctccgcgcagtcagagtccgacagcctctgcgatcccggaaattccggaccggtaccacctaattttgg

SEQ ID NO: 433146 - DNA, 891 bp, Homo Sapiens
  misc_feature (17)..(17): n is a, c, g, or t
  misc_feature (497)..(512): n is a, c, g, or t
  misc_feature (768)..(768): n is a, c, g, or t
  misc_feature (805)..(805): n is a, c, g, or t
  misc_feature (860)..(860): n is a, c, g, or t
tcagaattgagcttttnttcctgcatctcagaaataccaggaagaagtcagcatctcattaaacaggagttgtctaaactgtggaagaaaatatcccccattctttatcctacgctgaatccacaagtcttcccatcttccaccatcttctgacagttccataatatattggtatccctcacagggcagggacaggaaggaaataaatctttctgccacttgtttccaaccgaaaaggaaaaaagttaaaaattactaaagtgttctgaaaagagatttcaagtggtctgtgctgcttttttgccttgttacgcacataacttgtgactggctagatagggccacgtgtatttatcagccaaggattccattgcaggcaggatggatttcaaaacctctttgtgtgctgggccgtgctaggtagctggaatatctgaggtaaattaagcactgatttgttcccagagttgtgcataattctttaaaagtaggctcgnnnnnnnnnnnnnnnngtccaggatcacctaagtgaagtactcgtggttctaagttgctaacccagggaaagaggatattttcctgtcctaaccttggtttttgaaatatgcttctcctgtgtgccctctctggggtatctggcccacagtagattgctcagcagatatttgaatgagcagatgctttgctttgtcctcctgtgccaggctcctccccacatcctctggatcagctccacgtgcctagattcagactccgtgattcaccgtnggggcccttgaataggcattcagtctgaaagaaggtnggagggagaataatgttttcccagggttcaaatggagactcagggctgtttcctncaaagacagaaacttgcagagttgcacagca

SEQ ID NO: 433147 - DNA, 417 bp, Homo Sapiens
gaggaagagaggaaggaagaagaaaaagactgcaagctttcctgcccaatttgggattttcaaatatttaattctaaattccagattttaaggaagatttttcaagaaactgcaagtttttgacttgaaggaaagaaagaggaaggctggtagaagcagttagagcaatgtgtttgaaattatgtccatgaaatcacagggatctctgaaatatctttaggaaacttgaaatttatgaggtctgaatggacttgtttaaaattggctctgactcctcacttctgagtttcatcctatccgagggatgagattaaggcagaggcaaaagtttcacacaaagtttctgcaacctaacgtttaatagtccgggtctacagggaagaacaatgacacagcttgagcgttacttcctccttc

SEQ ID NO: 433148 - DNA, 1129 bp, Homo Sapiens
gctcccagacttcacgtttattgaactgagcgagaaggctgtgcggaccttcctcaatcccgtccaacccccagcccctccccaagcccccgctgcaactacgccggcaggtccgcagagtgttgcttgacagcgcgtggcggtgcccggagtcttaagacaccgccagtctctggcgccttcagtcatggtaggggactccagagggcacgcccgcctcttgaagccctaagtccggcttggaggcagcggaacctccggagaggtcagaggtagagcgaggacactgtcggaggcggtggcgctggtctggagggtaccactaggggcgggattccagcccctgggccgggcaggtcacccgatgggcaccggccctgggggtcggcaggcagtggcttccttggggggtgggggcttggctggcccctgagactggagtctcttggacacagggtcaggcggcagcggcctggaagggggggccgggaagctgagagcactagccttagtgcctcgtgccagcagggccctctgcggaggtcctggccgttcagagggaccagattgggctgccctgtactggcaggtgggtcccttgagctggcagattcgctgttgcagtcgggcacggtaccattagctggtcccatgtcttaccatgtaccaattagaccaggatgttgaggagcatcccttgttgtcagggagctggttgctttgagctgagtggtgcagtcagggggtgcccagccctcctcacagtagcagtgcctgttgctgtcacagaccccatgtccatggcatttgcttcgacattcctgtgcccccaggagatccacacgctggcatcgatggtctatacacaccaggccagggccacaggctgtgccaggcagagtcaggaggggctgggccacatcactgcccaggtccaggtgcacccagctgcagttcagctcagtcccattcacatctattgtctcccagagtagatcccggatggagcccagcagaggctgggtcctacctgtctggcactggagctgcccacaaatggcatctctaggggtgcaggacacataactgccactggggttgcgcccacagctcatcccgagaattccgg

SEQ ID NO: 433149 - DNA, 1060 bp, Homo Sapiens
ttaacgctcccaagatgtcacgtttattgcaactgagcagagacaggctgtgcggaccttcctcaatcccgtccaacccccagcccctccccaagcccccgctgcaactacgccggcaggtccgcagagtgttgcttgacagcgcgtggcggtgcccggagtcttaagacaccgccagtctctggcgccttcagtcatggtaggggactccagagggcacgcccgcctcttgaagccctaagtccggcttggaggcagcggaacctccggagaggtcagaggtagagcgaggacactgtcggagggcggtggcgctggtctggagggtaccactaggggcggggattccagcccctgggccgggcaggtcacccgatgggcaccggccctgtggggtcggcaggcagtggcttccttgggggtgggggctttgctgagagccctgagctgcttagtgcctcgtgccagcagggccctctgcggaggtcctggccgttcagagggaccagattgggctgccctgtactggcaggtgggtcccttgagctggcagagtcgctggtgcaggcgggcacggtaccagtagctggcaccaagcatcaccaggaccaataagaccaggaggctgaggagcagccctgtggtcagggagctggttgctttgagctgagtggtgcagtcagggggtgcccagccctcctcacagtagcagtgcctgttgctgtcacagaccccatgtccatggcatttgcttcgacattcctgtgcccccaggagatccacacgctggcatcgatggtctatacacaccaggccagggccacaggctgtgccaggcagagtcaggaggggctgggccacatcactgcccaggtccaggtgcacccagctgcagttcagctcagtcccattcacatctattgtctcccagagtagatcccggatggagcccagcagaggctgggtcctacctgtctggcactggagctgcccacaaatggcatctctaggggtgcaggacacataactgccactggggttgcgcccacagctcccaaaa

SEQ ID NO: 433150 - DNA, 2800 bp, Homo Sapiens
  misc_feature (298)..(298): n is a, c, g, or t
gccccgcccttcttggaaagccccttaaagtcccggctttgggagggcaggcgggaaccttcccggaagaaggtttcagaaggtagaagccgagggacacctgtcggaagggcggtgggcgcttggttctggaggggtacccaatagggggcggggattcccagccccttgggcccggggcaggtcaacccgatgggccacccggcctgggggggtcggcaggcagtggcttcccttggggggtgggggcttggctggccccctgagactttcgggctttctcaccaccggggtccancgggcagagggcgggtagggggattgggtcggtcagccagctcagcctgggagtctcttggacacagggtcagggcggcagcggcctggaaggggaggccgggaagctgagagcactagcctgcttagtgcctcgtgccagcagggccctctgcggaggttcctggccgttcagagggaccagattgggctgccctgtactggcaggtgggtcccttgggctggcagagtcgctgttgcaggcgggcacggtaccagtagctggcaccaagcatcaccaggaccaataagaccaggaggctgaggagcagccctgtggtcagggagctggttgctttgagctgagtggtgcagtcagggggtgcccagccctcctcacagtagcagtgcctgttgctgtcacagaccccatgtccatggcatttgcttcgacattcctgtgcccccaggagatccacacgctggcatcgatggtctatacacaccaggccagggccacaggctgtgccaggcagagtcaggaggggctgggccacatcactgcccaggtccaggtgcacccagctgcagttcagctcagtcccattcacatctattgtctcccagagtagatcccggatggagcccagcagaggctgggtcctacctgtctggcactggagctgcccacaaatggcatctctaggggtgcaggacacataactgccactggggttgcgcccacagctcccaaaagcatttccccgagtattagctgtctggaggcaaagtggcgcagcgggctgggctccaggtccccaaagtgactggcactgctgggcataggaggcacaacgcccgtgcatgcacacagcttgcccgccagcgcagggctcgccatcccctaggctgacatcagggggacactgggagctgtctcctgggcagaattcaggcaagtcacaatcccctctggtaggacgacactgccagccagacgggcgcagctggcaattttgacaacagggtccgtcagatgcacactgtgcacctggcctcagctggcaggtcaaagaatcacagcagggatcgacgcagtcatccaggaagccacagtcacactgctcgccccggctccacaaacatatttccgcagaaagcagccatagggggtaggctaggcagccgttcgaagaggcagctgcccattccatccaggagggctttctccagggcccgtcggctgcagttgctgaagttcaggcctggtaggaagtctgtggaggcctccatgatgcaggtcttggctggggctggacctggacaggggcagctattcccaggcaaatcatggtccaggcccaggctgtggcccaactcatgggctatggaggaggcgactcccaggatgctggtggagtggtccatgttcacacctcctgagaagtcaggagaacagatggagttctgaatggccatgcccaccgtaggcccagagaatgaagtaccagtcaccagctgggcactgtcatggggcaatcgaggcagcaaatgtgccctgcgccagtggaggaagttttcgagggtgacagctgggtttgggctgatctccaccaggtcacgctgggtccaggcctccaggcccactagtgccactcgtacattcaggggccggaagaatgtgtccagcaagagggccacttccagtgtgcggtttagcaggtgctggaagtcccggtatttctgggcctccgagtgatcagccacaatcaccaactccacagtcttggtctctgttaccacatcccgcctccggcgaatgtggcgctgtcccagggggtgctctggtggcgtctgagtgtgtacagattcccgccagctcagggcacaggtgtggcctggcaggtggagatcttggattcgcgaaataatgggaggaccctgaaggtccccaggcccctgctccagggtatagcttctctctggggtcaggaccaccaagcctctgagcccagagcaggtgcagatggacacccaggagcctgcatatccccgcactcttccctggtagcagcagttctccaaagtgtgtccctcactgaccacccgagtgccatcgggctggtaccacaccagggttgggcggcctgggaccaactccctattctgtagcagctccaggatatgactgtcaccgtccagctccaacttgatcctcaggggctcaggcagactggtctgaagcacctttttgaggctaattgggagatcgtcctgaaggacctggggctccaagggctccctcggggccttctctgactctgcctgctgctcctcagtgccacctatatttgggagcggccaggaaggcagagggctgcccgcgcccaggagccccagggcccagagcagcgccagccgcatggcagcggcgctccgggccgggcgagggcagcaagtgcggaacagcgcgcggaggagcggccggcggccaggtcgcctcggagaacccagcagcgccgcg

SEQ ID NO: 433151 - DNA, 962 bp, Homo Sapiens
ccaagatgtcacgtttattgcaactgagcagagacaggctgtgcggaccttcctcaatcccgtccaacccccagcccctccccaagcccccgctgcaactacgccggcaggtccgcagagtgttgcttgacagcgcgtggcggtgcccggagtcttaagacaccgccagtctctggcgccttcagtcatggtaggggactccagagggcacgcccgcctcttgaagccctaagtccggcttggaggcagcggaacctccggagaggtcagaggtagagcgaggacactgtcggaggcggtggcgctggtctggagggtaccactaggggcgggattccagcccctgggccgggcaggtcacccgatgggcaccggccctgggggtcggcaggcagtggcttccttgggggtgggggcttggctggcccctgagactgtactggcaggtgggtccccttgagctggcagagtcgctggtgcaggcgggcacggtaccagtagctggccccaagcattaccaggaccaataagaccaggaggctgaggagcagccctgtggtcagggagctggttgctgtgggcggaagtcaggtttaagggaggacggggctaagaactctagatccatgaaggcgcagggggcagggagtgaagtcaagtgatcagggagagtgaagggttcaaggggcacagactcagggaaccagcagcaaaggggggtcagaaagagagggccgagggggcaagataaagcatgcctaagttcagagccaggctgctggtctcattcatgttggtggcagccacagtccgtgctttatttccacagtccatgaggtcagcaatgtctgcgtaggaggtcacagccaatttggacaggtcctgcacgtacgggcccaggatggggtgctcccggacccgcagagaacccgactctggggttcagaggtctcgtaccgctc

SEQ ID NO: 433152 - DNA, 1259 bp, Homo Sapiens
  misc_feature (177)..(177): n is a, c, g, or t
  misc_feature (377)..(377): n is a, c, g, or t
ccgagtccacaaaagcattctcccttcttaggcatcgtacctcggtaggtggattatttctcactgatcccgtggggagggaggttttttgtgatgcatgtgtggcacaagtatgtaagaggttttacaagagtctactaaactataaaaaatttttttgctggggggagtgggctncgcgtgggtgcaggcccacttccctacacaatagggggttattgccgttaacacggggcgccccagatataggggggggaagctctccgctgatgtttttagcggggggagcggaacactcgtcaccgcgtttttccccaatagcaatctgctcccctctttatttgttttatgtgaggagtgggggatgtgaatgcatngcagaggggtgtaaaaatttgggtcgagaatcctggggggagacacgaatttgaaaaacatacgaagccgtgggggccaaagggggaatgtcactttctggggcccaggtcccgccctatttatatcccggttttttcaagggggcccctttcccacgagcacaagaataggtcttaaaccatttgcccgttgaaatccacttactccgaagttgccccgccaagcacgggggttactttccgtccctgggagtttcttttaattcaaccccggggcattaggggtcccttcgttgatgaaatggccttagcagcggatttgcttggtgcggtcagcatacctgagggtgctgagagtctcctcgtaattgatgtcagcaggggttcagggctgcaatcatggctgtgcgtgagttcccccccaaattttccttgagcagccaggtgagcacagagtccctgtaggggataaaatccgactttcgcttctttgattgcatatctgcaagggccgagatcactttccctagtgtagtcagggacttattgatgttggctccttccttcaggcgcatgccccgggcccttgaggagtcggctcgctcactcccagcaaggtccaccaaactgatcttactgacgttctccgagtccagccccgtgagttggtcatggcagcgttgtgtgaagacgatggtaaagacggcatgggaacggctgctggtctcattcatgttggtggcagccacagtccgtgctttatttccacagtccatgaggtcagcaatgtctgcgtaggaggtcacagccaatttggacaggtcctgcacgtacgggcccaggatggggtgctcccggaccctgcagagaaccccgtctctt

SEQ ID NO: 433153 - DNA, 558 bp, Homo Sapiens
catgccctgagggggcatctcaccacgccaaccaccgtcatgtctaccagcaccacagccctaggtggggggagaggccgtgcccttctctccccccaccgttaccttcggtcttctcaccaccgggtcagcgggcagagggcgggtagggggattgggtcggtcagccagctcagcctgaacagagagaggggcaagtggctgtgagagcataaccaggggctgtggacaatgcacagagattccccagaggggttcaagtcaacatgcaaagtcagccagggggcaggagagaatgagggcatgcgcagagggcttggaggcatgccagctgatgtctcaggggaggaaggtgtaggtcaaccgcagtgcctggccgactgcagtcccgccattgaccaccagatggtggtagaaaccaaggcaggaggctcaccctttgctgcttctggggctcagagtgtctgaaggctgagggcaccccgatcacctaatgaagagcaccactggcagagagcagtgatgagaactgcagttagggtaaggctccaagggatc

SEQ ID NO: 433154 - DNA, 878 bp, Homo Sapiens
  misc_feature (763)..(771): n is a, c, g, or t
tagagaatcacttgctacataatctctgtccttgaagtgcttttgcctataccttgaaaattatctttctagatattaaaagtgatctggtttgaagaagtatcctggcatatgatctttttcagagggaaaaaaatacattaagccatactttagataactttcaaggctcttcaatgatctagctaggccgaaaataaagttacacaattgaaacttaaaatttgaaggtttttgtttttatactctattagcattgattggttcgatttaatggctttgcttactgatatccaattccatgggcattatgcaaaacaaattacaacatttggattgtttttgagttttgaaaagcctgatattgacaaaaattagagttcaccacctttaaggcacatgaggctatacagagtaagccacaaacaaaaagtctctgctggagaacccagaaacaaacaagacttctatattggttgtgtactaatatttctggctaaaatatgaagacatttgctatattttataatttttaaagctcatcagaatctggataccgctatagtttcctataatttttcctttatgagaggatttagcacttttaaaagctaaataaaatgagtagttcacccaatctataatgagtcattattttataggtcagtttctgagattaattcaccaatatctaattcactcaagggacagaggaactggacaaaactgccatagcctaacaaaaatgaggtaagtctcatgnnnnnnnnngtgttattttattctaagttcttgttgggagagaatgaactagccctttatacctcactacacattataatacatcaccttcctttaatcccagtagggccaccgtg

SEQ ID NO: 433155 - DNA, 1288 bp, Homo Sapiens
cctccgggagcctgttccccatggcgcccccttagagggaggagcctgaaagcacgcccccaggctgccagctgcttccgcccacctttcccgtggcagagattcctttcccacgttgtgactcaggctgtgtaacccaggcctctgcagccttctctgaaattccaatgcagccaaagggcagataacattttacagataaaatactcaaccctggggtaaggcccccacgcaccagtactccttctgacctaacacccaggccaaagctatgtcaggatctgtcttgttcctttcagccgtggccactccttcctattggcaaattctcaagagaccctctcctcatgccttcttccactgcctcttcgcagaacccttgggggagcccaaggagacccgcgtcctaaggggctgagaaactcctagaagaccgactgcctagcctagtcttcccagtgtgggtggctccaaagtcctgggtcagaccagtgcaaccccattatgtgcagcatgaaactaatccccaacaaaagattaaaaagaagccacgagatccaacaaatgcaaaggctgattggaatggaattgaaggttggtcctggccacagccctgcctctgtcaagcaggtgtcacacccaagtccccagatcccctctcctcaccctcactgccctctctttctgcaactccccctccaccgcccttcccaacatgcccaaaccttccttctcatactataagatgtgctgaagaaagcaagaaactgcagggggaagaataagaccacacacgtttatatatatttggattaagaaaatgaatcacaagccatataaaattgagataaattggaaaactctaaggtaagtaccatgtctattcccagctgcctagaacaaagatccattaaaaatccatggtgtgaatttccaccatgggtcagaaggatggaagactaaggttttcctgcaactttcccaaccgcctcccaccagtgcagcgagtgctcccctggctgagaatcaaatacaggtgtgtttctaaacgctggaacgaagcagtcttgctgccacacgagtggagcccggagctaggattctgaaatccaaacccaggcctgccatcaccaggctgcgtggagaatgaagacagggagccaggcagacggtttctccgtgcatccatcttaagatgcagccatgggaaggaaactgactgggatgggagttgtgttcctccccaaaactcatttctttggttgcccgatgtcaacttcctgcctta

SEQ ID NO: 433156 - DNA, 492 bp, Homo Sapiens
  misc_feature (364)..(364): n is a, c, g, or t
  misc_feature (409)..(409): n is a, c, g, or t
  misc_feature (433)..(433): n is a, c, g, or t
  misc_feature (477)..(477): n is a, c, g, or t
aataagaccacacacgtttatatatatttggattaagaaaatgaatcacaagccatataaaattgagataaattggaaaactctaaggtaagtaccatgtctattcccagctgcctagaacaaagatccattaaaaatccatggtgtgaatttccaccatgggtcagaaggatggaagactaaggttttcctgcaactttcccaaccgcctcccaccagtgcagcgagtgctcccctgggctgagaatcaaatacaggtgtgtttctaaacgctgggaacgaggcagtcttgctgccacacgagtgggagcccggagctagggattcttgaaatccaaacccagggcctgccattcaccagggntgcgtgggagaatgaaggacaggggagccgggggagacggttttntccgtggcattcctttttaaggtngcagcctggggaagggaaattgattggggtggggattttgttcntccccaaaattcttt

SEQ ID NO: 433157 - DNA, 551 bp, Homo Sapiens
  misc_feature (72)..(72): n is a, c, g, or t
  misc_feature (91)..(428): n is a, c, g, or t
gaactttatattttgtccaatagtcctaagaaattttccctgtagagaatgtcatctaagtcaaaacaaggnttgaataggggcacccaannnnnnnnnnnnnnnnnnnnnnnnnnnnnnnnnnnnnnnnnnnnnnnnnnnnnnnnnnnnnnnnnnnnnnnnnnnnnnnnnnnnnnnnnnnnnnnnnnnnnnnnnnnnnnnnnnnnnnnnnnnnnnnnnnnnnnnnnnnnnnnnnnnnnnnnnnnnnnnnnnnnnnnnnnnnnnnnnnnnnnnnnnnnnnnnnnnnnnnnnnnnnnnnnnnnnnnnnnnnnnnnnnnnnnnnnnnnnnnnnnnnnnnnnnnnnnnnnnnnnnnnnnnnnnnnnnnnnnnnnnnnnnnnnnnnnnnnnnnnnnnnnnnnnnnnnnnnnnnnnnnnnnnnnnnnnnnnnncccctgtacctgtgaatgtgatcttatttggaaatagggttttgtagatgaaattaagttaaggatcttgagataagatcatcctggacttagggtggaccctagatccagtgactaatgtcc

SEQ ID NO: 433158 - DNA, 1365 bp, Homo Sapiens
ggggccaacacattcccggaggtttgggcccaagcgccaaaccgcccccccctgggtttccccagacggccccctttgtttttccaaaccacagcccttttattgttagttagccataggtgaatggtgtttgggccacaatgcctgccctgacggcatacttccagccatgaccccgcccaggccagccacagggttggcccatagtgtgagcagagctgcatcaagtacccggtaaccacccactcatccaggggaagcccactttgccggtttccatttgggcgcagcacatggtaggctgtgtgcagtgcctgcactcgggaggggtgccgaccgcacataggccggcagacacagaacccacagcccatagcagtgccccagcaggcaccgggcccacagctcaggcacagctgctgacttctgtgccatccgctgtgcaactttcatctccctgtttggtacggcgaggagcaggactgctgggggcgctacgggaagggcctggcacaggcagggccccaggttgctcttgaagagactcaaacaactcagcccgtagctctgggaatccatcatagcagtactggggagtggattcactgccctctggtaaggcaggctcctcgggaggtgtgataaagacagtgagctcacttcctgacagctcctctagctccactaagggtgtcggctcaggcttctcctgctctgggtggaccttttcaacacaagagtcaaagaattcaagggcagcatggcgagcagagccaaaagagcactcctcaatgaactgtgagaacatctgtgtgtgcagcagctgagagtaaagtttgtggctggagcgttcccgggatttgaggaagccctgcaggaagaaaaggttgtcaacatcacgagctccctcggagggggcctgggtgagtgggcgcaggaagacccggtagcccttgagcagacaggccatgaagcggaggaaggctccttggacttcgcgctccagccgggccctgcggccacacactgcctcgtagtctgtcagtaggaactccagggatgcttcctcctcaggtccagtgtatgtctggtccagctgctggtacaggtttgtcagtgtggccagcagaaccttgtagggtctgcggggcagggtccgaggggagaggagcttcttttcctcagtctggaagagcgtgttggtatcaaggtctacacagatgacatcagcaggcgggtcatgcagatcaaagtagctggagtggatacccacaatgaagggcactggggcactcagcacatctgccagcaccagcgggcacagaggaatgtaggggcactgccagtgcagtgggaagatcatcg

SEQ ID NO: 433159 - DNA, 324 bp, Homo Sapiens
  misc_feature (313)..(313): n is a, c, g, or t
gcctgttacgtgccaagtgctttttgttaaggacataatgtttttgactggggatcatgtttggctgatgtaaatattaatgccaaaataggagctaggatgaaagtaacactgtaattagtagtagaatttatttcatattaaaatgtgtcatgacgtaatttttatggcttggctcaagcaacaattttcagagtgcaccctcattgatgctactcacagagacgtggatgtgctgttactgctttctaactctgcctactacgtggcctattatgatgatgaagttgataaagtaaaccagtatcaacgnctaagtctagg

SEQ ID NO: 433160 - DNA, 2632 bp, Homo Sapiens
  misc_feature (108)..(135): n is a, c, g, or t
ccttttcttcatagtttattttgaattttcatttttggataaccaagcagctctttaagaagaatgcacagaagagtcattctggcacttttggatagtacataagannnnnnnnnnnnnnnnnnnnnnnnnnnnaatagtcacattcagctcgcttgctcaaaccagactcccacattgggtgagcaagatgagcccataggattccagagttaatacgtaaccgtatatacaaacagccaaaaaaccataatggtgccacagggatggagcagggaagggcatctctaacgtgtcctctagtctatcttcgctaaacagaacccacgttacacatgataactagagagcacactgtgttgaaacgaggatgctgaccccaaatggcacttggcagcatgcagtttaaagcaaaagagacatcctttaataactgtataaaatccaggcagttccattaaaggggttaagaaaaccaacaacaacaaaaagcgagggactgtctgttgtcactgtcaaaaaggcacttggagttaatgggaccaggattggaggactcttagctgatacagatttcagtacgatttcattaaaaggcttggatgttaagagaggacactcagcggttcctgaagggagacgctgagatggaccgctgagaagcggaacagatgaacacaaaggaatcaaatctttacaaccaaattgcatttaagcgacaacaaaaaaaggcaaaccccaaaacgcaacctaaccaaagcaaaatctaagcaaaatcagacaacgaagcagcgatgcatagctttcctttgagagaacgcataccttgagacgctacgtgccaacctaagttctcaacgacagctttcacagtaggattattgtgataaaaatgactcaagcgatgcaaaaagtttcatctgttcccagaatccgagggagaactgaggtgatcgttagagcatagcgacatcacgtgcggtttcttaatgtccctggtggcggatacgccgagtcctcggaaggacatctggacaccactttcagccacctccttgcaggggcgacatccgccaaagtcatcctttattccgagtaataactttaattcctttctaacatttacacggcaaacaggaatgcagtaaacgtccacgtccgtcccacggctgggctgccgttccgtttcctccacgaacgggtacgcgcttccatgagaaaggatatttggcaattttatattccacagtcaggtgggtctgcgatagctcatttaatgttaaacgccatcaggggcctctcctcccgtttctgccaggggcttttcttgtcttctccttggtcatcatcatcatcgtcttcctcttcctcgtgggcagatcttctctggtgggggctggctgctggctccgagggggcatccgcagtccgtctggtcgtctcctcctgcaggctgggcagctggccaccacttctccgactcgacccctccaacaagcatcgcagggcactgtcctcgggggtacagaccgtggtcccacattcgctaccactctgttccacgtcatccaggtacacgagctgcgtgtaggccgtgctgtctggggctcgaggctctttctgctggtgctcttggacgggcgggtagttctgctgcagagacaaagcatctccccattcccttccgggctgattttggttcattcatatctacgccagagtccaaactggcatcattacttccgttccttccagctctttggagatcacatgtatgaatgtctaacgtgagcgttggacctgccatcacaaggagacgaaccacgcccgtggggtgcaggatagcggcttcccacccccaagctccatcagggccttttcagtcaggagctgcacctcactgttcatctgagccaaagccgcgtcgttcagggaagctgggatggagagagactccgacatggatgcgttctgagggctccactcccgggtgcccgcatcctgcaggtgctgctgagagatggcctgggaagacaggggctggggctggatctgtgaggacgggtgtgggaagatcccggcatggggattggacagctcagcctgtagtctttctatctcaagctgctgatcagccgggacgacgaggggctggctgacataggagtggtccccggggagtttcatataatgagccgggatgaccaaggcaggcagtactttcctgtaaacgctgtcattgacctggtcgacagaactgcagcagattaactggccgggccgtgggaaggacgtaggtctctcgaggtgatctactgatcgcgacatcatacattcagtgggtctgcggtccagcagctgttctttctcaggtgatgaaggcgcggggtacagatgttcctgaatggtgagtttgcttcccgtggaggctggaccttctctgtcctgcttttcaaataaaggctgtgagagcacggtgttgtaactacccctgtagtcatcattgcccgaggactcgtagccttctctttccatagattttcttgcctttaagggaaaaacctccactgacttatggtagtcttcgacgcgtggtcgacgatatcccgtactccggaccgtaccagcactt

SEQ ID NO: 433161 - DNA, 1002 bp, Homo Sapiens
ctgattttgatgaaaaagattatttcagattataaatttcaaattccatatatggttttaccccaaatttacctaggtctctaggtttcaaaacaactttgcacatgtaaaatgattatgcactgtaatacagtaattgtcaattaagagaaagggttgtgaatcacagaggcaagaccttaggagaaaaaaaatcctgatctatgtttctcccctatgaggaaagagacaaagctatggactagcagagcctgaagaccccaagatttttggtctaagaaactgtagtattgcaactgataaagggaagatatgtctagggcaggtttggggtaagtttgagttgtctctcagacgtccaagtggagatactgagtaaggtattagatatatgggactggatttcagaagagtgatctgggaactccaaaattaagaggttaggaataaaaggaagagccatccaaggaaactgatgaagaagctttgagagtaaaggagaataaccaaggtaatgtggtgttctagcagccatgtgaatgcaaaacctgaaagagaagggaaaaatcaattgtgacagatgctgctgaagagtgacacaaataacgacagagaattaaccattagacttagcaaactggctgccactggtgattttgacagtttctatgcagtaagaagagcaaaaggcaagagttacactttagccacaaatgccagccgacaaggcagaaattagatgggtcgttgtcctggaaactagaggatttatgagacatagcatctaacatcttaggactctgattcatctatgttcataatgccctgaaagccccaccccttccctcagacacaaggacactacctgagggagataactcggggggttggagggctgtgtaataaactaagcgttgtttgtgttttacttttttgccaaggcagactattgataaagcttctgcctaaattacagatcaactaagctttaaatcaaagtta

SEQ ID NO: 433162 - DNA, 268 bp, Homo Sapiens
cacacctggcccctcattttctgttttttaaaaactcaggctgcagcacacagaatagatagcaagtgcacaaggttggagacaaagaaaccagttaagagacagctttggtaatctgaaatgatggaggccaagattagaaggcagtacaacagaaattaagagtaaatcctctgaagtcatttgcctatattcaaatccctctttttccacttaccaggtatacaattttaagcaaagttgcttcctgctatggtttgaatgctac

SEQ ID NO: 433163 - DNA, 1172 bp, Homo Sapiens
  misc_feature (345)..(345): n is a, c, g, or t
  misc_feature (404)..(466): n is a, c, g, or t
gcctttttggccccgggttttccaggcaagggcttttttcccacggggaagaatagttgtttcctgggcagggattgtaacccagatggatccaggggtccctcaggcagcttccctcttttcctggagccccctgctccttcttctttcaattcttttttgactgctggcttccggggggtgaagaagctgctgagcgtcttgggagctctgcggggaggcttggtctgctcttcctcctcctgcagttcctgcttcgtggccacctcaggctctgaaacgctttccgtcggggtctctgctttggaggtctttaggggcttgggaggcgtggtgggctggtcnccgtcttctccttccttctctgtggccacttcagcctctgtgaggctttctttcggggnnnnnnnnnnnnnnnnnnnnnnnnnnnnnnnnnnnnnnnnnnnnnnnnnnnnnnnnnnnnnnnccaggacttcctgaatggtccgtttcgggagctgcttccgagctgtgcgacgcttcggaatccctgatggggaactgtccatgggagaggtgtcagagagggaagcattgttctcaggagatgtggcaggacggggcggggagacctgtgagcagtccagggcaggcttctggcctttagcagggctaagggcttcatcctcctcttccccttcgctgcccaggacccgggccgccttcctccctggcctcttcaccggagagtcactctcggacaccactccattccactccttcagtgccgcctttggagggggctccgtctctctgctgctattggatgcctccttctcaggcttctttgctttaccctctttcttggggtggaaaaatgacatgatacttcgctgcatgttggcgtcagaattctcccttcctgtccagcacttttcttcgtctgtcagctgctcctcaaggcctcttctcagaggacctgtccaactgtctctgtctctcgtctaccctctacctggccccccctccctctgggagacacctctctgcactctccggcggcccgcagcccgcgctcttccgtctccaccgcgctctcggcagcctcagcgtccccacgcccactcctctgcagacaccccgacatggcgaagcataggccccaagcatttcggcgcacccgccgccctccg

SEQ ID NO: 433164 - DNA, 831 bp, Homo Sapiens
  misc_feature (801)..(801): n is a, c, g, or t
  misc_feature (806)..(806): n is a, c, g, or t
tcttcctcctcctgcagttcctgcttcgggccacctcaggctctgaaacgctttccgtcgggtctctgctttggaggtctttaggggcttgggaggctggtggcctggtccccgtcttctccttccttctctgttgccacttcagcctctgtgaggctttctttcggggtctcctcttcctcctccttcgttcctcttggcttctctgtcctcgtcctcactctgctcttccaggacttcctgaatggtccgtttcgggagctgcttccgagctgtgcgacgcttcggaatccctgatggggaactgtccatgggagaggtgtcagagagggaagcattgttctcaggagatgtggcaggacgggccggggagacctgtgagcagtccagggcaggcttctggcctttagcagggctaagggcttcatcctcctcttccccttcgctgcccaggacccgggccgccttcctccctggcctcttcaccggagagtcactctcggacaccactccattccactccttcagtgccgcctttggagggggctccgtctctctgctgctattggatgcctccttctcaggcttctttgctttaccctctttcttggggtggaaaaatgacatgatacttcgctgcatgttggcgtcagaattctcccttcctgtccagcacttttcttcgtctgtcagctgctccttgcgttggtcccgcgcgccgctgcccgggcaacacacctcagatccgccaggcgcgcctctccctcgtgccgaattcggccacccaggcctcgctaccantaacnccctggagttactgcacgatcggaa

SEQ ID NO: 433165 - DNA, 907 bp, Homo Sapiens
  misc_feature (326)..(377): n is a, c, g, or t
gcatttcccagggattggaatttagtgggagagcacattgatcaaaggctgtttcatcccacatgggcacgaaacataccacattttacggaggatgtagccccagagaagagggaggtggagaagcataaatgaaaggcaccttttccttcctctagaagatgcacagagaatttctgaccttgtgacgtttgggagtgaggagatcccatacagaggcatccaggtatttccagagatcctgtggcaggtgaggtctgccctcgctggagccaactcgtctataatatcttcctaacagcagaacctgggtctcactctgtccnnnnnnnnnnnnnnnnnnnnnnnnnnnnnnnnnnnnnnnnnnnnnnnnnnnntggacccaagcaatcctcccatctcagcctcccaagtagctggaactacaggtacgggaaaactggcttagagatgttaaatatcctggattattgtcagtttaacaaaataatttcggctatcaaagatcaagtgggataaatttcagaggaagaaactgagctccttgcataccatagaggagaggtcgaggtccttccactgaagcaccaagtggggtatataaagccaaactgcccatgagggctgtggtgtgaatctgctagccgtgaaagacagatgcattacaaagggctggatttagtgcactctttcctctcttactccccgcctgaacagccagtgcacaatgaaacaaaacttcttcccaagcctcaatgaggattgtgccgtagtttgaagagatggcatcaaggtgagttgattcagcagcttacccttgtcctcgagccttcccgttctttacgacctctctactctgctgtctgcaccccccgtttatacaccggctggtttctttctcctctga

SEQ ID NO: 433166 - DNA, 2647 bp, Homo Sapiens
  misc_feature (321)..(321): n is a, c, g, or t
  misc_feature (1876)..(1876): n is a, c, g, or t
atgcttattacgaacccccagcgtttcctgagaagtacttcagaatctcattcctcatatttcattggtattggtggagcctatgtttagtgttgccacgtgtttttatgtcctttttgttggacttgagtactcagcccagttgttctcatagatgctttgcattttctctgtgctttggcatctgaatatgttctttaaatgtgtgtttagtttaggacagttactaggaatgagtttataacttcattagaaatcatttctatttttgttatcctgtgattattttgatggtgctagtgactagtttctttgcttttngtgttgttccgtatgctaacatgtgcatggcaaaaatttagaatagccagggtctgtaggcatcacattgtgaggaagggagctttctggaagtacttgcttcatgtatggatgagtgtcaaagtgaatttgatttgtacttagacacacgcgtttacacacacacacatatcacaagatctgttagaaatggaatttttctctttttctggagatagttttcacttttagttggagtggaaatccctttatatttacattgaagtattttaattggcatagcctgctcattattttcatgtttatacactttcccacgttgaggtggtgtgttctgtgctgtgactatagaaatcttggtcagggctggatagattatctaagtcaagcttgagaatgaatgtatgtaattttcctgtttattgtacatgatgggttaggtggggtgaatgtggtacaggaatgtcctgtatgcccaagtgggcaagaaccccaacttgtttctcaggggacttgattgttctcttagctggtggaatatgttggcttatgtgtttgaactctgtcgtgtttaattggtttatataatatatgtatgctatcttgattcatgaacttgatcctattaatttatatgctgatattgtactttagacatacgcttgtctcctgaatgtcctctgaatatttatagttaaatgatttatatttgaaatgtgttgccagacttaacccagcagacactctgacatcacggggcttcactgatgacaggtaacgaaacttcctatgttatgtcaggtagtagtaagtagtattggaatgatgttttcatttttggtggctctcaactggaattggtagtgtttccaggccaagggtcgactgcaggttgtttgagaaatgatgagtaggtcagtctaggaagaaagagaaagtagcaggaaaggaagtgggaagggccagccaaggacagactgtagaggatccacatcaggtggccacgaggacttgcaggctatagttatggtggtgacatgcatgaggtgggctggtagagcaggaagctctgtgatgtcagagcatctactgggactacaggtgcactgtagtccccactactgggggtggcaatgaagacactctgtctgttgggccctagaatttaatgtggatttcctccttccttccaagttctgagattcttaaatgagagctggctgtcttctagaggtaagacctggaatggagtccagttggtactttttcactccctcttagaatctcttatgaaaaaatgatcagagagaaaagtggggttttgtttccccacctaataatatatcctacaaccagccaaatgcacttttgtgaaaatggggtgtgaggagtggttctgcagcttgagtcctctggttttaagtagtttgtttctacttgtttaaagaatcttctggtctgaccacttaaagtaaaaactacatgatttattttcgggcaattatgtttagctttcatcattatactccaacagacccgtctgaaggggtatttntctttaacaataatgtttgtaacattttgttgtgtcaattagagggtcacttgtttgtattgcaataaacactgggaccagttccggggttaagaattaatttttgtttttaatatttcacatgaaaagaatcaaagtaattgtaatggctagaagagacctgccagaagattaaaaaaaagaatgagagaaaagcccagttagtggtgtgcaaacttacttcctttaaatgtcccatggatgtaggacagtgccatgtttcaagatgcctgtgagctaggtcttcaagatttatagaatgttacttatgaacaaaatataattatttatggtacaattcttgtactttagcaaatctggagttagttcatagtcaaagtcagttaatatttcttagaggaaagttttgctttttgtggcaacatttttatagcttgtgtgagttcttttttatttaatgatttgaaagcagtatttttgcacagtcgtgaccgtgtgtggtggcgtcactgtaaccaaagtatatgcaccagcccttgtgcatttattgtttctcctgattttgtggatttaaatgtccaaatgcaaacctttgtgacttcctttggaggacttggcagcacagcatgcccccgtgacctgcctgctgtggtatgagctatgaccaagagcaggcttcctgctccatggagtcctgagttgctctggggcaggggattacgttatgaaaactaaccatgtgtaacaataaatctaccttagcagaaaaaa

SEQ ID NO: 433167 - DNA, 1039 bp, Homo Sapiens
  misc_feature (858)..(911): n is a, c, g, or t
cttctacaaattttctttggtgtccatgtaggcctcatatacaaatactccatctctcaccatgggtttatcttttccatatacccctggagtttctgtaattcacctcaaatgtctatttccagagtggggtatatagatttgtattggttagctagaactttaaccctctcagagaagccatcatagtcagaaacaaggtcgcacatcctgagtccactccgagcagctttggacgaataaactgggccaatgcccttttttgttgtacccaaattttttcctgcttgttcttgtctctgttgttcctggataccatcagctgcttgatgaaaatcaaatacaatatgagctctgtcagatataataagccttttttcccagccttctagtccttttcctttttgaacatttttctctgcttcttcaaacaatccaggtagatgaattaccacaccatttccaatgaatgcagtgacatttggattaattattccactgggtaagagatgaaaatcatattccacagaatccacaacaactgtatggccagcattatttcctccctggcagcggcacacgatgtcggcgtcctgcgccagcaggtccaccaccttccctttgccttcgtcgccccactgcgcaccgagcaccaccgtcacccggtttcctccgggccgcgccctggggcggccgcaatcgccgttgggcagggaggatgccgccgggtaggtctcggcgaacgccatggctccagtgacgcgaggagagcccgaaggagaggcggccggcgaggagtgagcgaactgaactgctctgcggccgccagccacatgcagaggaagaaggagccagagnnnnnnnnnnnnnnnnnnnnnnnnnnnnnnnnnnnnnnnnnnnnnnnnnnnnnngctctccgccacagcccgctcaagggggtaccatgactgccccgcgcaggccggcctcggcagcaccgcccgcaggaagaggccctggtggcggcaacggccgccaccccggaccgaggccacccgct

SEQ ID NO: 433168 - DNA, 1080 bp, Homo Sapiens
tggttttgtttttaaatgcaaaggagcaacaaaatttattgactgaattaaacacaacagtaaaatggcagtgttgtaatttcattttcagatgtttgaatggaacaagaaaagtgctattagcccaagcttcttacattcattaaaagagtgactatcaaaaacagcaacatgcacaatggtacatatgcacaaaatggaattatatcaacaaatatacaaaatacccaaaataaaatatttacaggtttaaaaatataaacattgattcctctatcccattaaaccattggagtggagaaaggaggaaagaccctattgctatttagaatcctttttaaaacaagtttttaaaacatagaattagttctaggagacaatttttgatgtttttcaggggtttaacattctattataaaaataacatctataaacctactaacaattttcctcctgtgcacaaaaataatactgccaaaacctgtcctcaaagacatgcctgactttcaggaaagctaattatggaaatggagtttctcgtttgggttatttttgttactattttcaaataaccagcaactccctatattacactgagatactttatataaataacgtgggcgaaacctgaagttcacaatgagcctgctaggtagctggtgtcaagtacaaatgataggaattgactttgccaacaacatcaaaagcattttccctgatattcctgatagacctaccactatcagatcctccatattcaataagatttatcctggaagcaatgaaaatgttaaatattactttgctagagtttctcctcctttatttagaaataaatgtgtagtggggaccagtggttgtaatgtagatacttgagaagtttcattgattccttcaggcccaccctggagccatttcaaggccaagtgaacaagcattttctgcatgtctactccatgcccctatgttattgaaccagatatttttagtatttctgccttagtttgttaaatgattcaggtctgagagtatctgaggaggtatagtatgtctcaggtaaccagaaacctaagccatatc

SEQ ID NO: 433169 - DNA, 1191 bp, Homo Sapiens
taaagcgagtccgggtagggagaatggttattggatttggggctgaaatgggtactggggcagaaactgggacaggaacaagggcaggaattgcagccggagctgaagctggagtgggtcgaggcctaggtgctggcctgggaactcgctccctggcaggactgcagcggggtggtgtggtggtgctgcgagtttgatgggcggatatgacaggagtgtggtttgccccttgagtctcagcccgggctccacgaagacgctcactgacacgagtccccggcctctcaggggctttggcctttttactgcgccggtgggtgcctccaccagtcccacaggaactctcatctccagccccgggccctcctcctcctcttggggtaggcggaacacctcctccttggcttggtccaggtctttgcgggcagcttccacttgttcttttgcctgtttgagctcctctcggctcacctcttccagtgaggccttcaggaatttcatggcatagcgctcaatgggggtcagctgttctacgagggcagcaatttcctgctcagcccgggacatctcctcatcctcagccccaggccggccagcttcctctccctcaccagcaggaaacccatcgttctcattaaattctgcaagctcagccacctgttcagccttggcctgggtggctgcacggatatcctcttcatcttctgcccgacacgatgcctgctccagaatatgagtctgcttgctggccacagtctcttcctcctcttcaggggcagagggccgggatgagctagaaggttcctccaggggcatatcaaacagctctcggatggtctgctgtttgaaataggctgtggtgaagttgcctccctcaatggccatgtcccccaacattctcttctgatttgccttttttaggatgttctcctccactgtccgttcactgataagcctatatatgtggacatcccgggtctggccaattcggtgacagcggtcctgggcctgagcatccatggtgggattccagtcgctgtcataaaaaacaacagtgtctgctcctgtcaggttcacgcccacacccccactccgagttgaaaggatgaagcagaatatgcgtttgtctgcattgaaacgttccatcaaggcctgtctctgttcaactctagtagatccatccaggccgct

SEQ ID NO: 433170 - DNA, 767 bp, Homo Sapiens
ttttttttaacatgagtaaacaaatactggatttaaagtgcagcgcctttctcctctcccttcgattttcccacccccaagaagatcagctctgtattaatttttagaatttccatcgaagattagattgagcaacagtcaagtctgtttgtttcgaaagtcaatgatagccttccacagtgtgcacagcatccctccccttagtctcaagcattttaagtcatcacgtgtaacatagtagagaacatccaatagtgtataatcttcagccaaaaaccggcttatagtgtcttcatcagctccattcactctcagccagtcggtaagttcagaatcttcagtatttgtgccagaagaatttagatgaaatacaggcaattcaggaatttctatgggttgggacttaagcttcaggtgtttaatttcttggtctttttcttcaatagctcgatgaaggagtgcttgtaattctttctctttccgaaccaattcttccagtaatctattggtttctattttcatccttccaagctgtacattcagtgaccggtgagcactctgggaatcatgagacacagtagaactgagcgtgctcacgcctgaggtagccacagcatcttcaatgacagcctgaggtcttcggacagtttgatttgaaggctgttcctcatggtcatcttgggcatccaatcttctgatcagcttttggaaaatctcttctcgcgtttttcataagaaaatataaatacattagagtcttatcgttt

SEQ ID NO: 433171 - DNA, 2131 bp, Homo Sapiens
cagggtgaggctccctcccatagcgcccctgcccctcccacggggtggcggtctcctggccccagagctcttgtcggcagccaccctgtccctggggcaggtttgaacctagcacctcagtaatctgggcacagtaccccagaatgtggctggggggagaagggcctttgcccaccactctccaaagccgcagcgggcagtaagtgggctgaaggacttggaccttgggaatgctccgccctggaatcttctgtctcagttcctgtcacctgtgcgccctcagcacctacctccttcccaaccttcccagttccctgctcctaagcggcagattgagagggaggggcacctgcagggtcggggagaaagcccggatcaggcctgcaggggctcagggcagtggtggcctcatgtcagggccgggttcctggcacatccacgacatacaagccatctttgcaactcacttttattgtttctttataaacttcctctcccatggaggaatatattgttatagtcattagcttatctctttttttaaaactctatgctaacagcaatggagccaagaggaggaaaacataagctacgatagaaaggcacttagaacctgttaaaatactgacgtcctggaatgtgcaacaacacaccaatgacaaccacaaaaagtacaccggccctgccgagcctggtccgtcaccgagtcgcatgctgagctcgtcggccttccagtgccctgttcctccgctctgctcaagtcgcaaacccatgaccccgccagggacttaaggcctggggccctcacaggggtggggggtgctcatggcctgggtggggcccgaagaaaggagaccagctccctcctaccttgctcatagccccttcgaggggcagagccagtgtggctgggccctgtcagggctggagtccaaagcccagtggcaaggtgggccgggtcagggtgacccctctgggacagaagggcagtccgggagagggtggggtcagcagagctgccagaggacctgcagggccactaaggaccccaaggctgtccgggcagctgcctcgttttacagatggggaggtggaagggcctggccactcagaggcctggtgacagggcaggcctagaagccagaactcccagctgccaggtgggagagggagcagggagaggccccagatggggggtgcatggctgcgtccatccctcagggcgtcctgggatgggactggggcacaaggccctccagcaccacccttaagtggttctggcccctgccagggtccctctgagtggcacagaacctgggggggcccactgggtgttaggggtggggaagtgcctctgagaaagcggcccagcagggaaaagccagaggaagcaacgtgtcatgggtccagcaccctcctccagccactgcttccctcaaggccttcagtccacagcctccagaaagctcccaacacagcactgactgggagccccctcccctgcatgctgtcacttggagcccccagaccaggagctgtgtcccagcctgtggtcggtcgtccccagccagcctcccccttcctgttacaggaccaaggacccaaaggcctctgcagggggcgctgcccaggccaggcccagcgggggtagaaggaggaagacggggcgctgggcctggccccacatgctccctgagccagggcccaggtcactcagtatcttggcaccacagctggcctggcacctccccttgccagctcaggggccctcggacctgcttcccacgctcccagggtgccccaaaaggtagagggaggagaccctggggtgcaggggtggagtggccagctatcccgtctggtactgcaggcctggcctggggtgaggacggcggctgcagagcgggcctcctcctaactagtgggaggcgccttgtcctggggggcatgcttctacctggggctttgcaggggcctgcatctgtcttgctttccctctggaggcagggtcagagggaaaggggtccaaggagcctggtgctagcagggagggcagatgccaccccacccaccccctctgctgggagagggcaacttgccatgggtggtcactaggtgagggaggtgccaa

SEQ ID NO: 433172 - DNA, 1183 bp, Homo Sapiens
taggctaggtacgaggccgggtggttaattcggcacgaggctcctccacctcaggtcccactgctgctgctctccagcctgcagatttcctctaaggctctggattggctggaagagcaacagagggctgggaaagagcttctatatatacctcaggaggaaaggcatcccagacagttttgaagttttcaaagactggctctgctgttaagaagttgtacttaaagcggaggagctaagccacctgccaaaatgtgcaaaggacttgcagctttgccccactcatgcctggaaagggccaaggagattaagatcaagttgggaattctcctccagaagccagactcagttggtgaccttgtcattccgtacaatgagaagccagagaaaccagccaagacccagaaaacctcgctggacgaggccctgcagtggcgtgattccctggacaaactcctgcagaacaactatggacttgccagtttcaaaagtttcctgaagtctgaattcagtgaggaaaaccttgagttctggattgcctgtgaggattacaagaagatcaagtcccctgccaagatggctgagaaggcaaagcaaatttatgaagaattcattcaaacggaggctcctaaagaggtgaatattgaccacttcactaaggacatcacaatgaagaacctggtggaaccttccctgagcagctttgacatggcccagaaaagaatccatgccctgatggaaaaggattctctgcctcgctttgtgcgctctgagttttatcaggagttaatcaagtagtaatttagccaggctatgaaatcatcctgtgagttatttcctccataataaccctgcatttcccattaatctacatatcttcccacagcagctttgctcagtgatacccacatgggaaaaatcccaggggatgttgcttactctttttgcccacactgctttggatacttatctactgtccgaaggccttctttccccactcaatttcttccctgccctgtttattaatttaagatatctttcagcttggtaatcagaccccaattcagaatccccagaaaaatccctgcctaagggcaaggaaatattaggacccggactattgatatccatgggaagggggggttttaggaaatagaatttccccgccttaaatgggccctaa

SEQ ID NO: 433173 - DNA, 1056 bp, Homo Sapiens
  misc_feature (55)..(91): n is a, c, g, or t
aacaccgtatacgactcactatagggcgaatggcggctttcgcggtggcggccgnnnnnnnnnnnnnnnnnnnnnnnnnnnnnnnnnnnnnatcaggccaaatcggccgagctcgaattcgtcgagagcggagttttgaagttttcaaagactggctctgctgttaagaagttgtacttaaagcggaggagctaagccacctgccaaaatgtgcaaaggacttgcagctttgccccactcatgcctggaaagggccaaggagattaagatcaagttgggaattctcctccagaagccagactcagttggtgaccttgtcattccgtacaatgagaagccagagaaaccagccaagacccagaaaacctcgctggacgaggccctgcagtggcgtgattccctggacaaactcctgcagaacaactatggacttgccagtttcaaaagtttcctgaagtctgaattcagtgaggaaaaccttgagttctggattgcctgtgaggattacaagaagatcaagtcccctgccaagatggctgagaaggcaaagcaaatttatgaagaattcattcaaacggaggctcctaaagaggtgaatattgaccacttcactaaggacatcacaatgaagaacctggtggaaccttccctgagcagctttgacatggcccagaaaagaatccatgccctgatggaaaaggattctctgcctcgctttgtgcgctctgagttttatcaggagttaatcaagtagtaatttagccaggctatgaaatcatcctgtgagttatttcctccataataaccctgcatttcccattaatctacatatcttcccacagcagctttgctcagtgatacccacatgggaaaaatcccaggggatgttgcttactctttttgcccacactgctttggatacttatctactgtccgaaggccttctttccccactcaattcttcctgccctgttattaattaagatatcttcagcttgtagtcagacacaatcagaatcacagaaaaatcctgcctaaggcaaagaatcgacggac

SEQ ID NO: 433174 - DNA, 563 bp, Homo Sapiens
  misc_feature (317)..(356): n is a, c, g, or t
ccttagacaagcctcaaatgctcacgtcactccaggggtaacacgcttcagaggcactgtgagtggtgggtggcagggcagcacacaaaggctgaacagtgccacggaactgatggttggagacaccactccctactcatgcccttgggtgaccttcgccatcctgaagctctgcagttctgggtaagggaggggcgtgcaagacctgcaaaagtggggcccttcgtcagaatatacttcctggtacacgaggaggaggccgaaaagttgatttgagattttatatatatagtagtacttttaatagttttatctcnnnnnnnnnnnnnnnnnnnnnnnnnnnnnnnnnnnnnnnncaacacttgaactaggcctttgtattcaagaggcaggcaggaatacccactgtgtgtaacttggttagctagaactgctcactggcaaaaaagagagcgagtctgcctttaaaaaatactgtgtgtcctgtgaggttcatttgttcacctaataggtcaaatatacatgaagagcttggctgagatgatctgtttgctaccgggagc

SEQ ID NO: 433175 - DNA, 628 bp, Homo Sapiens
aaaccttccaaggcaagttcatggatactaagctgatgtgtttgttgttctttttctccctgcctccgctcctagtgagtaaccacactggccgcatcaaggtggtctttactccgagcatctgtaaagtgacctgcaccaagggcagctgtcagaacagctgtgagaaggggaacaccaccactctcattagtgagaatggtcatgctgccgacaccctgacggccacgaacttccgagtggtaatttgccatcttccatgtatgaatggtggccagtgcagttcaagggacaaatgtcagtgccctccaaatttcacaggaaaactttgtcagatcccagtccatggtgccagcgtgcctaaactttatcagcattcccagcagccaggcaaggcattggggacgcatgtcatccattcaacacataccttgcctctggaccgtgactagccagcaaggagtcaaagtgaaatttcctcctaacatagtcaatatccatgtgaaacatccttccttgaagcttccgtccagatacatcaggtttcaagaattgatggcccaacaggccagaagacaaaagaagctcaaccaggccaatcccaagtctcgtaccaagggcttcctgt

SEQ ID NO: 433176 - DNA, 756 bp, Homo Sapiens
ttggtagataaggacctgaacatggtcatctgtaagcttctgacagtgtcaccatgttgttcagatctgcccccatgagatgggtcaccagatacacatcatggaattcctccagagaccttgcaggctgtaaatacgtccaacagaccaatcacattttcatgtttcatatgtttaagtaaccgcagttctctgtaggttcttttcgcatgaatgatggactgaaatggtctggagagcttcttcactgccacacgtaaccccgtttttgtgtcaaaagcagcacacacagagccataggcgccagagcccactggagacaggttctggtaacgctcgggcacctcccagattgtcttgttcagctcctgccggtagaacgtgggcctctcctgagacattttccagcggcagccgccgggcaagaaggtggccctgtggggcccccgcctgcacccgcaccctctccccggcccttgctgcccgcccagccgggcggggaccttgcgctggtcgcccgcgcaggtgcggctgccgcgaccccgcagactcccgcgcgcgcggctgctgtcagccgcagcggctggatgtgcccctgcgactggggcaagccccgctaagggcagggacgcgctccggcgctcaagactgcgcccgccgcgatctccctgcaccttcgcccctacaaggccgactccgggctgcgtcgcagtactcccgttccagctgctgcgcccgctaaggctccagtccgct

SEQ ID NO: 433177 - DNA, 732 bp, Homo Sapiens
ggtgatcgaagaggggggtatgaaccatagcgctttcccccagacccctttcaaaacgggcaattccactgccacctgcaccacgaacaataatcccaactcttgtgtcaacatcaaaaagatattcaccgatgtttaatatgtgatacaagtgacatgctgtgctcagtattgtgtggaacgtgcccccttggtctgcctatgcccttgttttatacatttccagaccattcatcaaggaaaggacctgaagaagtggaaagcacacttcattctccctctccctgctgcttcatactgaaacaggtgcctgttttgcaagtgggctgcattctctcagctctccttttccctcttaccctctctctctgaacattgtaaacaacagacttacgttaaacttcatttctagtacacgccctatttaaaaaagagcagtacatcctgggaggaaatgaaactaaagaacagttagagtaactgtttaacctcagaattttaaaggcagttgtttctttcctaagcacatcaattcgtagtaaatgatgcttcggtttgatcggacctttcaacgttatttattgaatatgtatttcggttgcctaccctgtagatatgtggatgaagagtctaactagaataatgacttgtaaacccaccatgagttatttggtttttgacttaaattcctatttgaatcccctttcccggaattttaagtgtctctacaac

SEQ ID NO: 433178 - DNA, 1103 bp, Homo Sapiens
  misc_feature (940)..(940): n is a, c, g, or t
  misc_feature (943)..(943): n is a, c, g, or t
aatggggatacaacccaattaatatggataggtgcagattatgtttctccaccaagcaaaacctagcgagcagctttcagtggccgttagaattttcacttatttccaaagggaattcaacaatagaggtattgcattactgagtaatgaatacatcaaagctggtgaacaataaattgcagcttttactctgagtgagaacaaaatataaagcaccaatttaaaaaataatcaaatgactacaatttacttttttgctttgtttacagatttgaaaaactttaattcagctctattaagcacctttatgataacatgtatcaaaagtgccattcttaaaatgtacatcaatgcagggagtgtttccagttccctaaagagtaaacaccgtattttcttctgtacacttatcctgaatgtgatcagagtatacctgcttcctatataatattgttcctagggatacccgccttggtagactatacaaaatgagtgcagaatgtaccactaaaaggaaatctttaacatacggagggaacaaatacacatggttttcattattcagggaggaggagagagtatacattattgtcttccatgtccttctctgagcctctttgttcatacatttcacaggaaagccccaaaataacttttcatgaagtttgatttctgctattctcctaaggttttaatccacctccacattttaggaacttatcaacaaatcaaagttattttagttttatcgctactgaacatatttacagtttttcaacacacacacagctaatcaaaatgtttatgggtttgtaaaagatgaccacgtggtaactatcttatttgttcttacattttcagaaatgaacataaaattctgattcttgtagctatttcatttaaatgagacttctttttaaaccacagtttttaaaaaaanacnaaaactgatacaatgtattaaaacacataataacaagagtctacatgtaaaaatataacttttacatacacaatttcaaaataatgatacgtttgccatttgttgcataaaatttaccaatgtatttcattactatataactggcaaaacaggagaacag

SEQ ID NO: 433179 - DNA, 285 bp, Homo Sapiens
  misc_feature (229)..(229): n is a, c, g, or t
aatgtcaaatgtttatttctatgccatagttgcctcagcacaatttgtaaaagaaaggaatccaaaaaaatgaattttttttagtcaggatattttctctgcagttataagaaagaaaataaacaccatgataccagaatcaccatttctttcacatcatcactctagtaagttgcatctaaatattttccttgggttgccactttttttagggtgggggaaatatccncagggaaaaatgtctggaattcattaaaataaccttggggataggtctttgccaga

SEQ ID NO: 433180 - DNA, 881 bp, Homo Sapiens
  misc_feature (513)..(530): n is a, c, g, or t
caaatttgccaaggtttagctgctcatttacattagtgtgtgtgcattcgttcagccccatggtggtgaattctgtttctttcctttcctaaggctgggacatggtgggcatcagggactttgtgctaagcctgatgaaatgtgctccttcaatctccatgaaaccatcgtaacatggaggcctcagctgctctgaggagagaaatcagactttgttttttgaaatcgattgggatcgaaagcctgaaataaatattcatactttccatagaactgagcacttggttgctatttattttaaaggcagggttatttccccccagggagtggggcaagcggggaagttgggatgagtgcgtgtgggagcaaagagttaaaaatcactatgctaagtttggttgatgctactggggggaaaaagttgaaactactggtgaccactgttgggagaggaacatctgttttatagatttagcatggccttcccatcaaaaatacactcgtaccatgacnnnnnnnnnnnnnnnnnnaagtagccacttttaattactcagtattaatcctaggtgcatgtgttaagatttcggttttcatcgagctgcttatactgatagtgaaaaacttggatgtgtgtgagacgagttaccgccttcttcattggatgtgatctgaactttttttctcctttcaacatacttaggctgtggagtgcaagcagaattatgcatagaaattgtggcagggctgagggagttgactgcaggcagtttttaggccagataaggctagatcttcctgcaatgcacttgctgcagctttgattttccagatctcaatcgtgttgcttcaatcaatatgagatccagcagccttcaccatcc

SEQ ID NO: 433181 - DNA, 1588 bp, Homo Sapiens
  misc_feature (101)..(101): n is a, c, g, or t
  misc_feature (1382)..(1405): n is a, c, g, or t
  misc_feature (1503)..(1539): n is a, c, g, or t
gtccatctgttcatggacatttgggttgtctccactccgtggctttataagaataatgctgctgtgaacatttttgtatacattttatattaacatctttncaattctcgagtagaattgccgggtcatgaggtaactgtttaattttttgaggaactgccagacttttccaaagcagctgcagcattttatatttctacagtttgttttgtgggtttttttccattttcttttgctacccagtatatgcagcacttgtgaactcccaacaggttcccagctttaaacacattaaacatcttgaaagactattgaattcttcaagaatctaaaaacagaccaaacgtgttttgctgtgaacattctgtagagacgaagtgaggcgggagtttgggttcatgttttttaaaaaaagaatcaatatagtgatggaagggtaaagaatgcaagaattcagacattctgtggagggttactctctctccattaaaggtccataaaaaggagcaaactgagatccataaggggagtcagcaggagctgtgtgtgtttccccacccgctgtgaataggtttttgctgaggggccatggccaggtccccacttgctcccctccctttggcctgagatggcagggcagtacaggggcactgaaggagcacgtcacgactcctcattcccagaatcatcatcatcataacagtcggcatcttcctcctcctcatcttcatcatcaatgtcgtcatcatacaagtcgtcgtaaagcaaatctgagctgttgtcattggaaggcactttagttttgatgcagtattccgccagggttgtggggaccttcactccatccttttctgcttcggccttagtggctgaaacttgtttcctaataatttcagcatattctttgtcttttcctttactgtctctccatttcctgaacataactgaagcatcgacattggctggggagaaggtgttgggctcattaagcagtgagattacacttaataggatagtcctcacattctgagtaggattccacctttcagaaggcagttctccactctgtgggtcatctacaggcggatgaagaatcgaaatgcatacatctccattctcataaatgttggggtgccacattttggtcaagaatctgaaggtaggtggtgaataggggtagtcaataggaaatttaatatgcgccttgaagtagccgccttcgtagagggtgttggggggtccgaagatggccacctcccagttgtagaggtcggactcgtccaccagggtgatccggaagccctccaccggttcctcctgcagtgatttcagctcgagcatcagggccttctgcgagctggtcatctgctgctgggccatcnnnnnnnnnnnnnnnnnnnnnnnnccgggcccgggccccagtcctcacgcaccggccgggccggaccaggcccctcccctcccgctctcgacgaattcgagctcggccgatttggcctgatnnnnnnnnnnnnnnnnnnnnnnnnnnnnnnnnnnnnncgccgccaccgcgtgagctccgagtcgccctatagtgatgtatcattcc

SEQ ID NO: 433182 - DNA, 2204 bp, Homo Sapiens
cggtgtgagtgggtgtaccgtggttttcgacaacagaacactacacctcttggatgaccatgtgtctctccctttcgttgtgtcctgaaatgtgactgggacgtgtcacaagtgttcttgataccgtttcgtataacatcacacatggggattgggtggtggaacagactccacatagggatgcacttggggggcacccagaagtggggggtatatgtcgttcttcaaagaagtacgcggcaaatatttgtaacatttccccttttagcattgacaagtcttcatggtggtttcacaggtaaaaaattgggcctaatatgggttttccacgaattctcccaaatgccagggactttcaggatagaggtgccttggagcaacgccctggcattccaccacatacccttccagattccccacactacattggagaagcaggatctaagccctccaggcagtaaaggcttgttttcagaggcaataacaaaatgatgccaggaggccaccgcggcacctctggaagccagaagcctgccttcttcctgcctggcgcagacctgagctcctcccctatttctatatctgcaagggactctgggccccatgacaggagcccatgtatgcaggcagggttgaccaactagcaccaggtaggtgagggtcaagaaaaatgtgctcctccctggggccagggcccagagactctatagatcccatcttcccctggtagcacccttggagctcagcatggcagagtgtgccttctgaactcatgggttgcaattccaagtggcacagcttctgctcgcctcctctgggaaggcctagatcagagaacacagccaagctggcttcagccttctcttggctcctgggtctggcctggagccggcaggtttccataccagatgggtggggggccttgcctgagcagccctggagaggccaccagggcatccctgaggctgctaatcggaagacactttgctcacagtcaacatgtggttccccgatggttttgtgccccaactaccagaaagccctgctcccagccagggaccaggaacccggccggccccctgggctctccggtggggaggccccggcagaaataaggctgtgcttggcagcactctaacagcactggccgccagggggcagcaggcctccgcaggtggtaggtgcaggctggtgcttcctagggggctcccagaggcagggctcatctggtagggtcccctcagcagccagggaccccctccagctctacacctgacccacctctaagactgggcatttctcttctagtaggtgaccctctctacaaaaagcagtgcaaacaccacctccaagccctgaagttaggaaaatgactagaaactctcatctcctcttctacaaagtgtcttgtagtgcagttcaggagggtcagtcaggtgtaagtgaaggaaaagttaggaacgagaaaggaagcacaggaggaggaaaggaggcccaggcgggggccagggagggcgtgggcagctcaggcgagtggggcatcctgggacatctcggtcaggatgtcgacgaggttattgagccccgagaggtagccatcctcccggttcccctcctgccaggggacgtcatgctgcagggtctggccctcaggcaggggcgtggttttcccaaagtcgatcatccacactttggcctgttccttcttgtcgtggatgaagaggagggagctgccaatgacctcgtggcacttgaagaagggagaaacttctagagtggttcgaatggccttcagccggtcccgataggcgatcaggatgttatggtttcctttagtgaactctctgaaggcctcggtgacctgctccctcgttttggtcttcttgaagtcccggttcacggtgccgtcttctttcttgattccctcgatcctgaaccccagggtggccgtggagctgatggtctcccgccactgcatgtaccgtggcttggtcacagcccgctgtgctttttcctcctcggtgggggcctcggggtccacctcgatcatcttctggtacatgtccttccgcaggctgggcttcttccgggccttcgtgagctcctcctccaggtaggtcctgattcccatcttgcagtccatcacacagggcgagtcgaagtcggccagcaggtcgtccatctgggcagctcgcccctgagtt

SEQ ID NO: 433183 - DNA, 1168 bp, Homo Sapiens
  misc_feature (1056)..(1056): n is a, c, g, or t
  misc_feature (1091)..(1091): n is a, c, g, or t
  misc_feature (1115)..(1115): n is a, c, g, or t
  misc_feature (1148)..(1148): n is a, c, g, or t
  misc_feature (1153)..(1153): n is a, c, g, or t
ccctagggcattgtgtgctttccgtaacttctcagttgtatttcgttatccatgactctccagtgttttttctgttggaccacacccgtcacagttcacagttccaaagagaaatttcccagcctattctaaatcttgttaatgacgaagagtccaatgtatctcattatttgtagccaattttagactcttttcaatacctcccccccattttaattagtattgatcatattcagtctttcattttactcttcatctgtagcgtgacctcaaggtaaagatgaaactatttcatgaaaaggggaggagtatgggtgtgcattagctctactccctctctggtaagtactggggagagaacagccctgccagtactgggtttgatagattctaaatattaatcacacatcctgcctacagttagccattttagtttctgggagttctttcatgtacattttcttccattaattgaattaggtataattgagatggcaataaatatgcccgtattagaaagaggaaacaaagctacatccggcttatgattttgttgagtcacttctcccgaggcagcctttccaatgcctggtcccttcccctgagagcaggtggactgctggtggtggctttctttcctgcagagaggcactttagacccatacctgctgtgagctgaattgatgttctcatcctgtgaaccttctcccactttaacctaatttatctttacttgtttaaagataaggaaacccaaggatgtactttatttgcaaactcaaagcaaatgggcgagccacctgtgacccagtaaccagaaaaggaaaccatgccatttgtgtaagtagagacacttcttgttgaggtaggcaaggctcttgtgagcgatttttttcccctagtgagacctaacaaaagacaagctatatcatttctgcctgaaattatctgcttgaaaagatcaaaatatcaggatacttagctcttcacaaatatgaagtcattatcacatttcactgaggcagaaatcactgttacagcacacacaaaaggctncactggttgaccagcaaagagaacccgggttcagnatacagtttggtcctcttattctncagtgcctgttttctaagggtcccgcaatgagnctggntggaaaatcatagtc

SEQ ID NO: 433184 - DNA, 362 bp, Homo Sapiens
aggatttcagcctatgaattttgagggggaaaccagcattcagtccaggtccataacaatggtcaaatcccatctaaaattattataacacaaagaataagggggcagagtaatgtccctacaaacaggaaactactccagggaagggcacgcccagaacatagaaactggaccctaataatgcatcaatctgagaggaaggccaggtaggtcaggagttggtcatagctcacctggtttttaggggtgtgggacttcattatactgttctagtctgccttttgcttgtttacttttcaagtatttgcctgaaatcttaaatattaacaaggtatgaaacagggatcaatgaaacacatcat

SEQ ID NO: 433185 - DNA, 383 bp, Homo Sapiens
ttaccctctcatgcctatgtctgcttttgcttccaaagaaccttctgacagtaaggactgtcctcagactactggagtcatttagtcacaagcttgcctgaggctcagaagactggcaatacctgggagatttatgtgcaatcccacagcacccagcaaccttgcctgccaattatttacccatgattgacaggtgcaggtgtatgaaagtccagctccctgacttgaggggtgccctttgtggtgaaagtagctttgggaaaaagggcaatccagaggcccaacttcgtaaaactccagatagataaatggaaagaaatctttgccttggaagtccagttgagaaagatagtgatttacatcagactgtggaaagagagacc

SEQ ID NO: 433186 - DNA, 611 bp, Homo Sapiens
attattgacaaaggcaaagttgccaaccttgtcatggatgagaatctcctgggggttgttccccaactaaatgaggaccagctcgttggcctaaccggtcaaggtttaggagaaaggtgtgccaacaactggggtggttttagacctgaaccacatgcagacagtgaatgcgtacatcccaggaaggctcttggtcaccttggcatacatatagtttgtccgcattgggaatctgagctggaacctgtctccagggcggttctctttctgacctttctcgaagctcgctgtatccgctggtgcagggaggtcagggcggtctcgatcttgaccctctcctcggtgtcgttcctggggccccccttgccctcctccagggtgttcacccgggacagcacctgcctctccagctcatcgatccttgctctgcagcagatccttgaggctgttggtctggctggaggaattgaggcggctgtactgctcgaggttctccaggcgggttttgagcgattgcaaagtttgcccgagttggctgagcgtctcggcggccggtgtccgggacttttcgcccatggtgttcttgtccgagccgggctgcttgcggccgc

SEQ ID NO: 433187 - DNA, 599 bp, Homo Sapiens
  misc_feature (53)..(115): n is a, c, g, or t
  misc_feature (172)..(193): n is a, c, g, or t
  misc_feature (532)..(556): n is a, c, g, or t
gcttctgcttcttcccgcaccagagtgctgtgaagtatgggaccggagggggnnnnnnnnnnnnnnnnnnnnnnnnnnnnnnnnnnnnnnnnnnnnnnnnnnnnnnnnnnnnnnnctcacacaccacgaaataaaacctggcacggaaaatgaattaagactggaacccagnnnnnnnnnnnnnnnnnnnnnnaaaaaaatgagggcatagtgggggggtaataaagtctacctagcaaagtataaaacgacaaaagcatggtttccattgaataagattaaatatatataaaacaagtacactgactgtggggtaggtttggaggtgccggaggagggaagtatttgtgctaaaccaacagaaaaaaagggctggggggagagggggaccccaaataaaccatcaacgggctgttctgtacagtgagggcttattaagaaaaagccgactgtttataaaagaaacggaggttggtttgtcttcggagcaggtggggacagaaggagtgtcttcgttgcagtggtacatgtnnnnnnnnnnnnnnnnnnnnnnnnnaggagtcggactggcggaggcgacacatctctcttttcccaag

SEQ ID NO: 433188 - DNA, 466 bp, Homo Sapiens
  misc_feature (445)..(445): n is a, c, g, or t
gtaaatcatcactttgttggcctggccaatccgatgagcccggctaaaggcctggatgtcattatgggggttccagtcagaatcaaagatgatgacagtgtcagcagtggccagattgatgcccaggcccccagctcgggtggacaggaggaagcagaattgttgggccccaggagcattaaaccgatcgatggcctcctgcctcagggcacccgtgataccaccatcgatgcgctcatacttgtagccttcatagtctaagaaagtcctcaagcaagtctaacattttggtcatctgcgagaagattgagcactcggtgtccttgctcctttcagctttcgcagcatcttctggagcagcatgagcttcccagacgacttaataagtgccccaccctcataagccccactggggagtttgggggactccatagcagccacgggnaaaaggtatggatggttgcag

SEQ ID NO: 433189 - DNA, 1295 bp, Homo Sapiens
  misc_feature (1169)..(1221): n is a, c, g, or t
atatactcctgacaagaaagagttaaggtgggtggtgtacttaagagaagaacacaatgaaaatatctgtgggatatgtgtggctgtgtgtctttacattgcatttacagttcttttaatagtacataaataaattgttcattgcactgtttagagtcatcacttccatgagtccggacctgatggtccttcagagcagctttgtatgtctcctctcatttactataattcacctgtaaactgtccttgactgttggagcccatatatcctatgtcaagaaggtcgctggcattgcgctggtggcctgctctcaacacctcggttttcctaggtccagtggatcccttagaagaagctgttcctgatgagctgtggccacctggagatgggaaactgggcttgctatagggcaccaaggcctcctcatctgtcattccttcccttcgatgaggcaatgctggttgttggtccatccgccctcccttgtgttttttagtgggccgaggcctctgactttgactcagggctgcactggtgttactgtcagtagaaaatgggctggtaggtcgaggtctttgagaggaggtaaaggcttttcctgtcacagagctgtctagattgtccatgctggatccaggagtctggtccagtgctctcaggggcctggggatttctaaagcttcctcttcgtcgtcggcatcatcatctgcaacatccgtttccaaatcagaaatcaaggctccagacacataccctaacggtggaactggaggctgtggaggttgattattgctttgaatgtgccatgtttgttttgctatatcaaactgataggctcttgtcaactcatccaggtgagcctgcagcatgggttgcatctcttcccgtggggatggagtaagagttgcagtggactgctgtccaaaggagatagcaggagaagaagccacgcctcgaacaggaggtgttgggaccctatcatcatcttcttccagttcatcttccagaccttggtgtaagtaagtttgtactggcaatggtgggcaccagctatcactgtcatagccattttcttgttgttccactgcatagtgttccagctccgtgccaggaaggggctggactggggggggaggtagagggacattggcccaagtggatccattgnnnnnnnnnnnnnnnnnnnnnnnnnnnnnnnnnnnnnnnnnnnnnnnnnnnnnaccattgttacctttgttctgatcaggtagagaataaccaaatcccatcagatctgttttttgctgaattgagc

SEQ ID NO: 433190 - DNA, 1026 bp, Homo Sapiens
  misc_feature (489)..(509): n is a, c, g, or t
  misc_feature (962)..(962): n is a, c, g, or t
  misc_feature (968)..(968): n is a, c, g, or t
  misc_feature (1004)..(1004): n is a, c, g, or t
  misc_feature (1012)..(1012): n is a, c, g, or t
aagtggcaaattttatatatttactacaaaaaagacatttaaaagttcagttaccgtatctttaaaataaggttgataataccaaccaagatggttctttataaggattaaataaactcacatgtgaactagtcaggtgcatagcagatacccttccccaatcccccccattttttggggcagaaatttttatgtctttatgacctcaagataggaaagcacaactcaaaagattcataatttgactacctcaagacaatattactaattattatcccccaaagactacagaaacaaacttataagacaagcaaagatgaagacaggatactggcaacacattaatctgcaacaccacgtagttcattcagcagaaccatagataagtaagacaaaaagatgacctcatttaacaagagtgagcttgcatagcaatgcacaaaagaaattatatacagaggagaatccttttcttcctgtagggcgagnnnnnnnnnnnnnnnnnnnnnatatactcctgacaagaaagagttaaggtgggtggtgtacttaagagaagaacacaatgaaaatatctgtgggatatgtgtggctgtgtgtctttacattgcatttacagttcttttaatagtacataaataaattgttcattgcactgtttagagtcatcacttccatgagtccggacctgatggtccttcagaggcagctttgtatgtctcctctcatttactctgtaaactgtccttgactgttggagcccatatatcctatgtcaagaaggtcgctgggcattgcgctgggtgggcctgctcttcaacacctcggttttcctagggtccagtgggatcccttaggaagaagctgttcctggatgaggctgtgggccacctgggaggatggggaaactggggcttgctattaggggcaccaagggcctcctcatctgttcattccttccnttcgtngagggcaaagtcgggttgttggggccatccggcctnccttgtgnttttttagtggggc

SEQ ID NO: 433191 - DNA, 468 bp, Homo Sapiens
ctcttctaaaccacagaaaaacaatggatccacttgggccaatgtccctctacctccccccccagtccagccccttcctggcacggagctggaacactatgcagtggaacaacaagaaaatggctatgacagtgatagctggtgcccaccattgccagtacaaacttacttacaccaaggtctggaagatgaactggaagaagatgatgatagggtcccaacacctcctgttcgaggcgtggcttcttctcctgctatctcctttggacagcagtccactgcaactcttactccatccccacgggaaggagatgcaacccatggctgcaggcttcacctgggatggagtttgacaagaggcctattcagttttgatataggcaaaacaaacatgggcacatttcaaaggcattaattcaacctccacagcttccagtttccaccttaggttattgttgttttgggagc

SEQ ID NO: 433192 - DNA, 1097 bp, Homo Sapiens
  misc_feature (11)..(11): n is a, c, g, or t
  misc_feature (15)..(15): n is a, c, g, or t
  misc_feature (19)..(19): n is a, c, g, or t
  misc_feature (27)..(27): n is a, c, g, or t
  misc_feature (30)..(30): n is a, c, g, or t
  misc_feature (32)..(32): n is a, c, g, or t
  misc_feature (34)..(35): n is a, c, g, or t
  misc_feature (57)..(57): n is a, c, g, or t
  misc_feature (59)..(59): n is a, c, g, or t
  misc_feature (66)..(66): n is a, c, g, or t
  misc_feature (68)..(69): n is a, c, g, or t
  misc_feature (79)..(79): n is a, c, g, or t
  misc_feature (84)..(84): n is a, c, g, or t
  misc_feature (86)..(87): n is a, c, g, or t
  misc_feature (127)..(127): n is a, c, g, or t
  misc_feature (220)..(220): n is a, c, g, or t
  misc_feature (547)..(547): n is a, c, g, or t
  misc_feature (663)..(663): n is a, c, g, or t
  misc_feature (678)..(678): n is a, c, g, or t
  misc_feature (703)..(703): n is a, c, g, or t
  misc_feature (727)..(727): n is a, c, g, or t
  misc_feature (746)..(746): n is a, c, g, or t
  misc_feature (858)..(858): n is a, c, g, or t
  misc_feature (1003)..(1003): n is a, c, g, or t
  misc_feature (1009)..(1009): n is a, c, g, or t
  misc_feature (1079)..(1079): n is a, c, g, or t
cccttctcctnaacnaagnatgtgagngtnantnnctccagttctcaacctgtcatntntgttgtncnnccgggcctangactntnntcaagtggcgcagtccgtataagggtcccagagggccatntctgctgaggtgaaagacatgtttttaaaaaccccccttccttccccatgggccctgttcccttcccctcccaggcagcctagagctcaggtnataggcgtcagtgtcatcatggaagttactgccctggtgcctctcaatttaaagaaaatccttgcgtgggttctatctgcggcagaatataaaatatcctacctcctacaaaaagggcactgtttaaagtaggtatttaaaaccagccactctctggcacagtgtcaggccaccttggcagcaggaaggggctggctgtgtccgtcggaggtggcgtccagctgcggcgcagagggaggggttccaggatcagagctccagggagcctatgaggatcagcatcgcacggagtgggaaatgacggtgccagggtgtggtgctgggcgnactgccatgttctccaccatcatgcttgtgcctgaaaccagcacaagctgagtcagctgggcctgggactaccctagcccctcccttgtggcaagattgagacctttcctaagganactcacagggccagntgaaggcatgggagcggacggatgnatggtattatcagtccgactctanggtgatttgtaggccgttngatattgatggttggtcctcagcctccccctgcaccctgcgcccttccctggccctcggggatgttctgggggctgggtagaaaggtggcggcgaggcagttctaagactantttgcacttggttcctgcctgccttccactttcctttgcgggtagagattggagttggcctgggtgggaatgatcctctcaggtatctgggtggatcctgaatctctcgaggggataagggtaggggaggagcagcacctccatncctcangatgtggacttctgcagggatccacatccctccgggccctgtggtccgaatttgtaccagggcaatggcnaatgtcttatcaccggga

SEQ ID NO: 433193 - DNA, 2207 bp, Homo Sapiens
  misc_feature (2144)..(2144): n is a, c, g, or t
ctcccccctttttagaggggcctccatttaggcctttaagggtcccttcctgggaagggaactatcggtgggcccgaaagcaaagtttagtgggcggtacccctcaagcttccacgggttagggtccaatgccaaaaccaggttcctttccctggggcccaaccaactggaccccctgtcccctgttttcccctgatccagcccgagccaatgaggaaggaatggataaaaacttgaagggagtttttgtccagcatccccttttcggatagagaaccagccacaggccaagtcgtgcccagaggggggccaggagggatgctaggccaagtttggactccctgtcagggagaatggtcgtatagctgagcccctagcacccttgcttgtaagggttgggaagaggtgaggaggctttgattagccagctccaggaaagctgacctgggctaggggtgggtgggtagggtgcagtgggggtttggctgtggcagggaaaaggcatgtgagcttatatttttaaaaaattgtagtgggtaaacatcaacataaacctgcccaggaaaatagagcaggacttaaaagtttaaaaaaccataacaaaatagagctctaactataaactacagaaaacaggctcggagcttccgaggacatatgcccttcaagatgcctgtcccgctgccccctgtgaagggccacctgtcggagcatgggctttggggtttcctagttgtgctgctgctcttgcctagggaatctgctcttgctttggcctcttttcttggggcaagagtgacgggggacagggagcttcaagtcagccctccatgttgaagtttggtagaagctctgcccacaccttggactggaacccagccatgccaatccccatgatcaccaatccgaaccccttgaagtagaattcttcataccctactgactaatcaccttcttagccaggccatagccattcagcagtgcctccttcctctgggtagacaaacagccttgaacagaaaggtggaagactcgagttcttaacccagccccatctcttctgggctgtgtgaccttgggaatcccagaccctctctggaccacctccatttcctcatctgtaaagtgaggggcttgaagaagttgagctctaaggcttcttccagctctgacgttctgtgactggtagtatacccagagctcaggaaaggatggcccatttattaacccctttttctccggggaaatgcaagcagtccaaggccgtctgggagcggatctggccaggtggtcctaggtatacctgggagcaggcagggccacatttatcctctgcccttcccagaaacctcccaataccaggacacacagcatgaatgctgcattcccctcccaggcaggagtgagtcagtgctgggagagcagagtctggggctgcaggtcggggaggccgagctgactgcaggcagcactggagaggtgggcgcatgattggccatctcctgcccaaaccctggagggactgtgcagaatgggtcttggaggggtgggagaccccaccaagacaagccctttagtcacccagccacctgaagtggcgctgtcaatcgggatgacagggtcaggttggcagtgttggctgagagggcatcgtcacctgggttgtgactatctcagaccaaggctggtgcccctttccaccaagggccctggcctctcaactctttttggctcccaccccaaacagcctggagtatcacccccctcaaagctgaaggggctcaggctcccagcctcaggcatcggggcgctggttctcagccgcttgggcaggcaggagcccctagggagttatcggggacagcgtcagggtccttgctgctgctcgagggagaaggcgggagagctcttggtcccagggcttgcccttcttccttagactgaaggatggtgaggtgtgcacttcgctccagttcttcaacctgttcatgtctggtgtttctgccgggcctaggactgctctcaagtggcggagtccgtatagggtcccagagggccatctcttggcagcaggaaggggctggctgtgtccgtcggaggtggcgtccagctgcggcgcagagggaggggttccaggatcagantccagggagcctatgaggatcagcatcgccacggagtgggaaatgacggtgccagggtgtggt

SEQ ID NO: 433194 - DNA, 2306 bp, Homo Sapiens
  misc_feature (2028)..(2049): n is a, c, g, or t
  misc_feature (2052)..(2055): n is a, c, g, or t
  misc_feature (2057)..(2057): n is a, c, g, or t
  misc_feature (2059)..(2059): n is a, c, g, or t
  misc_feature (2062)..(2118): n is a, c, g, or t
  misc_feature (2120)..(2122): n is a, c, g, or t
  misc_feature (2124)..(2124): n is a, c, g, or t
  misc_feature (2126)..(2130): n is a, c, g, or t
tcctggagaagccagaacaatatacaaacaagtatgtggaggcagatttgctttattccaagaggctgtttgagtgtgtgtctgcctaagcctccttatagcctatttttctacttgctgagagagtaatattaaaggaacagtgagggagtggaaggagagccttagttagagcgttcccatttctggcctttgggggtttgcactgtgcgggagatgctctctcatcactctgaaggcccatcctgtgcagaagtgggactctgtggctgttcactgagcaccagggcagactgtagctgagcagacttgggttatggatgggatatggggcccagggaccctcaggacacagggaccggctcaaggtaccactcagcctggccaggacccccagctttgcttttgttcttgatctctttgtgatagagaagcttagaacattgaatttggaaccccaaaatgtgtgagtctttggaaaacccattccagcctttcttcaaatgctcttattttcagtatatgaagtgtgtatttgaaatattcatatttctgttatttcttgttttcaagctctgaattattgcagttttctgtcctgcatgctttcaacagtgtgcttttacagtggcagtttagcacagcgaatgtccctgccccacactccatatggtcctgttttcctgaaaatacactccaggtagcacagacttgttattttgcctggctggttacacacatgctgtcttgctttgctgctcagccacctccctctgaggccaacttaggccaacctacataggactccatctttagcgagacaccagagacacctagtgatgaccacgggtctgcttttctctgtgatcctaggggacttgttgacatgggagtgtctgtttccacatggaaggatgtctgtttatctctcatctctgaatagatgtatgacaactctagtgtccatggtttaaaatgttgctttgaggattttccatcctgtataagaagaatggctttcttcagattataatcgttattaaagctgtatgtacactttacttaaaaactattaacagtttttcatgttgcactggtggtaattttgaacttggaattactgggtgggaattccaggaaccacagagtattgatttttgctgccaaaatgctcttgaagcagatgtccctgtgctcccctggctgcttctggctgaaggggggaggtgtagactgaagcttgggcactcatgtgtgtcccctccccagtccccatcctagtggggccagtctcattaggcagccatagataagcctggaacttggctgtcattagtgacttgatcctggtatgaaatgcatactgggtataaggttgctcaggtattttatttccttggccacaactcccatagatgccaatgttttgatagcctcagtttctcaacgatgtcttttgtttacagtgctacacttagtgtgagtcaagaagtgcttgagttacaagaaacttcttattcaggtttgagtaagcattttacttccatgtgtacttttaaataatccataccttgaagaagttggccaatgatattatatacatgctgatctgattgttcttttcattccttgagtcaacttcagggtcttggatactaaagagaaggagaactgtggttaatgttttggatcatcatttgtgaacaaggccagactttgcccattttaggctatccaggacttaaggtagccatctggatcataagaaggtcctgcagttgagacaaaatgacccaagtgtattttccacaagttttgatcctgtgtaatatttctttttccttccctagtgtatgtagatacaaggcatggaatgcagttccactttctccccagagttgatctttttgtgattgctttcccgtctctagtagtattctgttgtgtctagagaactgattttttcctacatacgcaaattgtacatttgtaagtgaaaatgtcaatacattaaagcattaaccttcnnnnnnnnnnnnnnnnnnnnnnccnnnncncnccnnnnnnnnnnnnnnnnnnnnnnnnnnnnnnnnnnnnnnnnnnnnnnnnnnnnnnnnnannnanannnnncttttgttgggcccgccctcgggcccctcaaaaaaagcttttctaaaaaccatttctttttgggcgcccgccgggccccccagtaagggaaagggggaaccttggggccaataagcgtggcttccccataagggaaaatccccggggccaaggaaactagaggggtttgggaattt

SEQ ID NO: 433195 - DNA, 718 bp, Homo Sapiens
  misc_feature (672)..(672): n is a, c, g, or t
  misc_feature (696)..(696): n is a, c, g, or t
tgtctcagtttcgggacgtggttaaaaatgaagcctctgattcatttagggccgggttgggccaagacactggctttggagcaaggtctcacttgctggcttcacctgggtggtgagcccccagcccacgcgactcgcgcaccacctcacctcccatacctgcaatctcacttggaggatgctggggcctgggtcctacccccacagatgcaggttgaggttggccaagagcctcccgggtgactcatagggtcgaggccctcggtttggctttgacacctctgggcctctcttcttcctgggaaaccgagcctgctccccaccttcctaagctctccaggtgtgcctgaccctacaccctcccaccaaagcgtccagaaggttcatccactcacctttggctgcaccctcacaccctgccagtcccggccctgtgggaagtggggttgcgacgggtggtcccattgcccctgcctcctcggaatccgccccgagaactgcggccacgaagaaacctccctgacaccccaaaggtctctgtgttgagcttcctctcttcggcccacgtcgtcccgcctggagctggttttgagttcagaagagatgttgtcgaagaacgaacttggatttgtcatagtagcagttgggccccagaaggtcttcctcagcggncgcttcggcactctgggtcaccanagccaggtccttctcttccccc

SEQ ID NO: 433196 - DNA, 671 bp, Homo Sapiens
agttctttttttataagatcttaaaggcaagtaagaaggaagagaaatggaagtaccaataattatatttaatataccatttggcttcagaagaggatttacctacagcttctgatcaaatttgttggatcatatcaatcatacttaagtggtaagaaatcatacttttcaccttttaaaggacttacatgtcacaatataggatgtagagtccatcaatatataggtacatattttgtaatgaaaacatcttgtgtaactattaattgcatgattttcatattaaggtttaaatacaggtgttttgagtctttctaaaaataacaatataaagtattgttttaggtggtcatttgcatagcaaactattaaactagaaactcagtggttctaggaaaacttcatattatgaatagttccagaaaaatgtattcaaatcacttctcttacaaaactgtaacctttatttgttgatccaacagtacgttaaccacttttaccccatccccactttacacggtacaccaacctgaacagattttgtgccacaatttcattcaaagggtttgtcattcactttatgattgtgctggataatctagatgtaagcaagtctggagattttaaaatacgggtcccctgtatgagagtagcatagtttttagcatact

SEQ ID NO: 433197 - DNA, 755 bp, Homo Sapiens
cctggttactccttgagtgcggaatatattatctaaagcatgttatgtgcaaaaggtgccatggtgttaaaaattaaaacttggaattggttgtagtaccattcgttacatttcaaagtgactaatgctgatgtcaaaaccagaatgctaatggtaataacaggtcatatcaagagttttttgaactccagggtcttcatgctccgaaatactcatttgcgtttccatgtattctatcctcttaaaagttctcggtcacagtgcaatatagcatttgcagtagctccaacagtgcttcctttatgaaacattcagtggggagttctccttccagctctgccccactcctgcctttctacacttgtgtagagatatagccaggatgatgacaaggatgatgaccacaaataccacagctccaatgatgtagaatatttctttcctgaacttgaagatttccaataataaagtgtataaattaagtccttgccaaaaacatcccggaggcttaggaaagtgttgttccttctgactaaagtccgttcatcttctacggtcacattcacttttgttcccacctgttcaaactctgaattgttggctgtccgaggtttgtctccaggtaaggtgtgaactctggggagttctcatacagaggctccccagcagaaccggtgctctccacattccctgccgggtaggagaagacccgtgccaagtacgtctgcttcacatccttcacaatctcgtcggtg

SEQ ID NO: 433198 - DNA, 1293 bp, Homo Sapiens
agcggaagactgcgagctccgcgcaccccctcgcactccctctggccggcccaggcgccttcagcccaacctccccagccccacgggcgccacggaacccgctcgatctcgccgccaactggtagacatggagacccctgcctggccccgggtcccgcgccccgagaccgccgtcgctcggacgctcctgctcggctgggtcttcgcccaggtggccggcgcttcaggcactacaaatactgtggcagcatataatttaacttggaaatcaactaatttcaagacaattttggagtgggaacccaaacccgtcaatcaagtctacactgttcaaataagcactaagtcaggagattggaaaagcaaatgcttttacacaacagacacagagtgtgacctcaccgacgagattgtgaaggatgtgaagcagacgtacttggcacgggtcttctcctacccggcagggaatgtggagagcaccggttctgctggggagcctctgtatgagaactccccagagttcacaccttacctggagacaaacctcggacagccaacaattcagagttttgaacaggtgggaacaaaagtgaatgtgaccgtagaagatgaacggactttagtcagaaggaacaacacttttcctaagcctccgggatgtttttggcaaggacttaatttatacactttattattggaaatcttcaagttcaggaaagaaaacaggcaaaacaaacactaatgagtttttgattgatgtggataaaggagaaaactactgtttcagtgttcaagcagtgattccctcccgaacagttaaccggaagagtacagacagcccggtagagtgtatgggccaggagaaaggggaattcagagaaatattctacatcattggagctgtggtatttgtggtcatcatccttgtcatcatcctggctatatctctacacaagtgtagaaaggcaggagtggggcagagctggaaggagaactccccactgaatgtttcataaaggaagcactgttggagctactgcaaatgctatattgcactgtgaccgagaacttttaagaggatagaatacatggaaacgcaaatgagtatttcggagcatgaagaccctggagttcaaaaaactcttgatatgacctgttattaccattagcattctggttttgacatcagcattagtcactttgaaatgtaacgaatggtactacaaccaggtccaagtttttaattttttaacaccatgggcacctttttggcccataaacatggtttttaga

SEQ ID NO: 433199 - DNA, 1941 bp, Homo Sapiens
  misc_feature (363)..(363): n is a, c, g, or t
  misc_feature (374)..(374): n is a, c, g, or t
  misc_feature (590)..(590): n is a, c, g, or t
  misc_feature (600)..(600): n is a, c, g, or t
  misc_feature (605)..(605): n is a, c, g, or t
  misc_feature (608)..(608): n is a, c, g, or t
  misc_feature (745)..(765): n is a, c, g, or t
  misc_feature (1856)..(1856): n is a, c, g, or t
  misc_feature (1859)..(1859): n is a, c, g, or t
gtaaaaacaacattaatgacatttatagaacacttaactataagctgccatttcatttaaccctattattagccctgctttacacgtgacggaatcgaagcacaaagagactcaataacgtgcgtaggctcacacagctggtgcatattggaaccaggcaggaagacttcagagtccaggttctcaactacccaattaagaaattctgctctttcttaattgtgttatgacaaaaacatttttactgctaatttaaaatatatactccgtgtaaatatttatgtaatgtaaacatagcacacattataaaactataatattatcttttatcaaaaaaagattgcgttctatatgcccattttnccccgggaaanaggtctttattttcctttgaattgaggagtagcctttgattttggcagggaacttaaaattatttcaaggttcccagtcgtacggtggcatggagatttatgacaaatatgtaatctgtttatttgtcacccaacttggatgacttctaaatgtttcttctttgtagctcttgattttgcttgggttccccccgacccatgcccaaatagtaaaanacaaaacagnaccanaanacaatgtctgagtcacgtttgctccagtcagggaataccaacgtgctgacagacagctctggtttttaaaaaatcttactgtatgtcacttgcaactttgaagaacattcatgcgttagtggactgcatttggaagnnnnnnnnnnnnnnnnnnnnncccccccaagttgtggctcaagtccctctgccatttgctgcagtgagttttcctattccattttgctggggagaaggcatgctttacagaacacatcaaactgtccgaaaaaggctgtctgcatccctcatgtttataagagaaggatttctttccccttccttcacgtatcaaagaagtcactcggggaggaaataaaccataattaggcatgagcgagcgagcagacagaccccttgctctgccttccctgtccccgcccaccaggcaaccgtcctgggcgcaagcgaggagcgggttgtctccgcagcagctgcagcgagcgcgcgcccacgcccgagcccgcgcccgccgccaggatctgggcggcggcgaggctagcccgggggcgcgctcgctcgggagcgcgctcatgcagcggttttcttctcccacaatccagaggcagctgcacgggaggggcggggagtcggcggaaggatatcggcgcggagggagcagcgcgctccctttgacggcggcccccggcattggcgggcggcgctggcgggcggcgaggggtggggtgtgatgcggcactgcggttctgaggccgttactccggcttctccatagagggcggagaaggctggagcgcggcggtgattttgtgccagggattcccagagacgcgctgaaaggctggcagggcttaggaagctggggggttagggacacacattcaagcccccacccccgggaggggaaagggggctggaggctaggcttgagggcggcggaggaatggtgtctgctcggggggaaggggcgagccctgcctgttggtgctgaggggctgcgggcagtggaggctccgcgggtcgaaagcggctccatgcccatcggtgggtggaacgtgtagaggtcggaacgccgaggtcgagtctggtggcgcctcggtatccttaacgtggtctctgtttaacgtatttcatttagcccccgttgggattgattcattgggagcagtttcgctggtctggatcctccaggagctggacaaccttgacgggctttttgtcttgggttccagccccctttcccttcctccnccnccagatgccttttctctgcccctcctcgcccggtacagacatttccagcgcaggctgctgctcgtggtgtccgtcgtcgaag

SEQ ID NO: 433200 - DNA, 880 bp, Homo Sapiens
  misc_feature (744)..(745): n is a, c, g, or t
taaagatagaagttgaaattagtcattttaagtttcagtgtaccaacgataagggcatttggaacagtgctatcaggtgagctcagtggtgctgttgtaggttcagaaatggaaatatgtaagggaggtcacacatacactttacctgtatgttcaacctatgttatcaaacaaatcaattcaccaataatagcatgattagtagggattcccaaaaagtttttaaaaacacgaacaggattttaatgataattaaatttgcagtggaaaggtctcatttaatggttttcaaggaaatgggatttggttgctgacatgaattgatgatattagtaatatttataaagcctttcaaacttccatcaatcctaagctaaaaatctttattacctgtatatccttttcagttaactgagaggaagggatttggaaaccatgtacttttggggagtaattgattaaaaacaatggctgattggcattgttaatgaaggctttatttgtgaggatgatgctggtaaatggagcatgcttagagtactaaattgatctaatgagaatttggatgaacataaacttaattttggatttaatataacattccagtcagaccgcatgtaaacagaatatttgaatctttgtacctccctacaagtgtttagccttgccaggcctgtaagctttaccttaaattaaaacttttcagtggaaagttggaaatttattaaggataataaaattttnnaattttggtgccttattttggtcaagttgttggtaaaagcttggtgtaaagaaaaaattcctttttgaaatggtaaattaagctttggaatttaaaatggttaaaaaggtaaagaaaacaccccccatattggtt

SEQ ID NO: 433201 - DNA, 1079 bp, Homo Sapiens
cgggggcagatttttattgcaaatatttactcaaaaactactatatacagcagagtattttaatcgccatttaaaacattgaacattcagtgaaacaaaatttaagaatccaaagcacattttaagaagtaaaaatgaagcattttaaataaaagtttattagtatttcaaagcaaactactgttcttcatattattcatttctatatctattatattctagatgataaaaagaactgaaaaatcaatttagcagccatcttatagataaattaggctaaatttccaaaaccagttcttttacatcactgttttaggtcccatttgaagtttttattttacaattacagaaaagtcacttaaacatggctgaatacatgccaggacatgttttcagtttactgctttacaatatctacattataccatactttggtttggcttccagaccatttttatgggcctatttctaaggaagatcattaaaacaatattaaaagcataatagctacaggagtttcaacaatgggtttctactttacattaatacaactaatacatcaaagaatttctacacagcttacacactgacaaaaagcacaaatataaatttatatcttaataattccactttcactgaaagtttaattaaggtaagcttacagcctggcaggctaacacttgtatggaggtacagatgattcaaatattctgtttacatgcgtctgactgggaatgttatattcaatccaaaattagtttatgttcatccaaattctcatagatcaatttagtactctagctgctacattacgaggattatcctcccaataagccttattaacatgccaataagccattgttttattctattgcgccccagtttctgatcccaatccttctctcgataatgaaagtacaggttataagatttaacaagatgatgaatttaaggttaaataaaagtaaagaaatagacaacctgctaaaacatgagacttcagaaatatttatctagttaactcggacaaacagttgaaggagacaacaaaagagagatctttgcacacacacagtgag

SEQ ID NO: 433202 - DNA, 1135 bp, Homo Sapiens
agttctggttctttcccaaatatgaaaggataatgcagaagtacaacctgctgccggagaagtccatgtatgatttggttcatgggtccagcctgtggatgctgtgtactgacgtagcactggaattcccaagacccactctgcctaatgttgtttatgtaggaggaatcctaaccaaaccagccagcccactaccagaagatctccaaagatgggtaaatggtgctaatgaacatggctttgtcttggtgtcttttggagctggtgtcaagtatctgtcagaagacattgctaacaaactggcaggagctctggggagattgcctcaaaaagtgatttggaggttttctggacccaaaccaaagaatctaggaaacaacactaaactcatagaatggttaccacaaaatgacctgcttgggcattcaaagattaaagccttcctgagccatggtggtttgaacagtatttttgaaactatgtatcatggtgtgcctgtagtgggaattccactctttggagaccattatgatactatgaccagagtacaggcaaaaggcatggggatattgctagaatggaagacagttactgaaaaagagctctatgaagcactagtgaaggttatcaataatcccagctaccgtcagagggctcagaagctttcggaaattcacaaggatcaacctggtcaccctgtcaatcgaactatctattggatagattatattattcgtcacaatggagcccatcacctacgtgccgctgtccatcagatctccttttgtcagtattttttactggatattgcctttgtgctttgcttggtgctgccttgttatactttctcttgtcttgggtgacaaaatttatctacagaaaaatcaaaagtctgtggtctagaaataagcatagcacagtcaatggacattaccacaatggaatcctcaatggcaagtacaaaagaaatggccatattaaacatgaaaagaaagtgaacatgagccaacagcccaggtgatagaaataaattggttcactcattgaattttattgctattatttagtctaacagctactaaaagtaaaacatcagtaaacaattctaacatgcccttatgagatctactaatgc

SEQ ID NO: 433203 - DNA, 354 bp, Homo Sapiens
  misc_feature (268)..(276): n is a, c, g, or t
tttcccctatatttgctcttattaaacaggttcttaaatgggctttttcagggtctttatatctcaaaaacaattagaacacaaaaagtgaagcttattacctagtaactctttccttggctactctcattctaataggtctcccctttttatttcagatcaactgttattttcagataaaaataaaattttcaaaagaagagaacactatttgagtgttatctcaaaaaaaagtctcctttgtatataatcaataacacaaaatacnnnnnnnnntttttaagtgattaataggaattttttcccaattagaaaagttacaaattatccagcaaaaaaccttctatgggccgg

SEQ ID NO: 433204 - DNA, 787 bp, Homo Sapiens
atgaagtaacaaaaacattttggtttgtatgttttaagtaacagttgtgcaaattcctcttgtttgttaggtgctccctttgaatattttgtgaactgtgtcagagggagaggggtggtggctaggaagagggtcagaaagaagctagagggaggtcaggagaagggtaacagggaggatgcacaggagacatctaccctggtcaccccaggatcaggatatctgtccttgtttcatgttgaattcaaaaattggatctcacttaggcttttgaaggtgacagccatctctgatagctgagcataagtaaagaaaggtggagtgccgatgcagaaaggaaaatattcagctttcctctcttagatcgcactttgaagatggccttttggagacaatctgacaggttaaaacaggaactgttggaattattctagctgtaactacctattggctatgtgttgattgatcctagaaagaaaaaataatttttcattttagatcttgattgaatttaagatgtatttatatgcctacaaaaggtctgtcttgtaactgttgtataaaataaacctaatctatggtttcatttttaatctaaaaaaagttgtgccttaacaatagggcattgtatgttaataagggaaaacaacctttttagtagatgggggaaaataggaactttttgccattaaaacttaagttcttttgatgtttttaatattatagttgggggagattcattaaaattaaattgaaataaaattatttttgcataacctagcattta

SEQ ID NO: 433205 - DNA, 878 bp, Homo Sapiens
actacaattatggaatggaaagcagttcaggagagatttgccttgggattattattactgtaaaattttgcaaaaaatcattgtgcaaagaaatctatttgtgagcttctactgtatttacttaaatagtgttaagcttctaggtccctattttagacatcttaacccttttgaggaaagaatatactgtatgtgtgtggtgtatgtatgcataactatatatatgatgaagagcaagcatttgatatgtgttttaactaataccagtaataatgacttgccttccaataaccaaagtggaacttaccatcatctattattcctaaagaagatctttcattcaccttaaagttacttatgtttagacgactaaactcttttttatgtgattgcctttttattatgctggttattgcatcactgcagattatagagtaaatggtaacttatactgttgacataggtatttgctgaggggtgagttaaggtacctcctgcacctttctgttttaagattgccttctgcacctttttgtcatctgcttgcactggtgtgccttgtgaatgcccctctattcattctatttccatgagtccaagactctggccacagaaggcataaacctaccatcttcctgtctgtatactacagaccttatccccctcacccctccagttgagtagctgttgagctctggcccaagccttcaggtgataaaatggagaatcagtccaaatccaaggtgtagatggagttatgtttccccagtgccactctcaggcgtgtttgtagtgaagatggtgagctttgccacatgcgtctgtctggtccccaggcgctgctagcggctcagtctcttatcctcgtccaaccaata

SEQ ID NO: 433206 - DNA, 1233 bp, Homo Sapiens
  misc_feature (58)..(58): n is a, c, g, or t
  misc_feature (62)..(62): n is a, c, g, or t
  misc_feature (93)..(93): n is a, c, g, or t
  misc_feature (115)..(115): n is a, c, g, or t
tggccccccctgactgctgtgggggaagccgctcagaagccaccgggcccaggttgtnaggnctgcggggggcctcgaggctgctgtgcccgntgtcccctgcagtgtcctccanttttgggttctcgatggtcatggtctctttggcattgcggtgtgcgcctgcctcccccttgtcgcctggtgggtgcttcatgttgccatggtgccagcgccggttctggctgtagccatggtgagtgggcctccctgaggggtggggtgctgagcccccctggtaggatttctggtggtccctgttgtgtttggcactgcctggctggtggtcaccatgctgttggggcttgttgccccccggaggtctctgctgccgccttcgatcatttctcctcctgcggaacagcttcttggtgtgtgcgatctccacttcatggggcatcgggtggtagccctgccaggctggaaggcccttctcgatgtcattcaggttgatgcccatccccattcttccaggtttccctttgcccacacccttcgcggtcgaatgtgtggcaggggctgcttgggcgtgtgtcggactttgcggtggaactgggtgaagtccagcttttccggctgcaggtcccaggtggcaccactgaaggaatcgaaggtgttggccgcccagatgtccgtgcccagcatgtccagagagttgtctttgctgccattctgctgtgggggggctcgccctcgggagaaggaacagctgctgtccagcggttcgctgcagtccgctgtccactgggagatgtgggactgggtcctctcgctctcgccatcaccctccgtcttgtcagccagcagcccctgcacctggtactccagcacgtagctgtcgatgaagcgctccagctcctcgatctcctgggagcggctgctccctgcctccgaggaggctgatgctgcagaggagttttccatccctccagctcaggggcctgggccgggactcggcggagcgcggtctgaacagctgcaagtttggctgatactaaaccaactgctcgatgcagcaaatgcgggctcggggttcctctggccgccgcgccaagcccgagtcgggggtgggggaagggtgcagggaaggggaagggagggacgaggctccggagagccgactcctgcctcgagttcggagcgtcccagctgcggaggggatcgggcgccccagcgcacagacccagcagagag

SEQ ID NO: 433207 - DNA, 510 bp, Homo Sapiens
  misc_feature (487)..(487): n is a, c, g, or t
taattagcctatggcacttactttattttctaatttttttccaatcataacagtaaatgaagaacctttgtttaaaaaaattacctgatgattccaattattgttcatgtacaactttatttaaaatggcaatctgagttgtcttcctgacatactctgtaccaaatcttagtactcagtttcatcaagtcctttgccaattcatatattcaaaagaaacatgataaaatgtaaaaggagaatggagtgcgttaaggaataatcaataatttaagattatcaataattttgatattaatattaatttcttagctgtcctactttaatgattttcattgaaactctggcacatctttaatagtctcatgacattactatttaaataaacatgattttcatccaaattattttattcttcttttttgtttttcctttggagacagggtctcgttctgtcgcccagggctgtagtgcagtggtgcgatcntgggctctctgggaacctccgcc

SEQ ID NO: 433208 - DNA, 959 bp, Homo Sapiens
cccgttatgcgcttcgggggtccccgaatctgacaaggggaccgggagttggacatagtgtgtgccgcacagcgtagatagccaaacggcctttccctcccatgccgggtaaagttaactacaaagacgcgttcggtcgctatcggtagaataaacactagtattttacccgagttctatacaagggaacttcgttttctggttgggcccaagtgtgctttatcctgggccccaaggcggtttcgccccgtagcgggcattggggaaagccagcccaaggggttacgatgttgggaaattggaggccaaagagtgctctgtcacccggtgattaccgtttaacggtgcttcgaattagtatcggggcataaaacccggccggttgggcctccatccaatcccgtgaatacccacttgtgaactggttgccaccctgggctggacttggtggtggggcccggctggccgccgttcccagcttggaaactttcctggggtaaacgttcccgtggaattcagtcccaatttgcctaaaccccttcttgcgccgaacgggttttccggataccagcgcattggcggccaagtacgtccttaaagcttaaaggcggactgggcatggttctccgttagttgaagagattgacttgtccaccttgatcttgctgtaggctttgaagtcatctggcattagcatgaccaggaccaggaacattgctcagctcattgatcgtgtggttcaccccccacatcaggacgctgaggatcggctcgctggcccggaatagcttcactttctggcacacgaaatgcttcttcttggtcttggtcttgctggcgctgagcggcgccaccgccaccgccgtggtgctggtgcagttggacgacatgacccggggcggcggcggcggcgcgaaagaggggggcggcggagacagcgcacaagccagcggcctcag

SEQ ID NO: 433209 - DNA, 1022 bp, Homo Sapiens
  misc_feature (12)..(12): n is a, c, g, or t
ttgacgttgggnttatataatacacaataccaaaacattacaagaaaaagtcgtaaactccttaggccagagttttcctacacaaatttaacacccaccattggcaggcaatgttagatatataaattaataacttacaaaacattacattatatacattaagtaataaatacacggttataaacaggaatggaggtgttagcgcagaaggcagtgcaagagaaggacggcagcattacattgaaaacagcctaacggggtgaagagaggaggtagggaacagggccagggactgtacaactcctgtggggggcagggtccaagacacagcagggcacactgctgagttctatgcagactctcacggtgaacgacaccactgctcctttctaccccctaatttgttcaattttattctgtttacagcaaaaagttaaaagtactgttggaggcaggcaaacagagagaagttttaagagtgactgtggagttggactggacaacaggggaaggaagtaaaatgtggttagaagtgtatcctttctgtctgtttgcaaaagtaactgtagtaaagtgaaggatattgcccaagaaagaaggaagactattttctttcccttttccagaaagagtcaaaaaagtttgtcaactttgaaagcttatctgtgtagaagttgatactaaactccaggtattcaacaggcattttaaagacatgaaaatgttttacaaaaaaggcacacaggttggcagacaaagggacaagtgagaagattcataaatgaagttattagtcagtgagttcagtcactgtcggggataagttcccgaaacttagtgcagaatgatctctcagttttgtgtcttccattttcaagccatgtgtcttgatcagaatcggcccccagcaacagcttcagccctctccaccaagcttgccatcaaggcaagtcaaccgtgggatttcctgagctgctatttgcttcctggtcttgcttgtcctgggggatcctcgaaagtct

SEQ ID NO: 433210 - DNA, 798 bp, Homo Sapiens
  misc_feature (698)..(698): n is a, c, g, or t
ccctttttgggtctggaacactttaaaatagttcttaaacaatccatagcctttctatggctccatggtataacataaaagctttaaaaatcttttttgtaccaaatggctgattctcaagaacctttgccatactgagctcctgcctggctcacagcttgaatttcatctctctttcagggtcatgatttctgctattagctggcctctttgtaaatcaacacctttgggaaagatcggaatctaagtaatgacagaaactgtcatttagccgcgaacaagaaaatgggaattcagaaaatgttcggacctccccacattgggggccagctgcccttacattcaaatggagttaggaggaaaacttgagaactggcggcatgtttctgcttttgagaaactgcccctctttaaggcatgggtatgaagtagccaagtgaaatgctgcaatccataggattctgtgaaaggtcttcatcaagcaataacgtatttagtggctaatgtaaaggatgcagtataaaatattcattatggatatcctttttatatcaagtggtacctaaatggatcctggtttattaagattaatgccttggtttacagaggattcaaaacaatgtttctgactgtgttggactagttaaaaatctatagaaccttaaagctaaattgcagcatttgtgcaactatttccnaaaaaaaataaatttttaaaacatcaatgtttccaatccagctatggcgtctgtgtgcatgtctaactgtcagagctgattgtgttttcaaacaaaatgc

SEQ ID NO: 433211 - DNA, 1453 bp, Homo Sapiens
  misc_feature (470)..(472): n is a, c, g, or t
  misc_feature (474)..(474): n is a, c, g, or t
  misc_feature (476)..(476): n is a, c, g, or t
gattcattctcgccgggcggatggctccgagaatagtcggttgggtgcgccactctgttgtcggtggtcttgggcgcgccaggggatatgtcaaggggactacaggggcgcaagagtaaggagagggtggaagttcgggggacgtggtgaaagggcgttgttagtcacggtgcgaacatgtagcggaacgcggtacggcgggtaggcgtgatttcagggggctgcggtggtgtcgatggggggggtggcgaggagggaccgtgagaaaaggcgcttcgggagtcgtccggaacggctcgttgccctccgggggtttttagttggggagagtccaagccttagtccaggaccaggatttgcctaggaagcgggtagggccgtggtcacttccctggggggcccgcgcgccaagcgaatggtttaagaaagcttttcggggggccgagggggccgccagggtgtttgttttnnntngngggttttttttcctcctatttttcgccactcccatatacaccaatgtcggtcctgggggctcagcacctgtaacaatgtatggctagaattcttcttaagaaacgtccgcccagtccgttctctccatgcccgtgctgctgctacctgtgattccacttgcggcagtgcttcaagacgcacaggaatagggcgtcctttcgcagacaagctctcaagctgctccaaataagcgtaattgctgccactctgaatagcttccactttagcggtccattctcgagccttttgtaaggcttctttcaaggacaacacattgggtagaaaggctggaatgttcttggcttcattcacaatgctttctaaacttgccacactgtgcctcggtcttgcctgtaggcagaccttagccttttcttcccatcgttcagagactgtaaggagctcctgtagttcagccattgctttctccacagcatggtggggtgccaaccctaccccagagtctatcagcttcttcatgacatccaaagtgacttgttgcggatctgataaggtcagtcttacttcgtccaaccaccgagcctgttgtagctcttgcttcagtcgtggtaattcagggagttccacatagagactagagcccatatctatcaacatctggagtttggaagaatctggggtttcatccatcatggcctcctgagcacgttcatgaaactcttccacatcatctagcagattctttacttgccgagcttggctgatgacacacggaagactaaaaagttgttggacaaaggccttcaattcttccactgtcagtttggtccgagtcctcccactatctgggctctgtctgtgtttctgctttttgctcagaagcagctgagccacagaagcacaggtctcagcttcttttacagcatccctgagtttcgaaagagatcacctcgtgccgaattcgccacccaggcct

SEQ ID NO: 433212 - DNA, 527 bp, Homo Sapiens
taaccaataattccaagagtcccccgggggggtaaaattcaattatccaaattatttttatttcccaatccatttctgtaaaagttaaaaggcggtttcttcccccctttaccattattaaccttttttccagtaaatttaaaaacccaaatccattggtgggacggtcattttcttttaaagggaacaatttaagaaaacctccacaaggagtctgcacttgggaaagatccgatcagagtacacagtagagacaaaacaggcatcttcattgtaattttttttaataaataaaagcacattaacaaaaaaggaaggtaagcagcaccggaagcctttgacgtttgtaactaaatgctggtactcaaatggtctagctggttaagtttcactaggaggcgcaaaaaaggagccgtttttgacttaacattttaattctagtagagataagaagagcttgtgtgggcttacagtccttcacctgactgtccttcaccagtgagtagcataccagttcttcaaatgtc

SEQ ID NO: 433213 - DNA, 1547 bp, Homo Sapiens
cgttgaccaatttcggcctgggaggccagataccaccatgtaagcatccgcaatcgtctcccaccttgtagacatcaaagttgtcaattatggcatcaaagcaggtatacaggtcattaagaagtgtcactacctgcatgggggtgctctctgctgacaatgctgtgaagccaacaatgtcactgaagtagatggtaacactgtcaaaggcctcagcctgtacagtctctccccgttttaactgctctgccactgaatggggtaggatttggtagagcagagcttcagccttgcgtttttcctccagataggcctgtgtgcgttcctccaccagcttctccaagttattggcatactgttccatgcgcagcaggaggttgtccaatatgctggtgccaccctccttgttaaagcgccgaatgaagcccttaatctgtccaaagtctggccgctcagctgggtcctgagcccaacatcgctccatcagcaaaactagctcttcattcagttgggtccggtcaatgcttggccggaaatatggccgctgaccatttcgtaccttctggacaatctctttggggctgaggtccaggccctccaagtagaaaggaccactgcgaagtgctatctcctgcaggatgatcccaaagctatagacgtcagccttctgcatgcctgtggttggccaaggggttccccactgagccagttcctggggcagtcccacagcttccttggccatagagggcatggctgtcatcaggttcagcagttgcatcggaagctggccaggccatagtctgtgatttggagcacaaaacgactatcccacccacacagttggaggacttgagactcccatgcgatgaaataatgctgttgtggagaaaggccatgcccttaacaaggtcattaatgagtgaataacgaaacatccagtccaagttgatgctgtcattttctagaatatcctgtaaactcccacgaggacagtattcagtgacaatgcaaatgttgggagggtctatgcaggcgccaatgaagcgagtgagatggttgaactgaacatctctcatatgtttgagttcaaacagaacctgccgggtcagctcaatgcgcttcttattcacatgtttgatggcgacaacatttcccttgaagtgaccggtgttggcaaagatctggtatttcccatgggctgtcatgagcgagccgtaactggatccccgcagcgacagtgtgaggcgactgcctgcacctttgtgataacgctctgagttgccaaactgcagttcttcccagcgaatacgccacaacatgctagccagctccttctgccagcatcagctttcggaaaattaggaagctggaaacaccaaacatgatgaaggtgattcctgtgcccagagccacaattgccagggttgaaagtggagttttatcacaggatgggtcgtccaagtcaaaggcacaggggggattgtccgagggaggagcccccgaacgcgtggtcgacgatatcccaaacgttccggaccgtaccagcg

SEQ ID NO: 433214 - DNA, 1094 bp, Homo Sapiens
  misc_feature (75)..(104): n is a, c, g, or t
  misc_feature (902)..(952): n is a, c, g, or t
aatgttaatatttttattgaaataaaaactgtatagagacacgtgaaaaaaataatttattacagactcttttannnnnnnnnnnnnnnnnnnnnnnnnnnnnncgatgtgctgatatgaaatactaaatttaaaggcaaacatttttacacaaaagtagttgcactctattttataaagatagatattaataagttatcagagacatttaagagctagaggccaattattccaacagtaatgcattctatgctgaaagtaaactaagttttctgaacatgatgtcctggatataatcacattcttctaagctaaggaaagggagctcatttctgggaatacaaggccaagaagggctctaacagcagtatcccagcagtgtgtttccagatttattcttggatgtggttggagctcccaacatttagcctgaactaatgtaacagctcaatgtgaaacaatgcagctttctgtaacagctgcctgtggttaatgagatttaatacaggggatacagttacaaatgatagcattttagacagaattcataattgccatcatgatttgaattagctaatcaaatactttaataacagaaacgtgtattctatatttctgaaagggaagtagcatacttcaaaatagtcactattttcttagcatgatatgttaattcttactttgggagtctgaaaataaattgcattttttcccctaaaacttagaattcactcctttagaaaatgatttctataatgatatacaccccacatgatataaactttattacattatagtcattaaaaatatacatatacatatatgtggaacactaaacagatttggtaaacatgatataaatatacacatggccaaacactgttcagtttcatttaactaannnnnnnnnnnnnnnnnnnnnnnnnnnnnnnnnnnnnnnnnnnnnnnnnnntaatgcttgtagtagattttaagacacatgaagctcacatcatccacatcaaaagccaaactttagataatatactaaagcctaaaaagtaatagaaagcagagctaaggttgaataacggatagtgagagatatatctaga

SEQ ID NO: 433215 - DNA, 1915 bp, Homo Sapiens
  misc_feature (129)..(129): n is a, c, g, or t
  misc_feature (250)..(250): n is a, c, g, or t
  misc_feature (992)..(992): n is a, c, g, or t
  misc_feature (1157)..(1157): n is a, c, g, or t
  misc_feature (1159)..(1159): n is a, c, g, or t
  misc_feature (1164)..(1164): n is a, c, g, or t
  misc_feature (1174)..(1174): n is a, c, g, or t
  misc_feature (1181)..(1181): n is a, c, g, or t
  misc_feature (1227)..(1227): n is a, c, g, or t
  misc_feature (1229)..(1229): n is a, c, g, or t
  misc_feature (1256)..(1256): n is a, c, g, or t
  misc_feature (1263)..(1263): n is a, c, g, or t
  misc_feature (1271)..(1271): n is a, c, g, or t
  misc_feature (1275)..(1276): n is a, c, g, or t
  misc_feature (1278)..(1278): n is a, c, g, or t
  misc_feature (1315)..(1315): n is a, c, g, or t
  misc_feature (1326)..(1326): n is a, c, g, or t
  misc_feature (1340)..(1340): n is a, c, g, or t
  misc_feature (1344)..(1345): n is a, c, g, or t
  misc_feature (1351)..(1351): n is a, c, g, or t
  misc_feature (1404)..(1404): n is a, c, g, or t
  misc_feature (1412)..(1412): n is a, c, g, or t
  misc_feature (1524)..(1524): n is a, c, g, or t
  misc_feature (1534)..(1534): n is a, c, g, or t
  misc_feature (1538)..(1538): n is a, c, g, or t
  misc_feature (1586)..(1586): n is a, c, g, or t
  misc_feature (1629)..(1629): n is a, c, g, or t
  misc_feature (1632)..(1632): n is a, c, g, or t
  misc_feature (1636)..(1636): n is a, c, g, or t
  misc_feature (1646)..(1646): n is a, c, g, or t
  misc_feature (1649)..(1650): n is a, c, g, or t
  misc_feature (1652)..(1652): n is a, c, g, or t
  misc_feature (1660)..(1661): n is a, c, g, or t
  misc_feature (1677)..(1677): n is a, c, g, or t
  misc_feature (1680)..(1680): n is a, c, g, or t
  misc_feature (1682)..(1705): n is a, c, g, or t
  misc_feature (1708)..(1708): n is a, c, g, or t
  misc_feature (1762)..(1762): n is a, c, g, or t
  misc_feature (1808)..(1809): n is a, c, g, or t
  misc_feature (1816)..(1816): n is a, c, g, or t
  misc_feature (1870)..(1870): n is a, c, g, or t
  misc_feature (1875)..(1875): n is a, c, g, or t
  misc_feature (1888)..(1888): n is a, c, g, or t
  misc_feature (1890)..(1890): n is a, c, g, or t
  misc_feature (1892)..(1892): n is a, c, g, or t
  misc_feature (1897)..(1897): n is a, c, g, or t
aatacaaactcacccaagaactggaaatcctcactgacaggctacagctcacgttaagagccttggaagatgaaaagaaaaagacagacacattgctgtattctgtccttcctccgtctgttgccaatnagctgcggcacaagcgtccagtgcctgccaaaagatatgacaatgtgaccatcctctttagtggcattgtgggcttcaatgctttctgtagcaagcatgcatctggagaaggagccatgangatcgtcaacctcctcaacgacctctacaccagatttgacacactgactgattcccggaaaaacccatttgtttataaggtggagactgttggtgacaagtatatgacagtgagtggtttaccagagccatgcattcaccatgcacgatccatctgccacctggccttggacatgatggaaattgctggccaggttcaagtagatggtgaatctgttcagataacaatagggatacacactggagaggtagttacaggtgtcataggacagcggatgcctcgatactgtctttttgggaatactgtcaacctcacaagccgaacagaaaccacaggagaaaagggaaaaataaatgtgtctgaatatacatacagatgtcttatgtctccagaaaattcagatccacaattccacttggagcacagaggcccagtgtccatgaagggcaaaaaagaaccaatgcaagtttggtttctatccagaaaaaatacaggaacagaggaaacaaagcaggatgatgactgaatcttggattatggggtgaagaggagtacagactaggttccagttttctcctaacacgtgccaagcccaggagcagttcttccctatggatacagattttcttttgtcccttgtccattaccccaagactttcttctagatatatctctcactatccgttattcaaccttagctctgctttctattactttttaggctttagtatattatctaaangttggcttttgatgtggatgatgtgagcttcatgtgtcttaaaatctacttcaagcattacctaacatggtgatctgcaaggtagtaggcacccaataaatatttgttgaatttagttaaatgaaactgaacagtgtttggccatgtgtatatttatatcatgtntnccaantctgtttagngtccacntatatgtatatgtatattttaatgacaataatgtaataaagctaanancatgttggagaacaccattatagaaancatttcnaaaggagngaanncnaaggggtaggggaaaaaacgcaatttattctcacacncccaaagaaanaattaacatatcangcanncaaaanagtgactattttgaagtatgccactcccctcccagaaatatagaatacacgtntctgttantaaagtatttgattactaattctaaatcatatggcaattataattcttctaaaatgctatcatttgtaactgtaccccctgtattaaatctcattaaccacaggcagctgtnacagaaagcngcantgtttcacattgagctgtaacattagttcaggctaaatgttgggagcnccaaccacatccaagaataaatctggaaacacactgctggganacngcangaagagcccntcnngncccggtanncccagaaaagagcagnctngnnnnnnnnnnnnnnnnnnnnnnnntanccaggacatcatggtcagaaaacttagtttactttcagcatagaatgcattacngttggaataaatggcctctagctcttaaatgtctctgataacttannaatatcnatcttaataaaatagagtgcaactacttttgtgtaaaaatgtttgcaattaaanataanattacatagcagnanancgaanatatgtataaatgttcca

SEQ ID NO: 433216 - DNA, 552 bp, Homo Sapiens
  misc_feature (70)..(90): n is a, c, g, or t
ctcaaccccacatgtcaaaatcaaatgatacatattcctgagagacccagcaataccataagaattactnnnnnnnnnnnnnnnnnnnnngacattagcaccatgtattcatactaccctattttcacttttaatagtattataaacttcatgaacttaattagtgtatttttacagtatacttttgagtttgttaaaatatgatgatattagtgattggtttggttcagtcccagaatctttgactagttacagatttgatagcacttaaatgtaattgaatagcttatgcttcatggctggggcatatccagcatgttatgaactaataactattaaactggacttaaccagtcattcattaataatttttcagggataacttaggggcctcctaaagacactggtttgggcactgaccagtttttagccaatttaatcggtatctagtataaataattctcatttttcttggatgatattaccagagtgggcttttccttttgcataacggctagtaattatcaatatcatgactaattaaatccatgc

SEQ ID NO: 433217 - DNA, 957 bp, Homo Sapiens
  misc_feature (36)..(36): n is a, c, g, or t
ataagtcactaatgctaagctataaaaactaaaaangaagtaagactacctttcaaaaattcttctgaatgaaattatcaggcatcttcaggtcactaaagtaggaaaatacaaactagggtaaatatgacttatctctttaaggaagctattgctctcataaaactgacaatcagaatccagtttacaaatgtctaacgtacagcaaggaacacacagattcttgcattggctattgtatctgctcacagggatgtctcactgctcagaagtttaaacacagaaatgaaacaagtattgcactacttacagtatgaaggtggatttgggttgagggacagaatttacaatacatgatcaaagcagttttattaataattgtgacactcttctcatatatatgtaaaaaataaattgaagatcgagtcatagacaagtctccctgtcaacacctttccctgagtcagctttcttctcttttcggctttcaatgcttttggaaggaaagcttgactccttatcttttgagttatcggcagtaatcagaaggttcctccacaaggcagtctttgacatttcatcagatatattgatcacagatggatcatctctatagtgcccttccaatgggagttgtactgtgccctcatcttccatagctagcatactttgttcttcttctttttcagcatcttccagtttctttttcttactctcgggcatcaaatcatccaaccagctgagttcccgcttcgtgaacaacaagtccatcaactttcttacaaataccagggctaacaccatcatgggaaagacaatagcagctcttgaaacttttattatccacaaaaggccaaggcaactcatctgaatgattgtgaagagatgcacttttcgaagcggtacgtgccaaaggtatataaaatctggttgatgttttgccggcatccagaagag

SEQ ID NO: 433218 - DNA, 700 bp, Homo Sapiens
tgattggggtcctttgaaataagtcactattgctagctattaaaactaaaagaaagtaagcttaccttccaaaatttcttctgaatgaaattatcaggcatcttcaggtcactaaagtaggaaatccaagctaggtaaatatgacttatctctttaaggaagttattgctctcaataaaactgacaatcagaatccagtttacaaatgtctaacgtacagcaaggaacacacagattcttgcattggctattgtatctgctcacagggatgtctcactgctcagaagtttaaacacagaaatgaaacaagtattgcactacttacagtatgaaggtggatttgggttgagggacagaatttacaatacatgatcaaagcagttttattaataattgtgacactcttctcatatatatgtccaagataaattgaagatcgagtcatagacaagtctccctgtcaacacctttccctgagtcagctttcttctcttttcggctttcaatgctttggggaatcagcttctagagtgattaggaaggggagcttttggaaggaaagcttgactccttatcttttgagttatcggcagtaatcagaaggttcctccacaaggcagtctttgacatttcatcagatatattgatcacagatggatcatctctatagtgcccttccaatgggagttgtactgtgccc

SEQ ID NO: 433219 - DNA, 1412 bp, Homo Sapiens
gcttggtaaaagttgtggaaagccataatgatgggggccccatttttgcaagatggtgacattcagaattcctgagcccagccagtttcctcaaggtatccaaaagccgccaatgtctgacgtattgctaatatttctgcaggaactttatccgaaaaggcaggcagtccttgtacactctcatagtcactgaaagtaatatacactgacctgcaaaagtcagatggggagacataaaggacctcatctttggttattagtggcgtgaaaagcatctccatctgttccattaatcatattgcacttgtctgttatccaccagtccaagtgacgttttcgcagttccattccacaatttttgtaaagttaaggtaactgtcttctccagttagaaaaacatagtctccatcattagtcccatttttctcatagaataggccaaaatagggagagatatcgggcctgaaaacatggataagggacaagatttcatctttgtagccccagagcaattcgtcaactgtgtgagtcacaaagagcttctgctgataggctttcaacatggcctcgatgatctccctgaggaagtgcacctgggaccactctatgacagtcaatacaggaatatttaatgttctaattaagtcaattttagggtctccaacagattggtctcgttcaaaaacataggccttgttgctaacagcagatattgttgttccattatctccaaattgaatatttgctttgtttctgagttccctgtaggtgtatggccccacttcttccacccgaggggtctcccctctgaggatctcctctggattggtgacattgaagaaatagaactgagtatacacaggcagagggggcttctcccaggagtcaaatgcctcagtaccattccttaacacaattttcttctcgatactctggtctacagccttctggaagacccgggccaccagcagcgtgacgctggtcaccagcaggagcagggacaacgtccccgccgtgtagaagcagcatcggcccattctgtgcgccgctcacgggccgggccgggccgcacccgccagggatccaactgcaaggagggaggagccgccgcagaggcgtcgaagacccgggacccttcggcgccacgcccacgccctcccggcgcacggttcgtgcgcgcagctctgggctccgcggcctggcgagcgcgaccccgggtgcaccgggcggatggggccgcggagggacgggcccggactcggtttcggtttccttcgccgggcagccgtggcgcccgcctagcgcagctcgggagagtgcagggagcgcgcagggacgtgacgttcgcgggccgggctcgccgcaaccccgcgaggcaaccgccggcgcggacgcgtgggcggacgcgtggg

SEQ ID NO: 433220 - DNA, 505 bp, Homo Sapiens
caccaccaacccgggctcctttgtcctcacgggcatgcacaatgccaggcccaagcacctgctgctcgtggaccccagaaggcacgatccggacaaaggacagagtctttgacagtatcagccacctcatcaaccaccacctagaaagcagcctgcccattgtctctgcagggagtgagctgtgtctccagcagccagtggagaggaagcagtgacctggccagcactgctcccagcactgcgcaccaggtcaggaggacctggagtggactagaatcggggctgctggaactgggacagctgcctgtggctcagagccttcttcaaaagcttcaaaaggaaggcttcctttaaggtcaagtttcataaacttggttctgaatttctcatatgcatattaaaggtgtacatacctatacatcctgtacaaattatccctctatatttatattttttaagactaagaaagatgtaagactaatgttctgtgctgtgtgtttttaac

SEQ ID NO: 433221 - DNA, 3110 bp, Homo Sapiens
  misc_feature (688)..(699): n is a, c, g, or t
  misc_feature (733)..(742): n is a, c, g, or t
gctttagggctttttttttaatgtttcctcactgttttgacaatatcatgaaaaaaatcagtttagaatctggaactggcctggacgggatttgagggcagctggcgggggctgcatagcccctgaggttcctcccccaccatgggacctaagctattggaaacaggagcaccaacagggcaccgaacctggaactaagttagtgtctagagtcaggcaagagaggagagtcaggcaagagaggaggggccgggccacagtcgccatggggacgcccctggctgtggttggttctgtgtctccccctccccccactggctacatggagacagggaggtgggtcaggctgttcccaggacagaaaaataaccggcagtcaacctcagggctcatacccgagcttctgctcaatcccctcggggacagttacaggactcagagagaaacgtaaatttcagaaaaacaaatcatttttcacataagtgttccaaatattgcgtggggcatattaatgctagaaaattatcttttgtttacctgaaatttgcgtttaactcagcactctgttttggttttgctaaatctggccaaccctggcctcaaaagtcggtggggggaggcctgagaaaagaaagggaagtagtcagtactgagggtattgaggggagggagggaataactcagcccnnnnnnnnnnnngggctttccccccataggaatgatatattatttnnnnnnnnnntcgttctccaaaaatattctgcactggccttcctcagttgttaatagctatgggaggtgcgtagggaaaacacacacaccagacacccaccccatgtcattctaaataaagttgggaagcactaaagttgagctggtgtctttgccacggatgtccccagactccagtccgctaatcgccaccagactccagtccgctaatcgccactgtgaattttgaagaggaggcttagtataaaggttttctaaaaggattgattctcattctgaggcagacctattaacaccatcctgatattgctctataaggatttaaacacaataataaagaacaaacaagcccctagggactgagcgagtgccctagccctgttcctagtgtcatcctggaagggtcccttcttgcaattcacgaagcctggggggctttccttccattctccatcctgttctcttccctggaaagggctgcgtttagtgcacatgctcgcagctggccccccgtccagctcagctccaaggggctccagatttccagggcaggagctggggtggggcagggaggggctgagaggcaagaccgtctccctcctgctgcagctgcttccccagcagccactgctgggcacagcagaaacgccagcagagaaaatgggagccgagagtccttagccctggagctgaggctgcctctgggctgacccgctggctgtacgtggccagaactggggttggcatctggcatccatttgaggccagggtggaggaaagggaggccaacagaggaaaacctattcctgctgtgacaacacagcccttgtcccacgcagcctaagtgcagggagcatgatgaagtcaggcagccagtcggcacccatgccagccccctacgtcctccgaagacccgagggccaggccagtgtccctcatctacaaggtccagggtccatggtctgaatcaagggtcctggctgcccctgcgccgtagggtcaaaggtcatagtggggtgggggcagggagaagatgcagccaagagctcccggtggccacccactgtccgcctcacacacggatttcatcctcctcctcctcatccatgaaggagaactccttgtctggctgtcttgagacagcagcccgggccctgtccggcccccggaaggcagggctgcgctcctccaggatgcctgaggtgcagctggagagggagctgctgtcccgtgtggtgtggctgcccatgctgcgggctgagccggggctgggggccgctgctgcccacccctcatcctccagagcatgggaggggagggagggcaagtctgggccagccttgccttcctgccttgccaggggaggggccgccacggcgtacgggggagcctgggtgatggtgccagcggcgccctcatcgccatggtaaccaccctccccctcctcggggtcccactcctccttgtccatgatgctgaggacgtcacccagcatggagggccccaggtcgatgtggaaggacatgatggactccgcatgcttcagcccgtacgtggccttgggcacgacaggcagatctgtcagatccccaaaggcctgctcatcgaggagggggtcaggggaatgtggacccgcggccccattccgacggggcactgcctcctccgtgcccgcctcctcatcgccgccctccccgtcattggccttcttcacggggctggatgacaggctcttgggcagcttactggtgcccttctccgcggcctccttctcattgagctggggcagggacatggcattcttgacaaacagggccgagtcccgcagggagcccagcatgtcacgctgctcccgctcccccctggtcaccgactgtgaccgcttgctgccccggaacttcctggacaggagactgcgtttggaagatgaagaagagggctgttcgtccaaggactcgccgtcgggctcgccagccttgctattgaggaaggaggtgtccccaaaggcgtctccggcccggccaacgtgcatggtgtggcggaagtcgcccagcggggcgctgatcatctcggccgtgaggtccgctcgggaacggcgcttggagtgcaccgagctggacaccagttgcttgaggattggcatcttgctggatgggcggggaggtgggccctcccgaggtagccggcaggtctggggtcagatctgaagtccaagtccagtgggcagagggggacgcaatgaggagatcataaggctcggtccccggagacccgagctctgggccggctgcgctgtccccttcgtgggctccgcgcggcggaggggctggcggcccctgtcagcgccggcgatccttaaattccggaccgtaccagct

SEQ ID NO: 433222 - DNA, 1094 bp, Homo Sapiens
  misc_feature (970)..(1025): n is a, c, g, or t
aaactcgggggagaattcccttttctcaagaattactcaagctgcggaggatcctccttttcacgacttgtgttaggttgatcaaatacactattccactttggataaggaatcgggcctgtggccaactcatacaatgtgatccccaaactcccagacatcagagcggacatcatatccttgtcgtgatgcgcttgggtctattctttcaggtgccatgtatggcctacagccagcatctcttgtcttggcaatagagtccacaagctgtccactgatgccgaagtcacagagcttaatatttccacttctgtccagaagaatattggaaggtttgatatctctgtgaataattttcaagttttcttttaagtggtttagtgctttcacagttgctaaagtgattttgcctaaaatttcttctggaataacatcatctaatacactatatacatatttgtaaaacttatcaaacgaggtagacatgagttccatacagatccaacagtcaccctctctgaagagtgcaccataaaactgaacaatgtatgggcaatcactactccgcattactacatccaaatccataagaagttgtttttgttctttttcatccactgttgaccgaattcttttaactgccattatttgcccacttggtttgtggaccattttgttgacagaaccataagctcctcgtccaatttctccaaggtctttcaagtcctctgcagtgaaatcccagtgttgttcaggggagatcttcagttttcctgatgactcaatgctgtgtgttctcagtctctctatgtgtgggttttgaactcctgtaggattgggattcagagtaaaccttgctgtagatttgaaaggtggatttgcaaaattcaacttcagtgctttgcgtttaccctgcatgctgctgacggccgggtggcctggcgccggggaccctacggggccgggggtnnnnnnnnnnnnnnnnnnnnnnnnnnnnnnnnnnnnnnnnnnnnnnnnnnnnnnnnttgttgggagtgaagagccgagcggcgccgcggcggctgcaatgcagcaagctcggcctctcgcccgct

SEQ ID NO: 433223 - DNA, 760 bp, Homo Sapiens
tcagagtggacaatcatatccttgtcgtgatgcgcttgggtctattcttttcaggtgccatgtatggcctacagccagcatctcttgtcttggcaatagagtccacaagctgtccactgatgccgaagtcacagagcttaatatgtccacttctgtccagaagaatatttggaaggctttgatatctctgtgaataagttttcaagttttcttttaagtggtttagtgctttcacagttgctaaagtgattttgcctaaaatttcttctggaataacatcatctaatacactatatacatatttgtaaaacttatcaaacgaggtagacatgagttccatacagatccaacagtcaccctctctgaagagtgcaccataaaactgaacaatgtatgggcaatcactactccgcattactacatccaaatccataagaagttgtttttgttcttttgtcatccactgttgaccgaattctgtttaactgccattatttgcccacttggtttgtggaccattttgttgacagaaccataagctcctcgtccaatttctccaaggtctttcaagtcctctgcagtgaaatcccagtgttgttcaggggagatcttcagttttcctgatgactcaatgctgtgtgttctcagtctctctcctgcacatcactgcaactgttcttctgtgtccgtactgttacgatctctagatgaatactgctttatgcatccttctgcaatgcagctctgttaattccccgct

SEQ ID NO: 433224 - DNA, 490 bp, Homo Sapiens
  misc_feature (11)..(11): n is a, c, g, or t
  misc_feature (30)..(30): n is a, c, g, or t
  misc_feature (36)..(36): n is a, c, g, or t
  misc_feature (56)..(106): n is a, c, g, or t
acatgttcatngtccgggtttcctaggaancagganttctgggacaattaagcttnnnnnnnnnnnnnnnnnnnnnnnnnnnnnnnnnnnnnnnnnnnnnnnnnnnaaggaaacaatttgcaaatttacacacctgacaaaaccatatatacacacatatgtatgcatacacacagacagacacacacacccgaagctctagccaggcccgttttccatccctaagtaccattctctcatttgggcccttctagggttggggccctgagcttggtttgtagaagtttggtgctaatataaccatagctttaatccccatgaaggacagtgtagacctcatctttgtctgctccccgctgcctttcagttttacgtgatccatcaagagggctatgggagccaagtgaacacgggggattgaggctaattcacctgaactcgaaaacagcgcccagcttcctcaccgcaggcacgcgtcttttcttttttt

SEQ ID NO: 433225 - DNA, 1177 bp, Homo Sapiens
  misc_feature (864)..(864): n is a, c, g, or t
cagattcgggggtggccccgccgtgaaccacctgtacgtgtgctccatctgccaggtggagatcgaggcactggccaagcgcaggaggatcgagatcgacaccttcatcaagttgaacaaggccttccaggccgaggagtcgccgggcgtcatctactgcatcagcatgcagtggttccgggagtgggaggcgttcgtcaaggggaaggacaacgagccccccgggcccattgacaacagcaggattgcacaggtcaaaggaagcggccatgtccagctgaagcagggagctgactacgggcagatttcggaggagacctggacctacctgaacagcctgtatggaggtggccccgagattgccatccgccagagtgtggcgcagccgctgggcccagagaacctgcacggggagcagaagatcgaagccgagacgcgggccgtgtgatctgctgggctagtctccccatgtgccccaccccgcggaaggcgtgtttgtgcccagaagagaggccgggctgctgcagaaccccgccgtgtaaagaggcagaaaagttggtttggtttgcagtaacgctgcaactagaaaatatatgcacttcaggcttgttgaaacgaccaagactctgtgacgttaatttgggtctttgtcctggcagtgcctctgccagtcactgtcatcgttgtgtcccccacaactgtcctcttgctagctcggcccagctttgtccctggagcccgatgctacccctgtcagacagaggctgcggcctgggccagagtcagggagtagctgctgcttcacggcgtctccactgtgcgattggcccggagccccgaagactcggagggagctgctcaggngccggtgagcgcagccagaaggccctggccagtgaggagctcacaggtcctcccttggtggtccccgcgcacctctgcatctcctgggcgtcaccagggaaggctctgaaggtcccgggctgctctcagcacttcttccttgcgacctgagactcctggactctttgcctgattgcacacccggcgcggccgtgcgctactggccagtggggggctgttcctggaggcgcttggtccccccacggttcctggtagcctgtcccggattggcggcttgccccgaggttccgtcctctcgggaaatggtgccccc

SEQ ID NO: 433226 - DNA, 876 bp, Homo Sapiens
agggctatcatcgggctccagggacaaactgggcccgactaagcaagaggacaatctggggaacacaacgatgacagtgactggccagaggcacgtgccaggacaaagacccatatgaacgtcacagagtcttggtcgtttcaacaagcctgaagtgcaaaatattttctagttgcagcgttactgctaaaccataccaactgttctgcctctttacacggcggggttctgcagcaagcccggcctctcttctgggcacaaacacgccttccgcggggtggggcacatggggctgtggggacacgggcactcagcagtggggccgggccatgtccagggccctcccacatcctccaggaaggtgctttcagggacctgctagactagcccagcagatcacacggcccgcgtctcggcttcgatcttctgctccccgtgcaggttctctgggcccaagcgtgcgccacactctggcggatggcaatctcggggccacctccatacaggctgttcaggtaggtccaggtctcctccgaaatctgcccgtagtcagctccctgcttcagctggacatggccgcttcctttgacctgtgcaatcctgctgttgtcaatgggcccggggggctcgttgtccttccccttgacgaacgcctcccactcccggaaccactgcatgctgatgcagtagatgacgcccggcgactcctcggcctggaaggccttgttcaacttgatgaaggtgtcgatctcgatcctcctgcgcttggccagtgcctcgatctccacctggcagatggagcacacgtacaggtggttcacggcggggccacccccgaatctgttgtacaggtgctcaccagacgttctggggcag

SEQ ID NO: 433227 - DNA, 1041 bp, Homo Sapiens
  misc_feature (74)..(74): n is a, c, g, or t
  misc_feature (79)..(80): n is a, c, g, or t
  misc_feature (90)..(138): n is a, c, g, or t
  misc_feature (334)..(334): n is a, c, g, or t
ggtggtgttgcgccgcgcgatcctcggggtgtgtaggtggtccgttggacgtagtttgtgtggggggtatgagnggagnncaccaagcgnnnnnnnnnnnnnnnnnnnnnnnnnnnnnnnnnnnnnnnnnnnnnnnnncgggaaatttaagtaaattgcgaggttaccagaatttccctttctttgggggcccccgggccattcccgggaagcactgagcggggggtttctttgccccccttgcccctttttggttgttagttccttgcgtgcttgatagccggacaccatagcctggactcgtcccaccagattccacgcgggccagctttgncctgccccttgccagaggggtcgaagcgctccttgtgggagcccgtgaacttggtggtgtccgtgagcctcgacactgtgggcgacgagatggctttcgtcaccccctgagatgatgggcgccttgccctcgatgagccttgtgcacctcgcgaacggcctcttcgctgctcttgtctttgaatcgcttcttggcgagctcctccagcgcctcctggaactgctcaaaggtgattgtccggcaagacttccctttgatcttgctgaagacgatgtccacgtcagtgacggtcacgttcctgccgtcgatcacctggcagtccttgcacagcttcgaccagttcttgccgtgcatctccctcccggtggccttggcgtccccgtgcacggcaaagcgccggaaggcctcctccagggcactgagctcaggggatgcggctgccccctcaccagcaccctccgattccagcgacagcctcttggctgcccggtccttcgaggggtcccccggggacttggggggcgtcctgttggcagctttggcaggcttggccttgtcagccatgttgcttggagacgcagcgactgcagcggaggcgcctccgcgactcggccgcgcgcgacccggtgctcagcggagctctccagccgccgccccgcgcccgcccgtcccgcccagcaatcccgggaattccggaccggtaccag

SEQ ID NO: 433228 - DNA, 669 bp, Homo Sapiens
  misc_feature (312)..(325): n is a, c, g, or t
atgacattgtttttatttttagtaaaatgcttttacaaaggaagaggagttaattgaatgtacttcttcactctctctaaagcattcttgcatatacctccatatagctaagtgatcagggtcgagttaatttttcagtcatttttgaaataaaatctaaaatgccctctgtgcaatatggaaaaggttcttgacaaggaaagtaaataacttaaagaatctgcttaagtggaatgcttctttctgtaggatccacattgggctcttgaaagagattctgataaaaccgtttaatgcattgttcacgagtcnnnnnnnnnnnnnnatgaagctttttgcatggccatgatgaagcattctccacggagcccctcaacatggacctttttgccaaacatatgtttttctggtaccttggctttctcagcccgggaagggtgatacgacgaggtacaagtcactgcctgtgcagccggagagtagacagtagagggcgtgcttagagcgctgagggcattccaccggcgcccgagcaacaaggcttccttcgctggggtacagcgggcccattcgactgggctctcgctggccacaaccacctccatcacctcgaacgccccccatcgttcacgcgtcctccctctactccctatctccccctacaccccg

SEQ ID NO: 433229 - DNA, 754 bp, Homo Sapiens
  misc_feature (320)..(320): n is a, c, g, or t
  misc_feature (614)..(614): n is a, c, g, or t
  misc_feature (663)..(663): n is a, c, g, or t
atgacattgtttttatttttagtaaaaagcttttacaaaggaagaggagttaattgaatgtacttcttcactctctctaaagcattcttgcatatacctccatatagctaagtgatcagggtcagttaatttttcagtcatttttgaaataaaatctaaaatgccctctgtgcaatatggaaaaggttcttgacaaggaaagtaaataacttaaagaatctgcttaagtggaatgcttctttctgtaggatccacattgggctcttgaaagagattctgataaaacccgttaatgcattgttcacgagtctttttatttnttttatgaagctttttgcatcgccatgatgaagcattctccacggagcccctcaaaaacaatggcagaggaagtcccctggccttttatcatgtgcagaatgtaagtgacatggacctttttgccaaacatatgtttttcttgtaccttggctttctcagcccgggaagggtgataagaagaggtacaagtcactggctgtgcagggggagagttgacaatagagggcgtggctagaagtgctgaggtcattcacagcgggctgagcagcaagccttctttgtctgtgtacagngggccctagtgaatgtgggttcgtcttgccattaaaatcttccatcagnttgaatgccattgagtcgctttaatggtcctgccctatgaaaaataagcagctttaataagaggtttattaaaggtgatgcgctggccctt

SEQ ID NO: 433230 - DNA, 718 bp, Homo Sapiens
cacgagcagggacggaggagggatcagatctcttcagtgacgggcatgacccgttttacgaccgatccccttggttcattttagtgggaagggcatttgtttacctgagcaatctgctgtatcccgtgcccctgatccacagggtggccatcgtcagtgagaaaggtgaagtgcggggatttctgcgtgtggctgtacaggccatcgcagcggatgaagaagctcctgattatggctctggaattcgacagtcaggaacagctaaaatatcttttgataatgaatactttaatcagagtgacttttcgtctgttgcaatgactcgttctggtctgtccttggaggagttgaggattgtggaaggacagggtcagagttctgaggtcatcactcctccagaagaaatcagtcgaattaatgacttggatttgaagtcaagcactttgctggatggtaagatggtaatggaagggttttctgaagagattggcaaccacctgaaactgggcagtgccttcactttccgagtaacagtgttgcaggccagtggaatcctcccagagtatgcagatatcttctgtcagttcaactttttgcatcgccatgatgaagcattctccacggagcccctcaaaaacaatggcagaggaagtccccggccttttatcatgcgcagaatattgcagtggagatcactgaatcattgtggcatccgata

SEQ ID NO: 433231 - DNA, 602 bp, Homo Sapiens
agactctagagtaccccacgggtgaggtagagctaaaatatctttgataatgaagtactgttacagtcatgagtgactttcagtctgttgcaatgactcgttctggtctgtccttggaggagttgaggattgtggaaggacaggatcagagttctgaggtcatcactcctccagaagaaatcagtcgaattaatgacttggcttcttgcatcgccatgatgaagcattctccacggagcccctcaaaaactagatggcagaggaagtcccctggccttttatcatgtgcagaatattgcagtggagatcactgaatcatttgtggattacatcaaaaccaagcctattgtatttgaagtctttgggcattatcagcagcacccacttcatctgcaaggacaggagcttaacagtccgcctcagccgtgccgccgattcttccctccacccatgccactgtccaagccagttccagccaccaagttaaacacgatgagcaaaaccagccttggccagagcatgagcaagtatgacctcctggtttggtttgagatcagtgaactggagcctacaggagagtatatcccagctgtggttgacca

SEQ ID NO: 433232 - DNA, 1153 bp, Homo Sapiens
gttgagatgctgagatggagatatctggtggaggtgcatgagggtcccacatgctgaggcatgggggataaacgagtcgactcagggatcttggggatgactgtcaccaagtctctcacgcagcagcaaaaagtggcgggttttttccacctcatgtaggaggtccagcttcttcagcttccactggtgctcaaggatgaggctgtctccacggggccgccagcctgctaagttctcttctccccgcacatatgccactgacgtatctaagatttttcttctccttctctgcatacctggactacctgtgtctgacattttgcataagctgagttcgtaaatgccagtgactcgattcgaatctggtgactttgagtagccgctgccaaagaggctaacgcagagagcgtggtggtgagatcttggcatctcgggagtagaagaccatgcacacatccttggtgatgacagccggctggatgcaatgatccagctctaggtaggccgacaaggtcatgtagatcttttctccatagggtgtcactcggttcagaagaagggagttatgcagagagctatcccacacagcctcaaagcggtagaaggtcctgctagagttgtgggaagacttcaggtacttggcagaaataatatttagggagaggatggcatcaactgcagcttcatccacctcaggcttattccgaatacgacctaccaccagttcacgaacatctttccaatggagctcgctccccttctcatggataatggtcactgtgatccttcgctggatgccctgatgaagcaaaaatgtcccctggcaaggcaagcctgctgtgtggtcaaccacagctgggatatactctcctgtaggctccagttcactgatctcaaaccaaccaggaggtcatacttgctcatgctctggccaaggctggttttgctcatcgtgtttaacttggtggctggaaccggccagatttaaactccatattcttaactgtactgatgctatgtgactttaggttaaggctgcttaacctctggggagtctgtcctcctcatttataaactgtaggaccctaatatttaggcctactatcttggaaaaggcaatcatggaaggatccactaacataatggtacataa

SEQ ID NO: 433233 - DNA, 1197 bp, Homo Sapiens
  misc_feature (20)..(20): n is a, c, g, or t
  misc_feature (92)..(92): n is a, c, g, or t
  misc_feature (127)..(127): n is a, c, g, or t
cccttggaggaaaccggaanaagctttggcccaaagttggggtggtaatcaacctccggaagtacacctccatgtactctggatcaacagcntagtccctaaatctgtgccccatagacacagtccnaaatccagactccacagtgacgatccttaaataagttcctttccaggtttgtctctggcacaatttttcctcatatcccacccattttcaaatcatacttatcattatatcctaggtttttggcactagtatcgcacatgaggaaatttccgtaggggccatggaaaacatcttccacaaattctagaagtcctatggctattttggcctttcttggccatgatggtgtgaacagctgatccatgcttcttctgaacccagatggaataaaaagttcaatgacccaaggaaggcttattccataaagagaggtatattcaacactttccatcacatagaggtcaccacagaatccccattaatttgggggtatgttctttatcttgaagtatcaccatgagaagaaattcattcagttgaagaagtgcccatgccgactttgcttctcccaaggaaacctggccatctttgtctccatcagccaccgtcaagatgagattaaccagttcagagaggtttccttggtcacccaattttgccttaaagagactatagaccatttctttaaatttttgtacagtagttcctctagttggcttatcaaatagcactatttcttttcttggttccaattcagttccaaaatcaagatgaagcgcttgttccatttgacatttcacaacacctggtagattatcccaaatccctaaatacatctgattgttgggcttggtggataaacattttccaaagtaaagagtttctgtaacacaaaggctgttacatgcaggcccatcaataactccagtcttgtacttgtcacatattattttcttacagtcctttcctctgcataattctgtataggtagaatactgcacatatataatccagcttccaacaaaaaccactaaccaggaaaagaaaagatatttcatccgcacatatgagaagcgagcctggaggtaatagggtttccttagccaggcccccggacagagactcctcgccatggtaatcacacatcgccccgccgcgctgcagtcagaggcggacccgagcgctccgct

SEQ ID NO: 433234 - DNA, 1833 bp, Homo Sapiens
  misc_feature (1153)..(1161): n is a, c, g, or t
ttttttttatttcttccatccatttattataaccagatgatgaatgggaaaagtaccttaaagtaaacaaaactggtgctaatccatggcgttgaaggaaagttttgagagaaagctgtccagtgatggtcacatagatttttaacatgttccactttaggtaggcgaaacctttgagcagaaaatagtggatcttttctccaaaaggtgtttaattttatggagatgttgaaaggtacatgccaaatctgagtatacgtgtgaaaataatatgaaagaggagcaaatactaaaccttgtatatcaagtttacatggggaaaaaaacattagataaataaatacatttacatgcctctttaagaaatagccctttggcccacaggatatactgtttgaaaatggaaagttattactaaaaagtctgctataatttattttagtcttgcacttaacagtcccactttcacatagttcaaaatcaggatatgtggatcttgattgggccttaagatgtcagttttgaagggctcagtcagctgcgtgatactaagatgggccctttgaatctttaggaaagttcatccatttttagtcaataaaattggtgtactgtcaagtataagatttcttgaagtaagccacttgaaccattgtgaagctacacataacttgatgtctgaatgaggttaaaaatgggtgtataagtctttaatacagtgaaccatgctattaacccaacatctgttttataaagaagcaagtttaacctgctttgcgttcttaatttctgttaatgtgcaaactttaccatgctaagacattagtaaatttataaattttcttgttgaacagcagcttcaatgcaaacacaatgcttccagcattggtattttggctaaggtaaatctacaaatcactcactgttgatgtttatggaatgaagcttttcacagcattggtttttaaagtcagtcaaaatagttacacaatgaatgtacttcggagatgtaacagggcttctaaaagggcaggaatgacatcttggggacctgttgatcctacacctgccattacttcagtaatcacatactgatggcttctcaggcctggggggaaggagttttgtgtaactggcaggaatttgaagccannnnnnnnnaatgctcaaaattgttctttaaaagtggcaggtttcttaaaatggtaattatgtccaaatgaactaagagtcattagtgtaggaaattttcttccacaataatgtttttaggttatttagtatcaaagaatgttccatttccatttgatttgctgtgactttgagagcaatacaagaataaagctgcttttctaattcttcacgaatttcacttggagcaccacgcagtaggtagtctttgagtaactgacaagcttttgccaagtttggttgtatcacttctgaagtacacttcattgtactctgatcacagctagttctacaatctgtgccatagacacagtccaaatcagactcacagtgacgatccttaataagttctttcaggtttgtctctggcacaatttttctcatatccaccattttcaaatcatacttatcattatatcctaggtttttggcactagtatcgcacatgaggaaatttccgtaggggccatggaaaacatcttccacaaattctagaagtcctatggctattttggcctttcttggccatgatgggtgtgaacagctgatccatgcttcttctgaacccagatggaataaaaagttcaatgacccaaggaaggcttattccataaagagaggtatattcaacactttccatca

SEQ ID NO: 433235 - DNA, 1026 bp, Homo Sapiens
gacctttctaaggaacccaggtctggaatcttttggtaaaaaactttccagaggggtgaatggaatattcccaaggttaagtccattataggttccaaaaacgaaataataaacctaggttaggctgggctttctatcaccagcatgaaggggatgggcaagatgcccagcggcctaaggatatacttcagcagcatctgaccaaatgatttaagcttgctgtgtagttctccaagaacagaaaatgcccaggaggacagaactgatgggtggcataggggtcttctcttctttgtgcgattgttcagtgtataaatgaagttcagtttgtaggtaagattccaaactgctggtatcttttgatggtgggaacttccatacaatcagcttctgccactcttctccaaggtgataaagtatgttctgtttctgtattgtgagctccatgctgagagatttcaatatttttaaatcaaagcattttctggattttaataacttcaagcatttctgtgcctcttccagacgctgagcaccagtgacatacttcttctctgttaatgcacaattatattcttcaatagcagtggaaaactcctgcaactgtttaagcaaacttaggacaactgagtctctttccaactgctgctttaagtctgtaaattcaccggttgatacgtgaagatcccggcggacctcactctctatcctggatttcagcaggtcaatgtcttcagatagcttatccacctgggtaatcaggccctgcgcgctctgcatgctaggcaggaattcactgtacttcttgctaatcatattgcacacctcacccttgatctcctccacccgccgggtcaggcggctgatccgggtccccagatcctccttttccagcctcccggagtgtgccaaaacttctgtcacgaacgaggccatggccaagacgggaaccaacgctgactgggtcactctcgtggacagcgccgcagctcccgtcccatcggaagaatccggaccggtaccagc

SEQ ID NO: 433236 - DNA, 594 bp, Homo Sapiens
  misc_feature (11)..(11): n is a, c, g, or t
  misc_feature (83)..(83): n is a, c, g, or t
  misc_feature (99)..(99): n is a, c, g, or t
  misc_feature (126)..(126): n is a, c, g, or t
  misc_feature (134)..(134): n is a, c, g, or t
  misc_feature (195)..(195): n is a, c, g, or t
aattgttaaancctggggcttctgcctttttttaataaaaaaccccagggtaaaaccccgggaacgctgcccaagtgtttgcnactcttgggagttccnagttaagcctcagggccctgactgtanttttccancccatcttttctgaagtgtcctttgggcagtatgtagttatttattacaaaattatattcnccctaaatgcccaaccatcctacaaaaacaatgagtaatttttcctactttgaagatatacagatggggacaaaaaccctgttttggaattctgttctattcctcagtatccagaaagttactgacacagtaaaacaaggaaagttctaccctaagagccgccatcacttcaggccgctggtttgtcagccatctgttgcttcttattgatagatggcattggaatgtggtacaaagttagctctgaagaatatggtaacgaggacaataaagcatgcactgtaagaactgacctcaggtgtgcagatctactttgatttggggttttgattaattcttatttttctgaaaaaaagtttaaataatgtctgtaactattgtgtttttttcctgccgaat

SEQ ID NO: 433237 - DNA, 1559 bp, Homo Sapiens
  misc_feature (1226)..(1226): n is a, c, g, or t
atgtaaaaaagaattgtattcttttacatagatcaacacaaaacattacattgcctttgtatgttaaatgctcattatgctgatttacaattctaagagcaaatacatgtagttatctaaattttatgggtcctcaattactgcagatagacagtacagtaagagacagtacagtaagaaataaaaaggctgaaaggaatgttttggacattataggaggcctaactttgggtggtgtagatacagatcaaaatgaattctcaaaccagagatgggctttgtggaatgggcctaaagtagtgacaaggtagtcacagacttctggaggagggtacttgggctggtgtctacctggcatatttaggaacattccataacgagatgtaatatcagcacaattgattatttagcccaaggtctcagtcagttgatggctacaagtgttaagtaccacaagccccacctctatctctgtatgtttagagtgcaaatattttccccatgcttctcgtcccctagtcactgcccacccccctccgcccttccctattcttacaggacttagcaggctggcacactagagctctgtctttcaaagtcaagttcacatagaggagatacaagtaaccacaagcccttgagtaacccacgcaaagaaactgcttggctttggtctaaatgacttacatttttcctcgcttgaattagccggtaattacatgtgggcagacttagccagaatagtctaaatgatcaattagaaggcaaaaagaagttcctttctttaaagttcaagggtccctgttgaagagccctacttccaaagtgatgctcacatgggcccgtgcccagctctctgcggtgcctgagcatattgtacatttgcttaacgataatgaatttagtacttattttgcaggaaaatatagggcatttccattacatgcaatcaagcaaaaaggctgcaaaatgtgccactccattaattctaaacaaaatccttcccaaatgtcaccctgaaaccaaagtacagagttattataaatctgaaggaattaagagtaattttcatttgtacaaaggatgtgagggacatgactcctgccacacacacactattaattgggttaaatccaatttgccaatttcagtgtgaatcactaagctctgacctagcttgccccagtggtgagatcagtgggttctcgtgtttttggctcaggtgntacatgtgcacgtgctcagatgtgcacacacatacacaactttagaacatgcaaagaacataatgtaattggcttgttataaacatgttgtactgtctactattgaggaatgcatacttagctaaaaagaaaagcaaaaccttgatgattggactcagaatagtggttacctttagggagaagggagaggttatgttcaaagaggaaaaaaattccaacttctggcaagtcatttaacctccaagcctggaaacctcatcgtaaaagcccattcgaaattccgaccggtaccacctcttttacaacgtgtgttagagggaggggggggagagg

SEQ ID NO: 433238 - DNA, 791 bp, Homo Sapiens
  misc_feature (728)..(728): n is a, c, g, or t
  misc_feature (750)..(750): n is a, c, g, or t
aaattagaactgttatttaggaaactttcctagtgttccaatgtattttcatactgtatatatgtaaaatacaaaaggagcactcttagtaaggatacttgtacatttgtaacttgaatataagaaaaagagaccaaaaaagagacaaaattcataaagcaaagcatgtttaaatgaatgcattcctcttacttcatcctgcttcagtattgctcaagaaaatgaagcaattatttatcttgatttgctaccaggaatttttttaaaagcaaaagaaatattacactatttagtgtttcctaataaaaaataaaatttcactaattatgtaaaaaagaattgtattcttttacatagatcaacacaaaacagtacattgcctttgtatgttaaatgctcattatgctgagtgacaattctaagagcaaagacatgtagttatctaaattttatgggtcctcaattactgcagatagacagtacagtaagagacagtacagtaagaaataaaaaggctgaaaggaatgttttgggacattatagggaggcctaactttgggttggtgtagatacagatcaaaatgaattctcaaaccagagatggggctttgtgggaatggggcctaaagtaggtgacaaggtaggtcacaggactttctgggagggaggggtacttgggggctgggtgttctacctgggccttattttaggggacctttcccttaacngaggatgttaatttttccggcnccatttgattttttttagcccccagggttttccgttccgtt

SEQ ID NO: 433239 - DNA, 488 bp, Homo Sapiens
  misc_feature (456)..(456): n is a, c, g, or t
  misc_feature (473)..(473): n is a, c, g, or t
aagccaattacattatgttctttgcatgttctaaagttgtgtatgtgtgtgcacatctgagcacgtgcacatgtacacctgagccaaaaacacgagaacccactgatctcaccactggggcaagctaggtcagagcttagtgattcacactgaaattggcaaattggatttaacccaattaatagtgtgtgtgtggcaggagtcatgtccctcacatcctttgtacaaatgaaaattactcttaattccttcagatttataataactctgtactttggtttcagggtgacatttggggaaggattttgtttaggaattaatgggagtgggcacattttgcagcctttttgcttgattgcatgtaatgggaaatgccctatattttcctggcaaaataagtactaaatttcattattcgttaaggcaaatgtaccattttgctcagggcaccgcagnggagctggggcacgggnccttgtggaggcttc

SEQ ID NO: 433240 - DNA, 753 bp, Homo Sapiens
  misc_feature (126)..(176): n is a, c, g, or t
  misc_feature (189)..(241): n is a, c, g, or t
  misc_feature (704)..(704): n is a, c, g, or t
tcaagatgtgtcataccgtctgtaatgaagcaggcatgcctctttaggctaacatattttagtggctttgctttttgctttttaaaaagtttttctctttaagagatgtggtctcgccgtgtcatnnnnnnnnnnnnnnnnnnnnnnnnnnnnnnnnnnnnnnnnnnnnnnnnnnntgggcttaagcannnnnnnnnnnnnnnnnnnnnnnnnnnnnnnnnnnnnnnnnnnnnnnnnnnnncctcagctactagtggctttgctttaaagaaacagtggaatcctaaatttatgactaaaaattcccccaaaagatgaaagatctacaatgtttttgtcagtattatatttgactcaggaactaattattaatggagctttgacacctgcagatggagggctgatcttgtgtcaagttaacaggaagactgcccacagatgacactgcatttgtatccctgtggatgtagagtattgggaaggcatttgtttagtttcatgcctccaaaccatgcattgtctgtgatgtatctgcccagccttctcagaactcaatgttgtacatttttccctctaggacctgaattggtcttggaggcagcttttagaaatcctctgtgtagttcctgtccacatgcactatatatttgtttcttttttctcctctcatgaatctgctcgtttctctacttctgtctacgtanaagcactcagcaactagtttctgctcattaaatgtggttctatatacta

SEQ ID NO: 433241 - DNA, 895 bp, Homo Sapiens
cccaaaagtatttggtttgtatgctttgtctgtggcagctataacagtggtaagaacattttgaagatagctttttaaaggaaccactgattttttcaaaaatcatcctgggggaggaattttggcatttcatttgagcagggattttgtcagaaaatgtgttttgatggtaggtcagcagcagtgctagtctctgaaagcacaataccagtcaggcagcctatcccatcagatgtcatctggctgaagtttatctctgtctctcaggataaatccctgtaggacaaatccctactatcatttttaccttttggggtgacatgtggaatcatacgaaggcttaggaagaaatacgtttgtttaaaccaggatgctttacttacttgaagtgacttcaatctagatttcttttaatatttaacaaatttttaactctatgatcagccacagtcagctattaccataaattggtctgtttattttgaagatcacggctgcttcattttgcaggattaagtagggctaatgtatcttagagttaagcgcttgaattaaagtgagttttagaaatagtgttacataccttttcagttgttttcaagaggctttttgttgcctttgtagccctgaaagctgttggtatgttttttccctcatggacccaatacaaaagttgtatattcatttggactaactctacattctgtcctttgtaaaagtttggcgtccccgcaccatttttaaatgaccccctttggctcacccccaactaacaaaactcccccattcccacaattcccaccctggtaagatatcttctcccccccttccaaatccatataaactctcccacaattgagaacaccaacatcactgacctagcgaaagtaaatat

SEQ ID NO: 433242 - DNA, 547 bp, Homo Sapiens
actaatttgtgttttccacattaatacagtgagaaggattatttttgttctgcctatatcctagggacttcatatggaagaagtaaagtgacagctgggaaagggactttaggtgtcaacggcagtatgagaatacaggatttttgtcaatctgctgtgtttccccaggttaggaaaaccctggatgccaccatgcagacattacaggacatgctgactgtggaggactttgatgtctccgatgccttccaacgcagtcgatcgacagagtccgtcaagtcggctgcctctgagacctacatgagcaagatcaacattgccaagaggagagccaaccagcaggaaacagaaatgttttattttacagtaagtggcatcctgggcccagaaccacactgtcggccaagccactggcagtgacttttcaggagcaacccaagctactgagaaccagagaaaccacatgggtcaattggatctaagactccatcaccatgcttttaaaattaagttgcctggcttggttttctgaaatgcagaaagtgga

SEQ ID NO: 433243 - DNA, 326 bp, Homo Sapiens
agagaagccagctactttctctacatcttcaacagatacgagaatatcatccatgtactggagcaggcatatttgctttgggatgacaactttttctaacacttgttctaaaatttgaccaaaaaggtttggagagtctgtaaacccttgaggtaaaactgtccatcaataatgttgttttcgccctgaatggggatcctaccactcaaaagcaaatatgtctcagctgtcttcagccaaggggcatgcccagaaggcatcttttaaatctattactgtaaacaactgatggttttttggaatttggctgagaatggtgtatgggt

SEQ ID NO: 433244 - DNA, 415 bp, Homo Sapiens
gtttaaaatgattgaatttcagttgctattttaaaatcatgcttaaaagaactgtcttcaatgattacacattttcagtagatttttataaagaatgatacatttttatgccttaactctgtgcactgttcacactataaaatttttattaagatatctgtatagagcataccaatgaatataccggctttgattttcataggaaaattgccttccagtttggtgtacaatacagtatttcagtgtgaacattggcatatgactttggggactgcagtgactcagaacaaagataaaagtgcacatatgcatttgatgttccaaagtcaggatttttggaggccatcaagtgccttaagatctaatctctcttttctcctactccaaactttccattttacttcattttactatg

SEQ ID NO: 433245 - DNA, 2092 bp, Homo Sapiens
  misc_feature (196)..(196): n is a, c, g, or t
aggggcccccgggaaccaatggggccaagccctttgtcccctgggccccgaatccagccatttttgggccacaaggcccaggccctcaacaccccagttacctgcccattctttaaggggcaggggtttgggtgttccgggcagaacttgcagcaggcttctgggtcagggctggccttcctggaggggggccccntggccaaggcacagctgtgagcgggatggcctggcctggctcccaccttgcgaaaggtctcggtgtcaccagccaggccgttgcggggcttggcagtcaggacctggacgtcatgcttgcccgtcttgttgcgttttcggaggtagaagagcaggggcaggatgagcgccaggagcagaagtaccaggcacatggggatgatgacgctgaacatgttggcctcaaggaagctcaggaagcctcccttggccacagcgggctcagggctggatgccatggggcctggctcgcctgtgggggtgctgctctctggcttccctgcttccgtccgggcggcctcggggacactgagcagggccacgctgtagggccgggcagcattgtaaggctcagtggcaaagtccagggaggccacagcaggcgggacgccctgtgcccacagctccagagtgagactgtcacctgcggggccgggggccctcccctctggcctgcccacctccagccccagcctcccgtcctcaaggtcctgctgagtgaactgctccaccagctggctgcccccgggctccgtcctggctcggggcacgcggaccacgcggccatgccggggtccctccaggaggcggaagcgcggcacactgcctgtgcggttggccagctcgccagcatctaggacggtggggtccaggcgcagggtggcaccctggggccatggcccacctgcccacacatgcagcagagccctcacagtgacgttcactacggctgatgcattgacacccctagccagtgccaggactctgaagtggtcatgagaggaggagaagttggtgaaggcaaagaccacctcgccctggtctatcgtggaattggctgaaggccgaggtggtccgcccgcgccacgcaggagatgcccatactggggtccctggatgaggcggtatgctgcctctggctcctcccgatctgagaccacccggagctgctgctggctcagtgaggagcgccccaaagcttggggcacctccaggggtgcccgcagctgcacctcgatggcggatggtaggatgtccacagccagggacatgggcaggggtgggctggccccatcagacatgctcagctggaagatgcctgccacgctgctcccgttggccacgaaggccagccgccctgaatccacatcggcttgcgtgaagcgggtcacgggccccaggccaccacccaccaggctgaggaagccgttgtggggtgcccgctggacctcgtactcaatctccccaggagctgagtctgggtccaccacactcagctgggcccgggagatgggggcacgagagcctcgggtgagccggagtgggacagaggcctgtggctgagggggccgctcatttacatccctcaccgtgatggcaaaggcctctgaggtttggggtccaagccacggaggcccctgctggcgcctggaggtgggcacgaaagtggaagccatcctgctgggtgcccccaccgccgtgggaatacactagctgccctgcagccagctgggactgcagtaagtggggctgcccagcatgggaggggctcctcggacaccaacagctggccccggctggggaactgtgtgacctggaagagcacatcatgctctgagcgctgggggtgatggaacgctgcccaagagattggaggcatccagagcagccacggtgatcctggcgcgctggccctcggggacccagagaccttgttcttccagaggtgctgggtgctgggacagcagcctcaaaaacacagccacagcaagggtgcggccacgtcccgggcaggcggcgagacagctgagcttaggtatcatgacgaaggggatgacacggatccttaagtacctca

SEQ ID NO: 433246 - DNA, 481 bp, Homo Sapiens
  misc_feature (422)..(422): n is a, c, g, or t
ggcacagggcgtcccctgactggtggcctccctggactttgccactgagccttacaatgctgcccggccctacagcgtggccctgctcagtgtccccgaggccgcccggacggaagcagggaagccagagagcagcacccccacaggcgagccaggccccatggcatccagccctgagcccgctgtggccaagggaggcttcctgagcttccttgaggccaacatgttcagcgtcatcatccccatgtgcctggtacttctgctcctggcgctcatcctgcccctgctcttctacctccgaaaacgcaacaagacgggcaagcatgacgtccaggtcctgacttgccaagccccgcaacggcctgggttggtgacaccgagaccttttcgcaaggtgggagccagggccagggcattcccgnttcacagttgttgcctgggtcaggggcccccttccaggggaggccagcttgaacccaga

SEQ ID NO: 433247 - DNA, 1955 bp, Homo Sapiens
  misc_feature (991)..(1023): n is a, c, g, or t
  misc_feature (1418)..(1418): n is a, c, g, or t
  misc_feature (1768)..(1776): n is a, c, g, or t
ctgaaaactttgtattcacatttggctgcccattaattaaaacttcaatggacttaagcaatttgaattataaactctcatttaataaaacacccacacaatgacaagaatgagactttaatcagttttaagtggagtttataacactaagagataaagggttgttaacaaacacaataacaaatggacatctgattgggatgaggcattatcctgtacacatcatattggtatttttgtgtatcctcagtgcatagcatttacacacagagccactgctgcacagcacaagagtatctgaagaggctgaatcagagtaaggctgtttaacagactgaaattttttagtatatatattctatatgaaaacaggttgaacttttgaactggcaggtagaaggcaactctgccaaatactacagttaaagcccccactttagtgcacagttccaccccttccatctgcatgcatgacacattaacagtatttaaaggtaaacgaggcactttgtggcaaccacagccatcgttatgaacatattgcacaaaatttctagaactaaacattaaacttgtaccctacttttattttttaaagctgaaacatttgatgctgccggtaaactccacttaagtttataacctgtgccacagcaaagaatggtgatgctatttattcaactacccttttaaaagtatggcaaacatgttcaagaggagctacaaaggacttgggatggtacagggcccaactgtaagctttcttaaaagtgatgccttcaagtaacttcagacatgtaagctgctgcacatccaaaaagtctaagaaaatattccagaaactcagagattacctacagaatgcatttcaggctaattatgaatactgccataaataaagttttaattaggactcgaaaacctttcagtcatagcaattcttgtcaaattctatggggatggtaactgaaataaagtaaggagagtatgnnnnnnnnnnnnnnnnnnnnnnnnnnnnnnnnntgccatttttccatttccaatgactacacccataaaatgtaagcaaggcttcctcaaaaacattgaaacattcaaaatcaaaaccctcattcagaccttcacattccaaaggaaaaataataacagtgcaaaagcccattataatgtcattatttatgacctggccctccatgttacatattggaacaataaagttacgttttaatatgcggtgcccgaaattgtaacaaagaacaatatttataactatcttcaaaacatgaagttgattttcattttaggtaacaattttcagcttttatgaaagacaaggtggcatataaatttcaatggtgaggtgttagaatagttgtctctaactttaccaatttaacttatgagcaatcaatcaatanctctatatatcaatgtttaaatataaatgtgtaaatcctaagagctttgttaaaaatttaaaaattgttgaatgaaactgacaaggtatggaaaacgtgtcaacactatttactaagaatattttagatgaagttctgcctaatctatttgccatcaaactctataaatgctgctctagtaggtcctattcaatctgtatttgtaaattaactaggtcagaccacagctagtgaacaatttcagcaccaataagttattgaaaatggaattttataccattaagaaacaaaatggctggatattcaaatgtcaaggtgaaggtataatttgaagacaccaaatttctggnnnnnnnnncctttttaataatatcttcacattagctttacaatagtagttgtactccgcttaaaatcgtatgcagtctgggcatatcaaatatatgatgattttttttaagaagtgaaattgaagccctagtcccaactcgggggagcactatgaagaaatgattcaacgactgcacatttaaaaaa

SEQ ID NO: 433248 - DNA, 447 bp, Homo Sapiens
aaaagagttttaattgagcaatgaacaatttgtgaactgggcagcccccagaatcacagcacattccgagatattccagaggtgcctcgttaaagacaaagttcttgactgtaaaatctaggaaaacaagcaagtcttaaatctcaggggagtatgaaataaaatattttaaagaaacaaggattttgcttgttttgagaacaaggttttaacaagagaaggggtttatctgttccaacctaccatgcacttaacagcagttatttcatcaaatgttcttccttttgaatttgaaattaaaatgtagctagaaaataatttgtaaaatggtacttttgggacacagaggctaatgaaagtattttgtataatatatgcactgcttaagcaggcatatgtaaagtatgtatatccatttttggggcagaacgcagtggctcatgcccc

SEQ ID NO: 433249 - DNA, 1938 bp, Homo Sapiens
  misc_feature (550)..(623): n is a, c, g, or t
cccccccctttatttactgctccctgtccgccgttggtagaaaaaaatgtggtcccttcatcattacttactccttcctggtggcggcgacaaagatgcatttttttacgctcacgcccatgcaatcagattattcttcgctcctcgtgttgtggttaacaccgcacgttagacctcatccgttggtgggcttgttgtttaggtctttcgccgccctaccagggagtcctctatattattactctctctgatggagtaggttttttccccacaattaggttgtgtgcgccctcagcgcactatagaagggtgttcctcctcctccaccatagaagtttcgccccggtcagcaacgttgtttccaaccctcatcccacgctcgctctgttaaaaatgacggccgcgccatgtgcttctcggtgctaattagtgtgtcgcctccacacatgtgggcgccgccctttctgctagcgaaaacgtggctgcggtcgcgtctgtcgtgtggtcgcccccctggtgatactacttttttgcgccgccgcccccctcnnnnnnnnnnnnnnnnnnnnnnnnnnnnnnnnnnnnnnnnnnnnnnnnnnnnnnnnnnnnnnnnnnnnnnnnnnaaacaaagagggatttattttatttacaagaattctggagaaggatggcggctggtattggcttggtgaaataatgatagggtcaatgactctgtgattctcttggcctttttgtcatggtagcaaagtggctgctgtggctccaggcatcacaccctcaatcaaggtaggaagaagaggcccagggaggtgttagccatgcctgtgtcttttattggaaaagctttcccagaagcccaggtagacttcctcttcaatttcattggccacacctgatcacatagccatcctaagctgcaaaggagactggaacagtgaaaatctggatttacagcctccacagttggagtggctggagatacagagttgggacgacccctgaaaagtgaaccaaggtcgtctgcacggctgccctggagggcgtggtgcttgaggtcccttctacctctggggcttcatggaatgacttgttgcctccatggagcacctctggggaccactgggtgaatccccaggcattcccttggagagccctcgtccatctgagaccctctgtcttgcttctcttcacatgtctgaacaacacatggacccgagggctgcttctttggggaagtggtgatctttattttagggattgtgcatcttcagtgtaaccctcacctggcagacattaaacagcgtaaacacattctcagcacgccagtcacattcaggagcctcttggagcttgacttatacacacgcacacaggcgcaatatctgcatttacagccctgtgctggcagcacacacaggaaaagcacgacttcagtcaccctcaaaccacccagttatgagtaagaccagaacaatccctttcctccgacagtcccacgtttgcttccaggaatcaaagagcatgccagtggcagctatctgtggcagttttgggaaagtgaaaggagatgctattccagcactgctctgtcaccttagatgatgggtttaggaagccagaggcagggatttcaggggaaaagaaacaggcctggtttattctctaattctttaaaaatgggataggagcaaaaggttaaaatatgtgggtctcacacaggaaaggccttctgaagaagaaaaatgggtgaattcactggagttggcccagctaggggttgggtctcaggtgacagaggccggggattcagactcaaaggggccagtccataaaggtggcagtggggtcttcaaaccactgtttctattccagaagcctactgaaaatcattgtatatttgctttccataagactaggaaaaagtaaaaaaaaaaa

SEQ ID NO: 433250 - DNA, 757 bp, Homo Sapiens
  misc_feature (606)..(606): n is a, c, g, or t
  misc_feature (730)..(730): n is a, c, g, or t
gaattagagaataaaccaggcctgtttcttttcccctgaaatccctgcctctggcttcctaaacccatcatctaaggtgacagagcagtgctggaatagcatctcctttcactttcccaaaactgccacagatagctgccactggcatgctctttgattcctggaagcaaacgtgggactgtcggaggaaagggattgttctggtcttactcataactgggtggtttgagggtgactgaagtcgtgcttttcctgtgtgtgctgccagcacagggctgtaaatgcagatattgcgcctgtgtgcgtgtgtataagtcaagctccaagaggctcctgaatgtgactggcgtgctgagaatgtgtttacgctgtttaatgtctgccaggtgagggttacactgaagatgcacaatccctcagacatgtgaagagaagcaagacagagggtctcagatggacgagggctcttcaagggaatgccttgggattcacccagtggtccccataggtgcttcatggaggcaacaagtcattccattgagccccataggtagaagggacctcaagcaccacgccctgcagggcaaccgtgcaaaccaaccttgntcactctttagggatcattccaactttgtatcttcaaccacttcaactgtggaggccttaattcagatttcacctgtccaatcttctttacaccttagaaggctatttcaacaattttacccantaaactctgacagaaatccaccttgcg

SEQ ID NO: 433251 - DNA, 736 bp, Homo Sapiens
aaaaaagaactaccatataaagttatgtgcgcacatgtgcacatgcaaattgcattgtaatgaaaaattgtgtctccaaattttacagcctaatcattttattgcagtatctcctattatagatatcatgctctgatgcaggagagttttggtaattaacataaagcgctggtacagagacttgtatcattaagggaaacagagtcaagagcttggttagcaacagtttcttcaagtgactgagcccctggaagggagcatgaaaaaaacatcataattatgtttatgatgcaaatgctaagtcaaagtagcaatgatatgatctatgttgtagcaaataaggtataacaaagtcttcacagtataaataaaatgttctaaaaagaaacaaatattcaacctgttaataaattggtgaaatgtatacagataaaaatggcttatcactgtacaatgatatcaacatgacagtccacattctatacatggtaactcgtgatttttaacatttgctacaaaaaagtacaacaaatattgggaatcaactttaacatttctgatgtctaaaaagaatgaagtcacttctgttctatgttaaaaaatacatgttccccgcttccttttaatataatttataaagctttactaaatattttgttctagagaaacatctattgacttatgtgaaaataaagtcccatatctttaaaatctatacttatatatcgagtattcc

SEQ ID NO: 433252 - DNA, 798 bp, Homo Sapiens
  misc_feature (397)..(453): n is a, c, g, or t
ggtgaaaagggcaaattggttattttaaaatagaatggaagaaaaatgtttttatatcaatagctcctaagtatttactctttgatcatagctaccagcatgtcatttcttctctggtcgaaaccctaccaagtctagctactgctcagctacactacaaacaatctttgggcacttttcctttaacttttggatcatttatacattttcaactgatgaggctaaacttgtacagttattcctatgactactcctagacctttgagcaacaataagtgaagagaaatacaagtgaatgtattacaatcaataaaaacttgcagaaagacatcaagtggcataaggattttcttgtaatcttttttttgtttaaaatagcctacttaagttaaatatnnnnnnnnnnnnnnnnnnnnnnnnnnnnnnnnnnnnnnnnnnnnnnnnnnnnnnnnngatgttccagatttagaaactttatttcaagaacgaaagtattttaggtttataaagaattaaaataaatgtatttatgattaaaacgttttaggtacaggccataagagataaacggcatttcaaaaatatcaaattcactatcaaaatgtgtatagtacatttcagaatcaaggcaagacagtttttttaaattcattaaaagaattatgtggtaaattaaattttatttaacaaggtcatttcatacctagagaaaccccatagaattctataaagaagttgctgcaaaatacattaactcaataaatatttaaactaattaaaactgtcatccataataac

SEQ ID NO: 433253 - DNA, 1158 bp, Homo Sapiens
caacaaagccaccagcagccaaaccaaggcccccgacaaggatgtagaatactccagcaacgttgctcagactgagggcactggtcccttacttccagagtccttggctccacattcaccatcgtaccaccatttgtttttcagcttgtctaagacgccttgctcactgagtttcaatactgcaagatttactggggttcttaatgaggatcctttaggtgttgcgatgccatagcctttggaatccaggtttccaccaactttcatggtgtcgcaaggcttcctttgctcaatgtactcgttcatcgtggactccaacaagtaggcatatttccctttggacttccgcactctagccaccccttcggccgtagtcctcacaaacacagagggctccgcactccgcatgtaggtccacattttatcaaacactgcaattttagatctcctgaaaaactctttagtggagccagagtctaatgttccataagcaatttctgtttgcttagaaagatcctcagcactttcgatgggagacaccatcctctctacagtcaggaaggcagctaagttagccgtgtaggaggagattatgatcagggtaaagaaccaccacacacctccaacaatgcgcccagagagggatcttggcgaaatatcgcatccttgccgcataaaggcacccaaggaaaaccagagactattaaaaatcccaaattcattagttgattcactactttgtgtttctcttccatcttcaaactcctcagtgtgccactcgtaggggctaaatctgctgaccaggaataaaactacactgaccccaatgtaggcaaaaacaatgcacatccagatctcataggctaaaggatcaagaaaggaaaacactcctggtttggacttctgaggcttcttgatcatgatagatatcccgaggctcatgaagggctttgagaagtcaatcacctcttctctcacaagggtaatagttaatggagcaattgcaatatcagctttccccatatacaagttctccaaccatcccattccaaattttcgtgtctgcatccctggccccatacttgccatcaccaacaattgtcaacttgtacttgaacccacaatgtttggcgatttctgcagccaggtcaacacagt

SEQ ID NO: 433254 - DNA, 379 bp, Homo Sapiens
tctgtactttttattaggtaatgctcaggttgcctgcagtgtctaaaattactctgtggccagggccccctgctttatcgctttctatagtttttaagtagtttgaagcttgaataacataaaataacataatataatgttatttatgttatttcccacgtgaagaacgcctgtaaaccttgcagtattgaaactcagtgaacaaggcatcttagacaagctgaaaaacaaatggtggtacgataagggggaatgtggagccaaggactccgggagtaaggtcagtcgctgaaggtctttttgtactgattagcaatcacattttgacccactgtttattttctaccctaaaacggctttccttccctacatcatcact

SEQ ID NO: 433255 - DNA, 955 bp, Homo Sapiens
  misc_feature (310)..(451): n is a, c, g, or t
ggatatgaacctgggtaaaagcggcggtacggccggaatctcgggatatcgtcgacccacgcgtccgcgttctgctctggttccttctggtgggttagcaacagggcgagatccactagaatacagctctcaaaatctactgcacatggactcacccaaggtgctttacaaaaatcctgatcccaggccacattccagatcacttacatttgaacctcaggtccaaactcaggcatcagcatttaaaacattcctcaggtgactcccaacatgcagctgatttgccagccagccctctgcagtctggatnnnnnnnnnnnnnnnnnnnnnnnnnnnnnnnnnnnnnnnnnnnnnnnnnnnnnnnnnnnnnnnnnnnnnnnnnnnnnnnnnnnnnnnnnnnnnnnnnnnnnnnnnnnnnnnnnnnnnnnnnnnnnnnnnnnnnnnnnnnnnnagccctccaggagactctgaggcactagtctggtccagtgggtctcaaacttgactgcaacaaatggcccagagatctttttgaagtgtagagtctgactcagcaggtgtgggtggagctgagaggccagcaagatcccaggtggggccgaggctgctcatcctcctaccacattttgagtagcaaggagctaccaagagcagccgacggggtttcattctcgtctactggaagcaaccttaatagacaactgaaaaacaaaacaaaacaactgagatacctgtttctgccagaaaacccaggccattcactggtcagctgttccaaaaccagagttaagctactgcagctgttcccgcgtgcctgactgcattccagtaaataatcccacgtggcaagtcagctcacctggttactgccaaagcatgttcccagctggtgtgactcagaggcacaccagaatttctttattataatttggcgatggggtcttgctttgccacg

SEQ ID NO: 433256 - DNA, 733 bp, Homo Sapiens
  misc_feature (19)..(19): n is a, c, g, or t
  misc_feature (607)..(665): n is a, c, g, or t
attataggcgtcagatgancgcccagcctaacaaattctaaaagagctgtaacactgacagtctcttcatggtcccagttatttccaaaagggcacgttctgctctggttccttctggtgggttagccacagggcagatccactagaatacagctctcaaaatctactgcacatggactcacccaaagtgctttacaaaaatcctgatcccaggccacattccagatcacttacatttgaacctcaggtccaaactcaggcatcagcatttaaaacattcctcaggtgactcccaacatgcagctgatttgccagccagccctctgcagtctggatcaaaggttctcaacatgaggtccctgaaccagcggctgctttgctaagaactgggaacttgtgggaaaggcagcgtctcagaccccaccccagatctactgaatcagaaactctgggggtggggccagcactttgtttcaacaagccctccaggagattcttgaggcactagtctggtccagtgggtctcacacttgactgcaacaagtggcccagagatctttttgaagtgtagagtctgactcagcaggtgtgggtggagctgagaggnnnnnnnnnnnnnnnnnnnnnnnnnnnnnnnnnnnnnnnnnnnnnnnnnnnnnnnnnnnaggagctaccaagagcagccgacggggtttcattctcgtctactggaagcaaccttaatagacaactg

SEQ ID NO: 433257 - DNA, 742 bp, Homo Sapiens
  misc_feature (210)..(352): n is a, c, g, or t
  misc_feature (674)..(674): n is a, c, g, or t
tcgggctgctcttggtagcttcttgctactcaaaatgtggtaggaggatgagcagtgtcgcccccacctgggatctggctggcttctcagctcccacccacactgctgaggtcagactctacacttcaagaagatctctgggccatttgttgcagtcaagtttgagacccactggaccagactagtgcctcagagtctcctggagggctnnnnnnnnnnnnnnnnnnnnnnnnnnnnnnnnnnnnnnnnnnnnnnnnnnnnnnnnnnnnnnnnnnnnnnnnnnnnnnnnnnnnnnnnnnnnnnnnnnnnnnnnnnnnnnnnnnnnnnnnnnnnnnnnnnnnnnnnnnnnnnnatccagactgcagagggctggctggcaaatcagctgcatgttgggagtcacctgaggaatgttttaaatgctgatgcctgagtttggacctgaggttcaaatgtaagtgatctggaatgtggcctgggatcaggatttttgtaaagcactttgggtgagtccatgtgcagtagattttgagagctgtattctagtggatctgccctgttgctaacccaccagaaggaaccagagcagaacgtgcccttttggaaataactgggaccatgaagagactgtcagtgttacagctcttttagaatttgttaggctgggcgtgacngcacgcctataatcccaacactttgggaggcaaatcccaaggtgggcagatcacctgaggttgggagt

SEQ ID NO: 433258 - DNA, 1364 bp, Homo Sapiens
aaaccacattgtttacacaggcagcccatggaggacaggcatctctaatgaaaatatccgatagcaccttgaagactgtgccagccacctcacagctctcgaagcctggaaccacaatgctgagagtagcaggaggggttatcacaactgccacttcccctgccgtggccctctcagcaaacggtcctgcacaacagtctgaaggaatggctcccgtgtcttcatctacggtcaggtctgtaaccgaaaacttctgggcagcagcaggtgtgtgtgagccaggccaccgtgggaacttgcagggttgccacccccaccgtggtcagcgccacgtccttggtgcttacaccaaaccccatctgtgggaaagccacagtatccggactgttaaagattcactccagtcagtccagtccgcagcaggccgtcctgacgattcccagccagctcaaaccactcagcgtaaacacatctggaggggtgcagacgatcctgatgcctgtgaataaagtggttcagtcattttctaccagcaagccacctgccattctgcctgtagctgccccaactccagttgtccccagctctgctccagcagctgttgcaaaagtgaagactgaaccagaaacacctggaccgagttgcctctctcaggagggtcagacagcagtgaaaacagaagaaagttctgagctgggaaactatgtcattaagatagaccatttagaaactatccagcaactcctaactgcagtagtaaagaagattccattaatcactgcaaaaagtgaagatgccagctgcttttctgcaaagtctgtggagcagtactatggctggaacattggaaaaaggagagccgctgagtggcaaagagcaatgacaatgcgaaaagtcttacaagaaatcctggagaagaatccgagatttcaccacctgactcccctcaaaaccaagcacatcgctcactggtgccgctgtcatggctacaccccaccggaccctgagagcctgaggaatgacggggactccatcgaggacgtgctgacccagatcgacagcgagcccgagtgcccatcatcattctcctcttctgacaacctctgccgcaaactggaggacctgcaacagttccataaaagtttaacccgagaatgaggaggaggtggacatcctcagccctctccgagccagtgaaagataaacatcaagaaggaggcaggaagaagaaacaagaaggaagtccaagtttctaacctgcccaccaacccccaagggttctgaaattttattggggggatgttcaccacagaaaagaattgggggattcaccccctggcaagccccgggggggcaccctccat

SEQ ID NO: 433259 - DNA, 867 bp, Homo Sapiens
  misc_feature (241)..(261): n is a, c, g, or t
gttttctttcatgtctagacatcagtgtgttacagagtttaattcattaagctctgtatttgaatataacaccttgtaaaaatgtttgaaacttatcctcttgtatgttaaatatttaaatatttgtatatggccctattcagcctgtgctttataaatcacaaaagagctgggttttatatgtttgttttttatttctaagctctctgcgaaaaagttacaaattgtctccttaagatannnnnnnnnnnnnnnnnnnnnatatcatgttgtgatttccataaatatgtgcagttactcttgataatacttgtcttattcatttcaggttgctataacaaagtaccatagactgggtggcttataaacgacagaaatttatttcttacagctctggagctggaagtctgagatcagattaccagcatggttgggttctggtgagagccgtcttggttgcagactgccatcttcttgtatcctcacatggccaaaagaggacaagagaactctctggagtctgtttgataagagcatgaatcccattacatcttcacatggctcctcccaaagaccccacctcctaatatcatcacatgtcatcacatagggggttagaatttcaacatagaaaattttgggagaacacaaacattcagtcagttgcaatacttaaggcaaattcatcttgcttataactctggtgcatgtgcattaaaatactattgcattgtaactgagtttgtacctattttctgctttctgattatttcctttgttcatgaaaataaatgactggtattacaaggtcacctaaataaataggtttgtgtacgtctgcgactagagagaaatactacagtgatt

SEQ ID NO: 433260 - DNA, 1594 bp, Homo Sapiens
ctgagctcgtaccattagcgcgttctgcgtcaggtggatactaaaactggcaagctgaaaattggtacctacacagggcccctacagcatggtatcgtctactcaggaggttcttctgatacgatctgtgacctgttgggagccaagggaaaagacattttgtatattggagatcacatttttggggacattttaaaatcaaagaaacggcaagggtggcgaacttttttggtgattcctgaactcgcacaggagctacatgtctggactgacaagagttcacttttcgaagaacttcagagcttggatattttcttggctgaactctacaagcatcttgacagcagtagcaatgagcgtccagacatcagttccatccagagacgtattaagaaagtaactcatgacatggacatgtgctatgggatgatgggaagcctgtttcgcagtggctcccggcagaccctttttgccagtcaagtgatgcgttatgctgacctctatgcagcatctttcatcaacctgctgtattaccctttcacgctacctcttcagggctgcccatgtcttgatgcctcatgaatcaacggtggagcacacacacgtagatatcaatgagatggagtctcctcttgccacccggaaccgcacatcagtggatttcaaagacactgactacaagcggcaccagctgacacggtcaattagtgagattaaacctcccaacctcttcccactggccccccaggaaattacacactgccatgatgaagatgatgatgaagaggaggaggaggaggaagaataaggaggaaaaccaaaaccccaagcacccattaaacaagtcctggcaggactcacaggaacaaacgaggtccctgttagggttctactcgggggagggagggggctccatgaaaggtacgtctgaaaagtttctgaagattttattatcatagatacttgttttggttttgtgtatctgtactctctgcagatggtccaaaattgtaatggagtctgtattagaagaaaataagggtaaaatcaggctgaactgcatgtatatggctccactgtggcttgtgacacttttaaaatcatccgtatgtcagtgtatctggatacacgaggaaaaggaaagagtctcagagtggaacaaagagtgggaagaggtgatctgtaatgttacaaattgtgctattactccaaggtccaacttttccagtgcattacatggtattgtatatcagtggagaaatgtattatttccatgatcaaatgtagtctctgttaaggtcaagttttcttttataagcctttaattcatcctcagtgactctggaaaggctgcttctctatcactggctttgcacagaagtatgctctacttgcgttgctttagggcaggattctattttgagggaaaagacagtaacccttattacccttttggtttgttttaatagcaccaaatgccttatttggttatcccaaaaaacaaacctccctttccttatcctgtggaataaaatcctattagaaaagggaattttaggcttgcccaaggtggggaacaaaagggaaacccagc

SEQ ID NO: 433261 - DNA, 2302 bp, Homo Sapiens
  misc_feature (15)..(15): n is a, c, g, or t
gaataaaagaacccnctactcagcattacgtgttgaaaccacaatcacgatacaagtccggaattctttggatgtcaccacagtgggaggcacatccttccaggaacctttcctcatcacaaatgaaattgttgactatatcagtggtggtggcttcagcaatgtgttcccacggccttcataccaggaggaagctgtaacgaagttcctgagctctagcccccacctgccaccatccagttacttcaatgccagtggccgtgcctacccagatgtggctgcactttctgatggctactgggtggtcagcaacagagtgcccattccatgggtgtccggaacctcggcctctactccagtgtttggggggatcctatccttgatcaatgagcacaggatccttagtggccgcccccctcttggctttctcaacccaaggctctaccagcagcatggggcaggactctttgatgtaacccgtggctgccatgagtcctgtctggatgaagaggtagagggccagggtttctgctctggtcctggctgggatcctgtaacaggctggggaacacccaacttcccagctttgctgaagactctactcaacccctgaccctttcctatcaggagagatggcttgtcccctgccctgaagctggcagttcagtcccttattctgccctgttggaagccctgctgaaccctcaactattgactgctgcagacagcttatctccctaaccctgaaatgctgtgagcttgacttgactcccaaccctaccatgctccatcatactcaggtctccctactcctgccttagattcctcaataagatgctgtaactagcattttttgaatgcctctccctccgcatctcatctttctcttttcaatcaggcttttccaaagggttgtatacagactctgtgcactatttcacttgatattcattccccaattcactgcaaggagacctctactgtcaccgtttactctttcctaccctgacatccagaaacaatggcctccagtgcatacttctcaatctttgctttatggcctttccatcatagttgcccactccctctccttacttagcttccaggtcttaacttctctgactactcttgtcttcctctctcatcaatttctgcttcttcatggaatgctgaccttcattgctccatttgtagatttttgctcttctcagtttactcattgtcccctggaacaaatcactgacatctacaaccattaccatctcactaaataagactttctatccaataatgattgatacctcaaatgtaagatgcgtgatactcaacatttcatcgtccaccttcccaaccccaaacaattccatctcgtttcttcttggtaaatgatgctatgctttttccaaccaagccagaaacctgtgtcatcttttcaccccaccttcaatcaacaagtcctcaatcaacaagtcctactgactgcacatcttaaatatatctttatcagtccacaagtccttccaattatatttcccaagtatatctagaacttatccacttatatccccactgctactaccttagtttagggctatattctcttgaaaaaaagtgtccttacttcctgccaatccccaagtcatcttccagagtaaaatgcaaatcccatcaggccacttggatgaaaacccttcaaggattactggatagaattcaggctttcccctccagcccccaatcatagctcacaaaccttccttgctatttgttcttaagtaaaaaatcatttttcctcctccctccccaaaccccaaggaactctcactcttgctcaagctgttccgtccccttaccacccctgatacaactgccaggttaatttccagaattcttgcaagactcagttcagaagtcaccttctttcgtgaatgttttgattccctgaggctactttattttggtatggctgaaaaatcctagattttctaaacaaaacctgtttgaatcttggttctgatatggactaggagagagactgggtcaagtaagcttatctccctgaggctgtttcctcgtctgttaagtgtgaatatcaatacctgcctttcataatcaccagggaataaagtggaataatgttgataacagtgcttggcacctggaagtaggtggcagatgttaacgcccttcctttccaagaccgttggtgcctagaggactagaatcgtgtcctatttaactttgtgttcccaggtcctagctcaggagttggcaaataagaattaaatgtctgctacaccga

SEQ ID NO: 433262 - DNA, 1111 bp, Homo Sapiens
  misc_feature (490)..(602): n is a, c, g, or t
acgcctggcgcaggttgtttgcggcggtgggctcccctcgctggggtctagaataatgtgtcttccacagtaattgccatagtatgctcctcgctgtagcgcccagaagctctttttccaagggtccgcgggtcaaggtggccgttattcgctcccgggcactttaggtgttggtgacacacccacgcttaagacagacaggcattgttggctagcaattctttgtcacataatgtgtaacccccttaagggagggctttgtgcaaaattgctctctcgtttaggggggatgagttgttggtttcctcaaattatatgggggcagcacgcccgccggagtatatggtgtctcttccgctacaagagtgcccgacggcttgctcgtttcttccgcacgtctgcggagccgtgtggtataatccggctctgtctaagtgccaatgttctttataagactccgcgccctccccttcttattgcgtcctcctcnnnnnnnnnnnnnnnnnnnnnnnnnnnnnnnnnnnnnnnnnnnnnnnnnnnnnnnnnnnnnnnnnnnnnnnnnnnnnnnnnnnnnnnnnnnnnnnnnnnnnnnnnnnnnnnnncggtgtagcagacatttaattcttatttgccaactcctgagctaggacctgggaacacaaagttaaataggacacgattctagtcctctaggcaccaacggtcttggaaaggaaggcagacaagtaaactggccatttcaatactatgtggtcgttacaatgctagaggtaggcacagggggcgcaatgcaagggaggaagggcgttaacatctgccacctacttccaggtgccaagcactgttatcaacattattccactttattccctggtgattatgaaaggcaggtattgatattcacacttaacagacgaggaaacagcctcagggagataagcttacttgacccagtctctctcctagtccatatcagaaccaagattcaaacaggttttgtttagaaaatctaggatttttcagccataccaaaataaagtagcctcagggaatcaaaacattcacgaaagaaggtgacttctgaactgagtcttgcaagaattctggaaat

SEQ ID NO: 433263 - DNA, 433 bp, Homo Sapiens
gcccttcctgcagtggctcatgctgctcagtaatgagtcagccctgccacatgtgcatactgtgagctatggagatgatgaggactccctcagcagcgcctacatccagcgggtcaacactgagctcatgaaggctgccgctcggggtctcaccctgctcttcgcctcaggtgacagtggggccgggtgttggtctgtctctggaagacaccagttccgccctaccttccctgcctccagcccctatgtcaccacagtgggaggcacatccttgccaggaacctttcctcatcacaaatgaaattgttgactatatcagtggtggtggcttcagcaatgtgttcccacggccttcataccaggaggaagctgtaacgaagttcctgagctctagcccccacctgccaccatcctgttacgtctctgccagtgt

SEQ ID NO: 433264 - DNA, 1591 bp, Homo Sapiens
taggcggttcccacaaaaaattccccccttgggggcctcccctgaggaaggaatttgtggctgcccgcttcccaccaggggcagaggggcaccagaaggggcccagcactccaaagggcttctagggtgggtctttcaaggacatctgcaaagccctggtggggaggggcggcggggctgtcccacggaggggcctgggccagaggctctttggaactcttgcacttctgagtgggggactgtccatgctgcccacaacctctagaccatgcagcctgctcatgggtccctggcagagaatgcccactccccagcagactcagggcaggcccccaactgcaggcttccaggaaggcccagggtgtccacctcacgccaggtggtctcagaggacccctgtgcaaccacattaaggaaagctgcagcccccacccacccgcctgccagttcaacaagcaccggctgcacacgcaggctcccaggcaccatcacccccctcccccgtcgcccctccctcatggggagccccttccccctggaaagacagcaggtactgtagcctcgcctgctggccaggggcgccggctcagaggacctgccctgacctgcacgtgctgaccagacagcccagcgtaaggacccgtgatcccacgccaccgccctgggtttaccacggtcaccaccacctctctcacagggcccccgggggacccagccgcgcccggcctggtgtctgcaccgagggaccgcgtctcacgcccggcggctcctgcaggggaagccgtggtcagcgactcaccacgaggacagggcagggcggctgagtgcggaagagaagcatgaagctgggggccggggtggggggaaaggaggaacaaaagttgcatctagacagaggtgaacgaaacaaaaccaaaacccgaacgtgttccgtcgcaggatgggcgcccgccgtcccgggcccttagcccgacatctcttctcgctgctccttgttcctgcgcacctcggccgcgtgcagctccttctcgcgcagccgctcgcgcagtgcggccaggtgtgcctcgcggatctccttgctgagctccatcttgtagttgagcttctcctcccctggcggctgaagttgttattctcctccagcgccttgtgcagcacctcgcgctcgtgctcgcgccgtccgccagctgcttcagcacctgcgcctcctgcgtcttcctccgctcctcggctgcctccagccgcttttgcagctcctccagggaggtgtccttcttcttgggtggggaggagagcatagggctctctggggacaggtcagaaggggacttgaggatgacctcgaagctctggcctgaggcccgcttgtccagctgcttcacctccatgtccccgtactggtagacggtattggggtgcggctgtgtgtagaagcaggagcagatgagcgacagcaccgacagctccttcatcttctccttgtaggcggaaatggtgctggccatggtgctggcggcggttgggctgcggaggctggagaggcgcaagtggcggccggagctgcagacggctggtgctgcagatcccggga

SEQ ID NO: 433265 - DNA, 1450 bp, Homo Sapiens
ttcatttgattgaatttttaagttcactttactacgtggatgagatgggtgcatattacagtaggctttcgctatgagcgctgccaccatgaggaatatcccagccctcagttctgcttccctttctgagtcccacaaaagccagatgtggacagccttgggttcccatcccagctggctgctccttctggggctgtcttggtggggagagggagatggggcagtgggtccctgctgacccctgagccctgcaggggtcaggatcctcccgtggtccctgggtgtggctctggaagacactggcagtgcccggccaaggcctcccgcaggatggaagttgagggccctggctctgggtcctaagagaactcagccgcccccttcacactttacagcaaggggccaggcagcagctttgggatggggcttccgtggagaagtgggggatgctgcagtggtacaaagacagcctcccccaccgccatcctccagctgaccgtcctccaaggccagcactgggcgtccaagggaaagaaggaactcagcccagagggtgtgggcaggagaggcctggagtcaggcctccacccacagccccctctgggtgccaagtgggaagggtgttggggctggcttgggaaccttacccgctgcccttccaacacctggatctgtgggcagcggtcccacaaaatcccccttggggctccctgaggaggacttgtggctgccgcttccaccagggcagagggcacaggaggggccagcactccaaagggctctagggtgggtctttcaaggacatctgcaaagccctggtggggaggggcctgggccagaggctctttggaactcttgcacttctgagtgggggactgtccatgctgcccacaacctctagaccatgcagcctgctcatgggtccctggcagagaatgcccactccccagcagactcagggcaggcccccaactgcaggcttccaggaaggcccagggtgtccacctcacgccaggtggtctcagaggacccctgtgcaaccacattaaggaaagctgcagcccccacccacccgcctgccagttcaacaagcaccggctgcacacgcaggctcccaggcaccatcacccccctcccccgtcgcccctcccttatggggagcccctttcccctggaaagacagcaggtactgtagcctcgcctgctggccaggggcgccggctcagaggacctgccctgacctgcacgtgctgaccagacagcccagcgtaaggacccgtgatcccacgccaccgccctgggtttaccacggtcaccaccacctctctcacagggcccccgggggacccagccgcgcccggcctggtgtctgcaccgagggaccgcgtctcacgcccgggcgctcctgcaggggaagccgtggtcagcgactcaccacgaggacagggca

SEQ ID NO: 433266 - DNA, 1000 bp, Homo Sapiens
  misc_feature (970)..(970): n is a, c, g, or t
  misc_feature (986)..(986): n is a, c, g, or t
cagccgtctgcagctccggccgccacttgcgcctctccagcctccgcagcccaaccgccgccagcaccatggccagcaccatttccgcctacaaggagaagatgaaggagctgtcggtgctgtcgctcatctgctcctgcttctacacacagccgcaccccaataccgtctaccagtacggggacatggaggtgaagcagctggacaagcgggcctcaggccagagcttcgaggtcatcctcaagtccccttctgacctgtccccagagagccctatgctctcctccccacccaagaagaaggacacctccctggaggagctgcaaaagcggctggaggcagccgaggagcggaggaagacgcaggaggcgcaggtgctgaagcagctggcggagcggcgcgagcacgagcgcgaggtgctgcacaaggcgctggaggagaataacaacttcagccgccaggcggaaggagaagctcaactacaagatggagctcagcaaggagatccgcgaggcacacctggccgcactgcgcgagcggctgcgcgagaaggagctgcacgcggccgaggtgcgcaggaacaaggagcagcgagaagagatgtcgggctaagggcccgggacggcgggcgcccatcctgcgacggaacacgttcgggttttggttttgtttcgttcacctctgtctagatgcaacttttgttcctcctcccccacccccgcccccagcttcatgcttctcttccgcactcagccgccctgccctgtcctcgtggtgagtcgctgaccacggcttcccctgcaggagccgccgggcgtgagacgcggtccctcggtgcagacaccaggccgggcgcggctgggtccccgggggccctgtgagagaggtggtggtgaccgtggtaaaccagggcggtggcgtgggatacgggtcttacgctgggctgtctggtcacacgtgcaggtcaggnaggtctctgagccgcnccctggcaacagcg

SEQ ID NO: 433267 - DNA, 1677 bp, Homo Sapiens
  misc_feature (473)..(473): n is a, c, g, or t
cccgggattgcagcaccagccgtctgcagctccggccgccacttgcgcctctccagcctccgcaggcccaaccgccgccagcaccatggccagcaccatttccgcctacaaggagaagatgaaggagctgtcggtgctgtcgctcatctgctcctgcttctacacacagccgcaccccaataccgtctaccagtacggggacatggaggtgaagcagctggacaagcgggcctcaggccagagcttcgaggtcatcctcaagtccccttctgacctgtccccagagagccctatgctctcctccccacccaagaagaaggacacctccctggaggagctgcaaaagcggctggaggcagccgaggagcggaggaaggcaaggagtcctccattccccaccccccaggagtttcaacggtggcggcccacggggacagggcctgcaagaagcagggtgctcccggacaggcttnacgcaggaggcgcaggtgctgaagcagctggcggagggcgcgagcacgagcgcgaggtgctgcacaaggcgctggaggagaataacaacttcagccgccagcgcgagagagaagctcaactacaagatggagctcagcaaggagatccgcgaggcacacctggccgcactgcgcgagcggctgcgcgagaaggagctgcacgcggccgaggtgcgcaggaacaaggagcagcgagaagagatgtcgggctaagggcccgggacgggcggcgcccatcctgcgacggaacacgttcgggttttggttttgtttcgttcacctctgtctagatgcaacttttgttcctcctcccccacccccgcccccagcttcatgcttctcttccgcactcagccgccctgccctgtcctcgtggtgagtcgctgaccacggcttcccctgcaggagccgccgggcgtgagacgcggtccctcggtgcagacaccaggccgggcgcggctgggtcccccgggggccctgtgagagaggtggtggtgaccgtggtaaacccagggcggtggcgtgggatcacgggtccttacgctgggctgtctggtcagcacgtgcaggtcagggcaggtcctctgagccggcgcccctggccagcaggcgaggctacagtacctgctgtctttccagggggaaggggctccccatgagggaggggcgacgggggaggggggtgatggtgcctgggagcctgcgtgtgcagccggtgcttgttgaactggcaggcgggtgggtgggggctgcagctttcctttatgtggttgcaccggggtcctctgagaccacctggcgtgaggtggacaccctgggcctttctggaagcctgcagtttggggcctgccctgagtctgctggggagtgggcattctcttggcaggacccatgagcaggctgcttggtctagaggttgggggcagcatggacagtcccccactagaagtgcataagttcaaagagcctgtggcccagggccctccccaccaggtcttggcagagtacttggaagacccccctagagcctttgagggctggcccgtccgtgccctttgcctgggggagcgtaacccagatccccttagggccccaggaggtttgaggaaccgtggccaatccagtgtggaaggcagaggtagtgtccaaccgcccaccctttccc

SEQ ID NO: 433268 - DNA, 1290 bp, Homo Sapiens
  misc_feature (281)..(281): n is a, c, g, or t
agggtgcggggcttgccgggcctaggcgaggctggaggaagcggaatttatggagccagagtatggagtggtgcgggactaactccgcgtgttcgcgggcaacggccccccgtccaagagaggccgcccctcccccctgaaaaaaaacccccaagtacctaagaccccaccctttgggccaaggggccgcgggttcaagaaaagccctcccttaacctgcccgggggtacccagaccagccccagggtaaaggaccccgggatccccaagcccaccggccntgggtttaaccacggtcaccacccacctctttccacagggccccccgggggacccagccgcgcccggcctggtgtctgcaccgagggaccgggtctcacgcccggcggctcctgcaggggaagccgtggtcagcgactcaccacgaggacagggcagggcggctgagtgcggaagagaagcatgaagctgggggctggggtgggggaggaggaacaaaagttgcatctagacagaggtgaacgaaacaaaaccaaaacccgaacgtgttccgtcgcaggatgggcgccgcccgtcccgggcccttagcccgacatctcttctcgctgctccttgttcctgcgcacctcggccgcgtgcagctccttctcgcgcagccgctcgcgcagtgcggccaggtgtgcctcgcggatctccttgctgagctccatcttgtagttgagcttctcctccgcctggcggctgaagttgttattctcctccagcgccttgtgcagcacctcgcgctcgtgctcgcgccgctccgccagctgcttcagcacctgcgcctcctgcgtcttcctccgctcctcggctgcctccagccgcttttgcagctcctccagggaggtgtccttcttcttgggtggggaggagagcatagggctctctggggacaggtcagaaggggacttgaggatgacctcgaagctctggcctgaggcccgcttgtccagctgcttcacctccatgtccccgtactggtagacggtattggggtgcggctgtgtgtagaagcaggagcagatgagcgacagcaccgacagctccttcatcttctccttgtaggcggaaatggtgctggccatggtgctggcggcggttgggcctgcggaggctggagaggcgcaagtggcggccggagctgcagacggctggtgctgcagtgccggggaggggaggggagaggagtggagggagcgagcgagcgcgtgggtcgacgatatcccaaacttccgggccggtacacgt

SEQ ID NO: 433269 - DNA, 2652 bp, Homo Sapiens
  misc_feature (399)..(493): n is a, c, g, or t
  misc_feature (2226)..(2226): n is a, c, g, or t
  misc_feature (2251)..(2252): n is a, c, g, or t
gctgactcccgcgctgcttgtttgttttttgtgtcgccccccccgtcgcatcgcgttttcctctgtcttgtggggtggtggctgtccccccctcgtggggcgcctcgccgtccccggcgggtgggggttggcgcccgcctcccagcaggggccgccagggcgtgccgccggtgtttctcccccacctcaagtttttctttttctaagatcagccccaccacccctgtgctcgtcttgttctattatagagtcgcgccgccgccctctgtatgggcggccccctctcttttgttagcgcagactagcgcgcggggcgcgctctcgcgcgctgattggtgtggcccgccgcgcgcggggggaacatataagaggccgcgccgcgccgccctcctcttctcnnnnnnnnnnnnnnnnnnnnnnnnnnnnnnnnnnnnnnnnnnnnnnnnnnnnnnnnnnnnnnnnnnnnnnnnnnnnnnnnnnnnnnnnnnnnnnnccttaaacacacaggtgtttatttaattgttcatttgattgaatttttaagttcactttactacgtggatgagatgggtgcatattacagtaggctttcgctatgagcgctgccaccatgaggaatatcccagccctcagttctgcttccctttctgagtcccacaaaagccagatgtggacagccttgggttcccatcccagctggctgctccttctggggctgtcttggtggggagagggagatggggcagtgggtccctgctgacccctgagccctgcaggggtcaggatcctcccgtggtccctgggtgtggctctggaagacactggcagtgcccggccaaggcctcccgcaggatggaagttgagggccctggctctgggtcctaagagaactcagccgcccccttcacactttacagcaaggggccaggcagcagctttgggatggggcttccgtggagaagtgggggatgctgcagtggtacaaagacagcctcccccaccgccatcctccagctgaccgtcctccaaggccagcactgggcgtccaagggaaagaaggaactcagcccagagggtgtgggcaggagaggcctggagtcaggcctccacccacagccccctctgggtgccaagtgggaagggtgttggggctggcttgggaaccttacccgctgcccttccaacacctggatctgtgggcagcggtcccacaaaatcccccttggggctccctgaggaggacttgtggctgccgcttccaccagggcagagggcacaggaggggccagcactccaaagggctctagggtgggtctttcaaggacatctgcaaagccctggtggggaggggcggcggggctgtcccacggaggggcctgggccagaggctctttggaactcttgcacttctgagtgggggactgtccatgctgcccacaacctctagaccatgcagcctgctcatgggtccctggcagagaatgcccactccccagcagactcagggcaggcccccaactgcaggcttccaggaaggcccagggtgtccacctcacgccaggtggtctcagaggacccctgtgcaaccacattaaggaaagctgcagcccccacccacccgcctgccagttcaacaagcaccggctgcacacgcaggctcccaggcaccatcacccccctcccccgtcgcccctccctcatggggagccccttccccctggaaagacagcaggtactgtagcctcgcctgctggccaggggcgccggctcagaggacctgccctgacctgcacgtgctgaccagacagcccagcgtaaggacccgtgatcccacgccaccgccctgggtttaccacggtcaccgccacctctctcacagggcccccgggggaccccagccgcgcccggcctggtgtctgcaccgagggaccgcgtctcacgcccggcggctcctgcaggggaagccgtggtcagcgactcaccacgaggacagggcagggcggctgagtgcggaagagaagcatgaagctgggggctggggtgggggaggaggaacaaaagttgcatctagacagaggtgaacgaaacaaaaccaaaacccgaacgtgttctgtcgcaggatggcgccgcccgtcccgggcccttagcccgacatctcttctcgctgctccttgttcctgcgcacctcggccgcgtgcagctcctgcaggacagggggcgggaggncctgagggcgggggtggcttggggnnactccgggaacccccaggcgcgcaggccgtggcgccctggcacccgcccggcctcatccgggctggccttcaggcaggaccctgactgagttgagggggcgggagcaccggggaggcgcagagcaaggccagggaccaaggacgggtttcctgggagctggctgggccccgcttctagctcgtaccggagccgagcttccttcagggcactttcaatataatgaatttagccatctattactgcggctagttactgtcccgccaggaccagactctggacctgcctcgtgcgctgctggggacgcccagtaaacacgggaggagcccccgacccccaccaccagctcagcgcctcggagtccccggccccgctctgcgcccctccgagtccgccctagcc

SEQ ID NO: 433270 - DNA, 1031 bp, Homo Sapiens
  misc_feature (12)..(12): n is a, c, g, or t
  misc_feature (22)..(22): n is a, c, g, or t
  misc_feature (28)..(29): n is a, c, g, or t
  misc_feature (40)..(40): n is a, c, g, or t
  misc_feature (50)..(50): n is a, c, g, or t
  misc_feature (60)..(60): n is a, c, g, or t
  misc_feature (70)..(70): n is a, c, g, or t
  misc_feature (86)..(86): n is a, c, g, or t
  misc_feature (90)..(90): n is a, c, g, or t
  misc_feature (104)..(104): n is a, c, g, or t
  misc_feature (110)..(111): n is a, c, g, or t
  misc_feature (143)..(143): n is a, c, g, or t
  misc_feature (220)..(220): n is a, c, g, or t
  misc_feature (441)..(441): n is a, c, g, or t
  misc_feature (725)..(725): n is a, c, g, or t
  misc_feature (791)..(791): n is a, c, g, or t
  misc_feature (801)..(801): n is a, c, g, or t
  misc_feature (808)..(810): n is a, c, g, or t
  misc_feature (812)..(814): n is a, c, g, or t
  misc_feature (817)..(818): n is a, c, g, or t
  misc_feature (826)..(826): n is a, c, g, or t
  misc_feature (887)..(887): n is a, c, g, or t
  misc_feature (896)..(896): n is a, c, g, or t
  misc_feature (905)..(905): n is a, c, g, or t
  misc_feature (911)..(911): n is a, c, g, or t
  misc_feature (915)..(915): n is a, c, g, or t
  misc_feature (924)..(924): n is a, c, g, or t
  misc_feature (931)..(931): n is a, c, g, or t
  misc_feature (966)..(966): n is a, c, g, or t
  misc_feature (1018)..(1018): n is a, c, g, or t
ttccttattttntgcacagggnctttanncacctgcgtgngtgacccctnggccttcctngaacctgcantgggggctgccctgantctntggggagtggcatntctgcnnggacccatgagcagctgcatggtctagagttntgggcagcatgacagtcccccactcagaagtgcaagagttccaaagagcttctggcccaggcccctccccaccaggntttgcagatgtccttgaaagacccaccctagagccctttggagtgctggcccctcctgtgccctctgccctggtggaagcggcagccacaagtcctcctcagggagccccaagggggattttgtgggaccgctgcccacagatccaggtgttggaagggcagcgggtaaggttcccaagccagccccaacacccttcccacttggcacccagaggggctgntgggtggaggcctgactccaggcctctcctgcccacaccctctgggctgagttccttctttcccttggacgcccagtgctggccttggaggacggtcagctggaggatggcggtgggggaggctgtctttgtaccactgcagcatcccccacttctccacggaagccccatcccaaagctgctgcctgggccccttgctgtaaagtgttaagggggcggctgagttctcttaggacccagagccagggccctcaacttccatccttgcgggaggccttggcggnggcattgccagtgtctttccagagccacacccagggaccacgggaggatcctgacccctgcagggntcaggggtcngcagggnnngnnngcnncgtctccntctccccaccaagacagccccagaaggagcagccagctgggatgggaacccaaggctgtcnacatctggnttttgtggnactcanaaanggaagcagnactgagngctgggatatccctcatggtggccgcgctcatagngaaagcctactgtaatatgcacccatttcatccacgtagtaaagtgatttanaattcaatcaaat

SEQ ID NO: 433271 - DNA, 1066 bp, Homo Sapiens
  misc_feature (267)..(275): n is a, c, g, or t
  misc_feature (634)..(634): n is a, c, g, or t
  misc_feature (652)..(652): n is a, c, g, or t
gtggttctgtgtggtgcacatcttgtgtgttgttcgggtgggtgtgtagtcgacgttgtggatgccgtaggtgggcatgttggtatttcggtggcgtatgtagcatgagatatgagacgttttctttggtaagttggccttaaggaggatgtggcactgagaggtaggggggtgctttaggagagggactgaagggtgcgatatacaaaagtggaggcatggataagtatgggtttcagggggttcttgagtaggaaagggtcggannnnnnnnncagttggtgatactagttggttggggtcatcgttggctccccttgatagattttggattcagcgagctttggttataacgtttcgtagccctaagggtgccttggcaggatgggggcgctccgtcccgggccgttagcccgacatcttttctcgctgctccttgttcctgcgcacctcggccgcgtgcagctcctgcaggacagggggcgggagggccttctcgcgcagccgctcgcgcagtgcggccaggtgtgcctcgcggatctccttgctgagctccatcttgtagttgagcttctcctccgcctggcggctgaagttgtttttctcctccagcgccttgtgcagcacctcgcgncttgtgctcgcgccgctnccgccagctgcttcagcacctgcgcctcctgcgtcttcctccgctcctcggctgcctccagccgcttttgcagctcctccagggaggtgtccttcttcttgggtggggaggagagcatagggctctctggggacaggtcagaaggggacttgaggatgacctcgaagctctggcctgaggcccgcttgtccagctgcttcacctccatgtccccgtactggtagacggtattggggtgcggctgtgtgtagaagcaggagcagatgagcgacagcaccgacagctccttcatcttctccttgtaggcggaaatggtgctggccatggtgctggcggcggttgggcctgcggaggctggagaggcgcaagtggcggccggagctgcagacggctgatcccgggaattccggaccc

SEQ ID NO: 433272 - DNA, 711 bp, Homo Sapiens
agggccagcacagctttggatggggctccctggagaagtgggggatctgcagtggtacaaagacagccgtcccccaccgccatcctccagctgaccgtcctccaaggccagcactgggcgtccaagggaaagaaggaactcagcccagagggtgtgggcaggagaggcctggagtcaggcctccacccacagccccctctgggtgccaagtgggaagggtgttggggctggcttgggaaccttacccgctgcccttccaacacctggatctgtgggcagagggcacaggaggggccagcactccaaagggctctagggtgggtctttcaaggacatctgcaaagccctggtggggagggtcggcggggctgtcccacggaggggcctgggccagaggctctttggaactcttgcacttctgagtgggggactgtccatgctgcccacaacctctagaccatgcagcctgctcatgggtccctggcagagaatgcccactccccagcagactcagggcaggcccccaactgcaggcttccaggaaggcccagggtgtccacctcacgccaggtggtctcagaggacccctgtgcaaccacattaaggaaagctgcagcccccacccacccgcctgccagttcaacaagcaccggctgcacacgcaggcctcgtgccgaattcaaccaccaggcctcgcacctagccgaagtt

SEQ ID NO: 433273 - DNA, 823 bp, Homo Sapiens
ggtggtaaagtaaattttacggaaaaagttaagatagctttgggaacagagacctttccctaaattgattccatagcagatttgggggaattaacaaagaatttcagtctcatcaatcctttgaatccatcttcaaaacttctgcttttaataactttagaaaatttactaatctatagaactaattgagtaggatataggaaggatacaaggatataatgtcctttttataaaagtttagtatagcttctttacatgtatccacttgttccagaaaatgtgcattggttctgaatgtgaaaatatttaaagagagaaaggaacactcaagtaagtgtgggcttcagtgggaattatcacaaaacattggcaagtatttttatttaaattattttcaaatttgacttctacagccaagtggaattggtaggctgtagctgttacactgaaatttctagtctttgtaagtgcctactgaaagtcatttaaaatggaaaaatatttcaatggagcttttccttttttcatatttatggacatgaatattttattggagatcatttaactcctagaatttgagattatatttccatacaacatttttataaagttatggttgaacttactacctgttatgtgcaggttattatgtaacttattcccggattgcttcatatattggctttatcttcccatctaacttcttaaagttaaaatccggacacacatgttgattatctagaccagtcattctggaaattgtaacactcccacataaaccccaggagactttttcagaatgcaatgtttctaaatgtactgt

SEQ ID NO: 433274 - DNA, 1810 bp, Homo Sapiens
ccggcacgtatcttttaaggaatgacaccagttcctggcttctgaccaaagaaaaaatgtcacaggagactttgaagaggcagacaggagggtggtggcagcaacactgcagctgcttctggatgctgctggggtgctctccggagcgggtgtgaacagcgcacttcaacatgagcaggcgcctggctccggtgtgtcctcacttcagtggtgcacctggatggtggaagccagcctttggggcaggaaaccagctcagagaggctacccagctcagctgctggcaggagccaggtatttacagccataatgtgtgtaaagaaaaaacacgttctgcaagaaactctcctacccgctcgggagactggggctccttgcttgggatgagcttcactcaacgtggagatggtggtggactggtccctgaaaagcgggccttgcagggccaagtgaggtcctcaggtcctaacccagtggccctctgaaagggggtgtgcaggcgaggggagcaggaggcttctctctagtccctttggaggctttggctgagagaagagtgagcagggagctgggaatggtccaggcagggaagggagctgaagtgattcggggctaatgcctcagatcgatgtatttctctccctggtctcccggagccctcttgtcaccgctgctgccctgcaggaggcccatctcttctgggagcttatctgacttaacttcaactacaagttcgctcttacgagacgggggtagcgtgatctcctgcttccctgagcgcctgcacggcagcttgcccttcttatagaggaaatagaggacagcgcccagcaccgccaggaccaggatgcacacaatcacagccacgatgaccacgccccggctctccggctccggcagctttctctctgtggaggtgctgttggctctggtatgaggactggcagtggaagtgctgaggccagtggttgtgttggagtctggtgtgagggtggttaaattgaccagctccaggaagaggatgctggtgtttttgcccaggtcgttggaggccgtgcattcaacacctgtctccaacagctccggggtcacgaggacattcagggtgctcaggactcgctgtggatcttggtcttgttcacttgccgtgccgttgacgttccaggagatggtgggccgggggtgccctgacgcttcacaagacagattcaacaccatattctctttcacccacaccttcctctccttgaatgccatccaaggggggccaaaaatggccacgttgaccagctgtgtgcggttcaggccgggtatgctgggcacagacgccacgcagcgatagccgcctcctgcctcccgtttcaggtcatgcaactgaagcacaggccccctttccagcacctggcctgtctcttctctcagccactggaactcgaggtcctggctactctctgcctcacaggtcagggtgaggctgctgccttcctgtctctcaggggctgcgggactcactcggacgtcagacacatagttcaccagtagttcctgtggttcactcagcagcgatatcatggtgtccaagtccaggccctgacattcatagcgcccactgtgttccttccgggcaggctccagcaccaggaccccgttgtcgttggttgtctcttcctctgcctccctggtgctggggttctgcttgctgatgctgaagtgtggtggagggttgccatcagccaaacacctgatttccacgcggtccccttccttcagcattcccacgggctccacttccagccacactttttctgtc

SEQ ID NO: 433275 - DNA, 580 bp, Homo Sapiens
cttatatacatttctcctctttcaatttctttgtagaaattcagcacattgacggtgcagctcatgcggtttcctttgttctcgtcgtgcatgatggttctataatccaaaagcctttccattaagcgcacaacgagttttacaaaagtttctcctgttttggcgaggtatttgtgcttcctgcagtgttccagaaggattttatcaaataacactttgtactgttcgtctcctctgcctccttcgacttcatgatccagcttggtgatgatctcattttcaaacatttggaagcttcgggttgaatggaattcacactgcatcatatcaaagaagatggggatggtggctttgcgcagctccgtctcgggaattaatgtcatttctaatattgggcccaccatttctggaatgaactttatcttgtgttgaccaaggttgtaccacatgtctctgatttcaaagccaatctgtctcctcatatctccgtacttgttaaggattttggctctcttggcacttgaaaaattctccagttgcagggactcttgagtaaggaaagcacgacatcgtgatccgt

SEQ ID NO: 433276 - DNA, 379 bp, Homo Sapiens
aatctctggcatgtggcttggctttgttgagactccaaattccattatcttcatgacattcggcctcatccatagggtcctgaagctgcagtccacagctcagaaaggagaggtgagacctccctccaacctggtgccacaggtctctcccaagccacatccagcctggatgacctgggaccccagaaactgccgtttgggaggcagcaacagcaacgtgcccaggcaggcagttattcccacagagtgagccagaattgtagcagggcacttgaatgcagagctgatgatttgaaaccaacgttcacccaacttgtcagaaatggcacttacatgggttcgatcttgctgggagacaagtgggacaattgggggtcac

SEQ ID NO: 433277 - DNA, 570 bp, Homo Sapiens
  misc_feature (11)..(11): n is a, c, g, or t
  misc_feature (56)..(56): n is a, c, g, or t
  misc_feature (87)..(87): n is a, c, g, or t
  misc_feature (506)..(506): n is a, c, g, or t
aaaatttgggnaaaaccgtctctgcccaatgacccccaaatgtcccattgtctccnagcaaaatcgaaaccatgtaaatgccaattnctgaacaaattgggtgaaagttggtttcaaaatcaatcaactctgcattcaaaatgccctgcttaaaaattctggcctcaactctgtgggaaataactgcctgcctgggcacgttgctgttgctgcctcccaaacggcagtttctggggtcccaggtcatccaggctggatgtggcttgggagagacctgtggcaccaggttggagggaggtctcacctctcctttctgagctgtggactgcagcttcaggaccctatggatgaggccgaatgtcatgaagataatggaatttggagtctcaacaaagccaagccacatgccagagattcaccacctggggcccaggatcagaagtgtgcccttaggaggccaaacatccacctgtctaccaactagacatttggtctcagacagcaanaaaggctgcgtttatgtcattagggggaacaccacggtcttcggcatgagagaggtgtaattct

SEQ ID NO: 433278 - DNA, 791 bp, Homo Sapiens
aagttttaattaaatttttaggtgacctttaaaaaactgtctagaattgcctgacatttaaaatccacttaaagcagattagcaacttcaagcatcacaattattcagcataaagagcctttgttgaaacatctttctcatttatttagaagaaaacatctatgacagaacccaagcaaaacttttgtatttttgtaaaaaatctcaattcctgaaactactataaacaatctactgaaactgtattcagcaagggacagatttacctcaaggccatgttcacctgcaacctgctgataagtctgtatcactttataactcctgagaaagtcattcacataagctgtggcctccccacctcttttagattacttcagtggctatactgcaatcattgacttgtgtctgctccacttgactataagcaaattgaaggcagggtttgtgccttcataatctctgaatgatctgaagatggaaataactgctttgtgcttcagggagctcatatacctcagctccgtgggctacgaagctcgttcttcaaatgaggtggagaaatgtaagcgcgatgaatgaggcccaagtcgctggtggcgctgaacccccaaaagatacacaccgcgacagatgcaacgacccctcacctctactcccgttcccagccgcatcctctgaaacctgatacgcctgcctgcctaccaggacgctgctgtcactggctctgctcggtggccagagacagtactcactccatgcggccacccctccaacgtcccaccttcctaccc

SEQ ID NO: 433279 - DNA, 1008 bp, Homo Sapiens
ccttgtatcccgcctgcggcttggtccccgtccttggtccgtttcagctatctgtcgacttgtgtacgcctgtgtctctcatacccgctctttctgtgtgtgcccagcccgtgtccccagtgactggcgagcttatccctgtgttcacttgatccgggatcccgaattgcccttgaccccgatttcgtgcccctgcaagtccgtttggtaacagacgagacctccattttcaacccccaattctttcgttgaaccatacctttttttgttgtcaagtcaaatcccataagctagatgacaagagttagcttttattcacaaatgtagttaaacatgaggggtgttttgtagaaactccaatttctacaacattagtggtgcattttggtaacattgggacaataaataagttatttaattaataatacaattttaagacaaaagataccccaaacaaagcattatctgttgactgcctgagaaacatgaagatcttcaatgttagtacttttctgttcctcctttcttaggtggtcatccattggctttcttctactaggttgtctgccaagacttgggtctgaaggctgaagtgaaggccctttcagaaatgcattctggatgccatccttagttccacgcaagaaatgggctaaaatcccatataaaagaggtattgtattatcctttgattcttcaaatgcatttagttcatggatgagaaactgtctgtccaacggaactacaggttgaccagattctgctatgaggacagatgctgtatacttatatttgttgaattctaaatactctcgaattaattcattaattagaaggttttcatgagacaatgatggtcggggttcacggtcatcatctagggcattgaaaacttcagctcggatccttgcttttaaatgccctaataccccctttttttccaaggtgtcctttaaaacagccttcaactctgccacagtcgccatttttcaacggccgccaggcccc

SEQ ID NO: 433280 - DNA, 1428 bp, Homo Sapiens
  misc_feature (465)..(716): n is a, c, g, or t
  misc_feature (725)..(738): n is a, c, g, or t
  misc_feature (758)..(766): n is a, c, g, or t
  misc_feature (1117)..(1204): n is a, c, g, or t
aaaggtaggccgtatttaggagataggcaccatacttattttttcttatccccaagaattaaaaattgatgtttggtaaagagttttcggagcccaaaacaagtaggggggctggccctctttctggctcatctgtgatgcaacaaccgagggccacacggagattaaacaatgccatctttgaaaaatccctttctggtatttctcccaaagcctgtctcttcatgcttacttcacattctttatctaataaaataaactctttgttttatttacaggaaaattattacagcaaatttacttctcctctaccttttaattaaatcttccagtaagccaaagtctaaggaaagaaaaagtacattgttgcctattgaaaaggtaatacaaagccctttcatttccttacaaactttaagggcctttataatacttcctaaatggctgggctcagtggctcacacnnnnnnnnnnnnnnnnnnnnnnnnnnnnnnnnnnnnnnnnnnnnnnnnnnnnnnnnnnnnnnnnnnnnnnnnnnnnnnnnnnnnnnnnnnnnnnnnnnnnnnnnnnnnnnnnnnnnnnnnnnnnnnnnnnnnnnnnnnnnnnnnnnnnnnnnnnnnnnnnnnnnnnnnnnnnnnnnnnnnnnnnnnnnnnnnnnnnnnnnnnnnnnnnnnnnnnnnnnnnnnnnnnnnnnnnnnnnnnnnnnnnnnnnnnnntccatctcnnnnnnnnnnnnnntacttcgtaaaaacaatacnnnnnnnnncaagtcaaatccaataagctagatgacaagagttagcttttattcacaaatgtagttaaacatgagtggtgttttgtagaaactccaatttctacaaacattagtggtgcattttggtaacattgggacaataaataagttatttaattaataatacaattttaagacaaaagataccccaaacaaagcattatctgttgactgcctgagaaacatgaagatcttcaatgttagtacttttctgttcctcctttcttaggtggtcatattgtattatcctttgattcttcaaatgcattagttcatggatgagaaactgtctgtccaacggaactacaggttgaccagatnnnnnnnnnnnnnnnnnnnnnnnnnnnnnnnnnnnnnnnnnnnnnnnnnnnnnnnnnnnnnnnnnnnnnnnnnnnnnnnnnnnnnnnnatgctgtatacttatatttgttgaattctaaatactctcgaattaattcattaattagaaggttttcatgagacaatgatggtcggggttcacggtcatcatctagggcattgaaaacttcagctcggatccttgcttttaaatgccctaataccccctttttttccaaggtgtcctttaaaacagccttcaactctgccacagtcgccatttttcaacccgct

SEQ ID NO: 433281 - DNA, 482 bp, Homo Sapiens
gacttgcttattttttttattaaatgatacattgaaagtataaaaagttgccgcagtacaaacaaattacagaataatgcatataaaagcgctatggactacacgtgacaattctgcttaacttccatcttgatgattttatatcagtatccaaaattatatactccagcattttttccgaatatagtcttacatgattgcaattcctgaggtaaactaagtgtccactgccaacatccttggacgaaaaccaagtcccccgggagaattcagatatttatattcacacatacaatacaacggaattcatcaatgtaatcagatattgcagatttaaaaatggaaaatggactcttgcaatacttctgcatccatatataattttaccagcagggcctcccaaaatgttgtgtaagtatagtttaaatggatttcattaataagtttctgcatttagataaaaattcttggctaatctgtaa

SEQ ID NO: 433282 - DNA, 773 bp, Homo Sapiens
ggcgaattcggcacgaggcagcggcggcggaggctggcgctgtcctgagagggagggctctgtgcggaagagatgaatcggacaaagggtgatgaggaggagtattggaacagctccaagttcaaggcttttacctttgacgatgaagacgatgagctttcacagttaaaggagtccaagcgggcggtgaacagcctccgagacttcgtggatgatgatgacgatgatgacctggagcgagtcagctggagtggggaacctgtgggaagtatctcatggtccatcagagagactgctggtaatagcggctcaacccacgaggggcgtgaacagctaaagagccgaaacagcttctcctcctatgcacaactacccaagcctacttctacctactccctgagcagcttttttagaggtagaactagacctggaagtttccagtccctttctgatgctctgtcagacacacctgccaaaagctatgctccagagctggggagacccaaaggggagtatagggattacagcaatgactggagccccagtgatacagtgcgacgtctccggaagggcaaggtttgctcactagagagattccgtccttacaggaacaaactacaagtcctaagaagaggcagtaagcatgcatgatggaaacgtcattactgcagttctgattttcctgaagaggacacttgaggcacaagagatcctcttccgaagagctggaggtgcgacaggttgcctgagactttcttattcattccttaagg

SEQ ID NO: 433283 - DNA, 1518 bp, Homo Sapiens
  misc_feature (1458)..(1458): n is a, c, g, or t
  misc_feature (1504)..(1504): n is a, c, g, or t
tttgaaggcaccaaggaagaaatacctttattaggagtctaggcatgtcagaaaaacccagttcagtcacagaaaaggaggcaaatattggtacagagcaagaatccaagtgtgaaaataaaacctccatctaaatatcctaacagaaatgctgctgaatttagcccaggtgaaacttctgaaagctcctggtgaaatgagatttttgcataaagagagagctctccagcactgctgcatctgagcttcttataaagtgacgggtcttggccagcagtagaggaagagataaaggggatgtctcatcacccaagcaaggtcgtctgtgttcaagtgagagaagaaccttagggttttggacagagtaaactggggcagcagagggaaaatggctgaggaaacacaacgtctaggccgtgtgtggcataatgtggaggggtctgtgcagtctggtgtgagtgcatctccaggaggtcttgggaaacactggcattccttcctgaggccattttggttctgttctgacttcattcagagcagaactgccaatgtccagcgccaagtcctggatcataattagctgagtggaatgcagtagccaccctatgactcccatacctcttcctttctggagcagtcacttttctcagaccaagtgagatcttacccagtaggggcccaatctagaaatcactcccaccttcatatgagcaccaggtggagagaatcattctcatgactcaaagctttagatctcgatcctcagatgatgttccttggacagaagatcagtctgaagttatctgtgtcaagagtagctggcactgcccatgggtaatgggcccaagcgatgtgatgccgcagctctcccaaagaagggctctctctgctttcacaggcaggagaggaggaaatgaggcaggcttcaaggtagtcaatgccacttaattcttccatcgaatttgcgagctgctgagaagagcatcaatcttctcctcctctgctgatcctttatctaccttactcctgtatgctagcaactgttgacgatccttcaggtcccggtaggtatcaatgacgacatcatggcacttgaacttagtggctaagttcaacttcgtgtccacatcttccaccagattgacatactcctgtaatatctgcacaggggcattgttcttgtgcaaaatttcgacaacccgatggaagccaatgggtgctctcttcttggtatagcccagccagttctttgtggtgaatagggcatctacatcattccaggctcgaagcttggcacgagcagccagggctgtcagcacatactgtttatctgggatcttaaatgtcttcttcaggttgacgggactgctgaatgtcccctcagcctctgtgtagtgatacgcagcaggagtagaaaagtgttgtcactagtggcatgttgaggatggaggctttgcnggggtgctttcggaagatctcagtctgtcctgctgattctagatgncgatcatttgcctc

SEQ ID NO: 433284 - DNA, 788 bp, Homo Sapiens
ttttttttgttgtagaaaagtcttttattctatcggtcaggccccatctggcccaagaatagctgagcagagcccatccctctacccgctccctcctactccggcttctctttgtcctgcttctgctcctcctccagtgccaaggttcgctcacgctcctttaccagctggacgccacagtaggtgacaaacaggatggacagcgtggtctgggggaaccctgtgagtagcaggcgccgggcaaccagctctgtgaatttgaggctgttcaggctcacaaggttgtacatgatgatggcccagaagttcatggctccaaacagggcccggaccctacgggacatctgcactgacagagaggcctcaattcgtgctaggggcccccactctgccagtttttgcatccagagctcaaagttgaggccaaagcagttaaggaatgaccacaggtagacaatgtcacaaggcccaagccacagtgtggtgatggcaaatgtggccactgtggctgccagctctgggatcacagcggaatgctccccaccaatgtggttatacacatatttgcaaagccagtcgttgatgccacggtcaaagtgcgtttccgcaaagacgtagagtgcggtgatgcacttgggaggctggggtgggtccaggtggtcgaggcatgccacagtgttgacaacaccaaagaggacggccgccttcacccagtcatacaccaggtttgaataggctaggccagcgagggcactgtctgggaggcggttggcgaacttgaggtcgct

SEQ ID NO: 433285 - DNA, 1006 bp, Homo Sapiens
gtgacctgagctacactcttaaaagatgcctctggctgctgtgtggagaatgaaccatgggggcaaaagcagacacaaggagaccacttaagaggctcttgcaataatttatgtgagaagagtgatcatcttgactagggtgttggtgttagagagaggtggattggtggtcaggactgagaggagcccacagaatttgctggcttgcttggatgtgggtgatgaggccaactgagaatccaagaatggcaccaaggcttataccctgagcaactgaatggatggtggtgccattcactgagatgaggacggagctgggtttgagcagggataggggaatctgtcaatcaagtgacatggctagtagcaattgcatatacaaatcaggagagactgggctaaagacacagatttaggggtcatcgtcatagagctagtacttgaaatcttgggtctggatgagatcatttgggaagtaaacgaacagagatagagaagctataatgtcccaggctgagcctgccacaatttgaagttggttggaggaggagctgctacgtgaggtcaggaatgttgaatgcacccagggtgacagtgttgaggaggacgccctgttgtgtgtcctctcccatctcatccctgccctttcccacactcccagtggcccttctcccatctttcctgcagatatgtgtataaccacattggtggggagcattccgccgtgatcccagagctggcagccacagtggccacatttgccatcaccacactgtggcttgggtcttgtgacattgtctacctgtggtcattccttaactgctttggcctcaactttgagctctgggtgcaaaaactggcagagtgggggcccctagcacgaattgaggcctctctgtcagtgcagatgtcccgtaggttctgggccctgtttggagccatgaacttctggggcatcatcatgtacaaccttgtgagcctgaacagctcaattcacagagctggt

SEQ ID NO: 433286 - DNA, 906 bp, Homo Sapiens
atctctctcgagtctgcagtccatttagtctttctggctagtccacctcttaaagcttcttcgtttgctgaattttctggagtcctgggaagcttagctgtgggtttctgaggtgtatgcaaaatggtctctgttgattttgtccttggatctatcagtctctccataatctgtcttgcatccgatgcaaactgcacgtggtatttgtgaggggattctgaatcaatgagtaggacattttccaaatcatcttctttttcactatctgatgaatactctaaaatttctatagaacttggcttgggaagctccgacagcttctcatcacttgtcaaagactgattacttgcacaagaagcacagtctgagatttccacagcaccctcgtcatcttcaaattcatcacagtcactagcctctgccctgtcactgtcaatctcccagtcgataaactgtaattcatctctctgtaactgagaaagtgtcttatcttcatccgacaaatcacttccactggagctccatgttatgtctgtaagcccactggtgcttttagatgtggtggtttcttgcttgggtctagggcataattcaaggtgcttttctgtaatcgtcttctcttcagctgttaatgacggattcccagaagtgttctgaaacccttctccacacctgagccatgcttcagagagagaggcagctgcccctgctgtcctgagacctgctcttctgacctgcagtggtctttctcctggaaaggatgggcattctgtattccaactcctttttctcttagagccccgagcgcggctgccgcggggcatctccgggagatccaaggaattccggacccttgccaggcttcaaaagatgtataggtgacggcgaggcgggtggggaccgcgg

SEQ ID NO: 433287 - DNA, 999 bp, Homo Sapiens
agaatccctcaggggaatgctggttggattccgctgttttggttcttggtgccccagggtccaaggctgtccctgtaggggttacacccttacaccacaacctggattccaggtgaattattgttagacccttaattacaaacatctgggccaaagagatgcttcttcttggaagggggtatgtccggccagtacacttcacaagttttttctgaatcttctttggcaacaactttctcacaaaagtaagtattcagaataacagggcactttccacttggaataatcagtttttgccagggagggaagatccggacagtgtcctggggacggcccctgaggtagcctgcagtctccttggtgaagagaactttcaggccagctccaggcctgggagccacactttgggaggagctggtggctggtgaccccaataactgctcacacatggcaacttgcatggcacattcctcatgcagctctaaaattttcacagttaatacaccagattttctacctgaaagtgtcttttggtaagaaatacattgatgtctccacaaagaaatagcagatctctctcgattctgcagtccatttagtctttctgctagtccacctctctctgtaactgagaaagtgtcttatcttcatccgacaaatcacttccactggagctccatgttatgtctgtaagcccactggtgcttttagatgtggtggtttcttgcttgggtctagggcataattcaaggtgcttttctgtaatcgtcttctcttcagctgttaatgacggattcccagaagtgttctgaaacccttctccacacctgagccatgcttcagagagagaggcagctgcccctgctgtcctgagacctgctcttctgacctgcagtggtctttctcctggaaaggatgggcattctgtattccaactcctttttctcttagagccccgagcgcggctgccgcgatcccgggaattccggacccggtacc

SEQ ID NO: 433288 - DNA, 1068 bp, Homo Sapiens
  misc_feature (71)..(85): n is a, c, g, or t
tctgggtgggaaggccctgtttttgcttctggggccccatgggttcccggcctgtccccgtagggggttannnnnnnnnnnnnnnaaaccgtgattttcaggtgaattatttgtttagacccttaaatacaaaacatttgggccaaaagagatgttttcttcttggaaaggggtatgtccgggacagtacactccaccaggttttttctgaatcttctttggcaacaactttctcacaaaagtaagtattcagaataacagggcaacttccacttggaataatcagtttttgccagggagggaagatccggacagtgtcctggggacggcccctgaggtagcctgcagtctccttggtgaagagaactttcaggccagctccaggcctgggagccacactttgggaggagctggtggctggtgaccccaataactgctcacacatggcaacttgcatggcacattcctcatgcagctctaaaattttcacagttaatacaccagattttctaccttgggaagctccgacagcttctcatcacttgtcaaagactgattacttgcacaagaagcacagtctgagatttccacagcaccctcgtcatcttcaaattcatcacagtcactagcctctgccctgtcactgtcaatctcccagtcgataaactgtaattcatctctctgtaactgagaaagtgtcttatcttcatccgacaaatcacttccactggagctccatgttatgtctgtaagcccactggtgcttttagatgtggtggtttcttgcttgggtctagggcataattcaaggtgcttttctgtaatcgtcttctcttcagctgttaatgacggattcccagaagtgttctgaaacccttctccacacctgagccatgcttcagagagagaggcagctgcccctgctgtcctgagacctgctcttctgacctgcagtggtctttctcctggaaaggatgggcattctgtattccaactcctttttctcttagagccccgagcgcggctgccgcggggcatctccgggagcgatcccgggaattccggacc

SEQ ID NO: 433289 - DNA, 1080 bp, Homo Sapiens
cgggggaacatctgccgagccgtgtccgtgggggcggccacagatgtatgccccattcttcccttgggtgacaggaactctttcgtgccacggcttcacgggcctgggggaccacacacttctggggagtgatctcggggcgctcgggtgacccccccgatgaactcgtctacacacacaggtgcacaaccttggcacaggggcaacctttgcctgacagacaggcttgtaaagatttttttgcaccaggttaaaaacaccagagttttcaaccgggaaagtgtcttttggtaagaaaataccatggatggtgtccacaaaggaaatagcagaatctctctcgattctgcagtccatttagtctttctgctagtccacctcttaaaagcttcttctttgctgaattttctgggagtcctgggaaacctctagtctgctgggtttctgaggatgtatgacaaaactggtctctgtatgatttctgtccgttggatctatcaggtctcgtccataatctgtcttgcatccgagtgcaaaactgcacgtggtatattgtgaggggacttctgaatcaatgagtaggacattttccgtatcatcttctttttcactatgctgactgaatactctaaaagtgttctagtagaacttggctctctgtaaactgagaaaggtgtcttatcgttcatcacgacaaagtcacttccactggagctcacatgttatgtctgtaagcccactggtgcttttagatgtggtggtttcttgcttgcggtcctagggcataattcaaggtagcattgtctctgtgaatcgtcttctcttcagctgtgtaatgacggattcccagaagtgttctgaaacaccttctccacacctgagccatgcttcagagagagaggcagctgcccctgctgtcctgagaccgtgctcttctgacctgcagtggtctttcatcctggcaaggatgggcattcatgtattccaactcctttttgtacttagagccccgagcgcggctgccgcggggcatctccgggagcgccgcctgagcgcaccgcctcctcagcgcgccccgct

SEQ ID NO: 433290 - DNA, 1908 bp, Homo Sapiens
  misc_feature (1290)..(1308): n is a, c, g, or t
agcggcttcaaatacagctgatttttagaggtcagatgaactgtgactgagtgtgacgggaaacgtggctctcccttcactgatgggtagctgacttgagctccccccatgctctctggcagtcttgtgggagctgctgggtgagctgctgactgctgcagagcctgccagactagggacctggacagcggggattttcagtttgattgacaccctgtggcccccagcgatacctctgaaaacacctggccgcgaccagccctgtgaagagataaaaactcatctgcctcctccagccttgtgttacatcctcacagctcatccaaatctgggacgaaattgatataattgacgaagaccccatttataagctttaccagcctccagttacccgctgcttaagagacattctccagatgaatgatcttggtacccgttgcagtttctatgccacggtgatttaccaaaaaccacagctgaagagtctgctgcttctggagcaaagggagatctggctgctagtgaccgatgtcactctgcaaacgaaggaggagagagaccccaggctccccaaaaccctgctggtctatgtggcccccttgtgtgtgctgggctctgaagtcctggaggcactcgctggggctgcccctcacagcctcttcttcaaggacgctctccgtgaccagggtcggattgtttgtgctgaacgaactgtcctcttgcttcagaagccccttttgagtgtggtctctggtgcaagttcctgtgagctgcctggcccggtgatgctcgacagcctggactctgcaacacctgtcaactccatctgcagtgttcaaggcactgtggttggcgtggacgagagcactgctttctcatggcctgtgtgtgacatgtgtggcaacgggagattggaacagaggccggaagacagaggcgccttttcctgtggggactgctcccgggtggtcacatctcctgttctcaagaggcacctgcaggtcttcctggactgccgctcaagaccgcagtgcagagtgaaggtcaagctgttgcagcgcagcatttcctccctgctgaggtttgccgccggtgaagatgggagctacgaagtgaagagtgtcctcggaaaggaagtggggttgttaaattgttttgtccagtccgtaaccgcccacccgaccagctgcattggattggaggaaatcgagcttctgagtgcaggaggggcctctgcagaacactagcggttgccgcaggatctgtgaactttgcaatgtggctgcaagnnnnnnnnnnnnnnnnnnnatttggggtagttatttgttaactatggacacagtgaacgtagtttacgatcttgaaatgaaacttagatttttctggggaaatgttcagatacagttttgtgaactgtaaatcaaaatacctttttctacagtttatcttttattttctgcaaatttaggaacatatttactcgttttcacattgaatcttaagtttaagctcttcatttggtatttaggcaatatatgagaaaaaaattttttttgttcatttgtaattttaacaagttgaacattttaccatgattgaacatgtttttattacagtatttaacattcccccaaagaataccctgcaaagtgtaaacctttgtcccatactgtgatattactgttctgctacaataaatgtcaaacctaagcactttgcagttcactacttttgggaaaatgttctagggaactgtatcacaggtgaaactgttacccataaagtgtagctctctgaactggtgtgatcgtgtctctgctgaatggtggtggggatagctggctccaccacacacacctgttttaattaggctgggtaatgtgcacggagagcaaagatcacagacta

SEQ ID NO: 433291 - DNA, 505 bp, Homo Sapiens
tctcctgggatgtggtggaaagccaggggagctgcctcgtggccagggagctggagtccgagtggtggtgcaaagagtgtattctcttcccagcagagacagcaccaggggtcagcagggggccagctcaggacacacagacccagctggaactcgagcctgccttctggtacaagatgcctgtggaatgttcggtgaagtgcacttggagttcaccatgtcgaaggcaagacagttggaagggaagtcttgcagcctggtgggaatgaaggttctacagaaagtcaccagaggaaggacagcggggattttcagtttgattgacaccctgtggcccccagcgatacctctgaaaacacctggccgcgaccagccctgtgaagagataaaaactccatctggctcctccagccttgtgttacatcctcacagctcatccaaatctgggacaaattgatataattgacgaagaccccatttataagctttaccagcctccagttac

SEQ ID NO: 433292 - DNA, 943 bp, Homo Sapiens
  misc_feature (340)..(455): n is a, c, g, or t
  misc_feature (693)..(822): n is a, c, g, or t
aagctatcctgattctttttgtgatgactcactctaggcaccatttctaggggtggtagacacagaaacatactatccagatcccccttcaagcaagggcttgctgcctcacagtgggcagcatgggcagcagcatcctccagctatcagtagggcctggctcagctgctgagtacttcctcacttgaggtcatgacctctctggggcagcccccatatggtgactgagtaaggtagaagtataaagaggcttcacatttagcccaacacagaacactccaacaaacaataattgttccatagctcctggcagggttgactgaagtttattgattgattnnnnnnnnnnnnnnnnnnnnnnnnnnnnnnnnnnnnnnnnnnnnnnnnnnnnnnnnnnnnnnnnnnnnnnnnnnnnnnnnnnnnnnnnnnnnnnnnnnnnnnnnnnnnnnnnnnnntgactgaggtttagttgggcctataacgtatgcaacttcttcctctgcctaacactgttttctcccccttcccttcacaagacttgatctgtaacaaatatcttgaaccccaaagtcagtctcagtaactgtttccagagaagccagcttgtgacagtaggtgacgttatcccacatattctgtcaccataagttcattactactaaaatatatccttggctggacatggtggctcannnnnnnnnnnnnnnnnnnnnnnnnnnnnnnnnnnnnnnnnnnnnnnnnnnnnnnnnnnnnnnnnnnnnnnnnnnnnnnnnnnnnnnnnnnnnnnnnnnnnnnnnnnnnnnnnnnnnnnnnnnnnnnnnnaaacacctatagtcccagctattcatggggctgaggtgggatgatcacttgagcccaggaggtagggactgcagtgaaccctgatcatccactgcacctcagcctgggagacaaggcgagg

SEQ ID NO: 433293 - DNA, 635 bp, Homo Sapiens
ggggcagagtccacagaaagagaggggatggtgggtctagaagccaacagaacagtaatgggagcctcccttgtgcagagaccgtggtggtctgggaaggcttcaaggtgggaagggaacagaatttgcacctcttcttcttgcccaatccccctgaaaaatcttacaagaaacactcagctgcaggagcctgcaagaaagatcattcaaggcaaggatggtgccactgacagtggcacgagcactaggatccttccagctgcatggacagagcccatttcccatcagcgtcctcggaaagtggggagtgttctcagcagttaatttgaggacccaaggacagtgcctgactgaatggcagggcctcataggtccatgtaaggatcaagagttagactcaagctttaccccaacctactcttcccataataccccaaaactgtcaaccaagcccttctcacgctgaaggtatctgctttcctctaaggaccaaactctatagacaagagctcttagggagtgccatgtcttggttaggaaaggggttagtactgcccttttctgagtgatgagcaggaataaggagccgaaaggttgcagtcctgagtctctcctcactgcctgcaccatctggc

SEQ ID NO: 433294 - DNA, 659 bp, Homo Sapiens
  misc_feature (151)..(163): n is a, c, g, or t
cttattcccagtttgttccagatactgtctactgacagtgatcgttcttttcttggttatgatataaggaagtagataaaagattttagtttgggtttttcattgggttctcatgttctaaaataaatgaccaggaatcaggaagccaacnnnnnnnnnnnnncagtccacctgtaaatattacataactcacaccttccatacccttaccctcatataatttaatgttcatttatttgccttggtttagtactccatatagaaggaaagaacacatgctttgttttggtgggtcgttaaattttttcttcttcggaacatgaaaaaggaaggaaggaaactgtattcatttttgtctaagcaaggataatggcctgttaatgcaaataaatggaaaatattctccattatgtcttgaaaatttgtttttcttaagttttattacagaaagttttagtgctatcaaaaaagatttatatggagtacgtttggcttactacctttcattccccctctaagcaagacatagaaaatttctatattaatttatatttggggattaggtttgtttcttaggagaaaagggatcatttcaaagtttgatagtgtcaaagaagaagtttcctatttacaagaaggcatgcggtgtggcatttaat

SEQ ID NO: 433295 - DNA, 1356 bp, Homo Sapiens
  misc_feature (300)..(300): n is a, c, g, or t
  misc_feature (776)..(830): n is a, c, g, or t
  misc_feature (1353)..(1354): n is a, c, g, or t
  misc_feature (1356)..(1356): n is a, c, g, or t
aggacactccaggttccaaaatgtttgttgtgggaaaaaggaatacattaggatcctaagaactcgggccttctgttactaagaagtccacccttctgggggcaggaagagggtaagttaacccaagggggaaagagatgggtgggttcctcagggccatcagatgctggcattaggtactcacacagtgagggcagctccatttgccctctgaagcccggtcaagctcaggatcaaggcagacgaggtggtaggcacgagggcaggtgtcacacagaataatttccccaccctgctggncacacctcacagtaatcctggtgatccgtctcgtagccatcaacctcctcctccccggccactgcaggacagcccaggaccttcttcttcttccttcctggccggcctctctttagtttcttggtgcggacagggccatcaggccggcctgaggcactgtggacactgccactgtccaggtctgattcctcagcctctggttcaggaccttcgtcgctcgagcctcctttcttcctcttgccacccagaagccctagttttattttgagtggtgccattttctttccccgaagcttcttgcgtccatcaggcactcgggggctcttactccgcctcttatggcctggacctttgccctctttggttttggctcttcggatgggtgggggctggatatcagcagcagggggtggtggaagggcggggggtccggagggtgctatgggggtggccgacgagacagcagctgacacctnnnnnnnnnnnnnnnnnnnnnnnnnnnnnnnnnnnnnnnnnnnnnnnnnnnnnnncccctgaaggggttgttggcactgaactctctccatttggccccaaggatggtcatcatcttagacattgggatcttaggattcttcttagcaattaggggcctcatgaactggctgaaggctttgtagttggtgagcgtgtggtaatcctcctcagagaacacatgctccacatcctccaggccccaggtcagaagcagagttgctgatgacttctgttccacttgcttttgccccccatctccctccccctttttccgccgctttgtcttcttctcctttttttctcggtgcttccttcttcgtttccgacccggtccggttccatattcactgcccccactctctgacttctcccggtactcatctcgctcagaaccaaattcctcctcactgtcacgcttcttgcgttttcggggttttcctggcttgttctccttctgcttcttgggtcctcgttttctcttcttcacacccaatgctgacggcagcagccgaatgtcatccttatctggcggcgggnncn

SEQ ID NO: 433296 - DNA, 978 bp, Homo Sapiens
ggtagttctctttcactttggtgtttgaaaagcagggcccagcccctttttggattgatttagccctctgaagttctggaaatttaatgagacagggagacactgatctttcaactcgataagaacatgtagacatttcagcaactaattgagaaaaaatgaaatagctatgatgggaatgatatgccaggatggtaaagctagggtcctactatacatatccacttgtctgagcatccttagaggccacatttcttctagtgaccatcactctgaactcttggttctgcatatttctgctaccccacttgtctctgggactgttggccccttccagattgtatttccctaagtgacccaccaccgaggtgtcttcattgtcccaaagaccactgctgcagagtggtggatcatttatcagactttagagagggcttggggcaacatgaagggagtgtagctgagcacagtacaagcaacaacttaaaactggccactaggcaccattgcctggaaaacccaccacccattctctgctttggagagttcctctccagcctgtgttctccttaagtcctgggttgtggctaccttcacaggcctcccattctctaaatgcttttcatttcttgtctgccaacttctagccttcaatacttctgtgcatttcttttgcagatcagtttatctttctatccacaaccccaaagttcatcttagcttgccagaaacgagttgagacgctctgatcacaaaggaccatctcctctatgcttcagcagcataatgcaacaactgaagcctgagattccagttgcttttttctccttaatatgatccagttcttagacaggtctccctcccccatgtgctccatgtgtctcttaaatggagagagtgtactgtaagtatttattctcccctgtcgtaagcaagctccccggcttcatcatatctatcttgatctttctttttttg

SEQ ID NO: 433297 - DNA, 745 bp, Homo Sapiens
tttttcaatacactcatatatttttactttgtaatacaatatagctgtcacatacaatggctctagtaggcttaaatcaaattgcaatgggcaaggaaagccaaagaagggtttacacaatattcaataagcaacagtatctgttcagtgtgcaataaaataaaaaagttctaacctagaaacacagaaaaagaatttattgtttttaagtttcagaaataaaagtaacagaatagtgtataatctgtaacaagctggtcctgtaatttctaaactacagtccaattaaaacatttaagtaatagaaacaatctacatgtttttctaccaggtaaatatacctgagagggttacctataaagaaataggctttaaaacttttaaccacaaagaaccttctgctgcgacattatgaagatgggctatgcatgtggccagactaagtcatttcccggagattctgctcactgcttagctgcaggtagtggtccatcaatgacagagtattttacatcaataccagctcattcaaccaaagaagcacagtaatattttaaaatcacctgtttatattcattagtatgtaaaaatcacaatacacagatttggaaacatataacgtgtccataaaaaagagtgtattatgtaagcataagctttttaaaaaggccttagcaatgcaataatgagggaagcagactctacatgttgactacagtgaagatatgttaaaattataattatt

SEQ ID NO: 433298 - DNA, 1111 bp, Homo Sapiens
  misc_feature (368)..(368): n is a, c, g, or t
gggattcccgggatctcttactctctcttgtggttttgaggtcgaactgtccattcaaataaagccctgaaaaggagagatttgaaaccactgaggcagaacgggtggagagggaacctttaggggaatttgggtatccttgaaactgtcagtctgcagcttcactacccctgagaggcaattgggaaggaaagaggatttgacagcactgggaacaagggagagtgcttcttaggcctgaggcaggacagagaggagcagggttccttgacactgtcactcaggccagagatgagtggaatggaggtcctggaaactgccattcagtgggaggcacatggtcagtagtcccggacagggggtggggncctggggggctgaaatgtgctgtgtgtggccccataggagggcgggggtgcagggggtgcccccgggggctcagcctcatcctccatttcgctgtcgtcactgccagccagctggtcatggccaacgaagccacacttctcctcgctcatctcctcaggctctgcccacggctgcttctctccagaagcaaagaccccgtagaagatgacacctccatagtgcaccagggaggcaattaggaacacgtactgccactcctcccgagtcttgtgcttagtcatggcccccacgatgatggggcacaccatgcccgacagtgtgcccacgccgttggagatgcccatgaggatgctggcgtagcgcggggctatgtccaggtggttcacgttgaacccagagatggcgaagccgctgaagcccacggctaggaccaggaaggagatggccacgcccttggagtgcgagtagccgaccaccaacagcagcgtggcttccatgccgaagcctccgcagttcatcaacttgcgcacgttggtggtggacatgatgcggcggctccgcaggaagtccgcgatctggccgccgatgggcacgatgatggtcatgaccaggtggggcagcgcggacaccaggcctaccttgctgatctcgaagccgaacacttcttcgaagtaggcgggctgggagatgagcagcaggtagaacgtccagctgcggcagaagttggccacgatgatggcat

SEQ ID NO: 433299 - DNA, 1393 bp, Homo Sapiens
  misc_feature (166)..(166): n is a, c, g, or t
  misc_feature (168)..(169): n is a, c, g, or t
  misc_feature (178)..(181): n is a, c, g, or t
  misc_feature (188)..(189): n is a, c, g, or t
  misc_feature (192)..(192): n is a, c, g, or t
tccccaggttaagccgttttcccaattcaggccgttgtaaaaaggacggcccagtccctaggcttataatacgactccctattaggggccctctttgtacaaaaaagctgggtacccttaagcctggggcccctcgagggaatactctagagcggccccccttgangnncagcagttnnnncaggggnnttncctatacaccaaagcttttattgggagtggggcagggcaggatttacagtcacagagacagagacacaaagacacaaccctgcactgggaaaaaacacccctgtctcctgccccattccctttcatgggattctgtgacttctctataggttccccaaattctaagctgaaagaggggtgtctgagaggggaaggatcccagattttgagtcattaagcccctgagggacacaacaaatggccactgagaaacagggtagttcgaaaccacccaggagaataaagtgcgaggaattggggagggggcatcatgaaaccaccatgggggagttcaatggtggtagcttcaaacctttgagttcatggactggagcagccactatttagacctgaaaaccatgtcagaaaaagtgcacgggggtagagaggcatattgttaaaattgcgattttggttgtttccccagacattatgctaagctagggagaagagggtcttgagaaatttggtgctttcgcagaatctgctggtaggggagatgtgaagtgggcacggaatcggggacttgaaaccgccattttccatcagaaacgctggtgagaatcaatccctggaatggcggggacgagtaattggttaaaccaatctggaagatgcagaacagagttgggagagatttgaaacttctagaggaggaccttgaatttttctgaaaggagatgggagctgagtgatctcaaaggttagcctgagagtccctggagataaaggaaagcggggggtgtgggtgcctcaaaaccacaagagagagtaagaggtcgaactgtccattcaaataaagccctgaaaggagagatttgaaaccactgaggcagaacgggtggagagggaacctttaggggaatttgggtatccttgaaactgtcagtctgcagcttcactacccctgagaggcaattgggaaggaaagaggatttgacagcactgggaacaagggagagtgcttcttaggcctgaggcaggacagagaggagcagggttccttgacactgtcactcaggccagagatgagtggaatggaggtcctggaaactgccattcagtgggaggcacatggtcagtagtcccggaacagggggtgggggcctggggctgaaatgtgctgtgtgtgccccacagagagagcgtcggtaccgaccga

SEQ ID NO: 433300 - DNA, 435 bp, Homo Sapiens
tagaggatcccttgcaggaagggatgaagcggagatgtcaccgagtggtagagaggaaaggaggagagaagaagttggagctggagagcagaggaagtgcagaaaagctgggaacagagagggaaggaggtgaggaaccactgaccatgtgcctcccactgaatggcagtttccaggacctccattccactcatctctggcctgagtgacagtgtcaaggaaccctgctcctctctgtcctgcctcaggcctaagaagcactctcccttgttcccagtgctgtcaaatcctctttccttcccaattgcctctcaggggtagtgaagctgcagactgacagtttcaaggatacccaaattcccctaaaggttccctctccacccgttctgcctcagtggtttcaaatctctcctttcagggctttatttgaatgga

SEQ ID NO: 433301 - DNA, 433 bp, Homo Sapiens
  misc_feature (24)..(24): n is a, c, g, or t
  misc_feature (380)..(380): n is a, c, g, or t
cgggggttgcaaggggttggcccngggggcttcagcctcaatcctcccatttcgctgtcgtcaactgccagccagctggtcatggccaacgaagccacacttctcctcgctcatctcctcaagctctgcccacggctgcttctctccagaagcaaagaccccgtagaagatgacacctccatagtgcaccagggaggcaattaggaacacgtactgccactcctcccgagtcttgtgcttagtcatggcccccacgatgatgggcacaccatgcccgacagtgtgcccacgccgttggagatgcccatgaggatgctggcgtagcgcggggctatgtccaggtggttcacgttgaacccagagatgcgaagccgctgaanccacggctaggaccaggaaggagcatgccacgcccttggagtgcgagtagccg

SEQ ID NO: 433302 - DNA, 796 bp, Homo Sapiens
  misc_feature (453)..(575): n is a, c, g, or t
  misc_feature (601)..(629): n is a, c, g, or t
gccatttatcactctcaaattttggtgaatcttccctaagttcccagcatcacagcattcatggacctgagtaaacattccggaaaacacagagatgttccaatactctggttcttaatttcatctaattagttttaaaatttattctctactcacaagaagcataaataaaggtttcactcttatataaagacctgacaatacatacaatggtcctctgctgatttggaagcaaagacagttttctacgacagtctgttctttataatgtataactgttgtgggaaaaaagaaaatccatttcttattgtaattatttttcttatttgaggtttcttttccacgatgacccaaccacaagtttgggaacattgcttctgaggcccattctctgatgagaaagttcagtcccaactggggaaagtacctgagtcccagccttttcagcctagnnnnnnnnnnnnnnnnnnnnnnnnnnnnnnnnnnnnnnnnnnnnnnnnnnnnnnnnnnnnnnnnnnnnnnnnnnnnnnnnnnnnnnnnnnnnnnnnnnnnnnnnnnnnnnnnnnnnnnnnnnnctgggcaacagagagagactgccccnnnnnnnnnnnnnnnnnnnnnnnnnnnnncaaacatccaagtatccaccttgggttgcaggaagagttaatcttatgcgtttattaaaaaaagtaactatataatgtgaaacaccataaagtcagatggcactgcatgagggatttttgcttctttttcttaaggaaaaggagttacatggaaaattctctcatcc

SEQ ID NO: 433303 - DNA, 1411 bp, Homo Sapiens
  misc_feature (47)..(83): n is a, c, g, or t
  misc_feature (1050)..(1279): n is a, c, g, or t
ggaatgatgatatataggggacctcccgttcaccgcggtggcggcgnnnnnnnnnnnnnnnnnnnnnnnnnnnnnnnnnnnnnatcaggccaaatcggccgagctcgaattcgtcgagagcggaacggcccaccgcagggttggccaccttgagaagctgcgaagatggcggagtaaggcgtgccgctgcaaactggcctctgggccgggggcgagcagcccccgggaggccgagtgcatctgttggaccgtgcgaggagaagaaaaaaaatatcggccagaggagaggaactaaccgaacattcttcctccctaccttatagaggggagtggtcatctacactaaagcaaagtgttaggcgcgtccgtgcgaagagaccaccaaacaggctttgtgttccttatcacaggaagaaaattttccttgacctttaggtgcttttatattcatctcaaaaacaaaattctgaactcaggacttggcaagtgtctctatgttgtctcctagagtgggtagtcctgcttcttttacccagttactttccctgtttttgaaatgtggctatcacttctctacacattacctccatgatttggaatggaaaaggccacttttctttttgttctgcctctcaaattcaacacagaggagctcctaggattccagttatcctgctaacatctccaggaagaaagaagcaactcacatgggtcttttgctgtttgcttaattataaagacatcattttgcaagcagaaggctgagtttcatttgaaacaggtgcttaggtggtggtatttgtgaatacttttcattccaagcaagaagactaaagaagtagcaagtatgaatgacttcagggtttaaaaaaaatgtcttccagtttcagccactaccatgataagcacagttgagactgcagcagtaaattccaaatatgtgtttctaatttgacgtgaaagatactaaaaatttatatttgtatatttaaatcctggctcatcctgtgacatagatttactgaataggaacaaaggcccaattttaannnnnnnnnnnnnnnnnnnnnnnnnnnnnnnnnnnnnnnnnnnnnnnnnnnnnnnnnnnnnnnnnnnnnnnnnnnnnnnnnnnnnnnnnnnnnnnnnnnnnnnnnnnnnnnnnnnnnnnnnnnnnnnnnnnnnnnnnnnnnnnnnnnnnnnnnnnnnnnnnnnnnnnnnnnnnnnnnnnnnnnnnnnnnnnnnnnnnnnnnnnnnnnnnnnnnnnnnnnnnnnnnnnnnnctaggctgaaaaggctgggactcaggtactttccccagttgggactgaactttctcatcagagaatgggcctcagaagcaatgttcccaaactgtggtagggtcatcgtggaaagaaactcaaataagaaaa

SEQ ID NO: 433304 - DNA, 1054 bp, Homo Sapiens
  misc_feature (91)..(91): n is a, c, g, or t
  misc_feature (110)..(110): n is a, c, g, or t
  misc_feature (299)..(299): n is a, c, g, or t
tcttcctggagatgttcgcaggataactgatatcctaggagctcctctgtgttgaatttgagagccagcacaaaaagaaaagtggcctttnccatgcccaatcatggagntaatgtgtagagaagtgatagccacatttcaaaaacgggaaagtaactgggtaaaagaagcaggactacccactctaggagacaacatagagacacttgccaagtcctgagttcagaattttgtttttgagatgaatataaaagcacctaaaggtcaaggaaaattttcttcctgtgataaggaacacnaagcctgtttggtggtctcttcgcacggacgcgcctaacactttgctttagtgtagatgaccactcccctctataaggtaggggagtggcatcgataaacaccggtgttttcctaagggagctaccaattctggagcatcccatgaggatgatttgctggcctcggtcattagggggaaaggatgttctcagaaaaacagccctgcacgctggtcagccgagatcttgaggtcgtggccacgactggacttggtgcagagctgaacccgagactccagctgctcgctgagttcgtccagagccccggtgcaggactccaggctctcggccagtttctgaatcttggccttcagcacggcctggctaaccttggtgtccccctccgcccgcctggggatgaggaagccacgtgagccaaagaagacgatgaagtagacagaattgtacagggcgatggaggcgttcctcccgcactgcagcagctggcggtccccgcagccctgccagcggcagaaaaactcgaggcagctcaggatctctcgcatctggtcctggcaggtggccgcgatctcctgcaccctccgcagctcccgggagttgcagaagatcagcgagagatcggacgtgatggtgacggcccctccggctgtggccacccccagccccacggccgacaccagcagcgaggtccccagggtgaccgggctgagcgagagccccacgatggcggcgagggcgcccgttgccctcccgct

SEQ ID NO: 433305 - DNA, 644 bp, Homo Sapiens
  misc_feature (513)..(513): n is a, c, g, or t
  misc_feature (534)..(534): n is a, c, g, or t
  misc_feature (614)..(614): n is a, c, g, or t
gtgtgagccactgtgcccggcctctttttactttgttaatggtgtattttgatagataacagattgtcattttcatgaagcacagctggtcagtttattgttgctcatgtatttggcctcatgttcgagtccctgtttttaatcatgagctggacacagccctctttagagcaactgtgaccacttgtggtgagaagtgcagcccacaccatccacgtgaggctcccacacgccatccacgtgaggctcccatgcagacatttagaaggcgttttcactgcagctcagaaaatggccccaggcccccatgggcacccccatgtcaccagggcctctggttgctgccggtacacagggataggcagccaggcctcgaaggtgctgggcatgggtttgggtgtctgcgttgggtagagacccggagcgcccttgctgggcgttgccctaacatcccggtaccctgtgcccctctgtgggccaggacgcctggtgctgccagctgggcgtaagctncaggagctgagggtggctgtnatttggaggatgagtaggagctcaccaggagggcgtggagccgaggcgtttaatatcatcaggagcaacacttggctcanaaggcaggcacactttccgtccctccagag

SEQ ID NO: 433306 - DNA, 384 bp, Homo Sapiens
  misc_feature (106)..(129): n is a, c, g, or t
cctttctttgtttcttttcttttcccccaaacaaccagattaaatgctgagcgcttttaaaatatcaaaacttgttcaagtcataaaacaacaaaagttttatttnnnnnnnnnnnnnnnnnnnnnnnntagtaaattcccagaaattcagtgtttagacgagggaatttaattcctattttgtccatgttggtgatgtactgtacttcccttccttttctctgcatcccccatcacctcatagaagactctttgttgatcattgtatgttaataatgtataaaatggctatcttgtaagcgtgctgtcctggtactagtgtagcgactttttttctcctctttcttctagtacatattgataggtataacataattaaggttt

SEQ ID NO: 433307 - DNA, 604 bp, Homo Sapiens
aaccttgtccttaaggcccgcaacctcctgtgcgtacttctcgttggccgcgcggagcttgtccacctccgcctggtaggccttcagggccttctcgtatttatcccgcagcaccccactctccctctggtgttccttgcttggcgagagcagccgctcccgtagccgcaggatctcggcggcgtctgggtggtccggaggtgggggacccgagtgcaacaggcactgctggagctcctcgatttcacctcggcgcagggtgagctcctcctccagctgcagcacgcgcgacttctcggccactgtggtcagcctgttgtccgctaattctcggagcagccgctcggcctgcgccttctccagtagcaggctctgttccagctccccaatgcgcgcgtgctccagctgcgtctgggtctccaggtctcccttggtgatggactcctcctccacgcggaactgcagatcctccaccttcctcctctcctcctccagctggttggacaggtccaccttctctttccgcacgctctccacgagcagccgggctcgctgcagcttctcctcggcttctgcaacatactgctcatgctgtgccttgagc

SEQ ID NO: 433308 - DNA, 1555 bp, Homo Sapiens
  misc_feature (46)..(55): n is a, c, g, or t
atttttaaactactgtttaatcagttgtaaagacacacaaattagnnnnnnnnnncatgtcctaaacatgttacatgtaagttaaaaacacctttaaaaaccagcaataagccaccagtgcagctctgacagactagaaatgagtggttatgaaatgagcacatctcagtttgactgacacagtgggagttttaatttaccgtacatcaggaactaatttatgaatctgttgaaaaataacacttctttaaaaaaatattttggaataataaaaacagaaagcacagaacaccacattctattctcaacttgggaaggcaaatgtaaatactaaattctggctgctggagttgggtctctcctcatgtttgggcgactgagggctcaactactactaggcagagatcaagacaacgtttaaaggaaggcaggaatgaaatcacacattttcactctgtatatggaagaatttctcacttcacctgaatgatttactttcattcctatggccttctatcgtgccccttctggttcagaggagcagtcacataaaagtgacaagatggacaagactggtttggaacacatttgtgttcaatgtttgattcctttttccttgtgataaagccagaggcaaatgtacttcattgataaatctgtgtgcgcagaaccaaaaatacataaaattgggaaagaggcatatttaaaaagtctgtcaaactctcaacatatattttcgtcctttaatgcaaaaggacaggggggaatattcaaattgatttcccaagaaaattaacctaaaatagtgaacgtgaaacagctaagactctggtgaaaggcagtcagtcacctttcccatttcaaacatgttactaagaaactgcctagtcattttacttatgttgctctgtaacttttggtttttcactgtagcatttccatttatttttagtgtgtgatttgataaaacatggctggagatggctatgaatcgctgagtaagcttcagacagcggttctgcatgggtcatcacactataatttacagaacatacagtcttagtgttgtatttttctttataaaagttgtacttaaagaagagttataatcagttttaaaggcaagacaaattagttggtgtaaaaactgtgtatttaggctgtgtttcacaaaatttcccagtcaatggcctatggaacgtgtcagttctttattgggatttgcataatgttaaaaaacctattaaaataaatattattttaaaacatacaaaaacattattcagcagcctaccaattaaaatgtaattggctgcaacctctgtacaagaaaagcctcaaaaagcagcttaagcattgattataagagctttcctacaaaataccgatgtggaaaatttcattttaaaatttctgttgtaatcagagtttctataaatagatttgactacttggtgttgcagaaaaacactgtagagaccctctatgttctaatctttcaaactcaaatttcagggtgtatttctctccttaaatgcaaatcttttgcttcagc

SEQ ID NO: 433309 - DNA, 447 bp, Homo Sapiens
  misc_feature (219)..(219): n is a, c, g, or t
  misc_feature (237)..(237): n is a, c, g, or t
  misc_feature (346)..(346): n is a, c, g, or t
  misc_feature (377)..(377): n is a, c, g, or t
  misc_feature (418)..(418): n is a, c, g, or t
  misc_feature (429)..(429): n is a, c, g, or t
aaaaaacatgtcctaaacatgttacatgtaagttaaaaacacctttaaaaaccagcaataagccaccagtgcagctctgacagactagaaatgagtggttatgaaatgagcacatctcagtttgactgacacagtgggagttttaatttaccgtacatcaggaactaatttatggaatctgttgaaaattaacacttctttaaaaaaatattttgggantaataaaaccaggaaagncacaggaacaccacattctattctcaacttggggaagggcaaatgttaaatccttaaattctgggctgctgggagttggggtctctcctccatgtttgggggcgactgnggggcttcaactactactaggggcggaggtnccaggacaacgttttaaagggagggccggggatggaattcnccacattttcnccccgttttttggggggg

SEQ ID NO: 433310 - DNA, 411 bp, Homo Sapiens
  misc_feature (19)..(19): n is a, c, g, or t
cctgtgttttccacaaaanttcccccagtccaatggcccctagggaaccgtgtccagttcctttcattggggatttggcataatgtttaaaaaccctattaaaataaatattattttaaaacatacaaaaacattattcagcagccctacccaattaaaatgtaattggctgcaacctctgtacaagaaaagcctcaaaaagcagcttaagcattgattataagagctttcctacaaaataccgatgtggaaaatttcattttaaaatttctgttgtaatcagagtttctataaatagatttgactacttggtgttgcagaaaaacactgtagagaccctctatgttctaatctttcaaactcaaatttcagggtgtatttctctccttaaatgcaaatcttttgcttcag

SEQ ID NO: 433311 - DNA, 1193 bp, Homo Sapiens
  misc_feature (538)..(550): n is a, c, g, or t
tatttcttttttgttcttttgttgcttatattttgttctccagcagtttcacatgtttatttttggcaggaaggaaatcattgcaaaccttttgattgacaatactcgcccctggaaacgtgcacattccgcatgtagcatttcctaagtaatgctggattgtttatcacattcaaatgtccagcagaaatccatgactacccagacaccagcatctccactacccggggtgggggagggtgtgtcagtctgcagagaagctcctgggagaatggaacaggaacagacatgatcaaagttacagtacagtaggaacagaggcagccagccaattttgcacagttaactgcaagtacgtcaagccattcactcttctcgaaccctggcatgccaactgtccagcacagcacctttaaaagcagaggcacaaacgtaggattgtttgaccatagggctgtgtggttctggattttttattagaaagccatctttaaaaatacagggttgtaaaatgttgccaggttacagacttacaggnnnnnnnnnnnnnaacaccaaaagttcaaatgctgcaaccatgacaagtcagcatcattagggcatcctcgtgtccccagagacatctcatcaaaattgcaccacgtcaaaggagcttcctcaccatcaactgtggcaggtggcattcctttttcagtatgcaaatgcattatttacaaacagctaatgcatggaaccacagaccaacacgtaggattccagaacaaatggaagacagagcattaacaacattgggagtgcctgtgcacttccactggaggcctggccagagaagtaataacatcatagtgggctgcagtccaccaacccaaggtgtcctgtcccagagctcaatgtcaaaaatacttctccagaagactacatttaaacctggtacagaaaggagcatggaaactcaggaggtcagggttctcttttggctaaagagttgggggtattttggtaacatgggaagtatatggcacagagaagtggctaacaggtttcattaggtttcaaagcccacaatttaatacatggtaataattaaaaaccatacccgtaattaccttaaaaaacataaaccccaacattcgtctcatttcttggccttatgttagaattctattgcttcatttacatgtagatgattaaaa

SEQ ID NO: 433312 - DNA, 1527 bp, Homo Sapiens
ccccaatttgaaacttggaggtcccccaccccccaaactggggccgggccaaaagtgggggaagaactccctgcacccttaagcttttccccttccaaccttccgtttcaaccttgaccccaaggccaggggccaacatgagagctgcaggggccctgccctgccagggcggataaacgcccaaggctgcctgctgaaaggcgactgactcgtgatgcctttgggaaagacgagggaatgaggaagaaagggggaaatagagagaaaaccctaaggagcctcaggccccactggcagctctggaataaactggaagggaaagaggctgggcaactgcctctttgagggagctgcaggtggggcccgaatgaaataaagtgacgcttgaaatgctgtgttcccaaccacgactgccccatcggccctgaatgaactgtcatgggtgacaggggggcctggtgggccacgcactcctcttaccaggaccagatgacgcccaggtgacggggaagcagctctggacaatgattccagaagccacattacatttgactaagtataatacataaaaacccaactgaccaaaataaacatcttctcagtgacaacctggtcggatgctgcgctctggtgggataagtgtccttgggtagtgccaggagttccgaggccactatgggggcaggagcctttctgtccttggaggaagagttctggaggactcaccctctcttctgaccccccttcccttcctggggaagagtcagaagtgaagctgggggggtcatcagcagagcaggtggaagggatcagggatcagggattgggctgatgggagtttggttgcaggacttgcttttacagcataaggaaatggacacatatatgctagaaagtccaactatgagactctacaaacagaacggggcaaactccctcacttctaaccattccagaagagacaaacacggttttttcttaagctactgattggaactgtcaactatggttcctgatcactaaagactggcaaggaagtgctagacagtttctatgatgtttcactccttcatgattacaccatagtaaggaagccagggacaataactgaaatacacaagacaacacacacttgacagttcatggcagcagctcacatgggacatgcctgtgggtgtttctggaagcataagactgctgtctcatttgctactttgataaggtacttctcagttggacagatttagatataagagacatctctgtaaacacagaaaaggatataccaatatgatgaagatatgcagctagataaggacttcctgaacagaggttaaaaagatgggatcccacatgaaaactgatcaattaaaaacccacagcaagcccatgcctctaagcccctacaccacagctatggaccagacagacagtgaaatgtgtggtgttctggccccctgtctgcatcgagcaaaagcaaaacattgccattcaagaagaacatcccgggaattccggaccggtcca

SEQ ID NO: 433313 - DNA, 651 bp, Homo Sapiens
gcaagttgcagccccaagaaaataatttaagtattcagctaatctgtgtccatgcaaaaaaagtttctttaatttcattcagtacagtgtagccacagaattttgtttttcagagtccaacacatcttagcattagtaaatgacgtgcccatggagctacaaagtctgccactcttcctgctggactgactgctctgattcccgcccagaggagggctgatgattgttcctgaccacttctttggtctcctgcttttcaccttatgcttcctaggattacactcctcacctgtaacaccgcttcatggctgtatagctccatttctgtggcatatcagggctttggggttagataaatgaagaaaaaggaatgataaaaatataaaggtgccattgaaaagggcttctgttgcatgaaactgactgattctttgagattaatccatggcttcagattggaccagaactcgagtgtcattgaattccaaatctgatagttcttcacagctctgctctttcacctgagggccttctttagggcacaatgtgtgcaacttcctctgagaacacaggattgctttgtatccctagaaacaggctcagaagacacaacattaagcatgcagtgttaccagggtttgcaacctgtga

SEQ ID NO: 433314 - DNA, 907 bp, Homo Sapiens
  misc_feature (387)..(507): n is a, c, g, or t
  misc_feature (520)..(771): n is a, c, g, or t
  misc_feature (789)..(848): n is a, c, g, or t
caaaaagagtttgatttcccataatttgatgctgtgatttggtttcctcaggatgtgaactgtagaacattccagttactggccttgaatggttctgggaatataagaatccctgtctgtcttttcaaatagttttcatggaaccttgtcctgtttgaacttggctgaaaatggaagtaaagatgccctcttgggggcccagagatgacagatgtggctccccctgctgcccccaccccttctccagactgtgggcggctccccttcctgctttagaatccctcagatggaggaggcagtacagtagtcactgtgccatcgtgtctggcactgtgctggcgtggtctgcaggatcccacttatgaactctccagattgggagctgtnnnnnnnnnnnnnnnnnnnnnnnnnnnnnnnnnnnnnnnnnnnnnnnnnnnnnnnnnnnnnnnnnnnnnnnnnnnnnnnnnnnnnnnnnnnnnnnnnnnnnnnnnnnnnnnnnnnnnnnnnctttgagatgaannnnnnnnnnnnnnnnnnnnnnnnnnnnnnnnnnnnnnnnnnnnnnnnnnnnnnnnnnnnnnnnnnnnnnnnnnnnnnnnnnnnnnnnnnnnnnnnnnnnnnnnnnnnnnnnnnnnnnnnnnnnnnnnnnnnnnnnnnnnnnnnnnnnnnnnnnnnnnnnnnnnnnnnnnnnnnnnnnnnnnnnnnnnnnnnnnnnnnnnnnnnnnnnnnnnnnnnnnnnnnnnnnnnnnnnnnnnnnnnnnnnnnnnnnnngtgtgagccatcatgccnnnnnnnnnnnnnnnnnnnnnnnnnnnnnnnnnnnnnnnnnnnnnnnnnnnnnnnnnnnnccattgggtgagtccttcaaaggtggagacctttccctgctggccagagagaggctgcc

SEQ ID NO: 433315 - DNA, 1085 bp, Homo Sapiens
  misc_feature (655)..(778): n is a, c, g, or t
tgtgaacatttaatttcagagggaatccacacttctgcaaggttgaagtttcctcatatccaaattctccattccccagtggaaaacaaggtggggagggttgggaggtttttgtcctcagtagcctgctttttcccacgtaggactccactttatactacttcacactgactcgcagtcatttttaaggcatatgactcccgaccagggcacagatctcacacatgcttccaacatcagtgtaatgccactgtgtcataaaggtcaagattaggggtttcatgacatatgaaaaactttgggaaaataaatttttcaagaggtaatacttttggcaatttaattttaaaacaacttcttcaccagctattactatgcaaaaataatcattatggtcccagcatttaatttatttgcaggaaaaaaacaaattaaatattgatttttttatttactttgagatgtaatcctaaagcaatgtattaatttaaaaaattaccacagcagaaaagatgcctctatgtgggtatggtccttccaaaagtcagcttaaaagtcaagcatttattctaagcattctgctactactgttgtgctcaaacttttggtataacttagagacacttatgagccacataaaaactaagtcctttgnnnnnnnnnnnnnnnnnnnnnnnnnnnnnnnnnnnnnnnnnnnnnnnnnnnnnnnnnnnnnnnnnnnnnnnnnnnnnnnnnnnnnnnnnnnnnnnnnnnnnnnnnnnnnnnnnnnnnnnnnnnnaacatgtcttatttctttataactgcacttcttatgtgaccccaaactcagcttaagcatccttttcattgatcaaacttggatcctaaggactatttccaaatatttaaatttattcttaaaggccaagattgactgccattgggaatattcaaaagaatgggggtactggccattcaagcagctcacacaaggagggccccacatgtttatagcacaggctgtatcaacggaataagtacatgggctcacaaggtgactgaaggacccatcatccaagaggatgtgtcagttctgatgtgttttt

SEQ ID NO: 433316 - DNA, 515 bp, Homo Sapiens
  misc_feature (11)..(11): n is a, c, g, or t
  misc_feature (32)..(32): n is a, c, g, or t
  misc_feature (64)..(64): n is a, c, g, or t
  misc_feature (91)..(91): n is a, c, g, or t
ttttggccaangtaaaaggccggtgaaagaangtggttttaaaaattaaaaggcccaaaagtantacccccctggaaaaaaaatttatttnccccccaaagtttttcccatatgtccatgaaaaccccccttatcctggaccctttatgaacacagtggccattaacactgatgttgggaaagccatgtgtgagatctgtgcccctggtcgggagtcatatgcccttaaaaatgactgcgagtcagtgtgaagtagtataaagtggagtccctacgtgggaaaaagcaggctactgaggacaaaaacctcccaaccctccccaccttgttttccactgggaatgagaatttgatatgagaaacttcaaccttgcagaagtgtggatttccctctgaaatttaaatgtttcacacatttttgtaccttttgtaaccttgtggtatttactttcacatggctttttaaaaaattattttaatgaacttctatcacactatatgaatgatatggggga

SEQ ID NO: 433317 - DNA, 2020 bp, Homo Sapiens
agttgaacagggatggtttatttcattatcttaaaaggtttcttttaatctactatagcacaacagttttttaacttaaattcatggccaagaggatgaggtgcaaggggcttcctaaaaataggtattttctactataaaatggactcttgtttttactttggcttgttctccctgtcccagtgggatgaccctcactgagagtagcagcaagggaacctgagggttttgtcacactttgttcttccagggttgctatcagcactggatcttgttgaagtcaatcctcagttggccacctcagaggaagaggcgaagactacagctaacctggcagtagatgtgattgcttcaagctttggtcagacaagagaaggagggcatattgtctatgaccaacttcctactcccagttcaccagatgaatcagaaaatcaagcacgtgtgagaatttaggagacactgtgcactgacatgtttcacaacaggcattccagaattatgaggcattgaggggatagatgaatactaaatggttgtctgggtcaatactgccttaatgagaacatttacacattctcacaattgtaaagtttcccctctattttggtgaccaatactactgtaaatgtatttggttttttgcagttcacagggtattaatatgctacagtactatgtaaatttaaagaagtcataaacagcatttattaccttggtatatcatactggtcttgttgctgttgttccttcacatttaagtggtttttcatctttcctccctcctcccacagcctggctatacagtgcatccttgaactgtcagcccacagcagcaatatgcttattctatccacatccctaacatcatgcattcacaaggtcaaagttctggtccacaaacccttccctatagaagttcaatggctgcgaaagaatttgtagtaaaccaggcctcccaggatggcgagctccagtaagatgataatggaaagcagcagcttgttggttgtcacttttctggacattgaacggagaatcttccgacttttgctcaagttttcacttgtgtttaccagtctactcttggtacgttctaactggtctcgttgttcccccagctcttctatgatttctgagccaatctggtcagtctctgtggcaatccgatgagaacgttcaatactttgggtggcccggttcaggctttcagtgccctgcagaagcattgccctttgagactgtagccgattcatatgctcattctctacagcatatatgccatatttcatgtctcctcggcctccaggtgtggctgtcaaaggtgtgcttctcacctcccgatggagtttagcaaggtccttccggtagtttcgaagcttagacatcatggggtttcggaaagacaggggtgcataacgtagctcctcctccatctctgccagcgtttcatttgcttcctgttgcttttcatcaaaatccctgatcaatttcttcttttcttcggtccccgccgtccccagcagccgctcgggcaccccttgtaggtcttcatggaggccgcggaagatctcgtgcagcttctcgaaatgctccgaggaggcggcggaggaggccatggcgcaggccgcgctggagcagcggccaccgagattcggggccctgggccctttcctagcccggcggtcagccgcccagcccagtggccataacggcgaccgccgcaccaccgccgcccaggacgaggctcttccggagccgcggcagggtcctctcgagccggaacgcccaccttctccagccagtgattgctggagcgccggcgcgaaagcctgacgagaagtcgggagactgcgcggcctaggcgactcctgagggagcggtgccgcgccggggcgatcggcagtcgcggaacccgagaagtgccgggtccgggttggggaaaggccgcagcgaaaggggcctaggggacctgcgggactggcagcgcggccgccttcctcccgggccccgccccgct

SEQ ID NO: 433318 - DNA, 2848 bp, Homo Sapiens
gcctactttatttcattttttcaaataaaatttaaatctgtacaaagtatactgttacagtatatattttgtaagaatcaatgcctaaaataatcacaatacttcaataagcagtacagcagacctcgctagttttcagctttgatattgaacaaactcaagccggctgatgcacaacacgtttgcttggtttccacatggtgatttcccagcactgagatgggagaacatgacagcaaatatggtaatattacagcccgacacactgcgtttcttcatgtgataataactgcacatatttaatacagaatgctcaaatttactttttaaattgcatttgcttacttcttagttggcaaaattcagcattcttaaatggggtccccaaacagtgcaaattaatgatattctaactgtatattggcacatctccaataaggattaacttgtaaactcaaagaatatcaacaacttagtcctaaattttaactaatatacatctggtccatttaaccaaagtcattttggaaagatattaaagaacaattctatttctgaaaggatattgttttgaccattctttagagaagataaatttttaaattgtcattaaaatgtttcactataaaaattttacaaacttgattagaaatttcaagattatgattcacagcagacaaatacaaactgtatattccaacaatacctattcttagactttcaaacagagcacaaccatgtcagctgtgttaactaaaattctgaacagtgtactaaatttataagtggtgctgggtctagcaagtgtaaatacacagtatatttcaatgaaaagaattgtcttctttatactttatttgttttcccataaggaaacattaatgtttacattctttaataaagttaatcttacatcagaatataacttaatactgtcagcaacagggaccacacacagtaaataagaagcacatttaaaataagtctgatttcacatagattaacatttgttggttaataaaatatcgacagtattacaatcttacaatatttacagtaagaaaaatctagagtaatatatacctttcacagcaggattcctttttttaaaatttcttccagtttgggattgtgtatacacaaaaagctcaaaataaagcaactctgcaatataatcttaaaataatggctactgggggaaattctatcacaaccattgaaaataatggtgacttctcacggagtctgtggcatctgagaacccagttaattaaccaaagtcttgctcatattagcctcagttacccagattaaagcagaactccggccttccctgactgctgaaaacccaacagattttctcaacatgctataaggaaagaggaaaaattggtttcagctcacacctcatggctggaagcctctggaagcctccagccagtgcacactccccaacttatgctaaaagagggccaatttcatccccacagcatcacaagagtccaccctccaaccacacagtgctctgacaccaagctcacccattcctcaactcttgtgccttaggataacacatgaacttagcccacataatacacaccagcgtcttagagacttgagaccagggcaaagaaacagactagtgtagtttgcactgagatcagtaagaaaaatgggaagtgatgcacatttccaattagaatgacaagaagaagacccacatccctaaactggaatttggccagggcatcagagttagcacccccctctctgagtacccgctagcgattaggatgtgtgctctgggccctccctctaaaagagagcatcctacagtaagtaacacagtatgggacattagttcagtgacgactgcccaagaaagcagatacaattcttgaatctggggctgtctacggcacctgaggtcaatcatccaagctgtgccctgtcccaaccctgcttactttcagatatctgatgggcacagagcactcagggatatggctgctggctactttggactctagatctcacaggtaatcaacaggtatctgggattgaattagcaaactgtaccatagctccttaaacagacattgtcaagtctgaaatcatgtcaagcatgaatcttcactgtcaggtcagtaatcaaagtgggagtcttcccacatcagccaaggttattttgtcagaaccttagaggagttggacagtttttcatgttgcaagtgattggtttacttatttcagtcaagctggattggcaaaccagactgatttatttagtgagctttgtttttttgattcttatgtgtgtgctaacccaaagctgttgtatttgggctaaatacactgacagagaaaattcaaacgacaaaagttttcagcaaacttctgtggcattttttctttttggaagtaaatgcaagatctaaaggtatttctacccaacaacgtctgtttaagtgtttaatgttatttcctttttggtcctatacagaatgctatgacttctatataggtctgaatgctgctccatgtagattccttctgtatatctaaaaatatatacttttcagtagttcaatacatggttaatcttcccacagaggaagatttttgtaatcacatgttgcaaagtagaaaacatctcctttctaagaaaggaaatatactttcctattgtacacttttgaataagcccaaaggcatgcaccaaaaatcattaataaaactaatacatgcaataaaatggtgtagagttagacttaaagtgctgcttctcaattttttttaatttgaagaagacattttgtcagttgtagactcaaaaatctttcccgct

SEQ ID NO: 433319 - DNA, 1746 bp, Homo Sapiens
  misc_feature (210)..(222): n is a, c, g, or t
  misc_feature (1425)..(1456): n is a, c, g, or t
  misc_feature (1644)..(1652): n is a, c, g, or t
taccttaggcaatagtatatgtatttgtgaccagtaatttttggttgccatacagggatttaaggattgggagaaaggcccaattacacggagcttttttatttgttgttataaagtctaaaaagaataaaagcacaaaagtaacagcaacatagataatgcgaacacgtgttgttacacaaactatagtgtgaaacatattagtatttnnnnnnnnnnnnnttgttaatgggaaaatcaatattgtggcccacacacaaaaagtcattgccagatcaactggataatgcttgcttgttcaataactgagaaaaaaatttaccattttattaactaaagtatcacaaataattcactttgtgatatgtaaagttcagcaaatcaacagtcacattgagtaatttttatattatgtgaattaacttaaaatgtgcgcagacaccctggaaaaggtatcttggcaggtatacataatttacattttgagagatttgggttttgtatacacaatattacagaaactaggcatgtaaatgcagtttatttaaattacagtatgtaacaaaagttgatcttaaaacctggaataatgtcaacatgatctttagatgagcagtttaacatttgttccaccattaaagaggggcatggaatagggcctcgtcctaacatgtcccaaagggggagaacagtgggtggtgatttgaatgaggaactattgctttcagtaccaaaataagcagatagagatagagaccgattcatcttggcaacatgtgtttatttgttggtcagtgcaggttctgataggtctattacttctctataataagacagtgtaaaaataaactatgttatcagctctttagtcttgcagccagcttgcttgtggttagtggcatgtggcttggagtatctttaagaaagggaataacatctggccctcaccaactggctgccaaagttcaacaaaccgaagtcacgagtttcgactggttatcgtctgccagcggtttccttgactctcctttgagctagtgttttgcctggcactgagcacagaggtaataccaactgtaggcccagggaaagtgccatgccaaaggaatggactcacggaattttgcggtatcatcaaatggaagacaaattaatggccaaaccaccatttttacattttctaaaatatggggcagcctcagcaggccacctgtagtatcctgtcttgaaatttatctagagtaatgctcattcatctcatgatggaaaaactgaaagcacacggaagtaaagcgccttaatattcaattgacttcaagttggattggatcatttcaaatacaaagattgacctgcaaaaggttttggaacagaaggtccaaaaacttggttccaacatcaggggtgtgtgactggaaaagcgcnnnnnnnnnnnnnnnnnnnnnnnnnnnnnnnnggagaaactgctgcattatgaattgtaaccactttgaagaaattgtccttcaatgacgaagttctagcaaagatagaaaatataaacacagctctgctggttcagatgcatccaaataaaggttgatttaaaaaaggtcatacttttataattattccacagaaatagtattattaaatcacaaaagnnnnnnnnnctttaactttctagcactgaagtggcacaaaggctgcctagtagaccagccacttttttttcttaaaatattgtgcttataaactatctgtaca

SEQ ID NO: 433320 - DNA, 925 bp, Homo Sapiens
tttttttctattgggtacatctctggaatataaaaataccaatatttagagaggggctcataaactactatacaatattaaggactgagaatacctttctctaagctgttctgtttacaataatttaggaaaagtgtttaataatccaggcttaactacattagcaaacttgtatatctggacaacgacctggggtactgtacatgattctaattagtggaattttcctgagccatcgagtttaagttatacacatctaaaaagaggggcacatgggggaggagcgagaagggtttgtgctctattaacttgggactttaatagtgcacgtctgcaacccggacaagatacaacagcagatacaaaatggtctccattttgtcatgccaaattctcatgttacacaggttttccctttactttgtaattaacattaattgttaattgttaattgtgtgccttactgatccagtagattaagtaaccgtgtctcaggagtccctaagaacattgctggaaaagcactttaaaatcactgcaaatatttttcatattaaaaaattcttaatctttttgatgcttatatacaagttatttcttgtgctataaatgttgtgatccactgcttgatgtctttcctttccttttttcttgaaaaatacactaaaagacaagagcggttctgctattttctaatgaagacattactcacacttaaatatccagtacttcagttacaaattcaaacagtaaagtgcacccatttatagacatgatgtgatagaaacccattagtgcaagaatcctgggccaatggaacatacaacttggtgagaaacctattaaactgaagtttgtcacctctgtcctccatttcagggtggtatgaattgagtaagtttcatctgaaacatttcctcccacc

SEQ ID NO: 433321 - DNA, 864 bp, Homo Sapiens
tattctattaatttgatccagtcattcctcttcttctcatcatatttagtttccctggcagcttcaccaagtaagttaattgaatcagaagtgccattaccactccagttctggtttcatataaaaaatgcactcctatgtcctttagaaacaaatctgctacacctgttgagaactatgggtgtactgaaatgaacaactcacgtatttcccacaggatggtgatggaaacctttgccttttggtttttcaaatgctctttttagtttagtagggcccatgtctgcaacgggcagtaccaaaagtattatctgttgagtactcatttttttaaaaaataagaaattctaagaaggtctgttttttgagctagaacacaatcatcatcaacaagatcaagaaagagaaatcttgtgtaattttcaaattattttctttcatgtaattttacatgatgcatgttgaaaaagcaaaggcttactccaaatgtgtaatattctagaaacataatgggaaacaagctattccctacatctgcaataactttcaaaatagctattttcccaatctcctttctgtgagggaatgtgtgttactatagttccaacatttaaaagagccccagctaagtagtgtggaagttcaatggtatcacattcttcacactaaacacacctataaaaccagtggagaaaagaaactccaacttcaaccactggcaaattaataagagttaatataaataaattagctcacactttctttgaaattgggtgtaagcaggctatgtgtatgaaagagaaaaatcacagggttttaaaatagatatagtcactaattatctctttataacctgcagaggcc

SEQ ID NO: 433322 - DNA, 1048 bp, Homo Sapiens
ggcctgggtggcgaattcggcacgaggctgagaagctcagcggtagctttttgggaagcaggacgttctcaccaggagagcgtcctctcgagatttctgctccctccattcagggcgtttgggagccaccccttcattttttaaaaaaagtatttctctgtgaccgacggccggggccttctgacggtctgaggtcttgcttgggccagtcacctcctgtcacggtccgcggaggggggaaggataagagggcgaggagctcatcgctcgccacccccgtgggcttcttgggcgcaggtcggagctgggtgggccggctccccggcccctggcttgggcgaccatgtccgcatccgcccagcagctggcggaggagctgcagatcttcggcctagactgcgaggaggctctaattgagaaattggtagagctttgtgttcagtatggacagaatgaggagggaatggtaggcgagcttatagccttctgcaccagcacacataaagttggccttacctcagagatcctgaactcttttgagcatgagtttctgagcaaaagattatcgaaagccaggcatagtacctgcaaggacagtggccatgcaggagctagagacattgtttccattcaagagctaattgaagtggaagaagaagaggaaatcctcttgaactcttacaccacaccttcaaagggttctcagaagcgagctatctctaccccagaaacccccctaacaaaaaggagtgtgtcaactcgtagcccccatcagctactctcaccgtcaagtttctctccaagtgctactccctcccagaaatacaactcacgaagtaaccgaaggagaagtggttacctccttcggcttagcacagggaagtatctttggttctggggaaaggaggaccttgggaaacctcagccctgaaagggccttgggaatgtccaaaaggcacttacctgggaagcttacaaatcctgggtttcagaaactccccgaacattcgaaaaaaattcttgacctgtaaggaaatgaagaaatttg

SEQ ID NO: 433323 - DNA, 797 bp, Homo Sapiens
  misc_feature (307)..(405): n is a, c, g, or t
atattgtgaacatcattgtttattccctgaaaaattttacagacactacatgctcattgtggaaaattagaagtttacagatatgcaaaaagaaaatataattgctccaaatctcaccctccccagagataaatgcttttacactttggcaagtatcctttcagactctttaatgcacacatgcatacatatatttttaaaaagggatcgtactataaatattcctctataacttcctttttcatctaacaatatagcttgtacatttcaataaatacacatatggtgcttattcttaactggtacnnnnnnnnnnnnnnnnnnnnnnnnnnnnnnnnnnnnnnnnnnnnnnnnnnnnnnnnnnnnnnnnnnnnnnnnnnnnnnnnnnnnnnnnnnnnnnnnnnnctttcttgcatatactttttgaataatgaataaatacatcttagctcattttattttctgacccatttaaaggagaatttccctaaagtggaattactaggcatgcaggaaaactatattaccaaaatattttttcagaaaggtggaatcaatttacattcctgttgactctgtaagaggtttatttctgtacttcctttttgtccctgggaattttaattctttataccgtttgcctttctgacatataaaaaggaatatatcatattaacttgcattttttattactagtatattaaaacactttttcatatttattattagtaggttattttagtttattgtgcattgccccggccgtaatggacactctgcgttgataccactgcccc

SEQ ID NO: 433324 - DNA, 1039 bp, Homo Sapiens
  misc_feature (109)..(120): n is a, c, g, or t
  misc_feature (1027)..(1027): n is a, c, g, or t
cttttatgtgtggcacggggcgggacagggcgaaccgggggggcacaacccggagaacccgggccgggggaattaaatggaggggggttcccttggttaaagcccttgnnnnnnnnnnnngaagtgcaccctttccggatgtcctccaggtttgcccaataggatttttctgcttgccattcagttctggggttggtggatctggctggaaaaagccagaaaattcttttaaaccgagttgttcaagggggttgcaacagctttccgtagggaaagacaatggccagcaccatatatagcaaaaatcctgactattctgactttcaccagcaaaatacagatttgatatatcagactggccctaaatctacgtatatttcatcagcaggtgataacattcgaaatcaaaaagcccccatcttagctggcactgcaaatgtgaaagtaggatctcggacaccagtagaggcctctcatcctgttgaaaatgcatctgttcctaggccttcatcccattttgtgcgaagaaaaaagtcagaacctgatgatgagctgctgtttgattttcttaatagttcacagaaggagcctaccgggagggtggaaatcagaaaggaaaaagaagctgccagtaactcagattctagccatgaaggtcaagaggaatcttcaaaggaaaatgtgtcatcaaatgctgcctgccctgaccacaccccaacacctaatgatgatggcaaatcacatgaactgtctaaccttcgactggagaatcagctgctgaggaatgaagttcagtctttaaatcaagaaatggcctcgttactccaaagatccaaagagactcaagaagaattaaacaaagcaagagcaagagttgaaaagtggaatgctgaccattcaaagagtgatcgaatgactcgaggactccgagcccaagtagatgacctgactgaagctgtggctgcaaaggattccagctggctgactgaaagtgagactccaggaagctgaccagcgactgagtacncgcacagaagca

SEQ ID NO: 433325 - DNA, 2404 bp, Homo Sapiens
ttttttgattagagaaccccctttattgtgcacccctggtgtaggcacttgacacccaggcttccctgggcccctcgaggcaagaggtcaccccctttccagggcagagccacacccccaactcagctctgggcagggtcccgtctccgaggttactggatcagctccatcctgggacaaggaaagaggactgacccacagaccagagcacctcagatctccggctgcagggccacaacggtgggcagaggtagagagcgggccagggtgcagggcagaagtgtccgagtccaagtccacatccaggtgtgctgcctgccctagcgtcctcaaggccaaaccatccacccacccacccccagcctcagggagctgctgtgggtcccacatccaaggagaaagcccctgcccatgctcatgtggttgccctttggcccactggagccgccagtctgaaacacccctcaaggcatcaggaaccgaggagagggaaggcaacagcacacccaccccggctccagcttcttgccagatatggctgctggccttgggcgcccacagattcacacgcaccacatcacatgtgccctgacatatgaacacggggagtgcacgctcatccacacgtgcccacacacacccacgggtgaacacaagactccaggcagcttttctcatttgacacctggtggttgtccctgcccagcctggtggcacactggctctgcctctcctcttagacctgtgggtctcagcagtgaccaagacagccccctacctccaggctgagcagctctaaccactgagacctctccctttgagtctcccggggtcccggccccagcgcgtcctccagaaagccctgggacagaagagagcccaaggctgacactcccttgggtcggcctgggacagacaggggaactccgcaggggaacccctttgtcatctatgaccccacagtcatgttccagtgtagagtgcagtagccagaagaggacaggaggaccaaggtaggcccagggacacttgtgcccagactcctacacatggcaagcacatgtacacacatgtttgtgcatgcatacatgcgtgtagattctcctgaaggcgaggggtcctaggccagaattctgtgaccataggagtgtgggaggtgcctctcgaggaaaccaggccagctgtggaagggtgcaggcccaagcccctccacaggctctcaggggctgctgggcagcacctcactgctcaatctccaggctgccaggtggcttcggtggctctgggggcttgaagctgaggacttcctggtaagtgagctccttccactcctccagcgtgcgctccttggcctcaacgctttcatcatatggttcggcctgtggctcatccttcgggggtcgtggtacttggctgaagtagggcgtgggccagtgcctcagcttgcactgaccctctggtcactgtccagcaccagcatccttccaaggaggtctaatggccagggggttggctccacggaagatgctgctcaggtccttctggggcatggggggcagggactggatatatgtccgggcgtgttccgaggagatttttgccagaacctcagggctgggtgtgcccaccacttccatgatgcgcttcagctggtcaatgtagtcgcttcccgggaagagggccttgccctggagcagctcagccatgatgcagcccacggaccagatatccactgtttggttgtaatgcatccagttgagcatgatctcaggtgcccggtaccagcgcgtggccacatagccggtcatctcctcgtccgcctggcgcgccagcccgaaatccaggatcctgagctcacagtcctcgttcacagccacgttgctgggcttcaggtcccggtggatgatcccggccgagtggatgtacttcagcccgcgcagcagctggtaaaccaggaattgaacgtgctcgtcgctcagcgcctggcacttgacgatgttgttcaggtcggcgcccatcagggtggtcaccaagtacacttcgctgaagtcctcgatggacgtggccggcgtgaagacgtccagaagcccgatgacgttctcgtgcttcaggtgcttgagcagccgcagctcccggtacgttctgcgcgcgtggatcagcgactggaaggggcgcgacagcttcttcaccgccaccttctggcgcagccgggcgtcgtaggccgaacacgacggagccgtaggcgccggagcccaccgggcgcagcccctgcaaccgctgcggcacctcccacacggtcttgttcagctcctgccggtagaagccggcgcgagggcccacactgtccggagcagccaccgctccgcccgggcaccagcccacgcgccccagcgcccgcgcccga

SEQ ID NO: 433326 - DNA, 1686 bp, Homo Sapiens
  misc_feature (439)..(439): n is a, c, g, or t
atttgggtgtgtaaatgttggttcttccactactggattttgtaatctaggataaatcactttttttggggactttgattttgctccattacgttttcattttttctgagcactgactgttctgaaagctgcacaaaacgtagaaagaagacatagcgcctgccagggaataggaaatgagggcacttacacattaatgtgaattagtaattgtggtatagaaatgttttatagtgaaagattcaaatttgcttttcaagaaaaatgccaaaagctatttaaataattcgaggttacatcgtaggttttgatttttctcaatttaagatacagaaatacagcaagccttaatataaagtttcctaaagtttcttcaagtattttttaaggtggagaaatgcaggaattgtataaccagaattgtttctgcctttagctnttcagaacttgagatgtggcagcactggactgggtttttttaaatgttaggactaggaatgtttgctcttgttaattatgaattaattgattattaagtttagaatgcatttttacaagtatctaactatcaacttgtgtttagtaacttgagtgtatgcacaagtttgatcaacagccaaatagagttctgaatttcttttaaagtgatgattatattattttgtgaaacttgtgtttgaaaatgtttatttctgtttatggtgtaatcattctgaggtgaggcttttcttatttcctttgcattttgctagagctgtgctgagttcagcatttgcttatttaaccactacataatgacagaccagttattaggtattagcatgtgtggtaataataatagtggaacttcacacttacatcaattcagtgcaggggcatagaataaaatattaaatattggcagatgtatgaaaagaagtgtgagttaaaaatattgaatattggcaggtgtgaaaacaagtgtcaaaattcctcatatagagaaaataattttgagtttagagtattatcttttaattaagtgtagtctaaacttaactttctgtaaaggcactttgtggtttttccaaagatgttctagatctatttggttgctctatagtcaaacagctcttttgaagacaactgtcttattttattacaaattggcttgacatatttatactgtaacattgtaatattgctgtgctgtacattttggcccttacgaaatacgtctttttcagaactgttaaagttttgatgtacatcgagctgaattctgtttttcccagtttcaaaaccttcaagtgatatgtggaaaaaagtgaatgagacctctgatacggggtttttcaaaaccttgttccccccccaaatgttgacagttctttcctgtttttcctaaaccaagttaaaattacatggactattttttgcggtttaaggttgattttttaaaaatacctcccgaatttgtaccaaaagggaatgtttccctttactaaaccaccagaaagacaattggccaatatccggttgggcaattttgacaaccatttaaaggggttggttttaaaaccctttaaaaagggattccccgggctgcaacacaattgtgaaaaagcattctttcacacctctttaaaaaaatggtttccacctttaccccctcccaaaatatttttgtttgcgacctttatactt

SEQ ID NO: 433327 - DNA, 640 bp, Homo Sapiens
  misc_feature (541)..(570): n is a, c, g, or t
gcgtttttaagagctttttattggcaacagtgcagaaccaaggggagaggggacggcccattgccaatctgtcccagccccccggggtcagatgcaaaatacaaaaagagaaccacaagtacagcatggggtaggggggtcggggattcattgaattgtggttggcaggagcaagccctgctcacactctcacactcgcacccagaattgtcaaagatacagattgtaaaaatctacgatccctcagtctcactcacaaaaaataaaatctcatgtccccaacgaacccagagtcagacgacagctggagcattggcagggacagtcagaaaggagacaagtgaaaacggtcagatggacacaggcggaggagaaaagacagagggagagagaccatcgggaacaatcagaggggccgagacgatcagaaaagggtcagcccgagactaggctgatgccacgagtttctagaacgcagtttccaattcaacggctcgctttgagggccaacgtgacctaggccgaggctgcagaagcgctnnnnnnnnnnnnnnnnnnnnnnnnnnnnnntccatatataatatatttacttatacataatagatataacttgcctttcggaaaccaggaaaggggataa

SEQ ID NO: 433328 - DNA, 1378 bp, Homo Sapiens
ccaccgtggtgcttggacctttttgcgcaggggggagttccccccaggtcaagagttattccggggggaccaccaagttcccggcaaggcggcaaaatggggacccggttttcagccgggagggatccttctcccacgtaagattggggtggagggacatcccctgtttttgcagctggcaaccaaaggcctcttccacaagggcctgcaaggttcccccaccagtgggcgcctctggctctcattgctcaccagccgctggaggtctcagtctgttggattctgggagcttctccaggtccatgcagggctggagtgacaggtgacctgtgtcaggttgaactgtgtgatcagctccggcagggtcctgcccatttggttctctgcaaaacctgagccacagttggtgatgatgtccaacaaggaatcgggcaggaagccatcagcagcaaagtgctccaggaaaacgtccccttgcctcttggagagcttgctgccatccctgttgaggagcaggggcaggtgggcgaagtggggtggctgccagcccagggcctggtagaggagcaggtgcttggcagtggagacgagccactcagagcctcgcagcacgtggctgatgcccatgtggtggtcgtccaccacgcaggccaggtggtatgtggggaagccgtcgctcttcatgatgactgggtctccctccacgctggccacttcatgcctattccagccatacaccaggtcctggaaggctggcaccacctgctccaggcggaagcggatcgcaggcttggggtccttggccagcttctgggccacctgctcctggctcatgttcctgcaccgattgtcataccggggcgtctggtggttccgcaaggcctccttcttcaggagctccagccgctggggtgagcagaaacaggggtaagcagctccggtcttcagcagcgcttctgtggcctgggcatacagctccaaccgctgagattgctggtagggcccagcaggaccgccccggcgggggctctcatcaggcgggatgcctgcccactccagcatgtcctcaatattctctgctgccccaggcacaacgcgagtctgatctgtgtcctctagcctcaggatgaagctcccctggtacttcttagcaaagatgtagttgtacaaggcagtgcggaggccacccaggtgcaagaagcctgtggggctgggagcgaaccgcactcgcaccgcaaccccggcatcagtgcccaggttggcctcgcgccgtcctacggggcggccagaggccgccgaaggcctctcgcgctgcagcagtctcctcaggagcgccgccatgtgggcctcgtccgaattcgccacccaggcctcgctc

SEQ ID NO: 433329 - DNA, 598 bp, Homo Sapiens
gtttcagatagctcattttgtagtacactgaccatattttccatttgtttaagttttactgtaagttggtcacagtgattattcttaagtttcagtaagtgttcacacaaacaaaatgtgtcttggattcttggtaggctagcagaatctttatactccattctaagttgttcaatcagcaacataaaattctcataaacagagtgagacaattcacaatcctctgaggctatttcagatggcttcattgagtcagcaaagtcagcctcaggatatatttggtttttgaccttgttcttttcattagctgttttatctgcaggcctgtcatgctcttcattttccttcctaggaatctgctgatttagtccatcatcatcattgccaacagtagtaccatcagttagggttcctgataattctgtgctattacttctgtgcttctccatttcttcttcaacctctttatgaagttgaacattttctttcttcaaagccaggaactcttcttctaatgtgttgacctcattcttaaacttttgcatgtcttgctgtaattcttcatggagatatacttctgatgttctgtcagaatctg

SEQ ID NO: 433330 - DNA, 1006 bp, Homo Sapiens
tgatcagaggatcccagttcgacggagactctctcagaggaaaattcctacacatggggcactgtagatcatttttcctattgggtatcgtgatttcaaggagaaaatttccttatgattactacagttacaagactgttatttcatagagtctcttatttggccattttggcagtctatctcaggcttgctctattaggtaagtttaaggtcagcctaagcttttccctgcctgtctttctacggaaggtttcttcctgcatagtgttcctcactcagtattattatcgattataaagtgacattgacttccacgtgaattctgtaactcattaacacagaactttgtttttagatcctgagttgtcaacaattccaaggggctctcaaagtgcaaacctttgcgttttttgagcgcctggaatcttcctcttgtagagtaatcttgtatgtctcacttctagaaaaaaggactgtacagtatatcccctgtatcgaaggatgagatactgctggctggtctcgagcccctgcagttgccccttgaagagtcagtttggcattctgcctcctgcacatcagacaggaaagcctttccagcaagcaggctcctcggggtccaggtatggcaagccctgctttggggaattccctacatgggtatcatgccgtctccttttttggtcttgaagaagctctcttatcgttccaaagatgtgtctcttggatttgcaggtcacagtgacaggatcaaaacccccaagacattccagaagaacaggcagaggcagggcccacagtggctgaaggactacaaaggccttaggatcctgggtgagaatccggcccttgttgtggtcaaacaatggaggcgtccggcggcagcagccttctgcgctgggtgcgcgaggggttcctcatcacctgagcgggatgctcgcctcctctgccggacgcagggcgccctccctctcctcagggacacctcacaggtgcgcctccgagc

SEQ ID NO: 433331 - DNA, 633 bp, Homo Sapiens
  misc_feature (49)..(85): n is a, c, g, or t
aatgatacgatcactatggggaactggagctcaccgcggtggcggccgnnnnnnnnnnnnnnnnnnnnnnnnnnnnnnnnnnnnnatcaggccaaatcggccgagctcgaattcgtcgagagcgggtgtccctgaggagagggaggtgggtgcgcggcgcccgcggcctggggcgctgactcccctcacttggaggcgcactgcgtccggcagaggaggcgagcatcccgctcaggtgatgaggaacccctcgcgcacccagcgcagaaggctgctgccgccggacgcctccattgtttgaccacaacaagggccggattctcacccaggtaaaccggctgccggcgctgtccacttccctctgactcccgcctccgcaggcgttctcaccccttccaggactcgactgcagttttttcactgtccccggcttctcatgaactccgtataccccctcccagacattttcccgtccggatccatctctccgccacatcacctctcatttcccccagaactcagctcctttgtgaaacctttcttgccgaactctaacaactaaatctccccgggagcctgctccgaactgaactgttctggttgctagattgcttacgggctgtcttattgcaa

SEQ ID NO: 433332 - DNA, 1238 bp, Homo Sapiens
  misc_feature (127)..(169): n is a, c, g, or t
  misc_feature (1184)..(1184): n is a, c, g, or t
  misc_feature (1192)..(1192): n is a, c, g, or t
ggattttgaattttctttttaataaaaaggcacctataaaacaggtcaatacagtacaggcagcacagagacccccggaacaagcctaaaaattgtttcaaaataaaaaccaagaagatgtcttcannnnnnnnnnnnnnnnnnnnnnnnnnnnnnnnnnnnnnnnnnnatggtacaaaatggctgggggtgtggccatggatggagggaagagtaggctggcctgtggcgtgggtgggaggagaggggacggagagggcactcggcccgctgcaatctgacccctctctcctcagggcaggaaacacagagtcagacagtttgggggggtcttgggccaggggtggagggctcaagggcacagggcccaggctgaggcagggcgggcaaagcgcctggcaggatgaagggcaagtggccccccaaacacagaggccctggccatggaccctgggaggtgaccggggtgagtcaggggcctgttgtcagccccagaggaagcgctggacctggccgatggtgggccgagaggacagcaccaggctgggagaagtggggcgagttccctttgtattacagctgccagtgcaagaccaggccctccaggccaggaaggctagggacgggtcctggtagaagacaccctgtctagaatggcccttggtcctggaggtggggcgcaaaaggcctcagccagggaactgccctgccacctcccgaggcaggaaaggaagtgagaaaaggagaagtttttttactcctggggccaaagtagggggacaaacacccagtcgtatatggcttcagctctgaccaaaggcggatagggagctatcctgggtaggagcagggagccaagggggaggcagtggctgtgcctgggtgggcacagacagatctggtacatggccctgagccctgggcagagggacaaccttgccggtgagtgggcaggcagagaggaggcggcaggatgctgtttccccgattccatcctcagggagtggagactggaggggaggtgcactgactcagatgaactgttctcccccttctttgataagaagtaggtggcagcagcctctggaaaagtcagggccctggaggttacctggcccagggctactacagccacaggccccagtggcaccatgccaccccttccatggctccactcaaggggnccacacanccaccgcctgttcctcctttccttcatcccaaactgggacaaaagg

SEQ ID NO: 433333 - DNA, 861 bp, Homo Sapiens
agcggggctgcttttgccagcacccagaatcagtgctcaggctcagaaatcctggatagaaagagcattttataaaagagaatgtgtccacatcatacccagcaccaaagacccccataggtgttgctgtgggcgtctgataggccagcatgttggcctcacccccagtatctccgtgcttcagaatgagaaaaatgaaagtcgcctctcccgaaatgacatccagtctgaaaagtggtccatcagcaaacacactcaactcagccctacggatgcttttgggaccattgagttccaaggaggtggccattccaacaaagccatgtatgtgcgagtatcttttgatacaaaacctgatctcctcttacacctgatgaccaaggaatggcagttggagcttcccaagcttctcatctctgtccatgggggcctgcagaactttgaactccagccaaaactcaagcaagtctttgggaaagggctcatcaaagcagctatgacaactggagcgtggatattcactggaggggttaacacaggtgttattcgtcatgttggcgatgccttgaaggatcatgcctctaagtctcgaggaaagatatgcaccataggtattgccccctggggaattgtggaaaaccaggaggacctcatttggaagagatgttgtccggccataccagaccatgtccaatcccatgggcaagctcactgttctcaacagcatgcattcccacttcattctggctgacaacgggaccacctggaaaatatgggagcagaggtgaaaacttccaaaaaactactgggaaaaaacctaattttaccctccccgaaagaataaaccccccagaatggcca

SEQ ID NO: 433334 - DNA, 767 bp, Homo Sapiens
cattggttctgggtatgggcccggaccaacaatcttctttcccaatggaaggtccttcccgggttttcccacaatttccccaggggggcaataccctatggtgcatatcttttcctcgagacttagaggcatgatccttcaaggcatcgccaacatgacgaataacacctgtgttaacccctccagtgaatatccacgctccagttgtcattgctgctttgatgagccctttcccaaagacttgcttgagttttggctggagttcaaagttctgcaggcccccatggacagagatgagaagcttgggaagctccaactgccattccttggtcatcaggtgtaagaggagatcaggttttgtatcaaaagatactcgcacatacatggctttgttggaatggccacctccttggaactcaatggtcccaaaagcatccgtagggctgagttgagtgtgtttgctgatggaccacttttcagactggatgtcatttcgggagaggcgactttcatttttctcattctgaagcacggagatactgggggtgaggccaacatgctggcctatcagacgcccacagcaacacctatgggggtctttggtgctgggtatgatgtggacacattctcttttataaaatgctctttctatccaggatttctgagcctgagcactgattctgggtactggcaaaagcagtccccggagcagctcctgttgctttcattttgctgcagctagggctggtcattccgttaataatccc

SEQ ID NO: 433335 - DNA, 629 bp, Homo Sapiens
  misc_feature (593)..(593): n is a, c, g, or t
catcttttctgtatctccattgtcccagcaaacattgtagcattgaaacagactatcagggtactcaggttgaagaggttcctggctttcgattgttccaaaccaccaggcatcatctatgacagacctgaagcggtcacctatattccatcgcctgtattttgcatcatcaaattgttgtctcaagactaggcaatctattacgtcaggcatatcatggtatttcatggtaaatgatccgcccgtccgtttaccagtatcaggatctagtaaagcaagtttaaggcagcacagggtaggtaatcccacttcatactttatgcccactattttcataagttcttgttcccgtagctccattttatgccatggttgttttttgggattgatactatatattttatttttccgggccatttcgacataggcttcatgtccttgtcggaaataataaacctcatcacccatctgtggcacaaatggacatcttcggggaatggtatctgtaatccatgttgatggccaccattcttctaatgtcaaaccattttcagttagttctcccacagccaatctcttttgttttctttctntgggcttctttttctttggtgatattggtccatctt

SEQ ID NO: 433336 - DNA, 186 bp, Homo Sapiens
gcaagttaacaattagtttatttcctttataatggacaaaatgcgccagaaaaagactttattaatcatacaattggtggcatatgtctgttgtccagcaatatgaataaaacaggcactggcagtgacagcaagtgacgatgtgaggcttaaaactcatggtattggctgggcgcagtggctcag

SEQ ID NO: 433337 - DNA, 947 bp, Homo Sapiens
  misc_feature (74)..(123): n is a, c, g, or t
  misc_feature (139)..(201): n is a, c, g, or t
  misc_feature (367)..(424): n is a, c, g, or t
agtttgttttgatgatttggaattttatgatatagggttagtttgggtctgttgaaggttctgctgtcggtgtnnnnnnnnnnnnnnnnnnnnnnnnnnnnnnnnnnnnnnnnnnnnnnnnnntcagttaggtcgcatnnnnnnnnnnnnnnnnnnnnnnnnnnnnnnnnnnnnnnnnnnnnnnnnnnnnnnnnnnnnnnngagcgagttgggtgtgtttttggaggtaaggggtgcggctgtggttttgtcggtggtgtgcggcagcggcgcgtcgcgcgctcctggtcggcatcgtgcgccgttgttcgcccctgtggtggtggccccagttgcgccgtgtgtctttgctgcggttcgatcggcnnnnnnnnnnnnnnnnnnnnnnnnnnnnnnnnnnnnnnnnnnnnnnnnnnnnnnnnnnagcaggtccatgaagtggggttgacgtgggtattatgtgttgtttgtgcctggttagccacggggtcataggggtcatgcgtgatgcgtctcgttaggtagtggccgacagagcagtggggaaggggaactggccctcacccagtgcgtgggcacccgccaccagctcccccagcttctccaccaggctgtgccggttggccgccagctgctgctgctcgtcctcggcccctgccccggggtacccggctgcctctggggatgggctgccccaggctgtgttgggcaggctgagcctctttggggaggccttggcgaggtccggtgccaggggtgaggcggtctcgtcggtatagaagacgcactcctcactgcccgcccgtgtgggccccatgtagccgggggagtcaggcaccgtgggcgtcttcacagggacgatgggcggccggatggggatggggccagcgctggacagggcgcggcgcacggtgggcttggtggagggtgtgcggcggatggtggcc

SEQ ID NO: 433338 - DNA, 181 bp, Homo Sapiens
aggggtgttaattacagtacacctttattaatactggaatcttcacagtgcatctgttacttgtagcagtgactatatttaaatcggggaggatggtgtggagggggcggggaggagaggagaatttttccaaaatctgacggaaagaaaagaaacaaatggttcagatgggacggagggt

SEQ ID NO: 433339 - DNA, 886 bp, Homo Sapiens
  misc_feature (66)..(94): n is a, c, g, or t
catatacaaaatcactttaatggttattcatataagtagatttatatagacagaaaatagctccannnnnnnnnnnnnnnnnnnnnnnnnnnnngccaagcaatcaagcaaaacacaagaccaatagaattagtagacagaagccttggggacaatggcagtgccctttctgagtaagacatgaatgccatctggaggatccatttgaaactacagtgcagtaaccaaagaacctaatgttttcaagcataaaggtactttttgtgaacaggtgggcaacacaggcaggaataactaccttcattctatggacttaaattcctatttctttctagcttccagtagaagactcttgagaatattgttgttgagtgaagtactttccgctgaaatgggaaatgaacccctagagtcttacaagtattattaagcatcagtaaatacaggtcaggaagaattaggcaagagagaagcaggcaaatgtgtcctgtttgctgtgtcctgccatctcctctccctacactgcatttcattcatgagaagatgtaaatgactgatagtttagttttttcaaaggtatttacattttcataggttgaaagtctaaattaagagagagagagataaagttaaccagcagaatttccagtagatatgttggaggggctatggttgaataagccatctcctttataaaattgttgattattccttttaaactaggtctgtttcttactgatacactaactttaacaaaatgttttaaaaggattaattcctcaaaagtctgagtagttaaaaacatctgcatttcctagtttatttctaagaagattctgatattctgagggcatgtcatagagtcttcgactcagtgatgtgggga

SEQ ID NO: 433340 - DNA, 1484 bp, Homo Sapiens
  misc_feature (24)..(25): n is a, c, g, or t
  misc_feature (27)..(27): n is a, c, g, or t
  misc_feature (30)..(30): n is a, c, g, or t
  misc_feature (33)..(33): n is a, c, g, or t
  misc_feature (35)..(35): n is a, c, g, or t
  misc_feature (49)..(49): n is a, c, g, or t
  misc_feature (79)..(79): n is a, c, g, or t
  misc_feature (784)..(803): n is a, c, g, or t
  misc_feature (1101)..(1161): n is a, c, g, or t
agcacttctcccattgttttattnntnganagntntgtgcaggcccctncccaggaccagcgctgctgccggatttcgncccacgtcttcttcactgaccgttggatggctgcttcatagcgctccttgtttttctcgagcttctgccgctgccgttcctcccagggctgcacggcgttgctcggctttaagacgttgctcctccagccggcgccggcgctcctggagctgcttctcccgcagcgccttggccttctcctccttctccagccacactgccttcttggccgccaggtacttggcccgctcttctcgccgctcctttgccagcttgtgtctctctcctgccttcttcacctcttgcttggtgggagggctgtcggaggctggcactgctgttggagatggctggctgctccttcgaggaggtctggcatcccgtgggcccatggctggtggggtgggtcctctgctctttgcttcagaggaaggggactcttcctgcgggggggctggcctaggcccgacctgccctgaggggctctctggttccagtgggagctgcttagagctagtggcattcttcatggcaggaggggtgtccgggggagtgtcggggaccagggctgacattggtggtggtgggggggaagggtcaccttctggagaaggtcttggctctgggggggtcctggcgaccacagctgggggtgcgcccgcccccagctccgcacgcgggccgctctccatggctgcggcgtcactgggggtctcggggtctcannnnnnnnnnnnnnnnnnnncagtggccaggacaggggtcccgcggcgcatcacgcccggcccggcccggcccggcaagtagcgactcggaggcgggggcgctccggggaaggtcgaggcaggtggcccgcgagtctcggaggtgccggtcgcccggggtctctcggctgcggtcgcgaacccgttccccgcccggcgccggcccagtcccggcctcggcccaaccctattgtaccgcccgggctgggcctggcctctctggcgcgtaccaagttcgaggcgggggggtccaccccagcagcgccccgggacccagcnnnnnnnnnnnnnnnnnnnnnnnnnnnnnnnnnnnnnnnnnnnnnnnnnnnnnnnnnnnnnagcctcccggcgcctctcccacggccacggccgagcgggctccacggctccaggagttcgccgcgctagctgcctccccctgcgtccgcgtcttggtacgcgccgcagcgcctgaggactaagtagggagcgctcgggtgactcacccgccgcggggactgggggagagggggagcagggctgggactcccctttcccaccctggagtttgggggctctggcactggggctgagagggcagcttcgagtccaaattctcgctcaaacccacctaaaccaaagcggcccgggggacgtcgggaggcatgaaggagagtcacaag

SEQ ID NO: 433341 - DNA, 946 bp, Homo Sapiens
  misc_feature (7)..(7): n is a, c, g, or t
  misc_feature (32)..(32): n is a, c, g, or t
  misc_feature (46)..(46): n is a, c, g, or t
  misc_feature (49)..(49): n is a, c, g, or t
  misc_feature (62)..(62): n is a, c, g, or t
  misc_feature (79)..(79): n is a, c, g, or t
  misc_feature (86)..(86): n is a, c, g, or t
ttctacngggggattccagagcgtggcagagnactttgagagccgnttnttgattatagagnccacgtgtttgggcagnttaactnccgacacggagcacctgctcccactggtcttatgtcctggagagctgtggtgcagggcccctgcccaggaccagcgctgctgccggatttcggcccacgtcttcttcactgaccgttggatggctgcttcatagcgctccttgtttttctcgagcttctgccgctgccgttcctccagggctgcacggcgttgctcggctttaaggacgttgctcctccaggccggcgcgggcgctgctggagctgcttctgccgcagcgccttggccttctcctccttctccagccacgctgccttcttggccgccaggtacttggcccgctcttctcgccgctcctttgccagcttgtgtctctctcctgcgttcttcacctcttgcttggtgggagggctgtcggaggctggcactgctgttggagatggctggctgctccttcgaggaggtctggcatcccgtgggcccatggctggtggggtgggtcctctgctctttgcttcagaggaaggggactcttcctgcgggggggctggcctaggcccgacctgccctgaggggctctctggttccagtgggagctgcttagagctagtggcattcttcatggcaggaggggtgtccgggggagtgtcggggaccagggctgacattggtggtggtgggggggaagggtcaccttctggagaaggtcttggctctgggggggtcctggcgaccacagctaaaccaaagcggcccgggggacgtcgggaggcatgaaggagagtcacaaggagacccctgaaagggtttcgctttctctcccctgctgatggctgggctggggacaggtctgggagccttgctgccgcccttgctccgg

SEQ ID NO: 433342 - DNA, 1590 bp, Homo Sapiens
  misc_feature (20)..(20): n is a, c, g, or t
  misc_feature (48)..(48): n is a, c, g, or t
  misc_feature (62)..(62): n is a, c, g, or t
  misc_feature (69)..(88): n is a, c, g, or t
  misc_feature (93)..(93): n is a, c, g, or t
  misc_feature (96)..(97): n is a, c, g, or t
  misc_feature (100)..(100): n is a, c, g, or t
  misc_feature (117)..(117): n is a, c, g, or t
  misc_feature (144)..(144): n is a, c, g, or t
  misc_feature (186)..(186): n is a, c, g, or t
  misc_feature (193)..(194): n is a, c, g, or t
  misc_feature (214)..(214): n is a, c, g, or t
  misc_feature (247)..(248): n is a, c, g, or t
  misc_feature (260)..(260): n is a, c, g, or t
  misc_feature (262)..(264): n is a, c, g, or t
  misc_feature (274)..(274): n is a, c, g, or t
  misc_feature (280)..(280): n is a, c, g, or t
  misc_feature (464)..(464): n is a, c, g, or t
  misc_feature (470)..(470): n is a, c, g, or t
  misc_feature (487)..(487): n is a, c, g, or t
  misc_feature (496)..(496): n is a, c, g, or t
  misc_feature (500)..(500): n is a, c, g, or t
  misc_feature (506)..(506): n is a, c, g, or t
  misc_feature (509)..(509): n is a, c, g, or t
  misc_feature (514)..(514): n is a, c, g, or t
  misc_feature (551)..(551): n is a, c, g, or t
  misc_feature (629)..(629): n is a, c, g, or t
  misc_feature (642)..(642): n is a, c, g, or t
  misc_feature (646)..(646): n is a, c, g, or t
  misc_feature (654)..(654): n is a, c, g, or t
  misc_feature (660)..(660): n is a, c, g, or t
  misc_feature (749)..(749): n is a, c, g, or t
  misc_feature (1048)..(1102): n is a, c, g, or t
  misc_feature (1274)..(1331): n is a, c, g, or t
ggaatcccccatccccaganctgggatccccctcagttacagttaaanagagagaggaaganctccccnnnnnnnnnnnnnnnnnnnntctgnctnntgnacccaccctctccacgnagaggagtctgagcacaagctatttanagtattcacatccactgtaccccaccaaatcaaggcaaatantacaggnngcccctccccaagggaagangccagagaggctgtgagtgtatatgtgtgtatnngggagaggggangnnngggcgtgcgngcacangaatgcactgaggggcagatttggctccggccaaagagacatcagtctataaggtgcagattaaaaacaacagagaggacccacccccagggggcccaggccacttccatctttgttctgtctttttctcctccagacatcctggtaggtgatgcagaggagccctcaaaactgtgcccggatncaaggnaaaccctcttaaagganttctgtganctgnggggantgnaccanagctttcttgaggaaggcttctgcctctgcaaagggnaggagtgtctctgggtgttcggctcagaatcttgtccccagagggtccgttggtggagaagccattctcctggtgtgntgggagaggctgnaggncattcacnagggangctggcaactccttgcttgggagactccactgaggctcctgtgggatggggctcctctttctgcaacagcctccttctggcagccctgngggacccgagcctcccacagcttttcacaggcctctgggctggaaaccgttggcgttggcctccttgctgtcctgcttcttggtttcagaaacttctgacttcccgagtcctcttcatgatctcctccagacgctttctgcgctcttgccgctcttgctcctgctgctggaagtgcttttcccgctccagacgctgccgctccgcctcttcccgcgaccgagcttcggcctcctctttctgcttctgcagccgctcctgctcctcctgctcggcctgcgccttctctcgtgcctcctgnnnnnnnnnnnnnnnnnnnnnnnnnnnnnnnnnnnnnnnnnnnnnnnnnnnnnnngccagctgctcctctcgcattcgcttgtccctttctgcctgcagcctccgctcctgctcctcgcgctcccgctgctcccgggcctggcgccgcttctcagccaagagccgagtggcttcttctcggtctgtggtgccggccattggtttgctaggggtcaccgggggagcannnnnnnnnnnnnnnnnnnnnnnnnnnnnnnnnnnnnnnnnnnnnnnnnnnnnnnnnnagggcgccggcgaaggtgccggtgaggctggggctgctgactccttctcgttactggccctgcgcttgctctggctcttgtcctcgggccctgcggcgctggggctctcctttgcctcctccttcctccgaacccgccccttgggggatgcagtggtgcctcggggggacggtggctttggaggcagagtgtggcctggccctgggctggggcagggggaggcaggcctggccaggatgggaatcccgggaatccggcc

SEQ ID NO: 433343 - DNA, 2153 bp, Homo Sapiens
  misc_feature (489)..(511): n is a, c, g, or t
  misc_feature (1642)..(1703): n is a, c, g, or t
cggaataagttgtgtcgagacactactagtccttgggtggacgaaaattttttcttggctgtgcagaataatgtgcggttggttgtaccacaccgttttatacgtgcctgataagtgctttgatgatatgcgcccctaggggcggttctataaaactctttgggagggggtgttggtgttgcccgacaatgtagttgtgccccccctcgctgggaatgtatggggtgtgtcttttcccacaagggtagcctcgaaggtaccagtgtttctccgcctatcaacacgtgtgtgtttaaaacacgccgctgtccagcgtgccaatggcgggtttattaatacggtgtccccatataggggcgcccactttgtgcacaacaaaaaccggggatacacggaaattgtggcgctcccctgggggaattctatttagaggcgcgcccccccctttatagatatatatatctgttatgttaatgtagttgtgattannnnnnnnnnnnnnnnnnnnnnnattctttatttctggagacatttaatcagatgcagtaacactgattccaggcgagggcagggggcatgggtacccctgaagcaaccagtatcctgtggcccaaggtgtcccccatccccagacctgggatccccctcagttacagttaaatagagagaggaagatctccccagggggctttggggggagggtctgcctcctgcacccaccctctccacgcagaggagtctgagcacaagctatttacagtattcacatccactgtaccccaccaaatcaaggcaaatactacaggtggcccctccccaagggaagaggccagagaggctgtgagtgtatatgtgtgtatgggggagaagggatgtctgcgcgtgcgagcacacgaatgcactgaggggcagatctggctccggccaaagagacatcagtctataaggtgcagattaaaaacaacagagaggacccacccccaggggcccaggccacttccatctttgttctgtctttttctcctccagacatcctggtaggtgatgcagaggagccctcacaactgtgcccggatccaaggcaaaccctcttaaaggacttctgtgacctgcggggactgcaccacagctttcttgaggaaggcttctgcctctgcaaagggcaggagtgtctctggtgttcggctcagactcttgtccccagagggtccgttggtggagaagccattctcctggtgtgctgggagaggctgcaggccattcaccagggacgctggcaactccttgcttgggagactccactgaggctcctgtgggatgggctcctctttctgcacagcctccttctgcagccctggggaccgagcctccacagctttcacaggctctgggctggaaccgttggcgttggcctccttgctgtcctgcttcttggtttcagaaacttctgacttccgagtcctcttcatgatctcctccagacgctttctgcgctcttgccgctcttgctcctgctgctggaagtgcttttcccgctccagacgctgccgctccgcctcttcccgcgaccgagcttcggcctcctctttctgcttctgcagccgctcctgctcctcctgctcggcctgcgccttctctcgtnnnnnnnnnnnnnnnnnnnnnnnnnnnnnnnnnnnnnnnnnnnnnnnnnnnnnnnnnnnnnntgccagctgctcctctcgcattcgcttgtccctttctgcctgcagcctccgctcctgctcctcgcgctcccgctgctcccgggcctggcgccgcttctcagccaagagccgagtggcttcttctcggtctgtggtgccggccattggtttgctaggggtcaccgggggagcaggggctgggggtgaggtcaagacagcagcgtctgtaggggtctccgcggggggctgctccttctggggcggggctggggtgggcgagggcgccggcgaaggtgccggtgaggctggggctgctgcctccttctcgttactggccctgcgcttgctctggctcttgtcctcgggccctgcggcgctggggctctcctttgcctcctccttcctccgaacccgccccttgggggatgcaaaggtgcctcggggggaccctcttttgaaaacgccacccag

SEQ ID NO: 433344 - DNA, 1250 bp, Homo Sapiens
  misc_feature (48)..(48): n is a, c, g, or t
  misc_feature (435)..(486): n is a, c, g, or t
  misc_feature (1123)..(1123): n is a, c, g, or t
aacagcgcgcgggccgcgatgcggggggggaagcaggttactaatgtnaaaaacccacctcgcgggcgcggggaatccgggcgcgtgaatttggttaagtcggggaggggtagggggattgaatctgcctggcgcggtggagtggacggtataaggggttcccgcggggcggaaggttttcccccggcgtagaaccggggggagggctggtgtatcggtcacggggggttggtgaggtggcccttacggccattgttccggggtcttccttgtgccataaagaagcgcgggtcaatcgccgggggcttttttcccatttgtggctccggcccttttcgtggggaatggccccgcgccccttggggggaatgcccaggtgttcccctccgggggggtcccggtgggtttttggaggggccaggagttgtggccctnnnnnnnnnnnnnnnnnnnnnnnnnnnnnnnnnnnnnnnnnnnnnnnnnnnnattttggagggagaaggatgggcctggcccggggatttgggggctgagcttcagagggcggttcctgacgaaaagggcggggcactgggggagggcgggcagcgactggcgcttcttgagagctgcgctcccgggttagggacactcttctccttgtcgttttcccgctccttgtccttgttctcctttttctgcaccggcgaggcctccggccggcggcgcaccggagcggggctgcccccggcgttgggcttgcggcgctccccgcgctcaccggcgggggcgcagcggtgcacgcttcgggtgacgctgcacggcgtcagggggctggcggaggccgagcgcgggcacacccgggacggcctggtcccggccgttgcggggcagtgtgaccgcgctgcgactccgaaccaaggaggaaaaactgcccctctcccgcgtgaggtccccctatcgccaaattttaactagctcagaagccgaccagccctacgataccctccgtttccctcccccctcctccctccgtggcggttggtcacgaagcatcccgatcgccaaccattctctcccccccacctctccgtactttttcacaccgcaccgcgtagcaaaggactcgccgaagggcgcgcantttcacagcgacctatacctaacgatgacgcggcgcgcgcgcacataccccacgaccgcggacagcggctgcgcgcaaggacctccgctgtgtccagcgaatctgcagttcggctgaagaggtgagg

SEQ ID NO: 433345 - DNA, 691 bp, Homo Sapiens
  misc_feature (164)..(180): n is a, c, g, or t
ttttttttcttaataaatttattcacaaaaagtgatattgcagagggtctgggggctgtacatgggcaggggcttggtgagctttgtacatggggctgggagacaagggagcctccaggtggaagggtattttttaataaaaaaaataatggagctacaaccannnnnnnnnnnnnnnnngattaaaaagacacaaaaatagacgtctctgaggtaaacggggagcctggggcttaagggtgtttaaagggcttcacaggtgccagagcttaaaggtgtcacaggcaccggggtggctcctgcatcagttggtagaacagcacgtagccctcgctggatgccacctggttttcactgacaggggagacacgagagtcattgtagacatgccaaccagtctggcaccggcacagggctgtgtagtggccatagtggacgctgcctgagtggttgcaaagggcatacagctggtatacaggacttccggctttgtcactggcaaagtcccctaggctcagtcgctgcagtggaaagtctacacctactgaacttttttgatggagcctcgggaggcagaaaatcgattcagatggagcacgaggattcgagggaatctttgtactgtcaactttttggtacttcgagttttctgccgacatcggtcacacacctgaataaatggcaaacagtg

SEQ ID NO: 433346 - DNA, 2838 bp, Homo Sapiens
  misc_feature (479)..(487): n is a, c, g, or t
tgcagagcaaggcggtggaggaacgccgaggaggggagatatcgaaattgaggtgatgtgcagatacggccactaagctcaagtgtctcgtggcgacacccgcggccactcaaggcgcgccgttggtaaaatgtggagccccaaaatgttgggcaccccgccgcgcgctgggaagggagcgttgccaccaaaagagaggcatatacacagccttgggtatatcacagaggaagcttactctgtgcgcgggggttggggactaagtggaatcccaaagtttgtatatatgattgagagaggccttggtcgcccccaccactttccctttgtggctccccggtaggggggcatttttcccccccatcccgaggatttcaaccgggggccttgtgttcaaattgggtcaaaatgtccacccctaagggctccatctccgcttggccagggggaacaagttcttaacaccttaggttgaaacnnnnnnnnnggaagggaggcctccgggaggccagaaaaatgcgaattcagaatctaaagcccttggttaaaggagcatttgggaaggcagtggccctttgaggggaagtttttctatcttgaaagtggtcctctccccattcccggcacactgggagcatcttgtggaaaagtgggtggcagacttttcctaaggaaaattcaattctctggaaacatggaggaaagagaatgtatgggaggtatcctaagagaagtaagaatctgaagattaggatatggagcacgaggattcgagggaatctttgtactgtcaactttttggtacttcgagttttctgccgacatcggtcacacacctgaataaatggcaaacagtgttaggttaatatgctcctaacctcaattggcttttctgacaccccgatccacatacaaatttagtatgctcttcattacagctggatcctcttggcttctcccctttgctctaggagtactagaacagatctgagactccaacacaaacccagatacataaatattattccccatatgaagacatcatgcaatcccttttatccacatggagtccccccaggtctcccacccttactgtatcccttgtgaacctccacatactggggcattctccgactctagctcttcttccttagtgaaaaggttgaaacaatcccgcagagacaccttgcccccagcaaatcctttctgggggaaaaaggggaagaaaggtcaacatgttctgaatttccgttttccaactcgttctcaatcaatccaggcttcagttctgctccagaaacccacagggttcccgcccacactctgggggtgggtaggcttgggtcagagagcccctgtcctgtccaccccggaatcctctggaatcccaccttggggatgggcagggacaggtcacaaaaaacctcgaaggtcgtggagcgatacccacaggcctggcacttgagacaacttttcaactggcccacaaacaggtccacaatcttgctgtcctctcgctcccaggtaacgtttccacattaggttggctcggtcatcatcacttaactcaggttcttctagcagagcccctcctcggcggggtggagagggaactggaccattggcaagtatcggtggagcccggcggcctcggcggttgatttcaaggtgtagccgctccatgaggagcttcaggaactcttgggcatcctgctggctgtatccagagaaggagggaacatatttctggaagacagctcggaatcgagtaggattccaacacttcgcaggagttcagggtgccagagggcaccaatcacatctgcaaaggcttcagtgagctcttgggctcggcctcctccaggcacctcttgccggaagtcccttctcagacagaagtcccgaagaggtcgagtgctgctcagacactgcagcacagcattcaggaagcacgtgtttcccaggtttcgaaggccaacatgaccagagcccagaaggagtgtgtgatgagccatcttgtcatcagagtagaaaggctcagaggaccgggcggatatcatgtggaaggagccatgggaagcagggggctctgtccgtatgctgaacagggtagggggtccaggaaagccccctaggcggcggagagaagtgctacgtctcaaagtgggtggctcaggccggagggccaagcggctcagtgcagccccaagctctccggtgccacggtgccctcccaaggcaatccccattggacgcaagtccccactgctcacagacttggaacgggctaagttggtccgagatgggagaggcaaagccactgttgggggtggtgagccaggcaggggaaccccatgatctgctcgaagggggcctctgggacgagggcctgaggtccgtccccgtcccagctccagtttcttgagccgttcatcaggcagacctggccggggaggcagaggtcgtaacatggggtttggcccagaggctgggtttctgcgctccttgctgcgggccctgggggcaaatggtagcttggatcccactcggggctggatattaacaggtggctctcgggtacggcccaggcggtgctcagaggcctggggcattgtggacaccacaggctggacctgtcccccagtgaggcggcgggagaggccagccagggccaggccccagttcagggccaccccctactacccccgtgcagcccccccgtgggcccggctgcagctttagccgcagccgttgcccagatcgctcccgccgcaggggccgccgccatctttgttggtcccgcccggccaccgatcccgggaattccggaccggtacc

SEQ ID NO: 433347 - DNA, 792 bp, Homo Sapiens
  misc_feature (711)..(728): n is a, c, g, or t
ctgctagaagaacctgagttaagtgatgatgaccgagccaacctaatgtggaaacgttacctggagcgagaggacagcaagattgtggacctgtttgtgggccagttgaaaagttgtctcaagtgccaggcctaaaggatttgctgggggcaaggtgtctctgcgggattgtttcaaccttttcactaaggaagaagagctagagtcggagaatgccccagtgtgtgaccgatgtcggcagaaaactcgaagtaccaaaaagttgacagtacaaagattccctcgaatcctcgtgctccatctgaatcgattttctgcctcccgaggctccatcaaaaaaagttcagtaggtgtagactttccactgcagcgactgagcctaggggactttgccagtgacaaagccggaagtcctgtataccagctgtatgccctttgcaaccactcaggcagcgtccactatggccactacacagccctgtgccggtgccagactggttggcatgtctacaatgactctcgtgtctcccctgtcagtgaaaaccaggtggcatccagcgagggctacgtgctgttctaccaactgatgcaggagccaccccggtgcctgtgacacctctaagctctggcacctgtgaagccctttaaacacccttaagccccaggctccccgtttacctcagagacgtctattttgtgtctttttaatcnnnnnnnnnnnnnnnnnntggtgtagctccattatatttttattaaaaaatacccttccacctggaggctccttggtctcca

SEQ ID NO: 433348 - DNA, 649 bp, Homo Sapiens
  misc_feature (546)..(562): n is a, c, g, or t
aacctacggctaggtacgaggctgggtggttaatcggcacgagggtcgggagtggggagaggacagctttcaggatagaagaagttcccctcagaggcccactgcctcccaaatgctccttaaccaggcttagatctgaatcgattttctgcctcccgaggctccatcaaaaaaagttcagtaggtgtagactttccactgcagcgactgagcctaggggactttgccagtgacaaagccggaagtcctgtataccagctgtatgccctttgcaaccactcaggcagcgtccactatggccactacacagccctgtgccggtgccagactggttggcatgtctacaatgactctcgtgtctcccctgtcagtgaaaaccaggtggcatccagcgagggctacgtgctgttctaccaactgatgcaggagccaccccggtgcctgtgacacctctaagctctggcacctgtgaagccctttaaacacccttaagccccaggctccccgtttacctcagagacgtctatttttgtgtctttttaatcnnnnnnnnnnnnnnnnntggttgtagctccattattttttttattaaaaaatacccttccacctggaggctcccttgtctcccagccccatgtacaaagctcac

SEQ ID NO: 433349 - DNA, 585 bp, Homo Sapiens
  misc_feature (30)..(30): n is a, c, g, or t
  misc_feature (37)..(37): n is a, c, g, or t
  misc_feature (60)..(60): n is a, c, g, or t
  misc_feature (390)..(390): n is a, c, g, or t
  misc_feature (392)..(392): n is a, c, g, or t
  misc_feature (483)..(483): n is a, c, g, or t
gggagccagaaaaaccgattcagatcttangccctgnttaagggagcatttgggagccanttggccctctgaggggaacgttcttctatcctgaaagctgtcctctccccactcccgacacactgggagcatcttgtggaaaagtgggtggcagacttttcctaaggaaaattcaattctctggaaacatggaggaaagagaatgtatgggaggtatcctaagagaagtaagaatctgaagattaggatatggagcacgaggattcgagggaatctttgtactgtcaactttttggtacttcgagttttctgccgacatcggtcacacactggggcattctccgactctagctcttcttccttagtgaaaaggttgaaacaatcccgcananacaccttgcccccagcaaatcctttcttggggatgggcagggacaggtcacaaaaaacctcgaaggtcgtggagcgatacccacaggcctngcacttgagacaacttttcaactggcccacaaacaggtccacaatcttgctgtcctctcgctcccaggtaacgtttccacattaggttggctcggtcatcat

SEQ ID NO: 433350 - DNA, 3751 bp, Homo Sapiens
  misc_feature (47)..(83): n is a, c, g, or t
gatgtatacgatcactataggcactcggattaacgcggtggcggcgnnnnnnnnnnnnnnnnnnnnnnnnnnnnnnnnnnnnnatcaggccaaatcggccgagctcgaattcgtcgagagcgggtggagccggaagcggaggttccgggctccgggatgaaaggagggaacgcagacagctggcagagagagaagttggctagcatggaatcaccagaggagcctggagcatccatggatgagaactactttgtgaactacactttcaaagatcggtcacattcaggccgtgtggctcaaggcatcatgaaactgtgtctagaggaggagctctttgctgatgtcaccatttcggtggaaggccgggagtttcagctccatcggctggtcctctcagctcagagctgcttcttccgatccatgttcacttccaacctgaaggaggcccacaaccgggtgattgtgctgcaggatgtcagcgagtctgttttccagctcctggttgattatatctaccatgggactgtgaaacttcgagctgaggagttgcaggaaatttatgaggtgtcagacatgtatcagctgacatctctctttgaggaatgctctcggtttttggcccgcacagtgcaagtgggaaactgccttcaggtgatgtggctggcagatcggcacagtgatcctgagctctatacggctgccaagcactgtgccaagacccacctggcccagctgcagaatacagaggaatttctccacttgccccaccgcttactcacagatatcatctcggatggagttccgtgttctcagaacccaacagaggcaatagaagcctggatcaactttaataaagaggaaagagaggcttttgcagagtcactcaggacaagcttgaaggaaattggggagaatgtgcacatttacctgattgggaaagagtcatctcgtacccactcgttggctgtgtccttgcactgtgcagaagatgactccatcagtgtaagtggccaaaacagtttgtgccaccagatcactgcggcctgcaagcatggtggagacttgtatgtggtgggggggtccatcccacggcgcatgtggaagtgcaacaattccaccgttgactgggggtggtgtgctcctttgcctcgggaccggctccagcacaccctggtgtctgtgcccgggaaagatgccatatattcactgggtggcacagacactgcaagataccctctccaacgcagtcatttattatcgcgtaggtgataatgtgtggacagagacaactcagctagaggtggctgtgtcaggggctgctggtgccaacctcaacgggatcatctacttactagggggggaggagaatgatctggacttctttaccaaaccttcccgactcatccagtgctttgacacagagacagacaaatgccatgtgaagccctatgtgctgccctttgcaggccgcatgcacgcagctgtgcataaagatctggtgttcatcgtggctgaaggggactccctggtgtgctacaatcccttgctagacagcttcacccggctttgccttcctgaggcctggagctctgccccatccctctggaagattgccagctgtaacgggagcatctatgtcttccgggaccgatataaaaagggggatgccaacacctacaagcttgaccctgccacttcagccgtaactgtcacaagaggtattaaggtgctgcttaccaatttgcagtttgtgttggcctaaggctgtggggaggggaggagaactgctcactccttttccctccccatacaaactcaaagtcccctgggccccaattcagagttatgttttttttggcacatactagaaaggcagtgcctcagcccttccctgaatccatggaggtgttctgtttggggctttttagactgctgctgctcagctggttgcttgaactgacagtaggccagcctgttctctgccattccctagtcatcctgtgcctcaccacagcttgcttagagcaagccttttctcagaccttaggcacagcctctcctctttacctgatcaatgttaaatgtaagcacccctgatcccaggacataaggaaagatgcccaattgtacttttgttctatagcctgtgaaatggctagttgatcatttttccacaaagaattaggtgttaagagttttccttcaggctttacttaggagaatggactaagctgaaggtgtacttcaccagcaagagtcaactctagaattcaggatgttccttctattgttttcttagccatctgtcaggaaatgtaactttggttttatttttggcttattccaaggggtaagccagaaaatagaaatgattatttctgattaatagcagaaactttttcaatctcaaatatataaggtgtctgctcttttaaaagctctaagctaagtcaagagctaggaactgttgatacaaataaaagtttttgaagggatatgtgtgtctgtgttgaattccaaaggggtgactttgaaggggtgagggtgtttcattccctcaggggaactcattacgtaccatcacatggctcagtctgcagcagtcctgactgcagcccatgctcccacttctccagataggatccctactccacagggccagtgagattcagattctgacagtggcaaagagccagaggtgagtctcctttttttaagtgctaaatgttttttgagttgtggtgctaaatattattaggcacaatattaggtacataatagatttttgttaaaatacttctttagccctattcaagaaaagatgatagccccatccctgtcctgtatcccatgaatacaagccacactaaatcttttcctttctagccacacaacagtgttatttcaagaaaacaaaacaagtcagagaaagaaaaattacctattacctattggcacatttctgttacgtcaagtctgggcttaagccctgttggtcctgttaagctctttttgttctgtatcaagcaggagtgtcttgagttctttctaatccccatacatcatgtctttgaaatgacaaaagtcccatcctttgttgcccgtgcagtaatctgcttgtggaactctttaagaacatccagctggccaggcctgatgtggatgtatgaccggatcttggcgatggctcttacagcctcctctggactccatttgtgcacctgaatcaggtatgctgccaccatagtggcactcctggagcgcccagccttacaatgcacgtaaacacactggcccagcgactggtacttgagagcaaattggactcccttctggaggttgtccaaggtggggatcccagtcatgtctactgtgctgagccgcagctgctcgactcctagtctcttccactcctgtgaagagttgcacaggaacctcgtctcgtactcctcgttcatggtgatcaccccgcgcacgttctcgtcctgtaccagctggcgcgtcaagctccgcaacggcagcgcgcccagcagcacggtggggtcgatgcggtggtaccagtcccggtgcgcccgacccggcaccttcccgcggaacagggtgtagagcagcgtcgggtagaagagcacccgcgccaggccggcctccagcagcgcggtggccgccatcccggcccggcgcagcggcgacccgtcggcccccgcgcatcgcggtccgaccacgcgagaagagcaggcaggtgccggggcgg

SEQ ID NO: 433351 - DNA, 911 bp, Homo Sapiens
  misc_feature (46)..(46): n is a, c, g, or t
ggtctttttggttcgggttcaaagcgggagtgtctggagttccttnctaatcccccatccatcatgtctttgaaatgacaaaagtccccatcttttgttgcccgtggcagtaatctgcttgtggaactctttaagaacatccagctggccaggcctgatgtggatgtatgaccggatcttggcgatggctcttacagcctcctctggactccatttgtgcacctgaatcaggtatgctgccaccatagtggcactcctggagcgcccagccttacaatgcacgtaaacacactggcccagcgactggtacttgagagcaaattggactcccttctggaggttgtccaaggtggggatcccagtcatgtctactgtgctgagccgcagctgctcgactcctagtctcttccactcctgtgaagagttgcacaggaacctcgtctcgtactcctcgttcattgtgatcaccccgcgcacgttctcgtcctgtaccagctgccgaggcaaagaggtggctcagcaaagacggtggagaccccagcggcccgacagggacggagcggcggggacggggcaggggccctggctccccggcccggctcacctggcgcgtcaagctccgcaacggcagcgcgcccagcagcacggtggggtcgatgcggtggtaccagtcccggtgcgcccgacccggcaccttcccgcggaacagggtgtagagcagcgtcgggtagaagagcacccgcgccaggccggcctccagcagcgcggtggccgccatcccggcccggcgcagcggcgacccgtcggcccccgcgctcgcggtccggacccgcgagaagagtaggcgggtgccggggcggggctgccagctgcactaggcctctcgcgggttcgcaccgggtgacggcccc

SEQ ID NO: 433352 - DNA, 949 bp, Homo Sapiens
ttgggacgagcttttcgcacaaccggtaaaggccattgcccacaattccttcaagctggtccggaggactctcgcaaaagccttctctttcctgcttattaaagtggatccaggcttctatgcctctgttgggttctgaggaacacggaactccatccgagatgatatctgtgagtaaccggtggggcaagtgggagaaattcctctgtattctgcagctgggccaggtgggtcttggcacagtgcttggcagccgtatagagctcaaggatcactgtgccgatctgccagccacatcacctgaaggcagtttcccacttgcactgtgcgggccaaaaaccgagagcattcctcaaagagagatgtcagctgatacatgtctgacacctcatagatgttcctgcaactcctcagcttcgaaggtttcacagtcccatggtagatataagtcgagccaggagctggcagacagactcggctgacatcctgcagcacaatcacccggttgtgggcctccttcaggcttggaagtgaacatggatcggaagaagcagctctgagctgagaggaccagccgatggagctgaaactcccggccttccaccgaaatggtgacatcagcaaagagctcctcctctagacacagtttcatgatgccttgagccacacggcctgaatgtgaccgatctttgaaagtgtagttcacaaagtagttctcatccatggatgctccaggctcctctggtgattccatgctagccaacttctctctctgccagctgtccgcctggttcttcagcgtcctcgccttctctctaggctctgccacaaggagctaggaccacgctcacctcacgatttccctacctgcctgtctcgctttctcacctgcgttccctcctttcatcccggcctcgtgccgaattaacactccggcctcgtacctaga

SEQ ID NO: 433353 - DNA, 463 bp, Homo Sapiens
gggttttgtaagctgtgcaaggtgagatcccaagccctggcctggagacccatcttaggaaaatgttagaacagggcaacaagttgccatttcctccctcctttctcttccccatacaaaaatcagaaagcacactagcccagtgcccagccacaatggtgaggaaaccccactcaaaatcctgggttgtgcccctgatgccaaagatctgcaaaattgggactcacctgctgcaaccctagcccagacttgtgtacatttcaggggtggctggactcatggctgcctgggacgtcagggtggtacaaagtactcttaatctaagactgtcggggtacaaagataagcatttttttcccttttcttgagagccagatggtaaatagttcagctttgcaggccataggtctctgtcccaaatattcaactctccattgtagcaggaaagcagccacagacaata

SEQ ID NO: 433354 - DNA, 1067 bp, Homo Sapiens
caaccccggacaaaacacatttgagtatacttgaagtagcagcatagaataggcccaactaagaagttggaggggcaaagagaaagccgacagaatcagcttctcctggaaagtgaaagcatcaagttctatttatggtagacagagggtccttatttgcttgtccgtggtgtctatgtgggcctattgagggaatggtagttacttgaaggttcacatatgtaagcgtgtggacccagcacagtctgtgacctgattccagatcctcaagagtggagaaggaaagaaatatgatgatttcctatgcttgaccctaacccaaccccaaaactgctagggattcaacagtgagtaagatgtatgcaataagagaacagataacttctcaacaatgtgcatgccgtttgtgtagatgttcagaactacatatgtgtgaatatcactcccaccttacacacgcacacacactgcaatcacatggcattaaaaaatatattgtgtatggaacttggcgaggtcagtcaggacctggagctgtaatcatagccttattgccacttcttgcgttgtgtatacattgaatggctcatagattttaagagatttttttattgtaagtatttctactaaatgcacttatccttctatatgtttatatattttggtaaaattgatttatcagatacttggtattttagtaagaaaatttcctcaaatatttggctaatgctttgatgtcaagattgcatattgctgagttggagctcagaagaaatgtatgcagctaaaaattgcactgtgtgttcttgtgaatttgctcacaattctaaaatgacataattggtggctgtgatgcttacagtcactgcctactggctctcttatgatgaatgttgccatcatatgatcatttatttactttttgtgcaagcaatggcattttggttgttgccaaaaacaacacaagtggttgggagtgtatgttgttggaaggtgtacacttctgtttctttcagctgtattatttatacacccaggttttctgttaaggatgtaatcattcattc

SEQ ID NO: 433355 - DNA, 2243 bp, Homo Sapiens
  misc_feature (1855)..(1952): n is a, c, g, or t
cttcattctgaaaataattttattattttacagttgttcaggaaacttcccaggatgttgtaaccaagatttaatcaccacagtagatttagagcagatcagtcagcccacttgtcttctctcttctttagggagaggctaggcagtgaacacatcacgtatgcaatgagaaaataaccaactggtaggatgggggaggggaggggaggcagggaataggcacaaatggaattctatcctggctgtccttctcaggtctatctatatttaattttgtcttctctatattctccttccattgccacagagggcagagacaatggggctgagaaactgtaataactgtcactaacagcaaagtagcttagtacttcaagaggtcaggagttgcagtgtggtgttagaccagtcagactcctggctgagagtcaatgcctaatattggctcccagtggcccctgagcactgtctcagggtccacattccaggaatattcagatattcctggaatgacaagaattggaaccctgctgtccatagacacttctccctgccctttggtgaaaggaaagacttgggccacttaataccttagtatacatgtgatcaagggcaaaagcaaagggattctatccttatagtctaagacctgaaattctccctccaattatatctgaaattggcagggaagaagatgctgtcctcccatgtgatctaacagctaaaacccctagggagttccttcagctttcaccaccctattctgcaagagacctaaatcagattgtcctatgaggtgacatgttcatttccctgaactctgttttatggcagagccaccttccccctgaaacaggagaaaatacaggcaaacaaggcaaagaaagttatcaatcaaaatgatactgaacttcagattattaggtttattgaaaccatcctcttggcttggctgaaagacattcctcagtatcttttacaggaccacaaaagatcagggtcctgcaaaatctcaacaaatattaggctcaacaaaccaaatgtgattctcagattaagcagaagcgttcaggctcagggcagtagaagaaagcagactcgccagtccctgcagctccaacctgtcctcgtatccacctctgtttttgcaggcactttccgtgaagagttggagagaagacctgtaaatgggaagactgttccactggaattgatgttctgatgttagaggtgagagaattccaagttttgaggggagtggtccaaagagtaacaactaagtctatagatggcccgtaaaacacagaatgagcaggacatgaatcattagaaagtagatggctgctagaagtggcactcgggtccgtgaatgacagagtgaacgcaggactcgcttccatccaacgccactccgggtccttcgacaactgttgcttgtaagatctattaacagtgcctgctcctgagtgccacaggagccaatgataggagtccgggaagagtcccattcactgtgctctaaccgtctgatctgctcctcggccacagagagagcattctcagcagccactctttggtctcgttcttcttccagcagcttccttaattcattcacttcctgtctggtgttgcgtagctgctgctgagcttcagaaaagctttgctgcggttcccttagttcctcagggtcactctttctgtgaactccattcttttcctggggagctcctggagcaacatctatatttagtggcccctacataaaactcttgtcttgattagatttttctcccagattctcattcttgaatttctcctcttaaaagttaagtctgggccgggcgccgtggctcannnnnnnnnnnnnnnnnnnnnnnnnnnnnnnnnnnnnnnnnnnnnnnnnnnnnnnnnnnnnnnnnnnnnnnnnnnnnnnnnnnnnnnnnnnnnnnnnngcctgcagctcttgaacctgcttctccaagactgcacagtgatttaaaaggtcaccatagtgctgctggttctcacgaagactctgactggtatcgcagagctgaatggaaagggtgtttttctcttccagtagctgagagaagttgctgttcagttgctgaattcttaactccttttggtgaatttcctttaagctgtcattgagctgggtcctgagaagttctgtctcataaaccagattttgtgacccatctggggaagctgatgtctctggggatgcctgtctttgg

SEQ ID NO: 433356 - DNA, 443 bp, Homo Sapiens
  misc_feature (295)..(295): n is a, c, g, or t
attttatagataaaataggaaagttgagggaaagataatgggatggcaaatagtctccccagcccagagttcaatatcctcctggttgctggctgagcttagactagaattatgttgagtttccaggacacccattttacgaatgttattttgaattgcctgttgtatgtgataatatggtaagggattttttttaaaaggtgaaatctcatagaggagataaagtgctgggattgtaggtgtgagccactgcgcccggctccaagttttcttttataccaaattgactaaaatnattttttaaaaatttgggggcatctcttttgataggtgcattgttcaacaagcatctttgggactttccattgtagcctaggagacatgagtggggagaaaaggacttaatgcttttctgtaggatagggcctactatagagggcctg

SEQ ID NO: 433357 - DNA, 1046 bp, Homo Sapiens
agtaggttggtattataacatttattaaaataatgctgtgggttaatagaaacagcaaagaaccaaagaattaaaatgcaagctatgtaaaatcccaactaaaacccaaaagtgtctaatgtattcattcattagctaactaaaagcccaaaaaagacaagacacccaatataataaagtactgcaaaacaattggcaattttcagttatcaaaattgtggattttgcattttgtatccttttctcaatcaagaaaaaaattctttttgaatgttatataacatacatataaaacaagatagaaaaatacattataaacttgtaacaatggctgtaaatacattatcttacatgtttctcataggcaataggttggttatggtacatacatagcatgaaactaagataataaagaatagacaaaaatacatgtcagctgtacgataacatacaagcgacactcccatctacccacgctaaaaaattacataatactgtcagaaaaaaagtcttaaaaactacatattttaataagaaataaattcaataaagaatgataatactgagaaccaaggcattcagagatttcaaaagtcatgctttttttcagttgatccaaaattttgtcaaccaagttttcaaaagtttgttcagagccaacattccctataaatgtcacacatttattatttcatacatttactttcttccccataaaagacctttgataaacatctaaaatgtccaggtataacatagttgagatgaaactggatcaaatactggtattgtttttaacaactatcacctcaagtgtttgagtgtcgcaaatttattcaaccaaccaaacaatataaaaatcaaaatggcacagcatatattgtaaataaatcaaaactgtatgtgtaacagaaagacaaagcagtggcatattaaaccaaagctagctggatacaaaacaatgaatgtctattgcatagtaaataaactgacaacggtttccaagtgagacaagatggtgggggaggtcaccaagaaggtaatcc

SEQ ID NO: 433358 - DNA, 756 bp, Homo Sapiens
  misc_feature (97)..(160): n is a, c, g, or t
  misc_feature (504)..(516): n is a, c, g, or t
ggggcacattggggctcggtggtctggtggtcccttcggtcttggccctatctgtcctttgtttttgtgatttactatcaatcatcacgaaccagtnnnnnnnnnnnnnnnnnnnnnnnnnnnnnnnnnnnnnnnnnnnnnnnnnnnnnnnnnnnnnnnntctcactgcttttcagtcttctctgtacttcatttttgtgaaaaagtgaaaatcacatataatctttatttaaaaatgctcaccaagcactgcagactttggagttagggattcagcagcttgttccagtgaaaaggaggagtgaagctggggaagttagtatctaagaggggcaagctgattgcatgtgcatttatacctatgcctttaaaacattcccataaaaagtattaataaagaaatttccattccacactagtactgatgaaaaggtggttgattttgccttgtgataattatcaaaggatagtttttcatccttagattttattcacatgagagannnnnnnnnnnnnctctgttgacttaggaacacatcataaattcacaccaactgacacgttgctgacgtctgtacttgacataaccatttttattcatacaggaagcattaaatataaaagatggtcagttttgaagagcaaagggtgctgaaatgacttgtacggttggctggtgctttctcaaatggattgccatagttcattactagtaaagaaaaggaaaatgtgatttacgttgtcatttttcctatt

SEQ ID NO: 433359 - DNA, 2280 bp, Homo Sapiens
  misc_feature (83)..(92): n is a, c, g, or t
  misc_feature (275)..(351): n is a, c, g, or t
ccccccctttaacccttaaaaaatttttatttttccccctagagggcttaaatttctggggggggaggtggccccattttggnnnnnnnnnnaaaaagaaagttcccctccccaaaattcccaaggttcccagttttcccactccgggggggttaaaaagggggcccaggccctagtttttaatcggcccccctttggggccccctttttccaaaaaaatggggtgggggtaaattgggcccccccgggggattttttaaaggggccccccctgnnnnnnnnnnnnnnnnnnnnnnnnnnnnnnnnnnnnnnnnnnnnnnnnnnnnnnnnnnnnnnnnnnnnnnnnnnnnnctcataccagctcaattttaattttaaagtgacaaatgtacaggtggaataaaattttaagcgacaccctccaaattccttttatatgacaagaaggagctgaatgtaattttacaccattaccaactaaacagtagttctttagcaataattaggaagtcacagcacaaaaacgacaccccagagttgtggtccatttataaatagattttcacctaggcttcgttggaagaagtgattttatatctatcctcaccaatggtcaaagtgggcacaggtgggctgtttctatactttgagcaaattatgcctcactagctggcaatgttttgcgggaacctggtccgtgcagctggttcaccttacctgcatggtctgatctgcactttgaccctcctaaggaagatccctggtctgagtgaaactctcaggtgccatgtaaccaaataagggtagggtagatctgacaggtggcctctgctttaacccagcagcttacaagttttttgtgacttggggaaaagaaataagcagtaatggctaaagactgaggtaaccctaagttcgaattgtagtctacctgtcatgaataaaataatgactaatatccctccaaacaagctataatttacagtagtagtccatacaaactgtaatccacagtggaactcagcgaagttcttaccaaaacatcacttgagcaggaaaccctttgtaatatggctgtgcaatgagaggaacgatcctttggaagggagctcaatctgggagaatgaggtggaaaacactggggagttctatgcctttgcagaccctcaagtcaccccggattactggtcagagaagctggctgtgccatgggccaaaccagcagcattctcccttggcttctgttgctgcactgaggctgccggggacacagaaggatttagttttctttacaagtaagcactttggtgggaaagcattgcaaaagttgtcaacagaaaatcattaaaaccctgaagaacaaggtgtgagggtcacaggcaaacagttatcagcatatgattcaaacactggtttgtcctcaccacagagcttggaaggttcagaaaacttccaagagagatgatcagacactcacgttccatccactgaagggcacagaacagtaggaactaagttggccctgttaagcaggcacatgcagccatgtccgatccacggatgtgcttttattctttaagaggatcatctagaatcctcagaaatgttatcttagcagccctgagatcatgccctcaataactctgccaagggaagaggggagaaaccacagacctagagatgagtcaggatgcccactttgtgccttggggtttgctaggggggctaagctgctaactgggctgtgccttattggtgacactgaattatgcaaagccactagaagcacaaagtgttggtgcaatcactgacatctcaaaagtatatcctgaaaatagaaatgaacagattccatatgcagactagaggtgatttatacttaaaacatttaaatataaattaagctataacttaagttacaaccaaaagaaaagccaaaaagacactcagcaattaagaatgctgaacacatacacaggacatcccaaacacaaggccattaaagcgatgtcattttcattgtgccaactttacattcatcatgtgctagtccggtcgggccacgctgccccgcaccacgtcatgccgtctggcactgcactccagcctggggcccgtcttcgtcctcctcgtaggcctccctgtgctgacgccagttctgctcattgggacaaaactccttcagctccacctgatccatgtcatctgtaatcctcactttctgtcgaggagggagtaaagcttccagctgaggaagcttttccagagaaagccagtgtt

SEQ ID NO: 433360 - DNA, 1620 bp, Homo Sapiens
  misc_feature (887)..(895): n is a, c, g, or t
tttcaggtaaaaccacactgcctttatttggctaaagaacaaaatccaaaataactcagaacaaactaagaacagacaggaaaattacagactgaaccccacttgaggaagacttccccacggactcacactggtgatggggcgaacgttcaagacgaagccagcagtcctttccaagactcttttgtcttttagggatcctcaatacaaaacaacccaactaatccaggatatgtgttcaaaacagtcagttttccccctcaaaaggcgggaaggcccacttcaaacctccaggaacacaacccaagtcatcccagtgttaaacctggtgcttccgttttctgcctcaatccgagcgctaacataaaatcttggcagacaacaatctttcttcttcaagaaaattaacatttaatggtataatcccaagaacatgttctacttatttacttggaaaaatagaagctagggaccactctttatccgatggcagtctattctatgagagaaaacaagaacaatcattgttatgactttgaaaaatagaacctttaaaaatacttatattggtaagcttaaaaaaatatcatcagttaaaaacattaagggggctttctttttctacctgtattggttcaacttctggtgagaatgtgtgctgatagaaaatttagaagctatggcttttagggaattaaagaaaagcagcaaaatataattgatttggaaagattttggataagtgatctggaacaggattaaaaaggcaaagagctcttgaaaataagctacccatagtcaaaataatccaggaagggggaatgacgccctatgaaccactgtggaaagaacatctagagatggtctgaccagctgtgcagcctccnnnnnnnnntcactatcgctcaggtgcagcccccctaaaaccaccatcactcaggtacagcctccaaaaacaccaccatcactcaggtgcagcctaaggagtcatcagtgatcagaaagtggctaagtttccttagcctccctcatattttttctcttcttcaggattttcaacctcctcacatccctaactttcttacccaagcctcagcaatataatggtctttggctctagctatcagcaatagctgcaagagcacaaatgatcccttcctagtcctctaaagtgtcaacctccattcttcagtgcttctgaatctagcataagaccaagctttccgtccggcccaccggaaggcagtggctgcgccggcacctccccggctctggccttctaatgtctcacacacagaggctctgctctaaggccaacacttctggctctctcatcttggccacatttggcccacccatgttgactgctttctcgtgtgtgattcagggaaacagctccatagcctcaaacgttaatatctgaagatttagatcccaggcattgtggtggtgtgcacacctctaacctcatttaattaggcacagatgaccacattatgcaacttcccaacagctttctccatctacccgtgctagtccagcacctcagaccacatttaccccaaagtatctaacaggccacactataaaagattttagctttcagtcagacaaatagct

SEQ ID NO: 433361 - DNA, 1073 bp, Homo Sapiens
cactggccatgggaaaatcatttcttttaatgacagagaaagcacaccaaatgataacagaagcctcattgggagttaccactgtacaaatcaatgcctggaggccctgaactagcattagacattcacagggaagtcagctgaggttaaggaaacatccacgcagcatctctgaggatacagaagtgggaggaggaaggtgacagccgcaatgcacacgctgtgtatctgtagcttggactcttcttcagggcagttcttgttttccttccacattgggatgggtaggggctgggggaggtttgcaaatgatcatgtggaagagaggccttgtgtatcagcctcgcagaagagccaatactgtagacagatatcacccagatgctccatgggccatgcccatgaagcgatgtgacattggtcctctgaacaatggttcagggagctcgtacaacagaagaacagtgggtccttcacaatctagggtctggcacaacttcctgaaggcatgctaggaaataggtttatcaacaaaacttggctgtccccaagggtaaaagtcattctcctagtttttactgcatgtatctaggtttcaaattaaagaacgagaagaaaggccgcaactgaaaagttatctggaatactgtggcactttaccaatctcttttgcttataatatatggcagagccaacgaaaccctgttgatataaactttcattataataatcctgtactgtacactctcagaatacagaaagaatccatcctatcatacatgtttcatctttaaaaataatctaacatagtcatactctctggctagtaacaaactattaacatcttctgagaatacagagaaaactctgggattaatagtaaattctctgacgtgctgcccccctcccccattcagcatcatctatgaacacatttctgcaaaagcatccccaaatcatccgtaactaggaaaagaaatggatatgttggttccaccaaatggagttttagctagaaatgatggaacatttttaccttggcaaaaatgaagcacaaacgtaacatttcaccc

SEQ ID NO: 433362 - DNA, 1234 bp, Homo Sapiens
  misc_feature (1082)..(1082): n is a, c, g, or t
atttttcttaatatttttaacattgtgtcttttaaaagaaatgttttacacagttcatccaaagagcagagaactgaacttctcactattgccttggccctgacagctgttaccagcacccttttcccaagaaaagtcaattcccaggtgcttattggacatccttcgagggggaagaggagggaagcggccagctcacccttccgggaccctagtgtggggcgaatctcacggacctgacctcagaggtgcaccagtgccgcccaggtagataagagctgcagcattgactgtgcctccgttcttccctcggggattgctcatggcatgggcctcttacgtgctgtcagcttgatgtgaagatcaagttcagtgctgtgggatttttaggaacaaaaaactgtgacgtctggatttggggttgatttttgtgctggggtgggattatgggtcaatgttgaagaatttttaagtctgtattatgtttaaaacatgaatgatttgaaagtttaaatttttaatttttatatgtggaaattcttcctgttggctaaaggggaagctcaagtggtgtcgtcttttgtgctgttaaatatatattctattctttggaagaaggcagagagaggagtcttattatttttaaatgctcctagttgtatagtctgtctgttgtacatagagttcagcttgttttttggctccagtaggaaaaaaaatccatccatctgagatggggtcctgttgtttattatcactctagaagttatacattgatatttattctttctgtccccacgttgtggcacctgtagacatcttcaaaattggcagaaaagataatagttataaaaattttagttcatttatttttaaactcctttcagattattttaccattaggaggaggtagattgtttcgtcttcctgtctgatttttgttttgtagtatttaattttgtattcctctgcagttttaagaaacagtgtttttcttcggtttgctggaacatgggcgttagagatggtaataaaccgtggtcctttttgcgatgtcacgactcttcacctgcctgggctgntgtgcacacagtgcagcctggatcctgtcgatctttacttgtggcggagctaatggtcacattgatagttgattacactgtggcacgaatttatgcagaacactgttattaataaaggaagtaaagggctgcaagatttgagagctgccacc

SEQ ID NO: 433363 - DNA, 877 bp, Homo Sapiens
  misc_feature (30)..(30): n is a, c, g, or t
  misc_feature (51)..(51): n is a, c, g, or t
  misc_feature (788)..(788): n is a, c, g, or t
ccccaccatggtgagtgctctgtgccttcngctcacctgtggtgagttggngcgagctgggcgtgcttggcgagctgggctggggagagcctgtaaggaccgagaggagaaatgagaagaaggaacaaaaatattatttctatgtaatttatattttacttatgccaaattatttatgataatttgccattgctatactgtaccagtgtcaaatgctgcagcctgccaagctgtgattttttgaggcttgtccctatgtaggatgcaccgcaggcccctgggcactgaaagagtgtgcagtggactttgggtctcccatatgcggtgccgcccaaaggtggctttgcctcaaagcaacctaccctgatgttttactcattggaatgtttttccccgattgtggatgacttcttttctgatggagagagtccaggagggatggaaaactcctggatttaagctcagcatcccccacatgggcttttcgatcatcttcaggcctgaagctgcacgacctgaagttcgcctgcatttatcagccctctttgtgctgctccttgccaccttggggttcctgctggggaccatgtgtggttgtggcatgtgtgagcagaagggaggatgaggaaaaagagaagaaaccccggtactgacaagctgtttttgagtgccactgtttgccatcatctaagccactgaatcaagtgtatttcaggcttatttcaacattccaatgccctggttttcctgcttgaatctgttcgtggtcaaaggtttgggggaatttntgaccctggaacatccccagagtgaaagatggagctgggccacatcagaataaggccttggccccatcctctcacagcctaggtgctct

SEQ ID NO: 433364 - DNA, 2231 bp, Homo Sapiens
  misc_feature (364)..(380): n is a, c, g, or t
atgacaagtgggcatgagtttttattctcagtgcacagcagtattggtttctgttcatcagcaaaaagctttattggctccaacaaattatcccttttaaaactcctcttcttcttctggtctcagtggaacaacacatttgaatttcagatttgcagtttatagcattttttttccctaagaaccatataaatacatgcaaaaccttgtacatagagcttaaataatatcaaaatgcaaatatagattgggtgcactgttaagctgaattgcaaattatggcaacacacactggactggggtatacgttgctttgatatcaccatttgtttgtttatgtcatgcagaccacaatagtcaatcnnnnnnnnnnnnnnnnngtacaaaaataccagtgcttgttatactagttactaaaagaagaagaaactcaaaattcctatctgcgtgctaatttgaaaagaacaacgtagatagatttgttggcacatatatatggcatattcacatatggcatatatacatatggggagaaaacatgaaccaaaggccaattcagttatgggagctcatctccttccatctctcctaatcaagagcaaagggaacagcaggcctaacagcagggttgggaaggcaaaaggactggcactgaactaagtgaaagggcgtctggtctattcagaggaagaggctggaatggcttaacaatagcaggcatttataagtgcccaccctcaccaatgcatcgggggtggtccctagatatgaaaggtgaggaagtctctgcatactgtgatggtaccacgggctgcttcaattgtaaggcaaaggaagcaggaaagaaaggaagggatgcatttagaggcttttccacacaagcgagtgtgccacgcccctctgggttttcagcagtgaggtaaccattcagatttaaccatgccaactctcctctctgaagctcaaggggaagaagaaactcaaaccctaaagaacccacaagtgtccagagggatttctaggtgatctctctcttaacccctttagggacaggagagtcattccagaggacagatgatactatgggaaggatctagccttaagactgtcactcagggctagaaccagccattgttttatccatttagaattctgtccccatttaatatattgcacaaaatctttctaggggagggaaggcatcacaaataagatccttgcacaaaaactcactaatggaaaactccagggggaacaggaaataaaaaccatgaaaaatgcaaaccccaaatcagagtatccttatagaccaggagatattcgtgtcttttataccactctgccagctattcttcaagaaacacaaatccaacagaggcccctgatcctaatgactagtcaggaaagattctgtctatccatctgcatggtgggggttggggggaagattcatttcctgacagctgtgtcccttgctgggtgttttcctgactatccacagtttactacccgtttttctaggtttattaagagaggaagctaggatgatacgttctccttctccccatcagacccttttcaaatccaaagcaccattttggggaaaagtgttattaacttatgccatatttacccactgccagttggatcagtgaaactgaatagaaaaaacttatataaaaaacatatgcacatagacacttaaacttacctaattccatatcaacaaaatttatattaaaaaagtctagaacccaacaatttttcttccctaagtataaagatggctgtttgcagaaagaaagtatggtgtattggttttaaaaccaattacaaatatactaagtcacctgtcatgccaaacagctggttatgtgctcccttccacagggctacatgacggcactttattttaaatcctttaaacaaaatacatatggctgacccaaaaatatcagtttctgatctaaagaaaactataatttttgcatatatttctatattttctctcctattatggaaactagaacacaagaaaaaaaaccattgacttttaaaaagtagacacaagccctcaagggtaacctgtcaggcaccatgagaaccttttgtgaacaggaatggtaaaatagccttcaaagctcgttattggcttgctatttaaaatgatctgaggtaatacaagatttgatagaattaaatcttctaaaatagttgatgaatatatatgt

SEQ ID NO: 433365 - DNA, 854 bp, Homo Sapiens
  misc_feature (19)..(19): n is a, c, g, or t
  misc_feature (25)..(25): n is a, c, g, or t
aaaattagctacttcctgnaagccnagtgggcccagcacagcagccacatctccagcccccagccgtcaagcccgcagcaccttacagagttgggccacaattgtaggttccgctgtgagttccttaatactccgtgtggggtccctaaagacacctgctgctcccaggacatttgagctcccatccactatcctctcgtcgtcgcagccagtggtcagcctgcatgaggctcagctcaggggtgtcatagtaggtgtctcggaaggtgacccggtactccagggtgccccccaactcctgcagccgctcctctgtgccaggccctggaaggaactttcgctccacctcaatcaagccctgggccatgctacctgcaattggctgaacaaacgtttgctgagttcccaaggatgcaaagcctggtgctcagctcctggggcgtcaactcagtacagaacccctccctggaaaaacttatgaggggcacactgtgtcgcaatagtctctagggctactgcccttttctctctacctcggtgacattaaggccccgtcggtgatattttaaggctctgacagtgacaggtctccagtaaaatcccttccactgctgctgatgtcctcaatccaaagagacccctagaaagcaggccgggtagcgggtgtcctttcaacgcccccctctctacaccttgccaccccaggaggctactggctcacgacccgggaggacctgccctttcctgctacactaccggccagcggaacttcaggtctcacctcaaagcccgagagtctcctcgcgggacccacagagggggaagggagcccacgccatacactcgcgaggaat

SEQ ID NO: 433366 - DNA, 1194 bp, Homo Sapiens
ttttttttgtgaggaaagccatatttgggtatatttgaagtggaaagtgtgtatgaataacagcaagggaagagcattcttacataggaggtatgcatcttcccctgagccttgagaacctgtctcaacacgggggcggggagggggcagctgttggttctttctaaccctctccaggtcagggaacaaatttgcccctaaacttccacaggaggcactctaccctctgggccagagctgggcacagtggcaaagtcagattagaatttctagagttctaacagcgattcccaaccatttcctcaacttttcttctgtttcccacatcccaaggcagggaaatccctgctgcctctcctcatcttctaactcagctgtaaggcggtttaggagccgctggcagaatcaatggcatcgaccaagggagggggggtggcaagggattttcctgtgcttaactactgatcacggctaagtggaaatcctataaacacgagcggaaatcaatggaggctgcttagcggccaggggagaggggcggcccacagattgcatctgacggatgagcgagaggaagcagccagggagggctcaaggaagagtagcttagaggagggggaagaaacaggcagcgctggagagagaggagtcactgtcagaagggacactgaggggagaggcacagtgggcccaggagtggactccgttagacccagagttcccttccccttctaggaagtgacacccctagcccaggcagtggtcaggatcttcagtctcctgtggcctctctctggagctgttcacttctagcaggcgctgatagtcttgaggccggaaacgctgtagatacacaatcagcttggctggtgctgtctcctgtgcaggcacacctcaaagcccgagagtctcctcgcgggacccacagagggggaagggagcccacgccatacactcgcgaggaatgccgggagcagttccggatcccggacctcggcccgaccctccgcgcgcccggcaggtcccggcaccagcggccatattacgcccgttgtggcggtgccgagagcaggccagggctcgagacacgcgctatgtaatgggaggccgcgacccccgcggtggccaggggagcgaggccgccccttgcattctgctcctcattgttggccccgcacggctccccctcgtgcc

SEQ ID NO: 433367 - DNA, 1186 bp, Homo Sapiens
gaggggaagaacagcagccctgagaaagaggatcctgtcagaaggacactgagggagagcacagtggcccatgagttgactccctttagacccagatgttcccttcccctctaggaagtgacacccctagcccagcagtggtcaggatcttcagtctcctgtggcctctctctggagctgttcacttctagcaggcgctgatagtcttgaggccggaaacgctgtagatacacaatcagcttggctggtgctgtctcctgtgcaggcacaccaagcatgctgctgagcctgtggatcttctctagggccagttgttacttcagcttcctcatgcacccagggcctttacttcaccccacagcgtagccaaagtcggctgtatccaagtccaccctgagctgtggctcctcttcatcagctcccaagagcaccagcttccaggcactccgcttagtcacaaaactagctacttcctgcagccccagtgggcccagcacagcagccacatctccagcccccaggccgtcagcccgcagcaccttacagagttgggccacaattgtaggttccgctgtgagttccttatactccgtgtggggtcctaagacacctgctgctccaggacatttgagctcccatccactatcctctcgtcgtcgcagccagtggtcagcctgcatgaggctcagctcaggggtgtcatagtaggtgtctcggaaggtgacccggtactccagggtgccccccaactcctgcagccgctcctctgtgccaggccctggaaggaactttcgctccacctcaatcaagccctgggccatgctacctgcaattggctcaaagcccgagagtctcctcgcgggacccacagagggggaagggagcccacgccatacactcgcgaggaatgccgggagcagttccggatcccggacctcggcccgaccctccgcgcgcccggcaggtcccggcaccagcggccatattacgcccgttgtggcggtgccgagagcaggccagggctcgagacacgcgctatgtaatgggaggccgcgacccccgcggtggccaggggagcgaggccgccccttgcattctgctcctcattgttggccccgcacggctcccgggggctggtacaggtctcatgcctgaggctgagccaggcaccccatcccgggaattc

SEQ ID NO: 433368 - DNA, 334 bp, Homo Sapiens
  misc_feature (19)..(19): n is a, c, g, or t
gaccggacatgggctgtanctctgtttagtcactctatgagactgcctggggcagggattgtggcttctgttcctatagtgggggaggctgggatggacgcgccaggatggaccctgtcagaagtagctagttttgtgactaagcggagtgcctggaagctggtgttcttgggagctgatgaagaggagccacagctcagggtggacttggatacagccgagctttggctacgctgtgggtgaggtagaggccctggtgcatgaggaggctgaagtaccaactgccctagagaagataccacagggtcagacagcatgcttggtgagggataca

SEQ ID NO: 433369 - DNA, 996 bp, Homo Sapiens
  misc_feature (56)..(65): n is a, c, g, or t
  misc_feature (934)..(934): n is a, c, g, or t
  misc_feature (936)..(936): n is a, c, g, or t
  misc_feature (938)..(938): n is a, c, g, or t
  misc_feature (953)..(953): n is a, c, g, or t
agtaattattatttttaaatatttgccctcattagttgttaatttttaagtgggtnnnnnnnnnngctcgctgacataatctcccctagtgaaaacttggggtaatatatgtaagaaatggcaaataaataccttagttaatgactttgtatgtagaaatttgacagcattacaaattaagtgaccattaaaaacacagcaatcattcatactgctttcataggtgttatgatagtctctgattaatcaatctagtatgaattattttacaagtgttgtcctgtttcatatctttgaagtagtagtgaaattgtaggccattttcttataacatttcagttacttttcagttaattattcctttaaaaagaaaatacagcagaacctcactgtagcattctttactgcagagcaaaattcaatttaagatgggcttctctgaggtccacatcatggcagttcatttactcttgtgccaaatggcaacaccacgtctaaagcagtttcacagcatggtcccctacaatgttataccaaggctctgatgtatttcttttagtagtttctaagtgtaaaatttattctaaatgtttttatggctattatctatttcatcagttattgaattaagaatgattttcattacttgagtgggatttgtgatttaatgacagttgaataatcaaaaatattttattaggcccccaaaatttaatagatatctatttctgttacattttattactgtatggcacaagaaagaagtgacattgggtatgttagaaatgaaataaggagtaaaaatgcattaccatttgtttaataattatctttacagaatgctagtttaatgacttttttaactgaattttttgaataaatcagaaatgtttgtattggtcacagatctatcataattgcttttctgatgcantnanaaataaatggaacantgaaatgtatattaccgatgcaaactgtggataaagttgaaag

SEQ ID NO: 433370 - DNA, 2303 bp, Homo Sapiens
  misc_feature (343)..(343): n is a, c, g, or t
  misc_feature (1828)..(1836): n is a, c, g, or t
agaaatgtagaaaattttctgatgctgtaaaaagttgggtgtctcacaggaaagacttggttgcctcatcatatttggaagaacgaggacttgtgaaagatggtgtcacagttcaggcgctccttgaattaccaacaaccaaggcatctcagctttctgtggcttaatataacattttaaaattctaagtgtatagtttcatttatttgaagtgatttcaaatatttcaaattcatgaataagaatattccgtcaaaaatagtttgccttaggtcacgccttaggattttaaaaaaattacattgaaacatcaaacttaaacattgaattgcccgaacttctntgggggaaaactggattaacttaataagagtattgataaactcaaattctctttttactaagtcagttgataatcttgattatttttcagaaagcagactgatactaaatttaaaatgtagtttcaatttaataatcacattaggtttaattttttttacatcatagcatattagtaaacatctggataacaggtaattttttttagcaatttagagcaattctatatttgagttatttaatacacttctaattctagtttatacacaatttcttcaatctttggtcttagttttctagaaaaaaggagtagaaaaaacaattctggctttatattaaattcttttagtattataggttggtgccaaaatattttcagttgtactgtagatggtttacatgtgaaggtgcctgtgtaattgatgactcttacatagtcttaagcatttttgcaatttttttaaatggtattaatagagtcaatggaactttaaaatattttagtagattttgtaaagtcagtaatatgtgaggatttaaatgagcctcacattgtgacatttgtggttttttagttagtccattgcagtttcccttaaattggttatttcatgttgtcaaaaataccaatgttaatatgattaatttatgctatttaattttgtgaaacttaatcatcttttaaaatgtattatttgaagagtattttatttctgtattgaaaatgttacacaaagcagtaaagtttttgagaactagtgaagtactaattatcaaggacattttgataaaactgccaaagtttgggtttatatcttccctttgagcagcattctatcagtgctgcctttagctatactcagagagcagcagttgaggaataggtttttactcaaaatctggccatttgtgaatcctgtaaaccttgtgatcttcaattactttgatgttaaattaaacacagactcttctataaatattttcatgagatactgtgttacacaaagtccttgttttaacttaggtatgggtaaatttacattggtggtattgcaggaatttttcaaaaacattactgtaatgaataactgagtttcctatagaagaacctgaataattacttttgtagtaaccaagcaagcatcatatcttaagtatgtgatcatttgcacttgttacctcttaatatggatgcaacttattaaaaatgttggcctgggtatttcaaagggtatatataaaaggtaaaaaactagtgtgccaaatggtataggaacaactgtactttttttgatcagttggcatgaagccatagaattaaattttggctttagaatacagatgtgttcattacattccccaagggtcaaattggagcttttaaagaattaaagcttctatgagtatatggtttaagaattaaattattagtaatttattattttaaatatttgacctcattagttgttaattttttagttggatnnnnnnnnnctcgctgacataatctccctagtgaaaacttgggtaatatatgtaagaaatggcaaataaataccttagttaatgactttttatgtagaaatttgacagcattacaaattaagtgaccattaaaaacacagcaatcattcatactgctttcataggtgttatgatagtctctgattaatcaatctagtatgaattattttacaagtgttgtcctgtttcatatctttgaagtagtagtgaaattgtaggccattttcttataacattcagttacttttcagttaattattcctttaaacaagaaaatacagcagaacctcactgtagcattctttactgcagagcaaaattcaactctaagatgggcttctctgaggtccacatcatggcagttcatttactcttgtgcccaatggcaacaccacgtctaaagcagttcacagcatggtccctacaatgttatacca

SEQ ID NO: 433371 - DNA, 700 bp, Homo Sapiens
  misc_feature (688)..(688): n is a, c, g, or t
catgagtactgtgggtcttagcctcaactcactaaaaggcctctagagacaataattaaaataacccgtggctcctcgaggaatggaggctaaggagcaaactgccaaacttattctggctggaattggtggctgttttctatggaacacacaagactcaagaatggccaatgaccactctcactggggggttgcagttggcaactggagggatgctcatatttaactgacttagaattggcttgtgtttagcttggcatgatggtattcccattgtttagtatttcaatttcaacatcaaaataaaggctggataagggtgaatgaggaggtagctgcctcacccaagacaagtcttcatttgaaagggtggctaattacattttccttaatttacaaattgtatttgacccactgtgtatttctttaaagttcgcacagagtttggggtattcattttcagaagagaaacgttatggatctgccttcaccctaaatccctaaatcagccagagttcctgagatgaccagggcaggctgttgatcaaagttcagagaaagtaagctcaccttaatgtctccccagttcctttgccaactcccctcatctactccccagaggccagggcccacctcatgcatctgcaggccacaccccatggtctatgccttcccatcatcccctaantataagctcact

SEQ ID NO: 433372 - DNA, 431 bp, Homo Sapiens
gatatattggatctaaacattttgaatcttgaagatgtaattccatcagcagtttctggtggtgtgctactccacagacatcgcagagtgtgagcagtatgcttggtgacctcaagtctggcacagagagagcttttccattcaaaagttgtctttcttcggttgcataatccattaattctagcatagactagtaccctagctctgtggccttccctgagtcttaggaaatctatgataccaacatattccttctatatgcctcccctacctgttacccttacaaccctcctccaacagtttagatactagagtcactctcatcaatcacagatgtgcttagcaatgcataacctaaatacttttttaaaaaagaaaattgtacattgtactgggtgccacatatataaatcccattattttgtttattt

SEQ ID NO: 433373 - DNA, 1255 bp, Homo Sapiens
ttttttttcaacggaacaaaagggtttcatacaacacagtatcaaaaagtaaaaggaacacactaaatgcacaagctggtggcaagtaagtccacagcctattgtgataggtccatccagcatcaatcagatttcttctcatctgttatctcaaggttatttacagatgtgttgactaacaagagtctctcatgggaggatgggcaggcttcaatcattggtttcgggatctgtctgcgccatgtaggcatccaactcagcatccaggtgtccttttgttttcgacatatatgcatccaattggttgtccagctgctccttggtcaatacagggcgagcaagggcacctctccctcgtccacggcctcggcctcggcctccaaagccccctcttccccgacctatcataccccgacctctaccaccgattccgccacgacccatagctccacgccctaggccccctctcccaggacctccacgacctcgaacaccacctcttcttaagcccattcggggagctacggctcgtccacctcggagcaggttttgacctcggagtgacatcccgcccctaagtagggttctggtggcacgtcccccacgtagtcctcctctgggcaagcctctctggattatgggtaggcctcgtcctccgattgctcccctggccagggcccctatgggtcggcctaaccgtgcctggatgttactcttacccaggcgctgctttaagctctgcttaagttttaatgctgcctggacagagggtctattctccatctgctgggccagtcttctgtttctggcactggctagctgctgttgttgctgcatcgaagcccgaatattcactggcgtcggctgtttgttcttcagcatattagtaaagcgctcatttagagacatcttggtggtgctttttagcacaactttcggcgctgactgtgcagccatcttcgaatcccgagaatcgaaggaaacagacgccagtgctcctcccggggctgccaccacggctccggcaggcgggccggggaccggccgaacctgagttgacggtggaggggctcgggttagctagatgggcggttggttagatgcgtaagcggtagtatgcgagctcagttcgttgttgctggttggctgtctagtcggccgatccgtctgctcacccggcctgccctttcctgcctttcgtctgcagcggccgccagctcctgctcggtgtccaaaacaaaatggccgccacccc

SEQ ID NO: 433374 - DNA, 457 bp, Homo Sapiens
  misc_feature (14)..(14): n is a, c, g, or t
  misc_feature (292)..(292): n is a, c, g, or t
ccccggaacaaganggtcctaattctcccatctgctgggcccaatcttcctgtttcctggcaactggcctaagctgctgttgttgcctgccatccgaagccccgaaatattccactggcgtcggctgtttgttccttcaagcatattagtaaagcgctcatttagagacatcttggtggtgctttttagcacaactttcggcgctgactgtgcagccatcttcgaatcccgagaatcgaaggaaacagacgccagtgctcctcccggggctgccaccacggctccggcaggncgagcggggaccggccgaacctgagttgacggtggaggggctcgggttagctagatgggcggttggttagatgcgtaagcggtagtatgcgagctcagttcgttgttgctggttggctgtctagtcggccgatccgtctgctcacccggcctgccctttcctgcc

SEQ ID NO: 433375 - DNA, 1493 bp, Homo Sapiens
  misc_feature (1401)..(1401): n is a, c, g, or t
tcctcttcgtggatggggtaagacgggaccgtagggtgctgtcggggaccttgctctgcggcctgcccttctggcggctgctgtccaggatgtgttcgatagccgcgaggggacagctggcctgggacagccgtccgagatgcctgaataggtgatttcttcataaagaggggccgaggggatggccggggagacagcccggaggccgttgagcgcctcgagcagcgagatgggctcgtagccaggtgggacgctgtcagagtttgtttcccttttaggtttcttgctggccagggaggcggggtgcggctttgattttttaaagggacaagagtgctcatcatgctccaggctctgggccaggacggggctgaaggacacgggggacagggctcctggcttcttccgcaccgcccggatctgcaggagggcccggaaaggcagccggcagatggggcagttgttggcctggtagcgcagcgtgtcggcgcaggaggtacagaggcacaggtggcggcagggcaggatcagcgtgtcccgcaggtcggacaggcacaccacacactcgttgctgttgtcgctgttctcgtcgtccgagggcttggtctcctggttgttcttgttctcaatgccatagatctcctgcaggaggtagctgacccggtccacaatttgcttctgctttaaaggcttcacagagaagctgccgtccatgtgcttttcaaaggcagccaagagcacgtgggcgtggccagtcacttccaccacatctccttcgtccaccacagcctggatgactactggaaacacgccccggtccaggtcaaagttcagctcgtcatccttccattccgagaagtcaatcttgaaggagggcagggagaactgctggctcacccctctcttgtagtggacggtctcggactgtagcgaggggctcttggggctgtatactgccctgccgttcaggaactcctccgatgcctggcagtagatggtgatggccacgcgggcatcggcgtcgaaggtgaactccaggctgtagagcacccggggcttgtcgccgtcctcggtggggctgtcggcatcgtctttgtacctcaccagccgcagggagtctttgcggatgttcaccaggctccgcagcgtcttcacgggctcgtggggggcaggagtgacgtagggaaactggaccgggcggctgcccaggaagttcagatccatgttctctccaaagaggtaaccttcagggtggggggtgtcgaatttctctcctcccatgaaaaagtgcgaagcaaagtagtttccggacttcggagggtagcgataggccgagttcgcctggatgtcgatgtcctccaccccgcgatgcggcggctgagaatggagcccatggtgcgngcgctgccgggcagaggggccagggccggaacgggagcggcgacagcggcggggtcctcacgcggacatggcccggaccaggccgcacggac

SEQ ID NO: 433376 - DNA, 1657 bp, Homo Sapiens
  misc_feature (4)..(5): n is a, c, g, or t
caannttagggggttaaatgtttattaaatcaagcttttaaattatatatccacctacagtctataaacaaatatagtacacatgtatgtaaaaggctagcagataagaaccagtggaaaaactaaagttccctttgcacaccggcacctcatcacaacaccctcttggtgtggatgccatggggccatgctgtagtcaaaagttaaatgaaaaaccacaagtttagtttgactccgtctcctagggtggatttcattcagatatttgttccatattataggagggtggatcctagcaaggcaacagtgtagtttttacattcacagattggctgaagtagtacaaattgagctgctaatctaggtgtctccctccctgttaccatacttcataagaaatgtgaattaaaatgaacaatggaccacaggtggttataaaaatagataactcgcagagtcataaatatctacagttagtagagcagaaacttctaaaatttacctttttccataatgtgcagaatatcctaagtatgttcaagagacacagtcagcagacttcagagtggtaattacaagggcatttgtaaagaaataacactcgagtacaaacccagagtaagaagctgaatgcagatgaaaatacgcaaaacacgcaaagttccaactcctcacatctcattatgctacttactagacaccacaattagcttacagccctttatataccttttaaagtaactttttgttacctgtgtacaaactttaacaaagatttttcatgagacaagcaaagtgggttaatggtggcgctaaaactgctgaaacttggagtgttttgtgtgctttcgtatacttctgtgtatggggctttaaaatgctccaacatgttttggatagagtttttaaaattcccatgaaaatctatttgataatcatttcaggtatagaaaaaaagaaatcctaaactggcgttgagggacaggcccaatctcacaaagtaacttaaattctaggaatatataaattacattcatatgttcatttaacacgtatcaagtgctatgtaaggtaactgtaatggattctgaagccaatctcatttaaaacagtacagtaaatcccattctaattctacaattaaagcacttattccaggtaatgtgcgtttcagcaaagctgacatcttgtacaacagtgtcaccttaaagcttcatcaaagattcacagcaggcctgaactgtaaaagttcagaaccaacaatgccacaggtagttattcatcctaatttctcgcagggagtgaagggtctacttgagtgatcctacggtcacctaagcctagaacagtgttccctgaaaactccagcaagtttcctcaccaaaatctcttcagtgtaatgtgtttgggacttgctaggctagaaaaatgggttccactgatgtataaacatacattcgacaccttcaagaggtgtacagacatagtgtttcccagactcacttgacctttccagggaacacctggaataatcactggctcttgggacagtcatttcctagggaacacaattagaggaatgccaagttaaagcagattttctaaagtagtggttcacatattgtagtaagcatcagaaacacagatgccacacccc

SEQ ID NO: 433377 - DNA, 2859 bp, Homo Sapiens
  misc_feature (1101)..(1112): n is a, c, g, or t
ttgggtttttttgaagcttttataaatgaggttaaacaaatgccaaattacggtgtgttagtacaagtctgtagcatctgtgtacagcaacatccatccaaaggcagaatcacagcctcgtatcggcctcgagtcttgagtcacattcatatcttaaaatacacgagtattccttttccgtctagtctcagttataggcagctacttcccagactctactttcacttctctctactttttcagacctggttcccatggcactagtgtagaaggttttagggtataagaagagggggcaataaggctaccctatcactatgacaaccaagaaggaggctggagcgtgaatccccaacgctgagggtggggagccatccctctctaccaaggtggcaatgatggagggaacttgcatgctaagcatccaggatgccatgcagcagacaccagggagcactgagccactgctggagcatttcctgcctctgccaggcggcctgcggcaaagtgtttcacataactaaaaaagtcaacacagtctcatgtatgcaattaaaaaaaagctgtcaaagtataaaaaacccaagacactggaagctgaaagacaaggtgagtagtgagagccattctccaggcacacagtggagtgctccttctcagcagctccttgctttacagcacttcagtcctgagtccagcacggcagggcatgtgaggctgagtacacctgctcttgaagaacacaggcttctgagtgatgttgctaatgtccccccacaaatgggagcagtgtctccggtggatgaaaaatttaaagtcaaaattagaaaactgcttttgattcaggcgtttcactttcctccccgccaggcctttcacctggctgctccacctgacgttctttaaaaggctggactggccgccactccatcatggtttgttttgaaatgcgacagagcctgtggcgtctgggtgctttctctgtggcaaagaggaacagtgggatccattttcttttaaaaatgttattgtacttgacagacttgatttcgcaattgcctttggccttagacaatcttaacaaataattaaacaaacttnnnnnnnnnnnntagcattgggggccctattttgtgagccatccataaccaaaaagaggtctgttacaggagcccaaagctgggacgctacatggaagacaccagtgtccctgcagtgcccacctgagagctgtgctggatgaagcaagggccacgtgagtaaagctcactgggacacagccactgccagggcccaaggatggcagggcctcctggcagacagcgaggcaacagtgagctagagcgggggcgcctggcgcaaccccaggagctgactggcatctgtgtatgtacatctgagggcttctgggtggcctctgggtacagactgtcctagtcatctcaggaagaggcagttcaaagctaacctgagaggtttcttttgaagagatgcaaactgatttcaacattgcttaactggaatttttaaaggtttcctaagcaactatggtctgatgtgtagacagtatgagttcccttgtgaaaaaggctaaaacttgtgtgagaaaaggaacatcacagtaaacttccatgagaggattccttgggtaaaatactcttaattattgatattttccaatttaacactagtagcttggaacttctaccttaagttgaacttttttaaaaaaataggttatttaacattgtatgacaatatatttacagtttaaatagaaattttcttttcaataatcaaaatacatccttagcaaaaatttagatgtaaaattttataaaataaacaagacccatagaaaagcatatttcagtaccatttcagacttagcctaagacgaaggttttccttaaatcctgacaccctgttggacaagcagggttcctcaggcaagatccctcttccagcaaccaatttaccttcctgattttggttgtttttacaaaatgctgatccaaaaagcttctccacaatggacactgcaacaccgatcagcagagcctttaagaagaaactgcggtggtgtctgtgggccgatgaagtaaggctgctgtgtaagaagccttttctgggttcccgccgggatgcgctgctggtgctgtccagccacctcgccatctcacatggtgctgtcgtggctgctgaacgaccagtggtgaacatgctggcttcacagggcccagcacgggcgtttacgtgagcaaactctttaagatcaccctaatactcatgcgggaatcaggccagaaacagattaggaacccaactcagtgaacgcacccagtttcgcttccttgtggttatatttaccgggtccatcttgaggaaaattcttctattcatgtggcttgttagagtaagaagagtagtggtcaactttggccaaaacgaaaagcttcgtgaatgagtgtctagctctgtccgagtgcatcagctctcgcgtgccttgacaggagtttctagcagaggtatgtgcacgtgcgctctgtgcgctctcagccacaccgcgggtctcagatcacaaacgatgacttgtgtctgaagtcgccctcctcgtcagtgcggatgtagttaactccatctggtttccctgggttcttgtaactttctccatcctgtttattgttgatgaagtagccacgtctgtatgcacagcagatgcccaatgtgatcagggccagtacagcaaggacaaccagaacccccccaataattccgccaatgttcaggtcatagacttccatctcctgctcctcacacctggctgagcctgcgtcattggaagcaatgcagtagtac

SEQ ID NO: 433378 - DNA, 1060 bp, Homo Sapiens
  misc_feature (449)..(457): n is a, c, g, or t
  misc_feature (740)..(749): n is a, c, g, or t
  misc_feature (774)..(774): n is a, c, g, or t
  misc_feature (802)..(802): n is a, c, g, or t
  misc_feature (847)..(847): n is a, c, g, or t
gtccggaattcccgggatgggaagacaaagaaataagcataccagaaactagagttactatacaagaaactctcctgagtttgtaaaccttaagtataacgattcagttgacctttttcttggttcatcaatctggaaagaacttacataaagcgccattgacactgtcacctgggagctccatgggccgtaagtctttgacagccaatttaatttgaggtcagagggccttgaggtacacagtcagcactgtttgaacacttttcctgaaagcaaaactcacagctccctgcgccctctgacaacactagctatttctgccagagtaagaacttctattactattttattattgttcatatgtcttttgatgatggttgtgtgacagggggaagcaggatctatttggtttcttccccctccccccaccccttcctttttgtctctcnnnnnnnnnctctaagaaaatcaccagactagtttttccatcttgagtaatttcttatgtgggacagttttgatcctcattttgaaagcatgcgtgcgcacatgtgtgtttgcctgtgggtgccaggtgagacaggtggcactaactccagctgcttggaaggcatcccaagggcgcatcttaaagttggagcagacctcccttttccagcccctggggccattagaccacgtgctggaactagcattgtaaaattcccatcccagttccactcccctgaagtgaaaccccnnnnnnnnnngtgacagtaaatcttaaaaatcatntgtctctttatgaaacatttcctcagtnttcttctctgctgaaaatggtagccatgctacttttttaatgtanttttggaattttgtgctcatttggaaattggaaatgctaatggcttcccccacccccggcaagacttttccttttaaactttggcctggtttttaccgggggaaagcctggggaatgcgcggcggggccctttaggggagcaatttttaaaccctttggcccaaattggcaaaaagggaaacagggaaattttcctttggggctccaatccca

SEQ ID NO: 433379 - DNA, 1415 bp, Homo Sapiens
  misc_feature (762)..(787): n is a, c, g, or t
ttttttcagaacgtacacaagctttattgggcaacagcaacgagccacgctggcaaacaatgaaagtagagtcgctcagaaacacgaaagatcatatgtgtgtcatcacagcatcgagaatttaaatcatctggaagttcctgctaaattaaagcatactgtgccagagctcccctctaatcaaaaaacgctgtcctggtgaaaatttgcaatgaggattacagagagagagatcaaccaatgaggaaatcacagactcttacatgagtttacagttaaccccactgcaacaaaataataaattagccataatttgttttttttgcaaataccatgccccccacctgaccccacaaacacaacagtcactgacatggcccagctatattaacagactgcgcctcaaaccatgctgtggcggagaagacagattcacgggtaatgccgctttggcctgagaagatgcttcggagctccaggtggaggagctgctcacgctgcaggatgctttgcaggttcattcaaaaccaaatttttttccaagaagaactggacataattcatgggaatattttaagtatatataagtggcaaaaaagctgtacattaaaagaagggggagaaataaaatgtgttgtatttacaaagctctttgtatatttttttaaatgaaaacaaagctgggagtgatagaattttaatgcaatgaaaaccaaataattcttcaaaaaactttagatgacatcattctctcgctctttnnnnnnnnnnnnnnnnnnnnnnnnnnttcaaacatacagaaaaggttaaagataaaaatagctgataggtgtttaagtaggatggagcagaagaatgtacatgtcccatttgcaattttggcaaaggtttaaaatgctgccctaaaggcacgcacgcatgcccagcctaccccagtaaaaacaagacaaagtataaaaagaaaagtctggcggggggtgggggaggcattagcatatcaatttcccatgagcaccaaattccaaatacattaaaaagtagcatggcttacattttcagcagagaagaaactgaggaaatgttcataaagagacaatgatttttaagatttactgtcaccaataaaaaagggtttcacttcaggggagtggaactgggatgggaattttacaatgctagttccagcacgtggtctaatggccccaggggctggaaaagggaggtctgctccaactttaagatgcgcccttgggatgccttccaagcagctggagttagtgccacctgtctcacctggcaccacaggcaacacacatgtgcacacgcatgctttcaaaatgaggatcaaaactgtcccacataagaaattactcaagatggaaaaactagtctggtgattttcttagagaaaaaaa

SEQ ID NO: 433380 - DNA, 253 bp, Homo Sapiens
aaatatgaaagctttctcttaggataagaattatgtaatcatgttacacaagtaatacagtgatggaaacaagacaatcttttatcttcctcttcttcagttgaatgacaatagttttctgcttagctgggagtccacatactatttgggagaagtgagatatttatcagtgggctgcagggaataaatgaaatgacctcagtagaggatgctgctatacttttatcaatgtctactgacatgatttgaaagt

SEQ ID NO: 433381 - DNA, 1673 bp, Homo Sapiens
  misc_feature (223)..(248): n is a, c, g, or t
  misc_feature (1651)..(1651): n is a, c, g, or t
  misc_feature (1659)..(1659): n is a, c, g, or t
aaataattgagaagccttttattgtcgtactgactgtctacaactgaaacacttggaaggaaaatccaagaatccacaaaaggacagattcagagaagtgcaagggacaaagtatctacaatagaaaatcatttcgtgacattgacttctttctgtccagctgtaaaagagggaacacagagtcaatatctatagagcacgtttcaattacactaagaatttnnnnnnnnnnnnnnnnnnnnnnnnnnttattgtattgcagagttttccaatgaccacacaattagccaggactttaagcttcttctcttggtcgtcatttcccttgctgtcattctgtgacctcctgggtgaatctgtggctgacacatcacaagtgtgttaacaattcttggcagttactgtcagtgctcagatctgtaggctggaaaagtctctgttcgatgaagcttcagagggctggaaacatcttgcaagcggtagagctgtcccgtgctgtgctgccgtgtgatgtgctgccagtaggcgctgcgaggcaggggcaccatggtgctcagcgaggcggcccgctcactcatcttcatctggagcatcgagtttttcacactctgtagcaagcgctcgtgctgctcggctatggccaaggcagcagagtggactttctgatagatggcctccccgtctcgggtctgaaagataaacagcccttcaccagtctcacacatcctccctgcctcaaaagtgaaccacgtagtatcacgtccataccgccgcagggcgcttagcggccaagagatgagtttgactctgggattctggacgtcccaaagacagatatactcatatgtaatctgcaaggcacattcgccatgtacatctaagttaggagatggcatcaaatacacattgaatctctcactctgttctctctcaaccccagtggccagtaagtcaggctctccaaggctgatgtcattgatccgtgttcctacacactccatctggagtactttgcaccactcatcagcctcaagatctgattcgcaagcaaaagtcttggaggtatcgtcattgaaataaatccctatggcatgtttcttggtgctttttggcaatcgagctacgttcttcacattattgagttctgtaaccttatgataacacctgaaatatgcagcacgttcatcagaaaatttctccagtctttttggacctttgcttgaagctttcttgaatactaaccagcatcgctgataaatcccgaggcgtctgctccggatcctcacgtacccttgcttcactatgtcattaaaattggaagccatcccagacagccggtgaccccccctttacccaagagcgcgcacccgaagtggctctggggagggtggagggcagggtcaagacaagcagtcggtgggagaaagttggagaggtgaagctgcttcggcggcgctgggcgaggctttagaaggcgcacatcactttctctgtccccccaaccctgacagtgggcggccgcttgcagccactttcggggagcgcagagcgcggcgcggggaggcgaggctggagcgccggcgtcagctgactccgcggccggcctgccaggaggaggagcggcggcggctgagggatccagcactgattnttcccggnggagatgccgggaa

SEQ ID NO: 433382 - DNA, 1127 bp, Homo Sapiens
  misc_feature (514)..(514): n is a, c, g, or t
  misc_feature (519)..(523): n is a, c, g, or t
  misc_feature (525)..(528): n is a, c, g, or t
  misc_feature (537)..(537): n is a, c, g, or t
  misc_feature (1034)..(1034): n is a, c, g, or t
  misc_feature (1079)..(1079): n is a, c, g, or t
  misc_feature (1095)..(1095): n is a, c, g, or t
  misc_feature (1107)..(1107): n is a, c, g, or t
ttatgggtgaagaatgatcttttattttcaaatgttttatgaagagactccgaacaaaataaaggctttcaaaaaggggggtaaaggggtgaggaaagcatgtgagagaaactgtaaccctgtaaacaacactaacgggttctttgaacaaatagttttgaacagaacagataagagtgagtcgaagcactgatttaactaattggtgatataatcaaatataatttccagtagttaatcagaaccacagtaataataactgaggaatagggtgtaaacaaataacaaataattaaaagccattttattgtcaatactgactgtcatacaactgaaacacttggaaggaaaatcacaagaatccacaaaaggacagattcagagaagtgcaagggacaaagtatctacaatagaaaatcatttcgtgacattgacttctttctgtccagctgtaaaagagggaacacagagtcaatatctatagagcacgtttcaattacactaagaatttaanagagnnnnngnnnntaggggggnttattgtattgcagagttttccaatgaccacacaattagccaggactttaagcttcttctcttggtcgtcatttcccttgctgtcattctgtgacctcctgggtgaatctgtggctgacacatcacaagtgtgttaacaattcttggcagttactgtcagtgctcagatctgtaggctggaaaagtctctgttcgatgaagcttcagagggctggaaacatcttgcaagcggtagagctgtcccgtgctgtgctgccgtgtgatgtgctgccagtaggcgctgcgaggcaggggcaccatggtgctcagcgaggcggcccgctcactcatcttcatctggagcatcgagtttttcacactctgtagcaagcgctcgtgctgctcggctatggccaaggcagcagagtggactttctgatagatggcctccccgtctcgggtctgaaagataaacagcccttcaccagtttcacacattctccctgcctcaaaagtgnaccacgtagtatcacgtccataccgccgcaggggcttagcgggcnaagaaatgagttttantctgggattttngacgtccaaagaaagatata

SEQ ID NO: 433383 - DNA, 1209 bp, Homo Sapiens
  misc_feature (1129)..(1165): n is a, c, g, or t
ttttttgaacattaagacattttataaagtatttcacagggttatcgtcttccaccatggacctctggaaagatctgttgggtgagttttagtccccatgacatgcagaacatccatgaagacttaaaacatggcacaagatggggcgctcgggagagcttgtggacaataccaacaggtagttctcgagagctgctccaggggtcagcagaggatctttctttccttctcaggtcacggtcgccacttcccacccccgaacaagaaggtcccctttcacaaacaggaggtgaccctagcagacagcacagcagttggaggttagacacagcaagctcccaacccggacgcgaaggcacacgggagagtaaacacagcacccacgagcaacagggcagggctattttttatgggcagtgggggggtggttgttttcttttttccaccatcaagggcatttctgttttctaaaaagttatgccggaaagtggggcggccagttaacaccatctgggttttcagctcaagttctactgcggctttatgaagacttccatctgattaaagagaacaccgcatggaccacgtagagcagagtggctatgtaggagaacaccacggcagcaatgttttcatggtagtgcctgtaggtgaagccgtcttgcatcgtgatggtggccagggcctccaggactgaggcgctgaggtaaaagagggcagcggtgcagtggtaggctgcgtccaaggtgacccaggaagtctctccaccgtgggctccaattatgtacaggatgatcaaggtggtggtggccacgaagcagaacacagacacgaacatcacccagccctggaccaggggccagggcaccagggaggaggccaccaggatccacaccaggcccccgaagataaactcaaagatgaagagcaagtcgggcaaggtggtgaagaccgagaagccactgggcagggtgctgccccccgtcgccgctgcgggggccatgacggcgtgctggcgtcggccttgggacgggacgagcgccgctcagactccgcgcagacctctcgctggctccgcggagcccagtccgctctcgacgaattcgagctcggccgatttggcctgatnnnnnnnnnnnnnnnnnnnnnnnnnnnnnnnnnnnnncggccgccaccgcgatgagctccgattcccctatatgatcatac

SEQ ID NO: 433384 - DNA, 468 bp, Homo Sapiens
  misc_feature (405)..(415): n is a, c, g, or t
  misc_feature (430)..(430): n is a, c, g, or t
  misc_feature (437)..(437): n is a, c, g, or t
  misc_feature (456)..(456): n is a, c, g, or t
tgaacattaagacattttataaagtatttcacagggttatcgtcttccaccatggacctctggaaagatctgttgggtgagttttagtccccatgacatgcagaacatccatgaagacttaaaacatggcacaagatggggcgctcgggagacttgttggacaataccaacaggtagttctcgagagctgctccaggggtcagcagaggatctttctttccttctcaggtcacggtcgccacttcccacccccgaacaagaaggtcccctttcacaaacaggaggtgaccctaggcagacagcacagcagttgggaggttaggacacagcaagttcccaacccggacgcgaaggcacacggggagagttaaacacaggcacccacggaggcaacaggggcagggnnnnnnnnnnnggggcagttgggggngtggttnttttctttttttcccaccntcaagggttttt

SEQ ID NO: 433385 - DNA, 1438 bp, Homo Sapiens
  misc_feature (52)..(71): n is a, c, g, or t
ttttttttaaaacgcttaaatgttgcatttattaaggaaatgttaaataagnnnnnnnnnnnnnnnnnnnncggtgtcacggatgtcaagagcacttttgtggcgtaaaccgtgcagtcacgagctacgagttctattctgggtctttgtcccagggccagcaggaacgctagacgcctcccaaaagacccagtgggaaatgcactaaaagaaacaactcaccccgttcaaattcgcaggctccccctggggggaggccttctcccacaatgacaaaactgtaactcctcaggcaggcaaacaggccactggggcagaaaaagacttatcaaacatttgtattcaagcaaacaaacacaaaacctcttaaaacggcacgttacaatcaaaggtatttatcgcccctcccctccagggcagggggggagcaggagaagagtgggagcgcacccggacacggatttgtgagaccccatgagtctgctgcgtggcttttaacaggtcactcttccggtcacaaggcgatcagtgccgctgggtctctcccctgcccgccctctccacctgcccccagagcttggcccacctgcgggtggagaagggccttcgcaccgtcggtctccccgcattccaagtaagtagcagcttccaaagttctgcgccctaatcgccctcttcttgccactttctgctgagttcagagtctgggcgctctcctccgactgccaggcatgaggactttcagagggcgagggagaaaccggtcgcttctttccgaaaggccgaagtcgagagaaataattgactccgacaggtttgcttcgcccagtctctgatagtgaggggcacagccgggctagcaaagtgggcaggcgtgggagcggttgccgcgggggcagagggcgggtcagtagggccccacgaccaccgcctccacctccttagacggcctccggtccttcacgaggaagttgatcatgccctcggacttgatgagcagattgcagccgaggaagaagatgccgaagaccacggtgagtgagagcacgcacatgaccgcgatctgcaccacgcgcattatgtacaggctacgctcgtccgggcctccctccgcgaagccgtcgtcggtcaccacggacgcctgggtgcagcagcgcacggctcgctccagcgcctcgctgctgttggccaggaacaggcccgccacgtccgtctggttgcctagggccggattcatcgcaggaacgggcgggcgccgcgagcggcgcgggtccgaggggtgggaaggcggcggcgctggaggaacaggtgccgggctgagcgctcactcgcagactagcgcgtgcgagggctcctcgctctgctttcgaaagtccctgggccgtgggagtttcccaggagcctctccgacgcgcgcagcagctaggctcttctaaag

SEQ ID NO: 433386 - DNA, 1193 bp, Homo Sapiens
  misc_feature (10)..(10): n is a, c, g, or t
  misc_feature (13)..(13): n is a, c, g, or t
  misc_feature (16)..(16): n is a, c, g, or t
  misc_feature (19)..(19): n is a, c, g, or t
  misc_feature (34)..(34): n is a, c, g, or t
  misc_feature (39)..(39): n is a, c, g, or t
  misc_feature (46)..(46): n is a, c, g, or t
  misc_feature (63)..(63): n is a, c, g, or t
  misc_feature (104)..(104): n is a, c, g, or t
  misc_feature (1111)..(1147): n is a, c, g, or t
cctccaaatnccncgnttntacccctggccaganccttnccccccntgattaacattgcaganccccatcagtcaagaaagaagaatttgcagctgtcactgtnccgtagggcttgatgaatgcaggttttagtttggccatctgctccagtgaggaaggacggatgccattatctttggtaactgtatcttttcctggtactttgaagggtaccacatcagaaaggagtccttcatcctgtgctttcttggctagactgtgagagcgcagtgcatattcatcctgttccagccgagaaacagcaaaggcagcggccagtcggtctgcagagtggcccatggtctcactggtggagaactcagaaaccgcagggagctcaggtgctaggaaattaaatcggaatttagagattaaagacagtcgctggcccatagatttggccttattgagatcaagcatcagttttctcattttccttgagtgacgaatagggacatcggacatcaactcaacaccacctgccacgatcacatcacactggccagaagcaatcaagccaacacctgtggtcatggcttggttggcagagatacaagccatggtgacagtgtgagcaggagtcttgtcagagaagccagctccaagggcagcctctctagccacattgcttgttttcacttcctgaataactgtaccaaagatgatataatcaactacttccttagggacactggtccgatgcaacaaacccgtaagcgctgctctagccaaatcatgtggcatcaggtctttatatgaagtgccagacagcaaaaatggagtgcgaacaccatccaccaccacaacattccttatattgggtttggctaacgtcttcttcgttttggtctggacagctggggcagctcgtagctgggaggaacagctcagaggtcttatggaaaatctgagggcccattttgatgcagtgggaagatttttaaaggggtaagtcaagatagtagtcattctggaatcttggctgacgtccgcgaggactccctctcggagcaaggttcaggtccaagtccgctctcgacgaacttcgagctcggccgatttggcttgatnnnnnnnnnnnnnnnnnnnnnnnnnnnnnnnnnnnnncgccgccaccgcgataagctccgggtcgccctatagtgatctatca

SEQ ID NO: 433387 - DNA, 2585 bp, Homo Sapiens
  misc_feature (412)..(426): n is a, c, g, or t
  misc_feature (431)..(431): n is a, c, g, or t
  misc_feature (435)..(435): n is a, c, g, or t
  misc_feature (440)..(455): n is a, c, g, or t
  misc_feature (463)..(463): n is a, c, g, or t
  misc_feature (465)..(465): n is a, c, g, or t
  misc_feature (467)..(471): n is a, c, g, or t
  misc_feature (473)..(475): n is a, c, g, or t
  misc_feature (479)..(479): n is a, c, g, or t
  misc_feature (481)..(483): n is a, c, g, or t
  misc_feature (485)..(501): n is a, c, g, or t
  misc_feature (504)..(517): n is a, c, g, or t
  misc_feature (519)..(524): n is a, c, g, or t
  misc_feature (526)..(536): n is a, c, g, or t
  misc_feature (544)..(544): n is a, c, g, or t
ggggttagtgacgctactgtgggggtccgcgtaatgctggggggacgtgatgtggtgagggaaggaaatatgatgtatgagtagggtatgatgcggcggggcggtgtgcgcgatagtgttcttgtaataaatgggaggggtgctaacggggagaccccaccccctcgttggagttgaaagccgcgttaatacacccctcgaagaggcgcccccccctggggtgtgtttttcttaaaaagcgggcgggtggactggccggggggggcttgttatttttgggtgggagaagcacaagccgtttgttttatgggccgagggttttctttttgggaaccgggtggggcccagttttggttgtattataatggggcccgcgcggcccaaaagaaatggtttgggaaaaatttttttnnnnnnnnnnnnnnntcccnaaanttttnnnnnnnnnnnnnnnnttcttttntntnnnnngnnntttntnnngnnnnnnnnnnnnnnnnncannnnnnnnnnnnnntnnnnnntnnnnnnnnnnngttccaantatttcttccactttattaacgctgaccaccatatttatgtatctaaacattttttataagttttcagtggtgtttagattctgaattatttttccataattaattaggcacgttggtttgtattttatagagaacacatctttaggacacagataagaacaagtataatttgcaaatattacaaagatgatttccaaatctcagttgacctctttcccaactgcaaaccctcatttagtctttagtgacaacagagaccaaaaacaaccacccacacatctcatgtgagattctggtggcttagaaatccctgaaagagcagtaaactgattattgaaaagctcagaacactggcaaggcttaagtgcaaagtatttaatagaaggccacaagaactgttttcctaagaggagctaggaactacaaatgtcatttagtaatgcattgaaatggcattgcctagtgtgagtgttgcacagaaacttcaggtcacttcttctggatctattattttggataagcttccactatcatagcatggccctgccctccagctgcacacgcagccactaagccatactggcctccttctttccgtaatctgttggcagcagccatgaccaacctgcagccagtggctccaaatgggtgtcccagggacagagatccaccccagttattaaacttctccaaaggaggcaatccaaccttggtttttctacccatgtagttttctgcaaaccaatcagaatccatggctttaaaatttgccaaaatctgacccgagaaagcttcatgaaattcaaaagcatcaatatcattcatggtcaatcctgccttttctagaacttttggagtagcatatgttggtccaagtaatagttgatcttttggatcctgagacacatacataaaatccctcaaatatgccttcggcttataacccatggccagagccttttcctccgccatgattaacattgcagatgcaccatcagtcaagaaagaagaatttgcagctgtcactgtgccgtagggcttgatgaatgcaggttttagtttggccatctgctccagtgaggaaggacggatgccattatctttggtaactgtatcttttcctggtactttgaagggtaccacatcagaaaggagtccttcatcctgtgccttcttggctagactgtgagagcgcagtgcatattcatcctgttccagccgagaaacagcaaaggcagcggccagtcggtctgcagagtggcccatggtctcactggtggagaactcagaaaccgcagggagctcaggtgctaggaaattaaatcggaatttagagattaaagacagtcgctggcccatagatttggccttattgagatcaagcatcagttttctcattttccttgagtgacgaatagggacatcggacatcgactcaacaccacctgccacgatcacatcacactggccagaagcaatcaagccaacacctgtggtcatggcttggttggcagagatacaagccatggtgacagtgtgagcaggagtcttgtcagagaagccagctccaagggcagcctctctagccacattgcttgttttcacttcctgaataactgtaccaaagatgatataatcaactacttccttagggacactggtccgactgcaacaaacccgtaacgcgctgctctagccaaatcatgtggcatcaggtctttatatgaagtgccagacagcaaaaatggagtgcgaacaccatccaccaccacaacattccttatattgggtttggctaacgtcttcttcgttttggtctggacagctggggcagctcgtagctgggaggaacagctcagaggtcttatggaaaatctgagggcccattttgatgcagtgggaagattttttaaaggggtaagtcaagatagtcattctggaatcttggctgacgtccgcgaggactccctctcggagcaaggttcaggtccaagtaccaaggctctgcgggaccaaggggcgggtcctagcccagccgct

SEQ ID NO: 433388 - DNA, 1154 bp, Homo Sapiens
  misc_feature (134)..(134): n is a, c, g, or t
  misc_feature (243)..(243): n is a, c, g, or t
cgggggtagtgtctgataaagcactgggtgcgtagtgacagagggtaggttgctttttgagtttgatgtgggtggacggtatagagacgagcgctgtagcgatgagaatggtgctgcacctcgaggttcgtctngttccgcggtactggttgctcttgacccgtgtgtgtcgggtggagcgggttatatatgctgcgattagaatgaagagacactcggcgcggcgtgtgagagcataccccngcgcttgtccgctgggttccctctaccagttatagagtacgctcttcttggaggacgcctctccctcttgtgggtggacgtgtgttattggagaggaattccctcctgcgtgtttgaaagggccgcccggcgggggggtgtttgtttataaatagggtggggcggaacatactgccaaaccccgcccttttgttgcaaggagccgccgggatttcttgtctgtgtgggaccagcggtgtcggggtcccccggtgcccccttttcctccggggggggccctggggctcgcccaagccaatgtgtgttgggagaaagtttttttggggggcggcgggggcgcggaacaagatctctatgccgtggttggtggtcgggttgtttcgctgcgtgtgcgacggttggttctttggggttggcgtctgtgtgggcggggtggtttgtaaggtggtcatttggcgcgttggtcttttttccaatatttctccactttattaacgctgaccaccatatttatgtatctaaacattttttataagttttcagtggtgtttagattctgaattatttttccataattaattaggcacgttggtttgtattttatagagaacacatctttaggacacagataagaacaagtataatttgcaaatattacaaagatgatttccaaatctcagttgacctctttcccaactgcaaaccctcatttagtctttagtgacaacagaggaccaaaaacaaccacccacacatctcatgtgaggattctgggtgggcttaggaaatccctggaaggaggcaggtaaactggattatttggaaaaggctcaggaacactgggccagggctttaaggtgccaaggttttttaattgggaggggccaccaggaactgtttttcctaggggg

SEQ ID NO: 433389 - DNA, 906 bp, Homo Sapiens
gggggtgaaactcccacgctgctgggccagtcgccgtccttgctgccctcctgtccttcgtcggagtcatcgtcatctccactggacgctccgcagatggccggggccaggggggctggctgccctggggaccccgcgccctgctcttccgcttcttcctgccgttgctgggcggccagttcgcggtagcagaggctgcagacgcgcacgggcttgggggacaggcgcgggagcaggaagcgctggcgcgagcactcagcgcagaccacgaagccgcacttgcggcagtggtggcgcctcgtgagggcagagaagcgcgtctgcgtgcagcgcatgcagatgtccgtggccttgtcggggatccagggtgccgcgtgctccgtgctgggcgggcggcccgtggccctcagttgccgccgcacgcactcctcgatgtggctaatccattcctggcgctccgtagcggaggcggccgacaccacaaaggacttcttggccgtcttgatcatccagcggttcttggcctgcagcgtctccggcaacagctccagtgtgacctcctccagggggatgatgtgctggctgcggtacttgcgcttgttgagcacgatgctgccatacaccaggatgtcgttaaagaggaagaagatgcgcggcttggccttcttgcggcactctttggtcagcacgccctcgcccagcagcactcggcctggcagcgccagcggctgccccgaggccccgaagcagctctccactgccgcgatgcgctggctgttgatctccgtgttggccaagtggtccaccatcgtctccagctggcggcttctgcgccggccccgcgcccagccctcgagtccacacccctcgtgccgattcgaccacccagcctcgtacctagcctta

SEQ ID NO: 433390 - DNA, 1046 bp, Homo Sapiens
gggcagctcgtggtgaggctcccctttcttgcggagattctcttcctctgtgcgccggtctctcccaggacaggcacaaacacgcacctcaaagctgttccgtcccagtagattaccactggagtcttccagtgtgatgatggtgaggatgggcctccggttcatgccgcccatgcaggaactgttacacatgtagttgtagtggatggtggtacagtcagagccaacctcaggcggctcatagggcaccaccacactatgtcgaaaagtgtttctgtcatccaaatactccacacgcaaatttccttccactcggataagatgctgaggaggggccagaccatcgctatctgagcagcgctcatggtgggggcagcgcctcacaacctccgtcatgtgctgtgactgcttgtagatggccatggcgcggacgcgggtgccgggcgggggtgtggaatcaacccacagctgcacagggcaggtcttggccagttggcaaaacatcttgttgagggcaggggagtacgtgcaagtcacagacttggctgtcccagaatgcaagaagcccagaaggaaaccgtagctgccctggtaggttttctgggaagggacagaagatgacaggggccaggagggggctggtgcaggggccgccggtgtaggagctgctggtgcaggggccacgcggggagcagcctctggcattctgggagcttcatctggacctgggtcttcagtgaaccattgttcaatatcgtccggggacagcatcaaatcatccattgcttgggacggcaagggggacagaacgttgttttcaggaagtagtttccataggtctgaaaatgtttcctgactcagagggggctcgacgctaggatctgactgcggctcctccatggcagtgacccggaaggcagtctggctgccaatccagggaagcgtgtcaccgtcgtggaaagcacgctcccagcccgaacgcaaagtgtccccggagcccagcagctacctgctccctggacggtggctctagacttttgagaagc

SEQ ID NO: 433391 - DNA, 3031 bp, Homo Sapiens
aatgcagcaggattggcttaaagtataggtacaccccatggaaacatgcaataagatcacatcgatccagaggctggctcaagtttgactgaggggaaacggagggaaggctgttcctagcacacaatctcagcagaggttgaggtggtggggatttctttcttctcatatgacgctaccgtcggtgacttcttactaggagaccactgagcactgaatcaaggtttctaatatgtttcaaatcaagattttagagtgtattttcttatggcaatagagttataaaatggtaacctatgattttcctcatataatgagatcttcataaagtccttgagctttttagactttaacaaattcagctacagatataaaaaataatctgtaaacacctttaaaatgcgaatttattaaagtttaagacaattctgtattatataatagtgtacaatatgttcttattttagatgtagaaataaaggaaaactggctctcagatgaaaacagaaattgtgtctgacagttaatagaacgaatgtcccataaacaggagtaaaaattaaatttgcctttaagacgattttacaattatttctcttgtccataatttcacttagttaaaaccacataaggactttatgaataccctcccctatactattcaagatatacatatgggctaactttcgtggaccgatctagaacctaaataccacttccaacattgtttgacttgtaaaaaaattaacttacaaataacacttttggagcataacctatttgaaagcttggaaccacctgtatttaaaaattaaatcttcattaacaacaccctcaagagtgccctcagtgctgcgaactgaacatgctgaaggcaatgtttttctgtgattatatggtttcaccagccattatgatgataatattatctactagagtctgtggcgctagctagcactaagttatatattgatttttccactgaaaattctttcttgggctctgactaggtggacaattctaagtaaaggtttttctaacttctatcactgttacttgggccctgaggttttctattaaaataggacatgaaatatttcaatattatgcatattcctggaataattaaaatttatactgattataaagctaggcatataatacatcccaaaagacatacatttcaaagcagaccaaacattcaaatcttcagatccccccatttaacttctggaagaaaaccaagcgatctcctggcttgggccctttcttccttaaaaatctatggaagactgttttctttctttttaaatttgtgtgattatggcagcagagggcagggggtggtgataacagcatatcaaagtggttacaaagtactccctcttcaagtagcatccagtgacaaagatgtgatctcatttcctcataaatgtttgactgaaataaaattattttcactgaagaatgtttaggacacaaataaagtcacagaatgagcaattccagtacatctcctatgaatgacattttaaggaagctacttgaggagttttgctttcccttttcaactcttctatccctatacattctacatacgtagaaacagagtactcaataagtggtattgagtaactagtaatactcattggaacttaaaacatcatcttttatccaaaaatttcaaagggcaatataggaaagtattacaaatttacataaaaagaagatgaaacatgagaaaaaacaagttatttccctgcaaagcagatcaaatagtgagacaaggaactttgacttctagtccctttaagcaggacgtaactgctagacacagtctgaatgtctagatatatttatactaaacttacaaggatcaaaaaaaggaatgaagggtaaatacaaaataatctttttgtaaacaattcttagattatacccaatgcagaatgtttaatgaagcagttgagtcacagctcataagtcacaaaaccatattataactcaaagtcaaatatgtattcgtttgccagatatattcgtcggaatataagagctgccaatgccaaagtcaggatgacaatcagtacagctgacccaccatgatcagtgtggttgtctcttggctggtggccctggattacatctggtgaagtagacaaccttctctgactctgctgctgggcccggcgctgtcgagggctcatggaggtattcttagctacaggttgggtaggttgatgaaaggatgctgctgaggaattctggactccgtacgatgtactggccgtagcaccctggaatgttgtaggtatatcatcttgtaaatcagttagtgaaaaaagagtggtttaagtctgactcagagatagtcttttccagatgaattgacttctgccttaaagcttatttgcctagccagttctttggcttcttggtcagcttggcttgaatcgcttccagattttaaaggcaacaggacatccttcatggcagagccacatccttcacaacagaaatcttgtgattttttggcaagtgctcttctttcctcaggagtgtaatctagagaacctatggctccctctccttttgttggcataaacccaatgatggctaataatgctgtccttatactccacgaaggctgccaagtttcaggatgatggcctgagatgctcaaacagattttcttgcccacttcaaatcgaccattagccgttaggagaataatgcttggtggtttcatgggatactctggtggcagtactatccgcccgtgataaactcctccatcaaaatcggagtctgggggccctctaaccgtgaagtgccattcaaaaaggttatcctctaaaggctgcgcatggtaatgatctgttggatctttcaattctgccgcttctttcattaaacgtttaacagctttaggaaaccagagatacattaacacttagggtggtgaatggccctcgacaacaggtggttggttgtctctttgaaattctccagatgaagcattcttggttca

SEQ ID NO: 433392 - DNA, 930 bp, Homo Sapiens
  misc_feature (809)..(844): n is a, c, g, or t
acaattgtgtaatgcatacaccttgtactaccagtgtgcagattgagggagtcctcctagagatcgtacagggtactcatgacaccacggttggaagagtgaggccacatggaccatgtgaagagtctattgtccaggagctttgcaggactgctgaggcaaaggtggactgtcgctcttagtcattggtggtgaccctccagccagtgcagtgaatatctccagacctccagtctcctctgtaaatgggggagtaacaggggagtacagagttgttgtgaggtgtagatgacactggacgagaaacagacgtatgtgctgaatacggaatgatctggcagatcatattggtaagtgagtattacccgactggtgtaatatgcatgtttggccatatgtattaagaccaaacgatgacgaagttggaaggaaaatatatatgcattgcagatatggcagggaatttatgctcatgagacataaggaaatgagaacgtgaagtctggaagaaaaaccgcactgtcaccttgttgtactatgctgattttactgcaagttctgaaaacttaagccaaaacgaaaagcactgaaattagctaagtagctactggtgattcgtgatatgacagctaagagtggcaccccgaggtaatgccatactgcactgctcaggatgggacatgtggggatgtggtgacgaagctgtgtaagacactggcctgccccacaggagcccccactataaaggcagagtcatacccgccgtatatgtccgaattcccgggcatatgtccggctaccgtcgactnnnnnnnnnnnnnnnnnnnnnnnnnnnnnnnnnnnncgcacgcttcctcgctcaatgactcgcgtgcgctcgtcttcagctgtaatgctaggccctatatagaacagtgtctgggggccgga

SEQ ID NO: 433393 - DNA, 521 bp, Homo Sapiens
  misc_feature (47)..(47): n is a, c, g, or t
cacatccctttgtgcaggatccagcttcccccactcctctggtgtanagtccatggccacatccttgaatgtcactgtttcctgggatctggccgtgaggcgcagagcagccacttctccctcttctgtgctcttctcttggaaatggggagaatcctgggaagacagagctcctttctcaggcatttcagccaaatctgtctccatgatcaccacctcctccttgttttggagattctgctcttcaccccaattcagatctccctggacagacgagttagaagccccccgggcctcgtggtcccacttcctgccttccctcctgggctctgatgaaaggcctgggttagatcgggtctctttctcaccgtggagtctgcctcagtcctacggcgctggagcctggaagcccggggacagcatccctgaggctgggtcctcagatgtctgtccctaccgcttgaagctgtccctgggggaaccgggcacctcccatcccgggcctcacaaaggggacgaac

SEQ ID NO: 433394 - DNA, 828 bp, Homo Sapiens
  misc_feature (201)..(201): n is a, c, g, or t
  misc_feature (708)..(708): n is a, c, g, or t
tttttcacagccacatatatgtttattctgcgagtccgtgtcccacagtctgagactcttcttcccctccccttcccgccccgtgaagtggcccggggccgagccccgcctccatcttggctcagccaattcccacccagtttccaggagtctcatttgcatttccgggagcagctgtccaatgggaaggcagcaccctgnccccccccacaagggggcggcactcctggtggatcgcaccactcttgggatccagggatggggggaacgggcttccactgaggtccgggtgacaggagggtggtcttccctcaaggcagggttggagttcagtggaggagggagttctggccttggaagaggcccagcagtccgctgtctggggcgggctccttgatgagtttctggatctccttgaactgggggtggacggcatcgcccacaagctgcagaatgagcccttcgctggtggagaggaaggcaccactctgtctcatgcgggccagagccaccagccggtccacctggctgcgtgaggagcaggcgtccaccaccacatggacctgcagcccccggtctaggaggtccagggtcgtgttcttgagcatgcgggcagccactgagacgatctgtgggaagtaggcgatgttgtggcggaacttctcctgcatgtcacacaggaacaggacagaggatcctgggaggacntcgcccaggctgggcctggcagccgccattttccggaaggtgccgggttcgagcccggaacggcccctctgcaggtgaggcgggggcaccctcacctctcggcgctcggacggccaccgc

SEQ ID NO: 433395 - DNA, 992 bp, Homo Sapiens
  misc_feature (15)..(15): n is a, c, g, or t
cccccccacaggggncgcactcctggtggttcgcaccactctggggatccagggatggggggaacgggcttccactgaggtccgggtgacaggaggtggtcttccctcaaggcagggttggagttcagtggaggagggagttctggccttggaagaggcccagcagtccgctgtctggggcgggctccttgatgagtttctggatctccttgaactgggggtggacggcatcgcccacaagctgcagaatgagcccttcgctggtggagaggaaggcaccactctgtctcatgcgggccagagccaccagccggtccacctggctgcgtgaggagcaggcgtccaccaccacatggacctgcagcccccggtctaggaggtccagggtcgtgttcaagatgcaggcctgtgcctcaatgccacagagcagcacagagcgcagctggggccgactgtccagctcctgctgcagggcaggcaccatgctgaagcaggtcttggccagcggccgaaggccctcagtccccagctcgggcaccgtggggcccaggccttgtgggtactgctccgtcagcatgactggcacctcaagcagccgggccaccttgagcatgcgggcagccactgagacgatctgtgggaagtaggcgatgttgtggcggaacttctcctgcatgtcacacaggaacaggacagaggatcctgggaggactcggcccaggctgggcctggcagccgccattttccggaaggtgccgggttcgagcccggaacggcccctctgcaggtgaggcgggggcaccctcacctctcggcgctcggacggccaccgctgaggcctcttgcgggcttcccagggctggttaccgtttcgttagggctggacacgtggcccaccccctgcaccgtccgttttccgcccacttgggcccagccgtccaatcgacactcatcatgctctgcctcgccgctctctccggccaatccgcccc

SEQ ID NO: 433396 - DNA, 278 bp, Homo Sapiens
  misc_feature (94)..(94): n is a, c, g, or t
  misc_feature (106)..(106): n is a, c, g, or t
  misc_feature (187)..(198): n is a, c, g, or t
  misc_feature (200)..(200): n is a, c, g, or t
  misc_feature (207)..(207): n is a, c, g, or t
atatatgtttattctgcgagtacgtgtcccacagtctgagactcttcttcccctccccttcccgccccgtgaagtggcccggggcgaggccccnctccatcttggnctcagccaattcccacccagtttccaggagtctcatttgcatttccgggagcagctgtccaatgggaaggcagcaccctgnnnnnnnnnnnnanaaggggncggcactcctgggggatcgaaccatttttgggatccagggatggggggaacgggtttccactgaggtccgg

SEQ ID NO: 433397 - DNA, 401 bp, Homo Sapiens
  misc_feature (12)..(12): n is a, c, g, or t
ccaaaaaggggncggcaactccctgttggaatcgcacccactcttgggaatcccagggatggggggaaacgggcttcccactgaggtccgggtgaacaggagggtggtcttccctcaaggcagggttggagttcagtggaggagggagttctggccttggaagaggcccagcagtccgctgtctggggcgggctccttgatgagtttctggatctccttgaactgggggtggacggcatcgcccacaagctgcagaatgagcccttcgctggtggagaggaaggcaccactctgtctcatgcgggccagagccaccagccggtccacctggctgcgtgaggagcaggcgtccaccaccacatggacctgcagcccccggtctaggaggtcccagggtcgtc

SEQ ID NO: 433398 - DNA, 1008 bp, Homo Sapiens
gggaaggtcatggtcagctcctcagttactcgagccagcagctggggctgtggccacggaagtaggcgtggacatactctgtgaaggctgtggctatgggcagggcatcctgggagcccaggaccacagggctcggaccccgggagactccgtgtcctgtctgggataagaagctggcccgttccaaggcagtgctggcggctgaagagcccagtggggaggggctcaggggaacgagacaggtccccattgctacgtgtgagagggcaggacaccttcctagagcgaagtctcctgggtggggctgccaggccctccctggctgtggggtcagcaggtgcagggcatcaggtctcctccggccaaggcctccagcccccaggggcctggagacgaggcgaggggctgcggcgagtctggcagaggcggtgcccggatacccctggcctctgggggtggcgccctacagctgggcgggctctgcggggtgcctgggcgggggacccaggaatctggggaggggccaggtgccgcgtgggacggagagtccaggccggaatcctccacgttttcgggcgacgaggaggagaaaggggaggggctggaggtgaagcccaggctgctagagcctgtaaaatcttcgtggtcaaaggctgactccaggggcggcccaaagaggttcttggacacctgctcctctgactgcaatctctctgcacagctgctggttctgggggcagaccgaggtctctggggtttcccagcagcgtcccgtgaagaatggcgtttcatggtgccctgtggacaaagtgggcaacatcacacacgagtgcatccagccagcctctctagcaacacccagggcaaccctcccacgcctcacccctgttcgcagaattccggaccggtaccagcctctttagatggcccggtgggtgggtaaagggaagcggggaaagagtgctaagagacgcccgtcgttcgtcgcgtgggggctggaggaggggg

SEQ ID NO: 433399 - DNA, 889 bp, Homo Sapiens
  misc_feature (151)..(151): n is a, c, g, or t
  misc_feature (153)..(153): n is a, c, g, or t
cagagtattgcaacactttattaagagtattggctttgaatcagtagctgaagtaacaattgcatgaagccagattaggtgcactgcataatacccatactcgatttattgacattacttagcaatttactggacaaaagtcaaacttttntnttttttattaagcacattccacagtacaaagctgtcatgaataatatctgtacaatttaacagtttcaatagctgttcagacacaaatttatttcaaacagataattggcaaacataattaattacaagttagaattagactatcccagtgctttaaaacattaatatagcagtaatttacatttgctcagttatggttagcaaaataaagtccagagtatggctgggaattactattataatcccagaaagtcagaactccttgggtgccaaagtcccctgctataatttagtaggcacaattcaaaggttgtctgcatattcaaaggccatcatctcccaaggaacgaggggaacttctatattaaacatgcaaaaacaacaaaaaatccattcattcattcagaattgcctcctcccctgccccctcccttccccctgggctttcctaaccagtttgatattgaagctgtaggatgaaaagtggtcaaagctaaatcactttcacaaccaccatcaagcttacaacatccatcttatgaatggaggtttattgtttacactttgagactcaacctctcaaaaacataaattaatttagtaacatgggaaggaaggattttatttttaaaagaaaaactaaaaaagcaaagccaactcaataaacaaatcacatacacacacactgatccccacaccgttctcaatgcaaaggacaaatcagagcccaggggcc

SEQ ID NO: 433400 - DNA, 3155 bp, Homo Sapiens
  misc_feature (2656)..(2681): n is a, c, g, or t
  misc_feature (2845)..(2889): n is a, c, g, or t
  misc_feature (2933)..(2969): n is a, c, g, or t
tttttgacttgatcacatttattcaatatggttggaaattagcaagaatcagaagaagcacatatcaatcaaatacagccacaaaaacatcctggagataaataaagctgcactatgagaaatactcactactgaaggaaccagtactctcttacatttactacctcttagcaacaaacaactcaaatgtaaatttaatttactcacaatatagaacccttgactttttaaagaaaaatatagattcaaatcaatcagaatttgcctcgctaggccttttcgttacgtatgtttttgaggcctagttcgacgactgttacgaaaatgacaaaaacaaactcgaaagaatgtttccacaaagttcaacaaaacagtgcagaaataagttacttacccatgcacagaataaggcaaaggctaatttcattcgggttaggaatagtaaatttaactagtttcttttccacaaaacgaacatttcagacttctttttaagtaacgggtatactctattatacatcatatgctacgttacgtggttttcctaactctactcagaaagccggcactcaaacgtcaaacagaaacttctccttgattagacttattctgtaacaaccacagaaattaatctgggtctcgtgatagtgtctacagtgaaaagagcacacactagtagaagcacacagtttagagagctgaaggtacattaaaacatcgtctataggtttcacaaattttgtttttaaaatattttttccaaactaaaagctgcagaaaattagttcttaaatattctactgaaaactcttgagcagctagcattttaaatttcttaagctttttattttcttaaaaatatttaaatgagtgtagtatctcatctttttgaaaaataatccaaaaaaagattacaaatctttagttttaatcagtgtgaccaagggtttgtcatcaggactgtaatcttcataggcgatggggctcacatcatacattgcaggccgggatttctttccaaacctggcatgccggatggatgcaatggcattgctgaactcgctgtcgatgctgcggcagttgtagaactcctcataggctggcctggaagaaccctggtattcaatgcggctgatgcggcaaatccccacgatcaggatgatcagcataaggatgaaggccacgcagagggctccaatgatgatgtagagggagtgccgtggcatgttggtgaggctctccgccatgtgcccggacttccattggaggtggatctcacagtttgctcccacccaaccatgcgggcagtggcagttataaccattgggctggtccaggcagctcccaccatggtggcaggggttactgtcacattcatttatgtcaatgtcgcactcttcacctgtaaacccgggtgcacagatgcacgtgccattcaggccgtcgctgtcacaggtggctccgttcagacagctgacgttagcgcagggatccttgtacaattcacagtgtgttcctggatcacagaggcatttgtagctggtgcccacgctgcggcacgtgccatgagcacagggggctgagggcacagaagtcaataagctgggcacaggtcggccctgtgaagcccgggctgcagttgcaggtaaagtgtaccccgtccacatagcaggtgccgttgttctggcacggagacgaggcgcaggggtccaccttttcttcacaagcagatccgaagtatccttctggacactggcaggtgaatccactgagactggaaatgcatgttgctccatttctgcatgggtctaggatgcagtaatcaatcttggactggcaaagctctccagtataaccaggaaggcaaacacaggtgaaattgctcccatcttgcttttcatttgcatcaatacagctcgcgttgttttggcaaggtttcctctggcaagcatcgtattcttcacagaaagtacccacgtactgctcctcacaggtacaggaaaaagttgcctctgacggcttcgtggtgcattttccttttcctgaacactccaagtcatttgcgtgactctcccccggcacacaggtgctgaccttcaccaccagagttaagcgcaaagccacaatagacttagtcacagaatcattcacaaaaccaataaagtgattattccccaaggcgagcatctcctccaggaggaccagtccccctgaagcctgaaggggggtcacacttcgtccatctatgagggagcactgttggaatcctgtggccgtgaccttccagagcaaaatcagtgaggcagtggcatcttgccgaatcttgactgaggtgttctgtggcacttcaaaggataccaggcggccacccgcagagctgttagaactggcattcccacaggcaatatctgggatcacctccacttgatcccatttcatttctacaactttctgccctgttttcggctgccaggtaggcagtgtcaccgttgcctgagagcgaggcaggattttgtcaggctcctgagtagcaggaacaggctgaagctgtcggggtgccatggattcggtccagccagtggctgggagactgggaagtgcctgttcacagttgggaccttcatagccttcattgcaaatgcagaggtagccatcnnnnnnnnnnnnnnnnnnnnnnnnnnagttgccatggtgacaagggttgctggcacaaggatctgcaacaagctggcagttggcgccggagatcccggcggggcaggtgcagctgtagccaggctcgccggcgggggccgggtgctgcgggtccggctcagggcgcgaggtgcacacacccccattccgnnnnnnnnnnnnnnnnnnnnnnnnnnnnnnnnnnnnnnnnnnnnngggcaccgggttggccagggagctgcctcggggccccgctccgnnnnnnnnnnnnnnnnnnnnnnnnnnnnnnnnnnnnngcgcaccgggcgcctgggcgcggcggggctgcatggccggccgggagggcgcgggagccggagccaggatgcagtgacggcggcggcggtggcagtggcgacgagagctgcgagagcgacggtggcggctagggctgctccgccgggccgggcgcctcctgcagctgcgggatccgccgttccgct

SEQ ID NO: 433401 - DNA, 1545 bp, Homo Sapiens
  misc_feature (1109)..(1109): n is a, c, g, or t
tgggtattaaccgtgtgtaaaagcaggctgtacggtcccggaatcccgggatatcgtcgacccacgcgtcgggtcagcacctgtgtgccgggggagagtcacgcaaatgacttggagtgtacaggaaaaggaaaatgcaccacgaagccgtcagaggcaactttttcctgtacctgtgaggagcagtacgtgggtactttctgtgaagaatacgatgcttgccagaggaaaccttgccaaaacaacgcgagctgtattgatgcaaatgaaaagcaagatgggagcaatttcacctgtgtttgccttcctggttatactggagagctttgccagtccaagattgattactgcatcctagacccatgcagaaatggagcaacatgcatttccagtctcagtggattcacctgccagtgtccagaaggatacttcggatctgcttgtgaagaaaaggtggacccctgcgcctcgtctccgtgccagaacaacggcacctgctatgtggacggggtacactttacctgcaactgcagcccgggcttcacagggccgacctgtgcccagcttattgacttctgtgccctcagcccctgtgctcatggcacgtgccgcagcgtgggcaccagctacaaatgcctctgtgatccaggttaccatggcctctactgtgaggaggaatataatgagtgcctctccgctccatgcctgaatgcagccacctgcagggacctcgttaatggctatgagtgtgtgtgcctggcagaatacaaaggaacacactgtgaattgtacaaggatccctgcgctaacgtcagctgtctgaacggagccacctgtgacagcgacggcctgaatggcacgtgcatctgtgcacccgggtttacaggtgaagagtgcgacattgacataaatgaatgtgacagtaacccctgccaccatggtgggagctgcctggaccagcccaatggttataactgccactgcccgcatggttgggtgggagcaaactgtgagatccacctccaatggaagtccgggcacatggcggagagcttcaccaacatgccacggcactccctctacatcatcattggagccctctgcgtggncttcatccttatgctgatcatcctgatcgtggggatttgccgcatcagccgcattgaataccaggttcttccaggccagctatgaggagttctacaaactgccgcagcatcgacagcgagttcagcaatgccattgcatccatccggcatgcaagtttggaagaaatcccggccttgcatgtttgatgtgagcccctcgcctatgaagatacgtctgatgacaacctggtccctgattcactaacgatgcactcctccggtcttttcaccagttcatcccccttcacttttccgattacgctcgaattccgctcccccattccgacttgacccttcgccttttgaattacccaggcccgagttggccccaggcccgggccgcgcccactctggcacccggctcggtgacccttctcctggttcccctcttctttac

SEQ ID NO: 433402 - DNA, 680 bp, Homo Sapiens
ggagatttttcaacattgatgccaatactgggaccattaggactacaaaggttctcgacagagaagaaactccatggtacaacatcacagtcactgcttcagaaattgataatcctgatttgctgagccatgtcacagtgggtattagagttctggatgtcaatgacaatccacccgaacttgccagggaatatgatattattgtatgtgaaaattctaagcctggccaggttattcataccatcagtgccactgataaagatgattttgccaatggaccaaggtttaacttctttcttgatgaacgcctgcctgtaaatccaaacttcactctgaaggacaatgaagcagcagcagcaccctcaccatcagggtttgtgcatgcgagagagatgggcgtgtgcggacctgccatgcagaagccttcctgtcctcggctggtttgagtacaggagccttaatcgctattcttctctgtgttctcattctcctggcaattgtggtactttttatcaccctgaggcgcagcaaaaaagagcccttgatcatttcagaagaggatgtacgggagaacgtggtcacctatgatgatgaaggaggcggagaagaggacacagaggcctttgacatccaaccttgaggatccttctgctgctgagagctcagtaccggagggaatc

SEQ ID NO: 433403 - DNA, 1717 bp, Homo Sapiens
gggtttaccggggataggagccaaatagttttcgtgctccaaggtacaagcacaccaacgggggcaccggaaagtggcaaaacatatatagcgcaggcagcaaatttcccccatgctgccatcagtttttgttactggggagaaaaggaacttgggacgggcaaaagggaaatgggaccaaacaagccactgatagagtgcggcaatacctcaggtaatatagacaccaggacaaggctcatgagatctgttaacaacacagagtgtggttctcaaggtttcacccagaaaagtgataaaagaggtcgtgattaccgctcaccagtttccgtctattagggttaccccccctataagtcataaccagccaggatcttgagcctttctgtttaatgtttgcttttgacaaaaataagatccgccacatacttgaaaccgaagatcattgtgttggcttaattcaggtattcctaatagaaccagggaccccccgagcctttattgagccattggcaatataccaccaggcgaccaataaccttttttctctgcgtatatgtccatgtctatgtttttttcttactttcttccaattaaataacccagtttcgatcatgaaaagggcacttgtttctacaggagctgtgtccagcttcctcagttccaagtactgtttccacacttcttccttgtcattgctgaggttgtatatccacttactcaggaagcaaattccacaaggttgcaagaactgaccccctaagttgttctttcagattctatttctccatagagttcagctaactttttaaactcgggtccccagtctccaaggtagtgataatcctggtctgattgtgtcgttgctgaatccagcgagctgatagacccagcttctgatctctgaccctcataggcataagtctgaagagagtcataagggggaacgctagggtctaggtctgcttctgccagtctttgcttaataaattcctgaacatctatgctttccagggtggatgatgtctggtgtctgggagtgagcttcacttcaggtctgatatccctccggtacttgagctcctcagcagcagaaggattcctcaaggctgtgatgtcaaaggcctctgtgtcttcctctccgcctccttcatcatcataggtgaccacgttctcccgtacatcctcttctgaaatgatcaagggctcttttttgctgcgcctcagggtgataaaaagtaccacaattgccaggagaatgagaacacagagaagaatagcgattaaggctcctgtactcaaaccagccgaggacaggaaggcttctgcatggcaggtccgcacacgcccatctctctcgcatgcacaaaccctgatggtgagggtgctgctgctgctgagagaggggattccaccatcagagatcataatgggcagataatacacatcctgaacagttcgactaaatctcctccgccttgtcagaatgctggctgtgttatcttcattgtccttcagagtgaagtttggatttacaggcaggcgttcatcaagaaagaagttaaaccttggtccattggcaaaatcatctttatcagtggcactgatggtatgaataacctggccaggcttagaattttcacatacaataatatcatattcctggcaagttcgggtggattgtcattgacatccagaactctaatatccactcgct

SEQ ID NO: 433404 - DNA, 1607 bp, Homo Sapiens
  misc_feature (61)..(63): n is a, c, g, or t
gcctcgcacgccagctgcgaaaggggatgtcctcaaggcgaaattggggaacgccagggtnnntttttttcagaatgaaatcactttaatagcataacaacattttcagaccaggagtcacagatgaagaaaacattttgtcttccatttgcacaattctggtgaggtgtgtggttgcactggacaatcttacagacacatttttcacattgagaacttaataaatagatacatacaatgtcaaactccacagacaatgagttatgagtgtgattgttttcttattctgcctcctctgggttgggaggttgcttcccgttgggctgatggcggctgggtcctctaggaggggtactcatactcctcggcactgcgacggccaaaatccatccagcccatgtagtcccggtcacttatcctgtggctggggtccaggttctgcaggttcttaacgatggacattcgtccagaaggagctttccgggcctgctggatgtatcttgccagcagggcgcccaggtgcgctcgggactcgccatccgttctctgcgataccctcagctgcctacggggcgcctcctctgcccgctgcagcccggagcccgcgggatctgcgggaggcaccggctgcgtcagggcgccagccgccagtaccgccatcagcacgcacaggcacacgccgctgttcatggcttttggattaggacgcagctggcttggcgtttccaaccggagcagcccggcagctgagccaagttcagggaggaccagcgggcggctgtctcttaaatagccccgccccggcggcgtcggccagtcatgtatttacccaacgctgacgcagactggcagtaacacgtgctcagagggcggccactggggcgacaaccggttgaagtggctcctgtgtcggctctttcgaaggagagaggaggagtcggggtcttcactttcttctcagccgcattaaaagccctcgcagttctccaggtttccgagggccagtgttctgggtcagtgaaagggctctggccacagctggctcttggtgtcctgggcctctcttgacgcagcttccagaactcagctgcgcagcctggaggtgaggacctcacccctagtcagtcacccgtccggtggagggaagggaggcaccgaggctgccgtgcgcctttccctgcacgcggttactctcccggctccggagcgggccgacctggagcccctcagtgcgctctggtcgtctacaccctgaaaccctttgagttcgagtccgcttgctggtgcttgagttcgccgcgtccctgcaaaggcactgccaaccccatttcacagaccgcaaaccgaggcgcgaggaagagcagcgccttgccaaggctccacaacacgcccctcgccctctccgtgcaccgaggccgcccagcctgggacctggagatcaccaggccttgaaccttgggacctcaactcctctccctttctttcccccacccgtcttagatgcaaggagaaagatttagaagcgcttattttaaaatcggaatccgtattccgctctggaattccatctggaatggagggactgggcatcccgagaattccggacc

SEQ ID NO: 433405 - DNA, 896 bp, Homo Sapiens
  misc_feature (205)..(222): n is a, c, g, or t
ggtccggaattcccgggatcgggtgtccgccccctctgggtccgagatgcttccgcccaaccctttccaggtgccgctcccctgcgcattccagagcagtactctccaaggtgggaaacctaggagtttggagtctcctccgggatggagaagctgccgctagcttagttcgctttggggaccggaggggctagaaaggaaactnnnnnnnnnnnnnnnnnntggacactgggcaggactgagcatcagcaaggcgtgattctgaaagggagggggcgtcggccccctaccccggagcgtccgaggcgctggtcttcctacctgtgtcggctctttcgaaggagagaggaggacgtcggggtcttcactttcttctcatccgtcttacaagccctcgcagttctccaggtttccgagggccagtgttctgggtcagtgaaagggctctggccacagctggctcttggtgtcctgggcctctcttgacgcagctgtaaaatgcggatgacaccatctggttttgctcagaggaatccggtttgggaacagggatgtgttttcttcccgggccaagttaccaccacccgcggcgcccactgttccccgttgtcgacaagcggcgccagcgagggtcctggggaacttgaccaccgcacccccgcaagctcgggtagaccacggcatccggccctcgcacctttcctgagggcccacacactcacaccccccaggacagtaccttccagaactcagctgcgcagctggaggtgaggacctcacccctagtcagtcacccgtccggtggagggaacgggaggcaccgaggctgccgtgcgccttttccctgcacgcgggtttactcttcccggctcccggagcgggccgacctgtaccct

SEQ ID NO: 433406 - DNA, 366 bp, Homo Sapiens
  misc_feature (79)..(79): n is a, c, g, or t
  misc_feature (81)..(82): n is a, c, g, or t
  misc_feature (85)..(85): n is a, c, g, or t
  misc_feature (98)..(98): n is a, c, g, or t
  misc_feature (236)..(285): n is a, c, g, or t
aatctgtgaggcctgcaacccccacacacatggttccatgtgagaacagactcggcagtgacatccactccaaatggancnnggntagcccccagatnacatttcaacatgtgtacaactctccagggcacaatacgtttacagctgcctttccttcacatacttttctaattcagaactactcacaattctaagcaaattcccattcacgaagtctgtccataatgcgaccttcnnnnnnnnnnnnnnnnnnnnnnnnnnnnnnnnnnnnnnnnnnnnnnnnnnttttgctggaatgctttcaatttttcacattttacatgatcatcacatttatttcttatattgaaaggcatggtttctgtt

SEQ ID NO: 433407 - DNA, 1836 bp, Homo Sapiens
  misc_feature (1817)..(1817): n is a, c, g, or t
tttgtggagaaatttttattactttgaatgttttagaatgcaggtagaagagacccggagctcaaatagcttaaataagtaggaaatctattggctaatacaactggaaatgcggagatagggcaggctgcagggctggtggctcagggctcagggggccccaactctctgtgctgctctgaggcactgccttcaatctcaggttggcagcacaaagctgctgagagtcccagtgtcacgcccagaccccacaatgccagggaggaagacaggttctatctaaggagagatcttccatccccacctctgcggacttttactcacttctcagggacctgcatgggatctcaggcccattcctgaagcagttgttggcagacagagtggaatagtgtttacagcaggcaggcagccttggagtggaggcacacagctccaagtctatcaggaagaaggggaaatgggagctgcacagacagcaagcagcatgctccatagaccacgaggatctgagtctgaattggtgattattagaacaatgactccatggggtgatacattagaagtgctccagggtccagagatttaaatgtaatgaaagatgaacagaaaaataatgaaaaaaagtatgctgcacaacaatagaaaaacaaaaatctcataatgcaaaagcatcaagtgtttgactctgaggagcgcgttgtatgcccagttactctcgttctccctcagctcttgcttgtgcttctccacctgccattccactttggcctggtactgcctgtagtcttcctggcaggccccagctccagttctttggagcagctgggcatccaagaagaggtcattgctgtggaaggagccctctcgctccctccccagcctctcaatcacagccaggagctctgcctgctgctgcctctgctcctccacagagccccagttgttgaaggcacagtaccttctctcacactcccgcaccaggtctttcaggctgcagttgtccgtgtttgctacatagtcatccagggcctggccccctaagtcctctttgtgggtgaagaggatgaccacatgtctcatggcccctgtcccaaagacctctttcaccttcctgatggccactgtgtcctgagcagtgaaacgccccagctggatcaccagaagcaggacgtggggccccggggcagagagcaggtagcagtccccgatgttcttgtacagctcttgggtatcggcctgtgactcaaagatggagggcgtgtcaaccaccaggactttcctcccgttccatgttcctgttttcacctggcacgtcctggtcactgactgggccctcagcttggactcaaacacgggctggccaaggatgctgttccctgtggcacttttcccgcagcctgttttgcccactaggataatcctcaatgccggtggtgttgcagacaagttatcttctgatctaccttcagccatagttccatatttgcccctctggaatcctcccattctctccagaaacggttgttgtgccctgtcctccagggtggcagtcactgaggctctggccgctggtcctctctcaggaaggtgaagtggcagcagagagagtcctgctctgcgtctgtgtgcggggatgctgttcacagggctgagggaggttgagcagacgcagttaaggaggagccatgtgctggggctgaaagctccatgactcagctgcacaaaaagaaaagtagagattatggagtgtgtcccccacacctctgcggactaggacaccctggtgttggctggaaactgattgggaatcccgnggaattccggaccggtcca

SEQ ID NO: 433408 - DNA, 667 bp, Homo Sapiens
  misc_feature (340)..(340): n is a, c, g, or t
  misc_feature (358)..(370): n is a, c, g, or t
tgtagttagcaatgcagttcatttttattagttataaataaagtacaaaaaatccaccaaaagtgaatctaagcatttacacaattcctaatgtctccgccttttcattgatgcactattgctttaatattcataataaatattcttctagctttctgctataaaatagtctatgtaggcaaaatgttgcacagcacaacaggaacagaacagcaggagggattacaaaaaaggacaatcaacactgagggataatcctttcacttgccgggggaaccaaaattaccccctcgagggctgggtgcagctggctccatggctgagaaattagccgcatccngaggccaggggtggagtnnnnnnnnnnnnnctcaagggtgagggcacaggccagccagggcaaagggcccttttccactctgaccctgcagagcggcataaggcatgcccgtccaggagccctgccaaagatgtggtgtctgccaggcccagcagtgtggtggtcgtgctccctccagtgtggtgggggactccacgggcttgtctccagggaaagcaaggctccaggctggaggcagaaggggaagctaggcaggaagcccagagaggggcacccatcgcccagctggggcagagttgaggctttagggaccatacacagcccagt

SEQ ID NO: 433409 - DNA, 1120 bp, Homo Sapiens
  misc_feature (59)..(69): n is a, c, g, or t
tttcttgcattttttatttcagaattccagttttttaacctaattgcaaacatatcttnnnnnnnnnnngtcagccttaatactgaaactataacatgaattttaaattatggacacataccataaaacacaatgaagaacattttatttaaataaaaagagaatatttcgctaagcaataaacccaacatatttcttttctctccatatctacatccaatggtgatattttataggctagtttctaaacagatgcaaatttttacaaagcgatgaaagccacgttttgctcaggaatactacggttcacataccatataggttgttttacagcagatactagtttgccaagcttcagatggcaaaatgctaagttgtgaattgagtattgtccagctagttgtttctccttgccctagagactctggcagtatgacttttgagagactgccttattgctgccacttctcttctcatagttgaatccgttatgggagaatattcatgtccttaagatgcaagtccgagcaaaaagcctcccacaaatccactggatatcacaatgttctgcttgataaattctgttgcttcttcaattaaattgttgatttcaggtgctgctttgttcgctcgtttcttaatctgtctttttgctttatttacatctttttcaactctcttccagtcaatctgcacatagccactatgactagcaatctgaagaagaagaaagccaccacctactgcagttgctgcaagttttccaactttctggaacagaaatcctgcacaccagccagtaacgccacccattacaatctgggtagctactgagtatttttctaccataggtcccgaactgtggccaaacactcgattccaccactggtgtcttcttgcatactcagttaaatccaacacttcataagagtcgtcatcactttcatagtcttggggaggggggttccgggtcgccatgataccgccagcggccaattctggagtggtccccacccgccctcctctcctggcactttaagggccgctctaggccaggatggaagtctatggtctcttttttcctccttctcctactccaggcgcgtagtcctgtcccgct

SEQ ID NO: 433410 - DNA, 498 bp, Homo Sapiens
  misc_feature (135)..(170): n is a, c, g, or t
tttcacgtgtatctcttatctgtactccaatgcctaggtcaaagtcctgatccccccaatcaggggagagctcaagtctctgaattcccagaacattctagcaatattataccacttatatcttatctgaaaagnnnnnnnnnnnnnnnnnnnnnnnnnnnnnnnnnnnnatcctgttagattgaaactacagaaggcagggctgtatcttgtacatcattgtatctccccggtgactgcaaaagtactctgtaaatgaatgttgattagggggaaaaatgtcagaaagtcatctgaagctgtcattccttactgggaggagcccattttgacaaatgagggtcaccaatttcattccttataaccaatgtacaggttacttttatgcttgtgcatttcaagtttccccttccccacgtttatctgaatgccaacccaaaggtaatgttttgacatttcttaattttgaacattaattttgaaccttattgagcagtt

SEQ ID NO: 433411 - DNA, 1098 bp, Homo Sapiens
gatgcctatgggttaagtcttttaagacttcaaaatatactcaaaatgcttaaattatgacagcaaagacttaaggaaaggtgttgagaacgggagttgatacaaaattaatacgttactttgatagcttagcaaaggcctgcaacagcttttatcaagagtagtgtgacttttgctgaaagcagtcagttttcttcatggaaggaattttatagcaggggcaaaatatatagaaacaatgaaaaggtttttagaaaaattcccttaagatgttaattatagaattatcttgatcatttgcacaagaatttttcaaacacttttcaaatgtgtcaactgagcatcttgtcttagcagagaaacgtgcttaaaaatgcaacttgttttatcttccttggtttttctcaacaatttccaaagaaaattctgggcttcaaatactggaatatgttcatccgactgaggtctgagaaagaagaaaattaaaatttgaaccaacttgcttttttctttccttgatttttctgaacagcttccatggaaacttttgcctcatacagtggaatgggttcatccaactgaggtctgaaaacaccagttgataacttctccatcacatcctttaagatacgtagctggaaggattgttaaggtggcaatgtaaaggagaattaaataaaaccattcaataagcagaggatgccaggcaggccactttctcttgtttcaagttttgcactctcagagactcaacatgttaagttagagaaattctgtaggacgtcaagtttagctctacaacagggaaatgatttgagagttggtggtgtaatagagcctaaatttccaaggacaagtgacaagagcagcaagtcaagcctggtgcttatcctaagtgctcaccactattatctcaatggatgcgaatgaaatagtgtctagttttcatttctacactacatatggcatttttagttaaaaacaattttagcacgtatatatcttactttagatgtacattcgttgaccaggctggttggttaatgggctcaaaatttgtttgcagaagccagtaaactttatgtgtgtatgatatac

SEQ ID NO: 433412 - DNA, 480 bp, Homo Sapiens
agaggcacgttggtgagaagagcatgtgcatgtttggggtagctggggcctactgtcccttcattagggaaggaggcttgcagaagcggatgttttctagaaagaaaaattgtgtgaaggctgaaaaggggcttggagttttgtctttgttgattagaaagaaggaagaagtcagctctgagtgtttcaggaagaagagagcaggtagaaagggaatttagtgatttaacacccaagggtccagccatagcaggttggaaaatcctccaaatttggccacagaagctggctaggaaaaaactgccactcattgggccacacgctgggtccccatcagttctcaatgaatggtcattgatttacttagcagagagaagtcaccagccacaaaccaatctttgagtttgcaggccctgattccagaatatatgcatccagctcccgggttctcagctggttttgcccacttccctttgactg

SEQ ID NO: 433413 - DNA, 904 bp, Homo Sapiens
  misc_feature (742)..(742): n is a, c, g, or t
  misc_feature (868)..(868): n is a, c, g, or t
ggtccggaattcttccgatgggctgcaacaaagggaagcctgcacaaagttaagctgaagaccgaagcaagagctggttcaggtggcagccacagcagcctcagggacctcagcaactatggcctcctgcccagactctgataatagctgggtgcttgctggctccgagagcctgccagtggagacactgggcccggcatccaggatggacccagaatctgagagagccctgcaggcccctcacagcccctccaagacagatgggaaagaattagctgggaccatggatggagaagggacgctcttccagactgaaagccctcagtctggcagcattctaacagaggagactgaggtcaagggcaccctggaaggtgatgtttgtggtgtggagcctcctggcccaggagacacagtagtccagggagacctgcaggagaccaccgtggtgacaggcctgggaccagacacacaggacctggaaggccagagccctccacagagcctgccttcaacccccaaagcagcttggatcagggaggagggccgctgctccagcagtgacgatgacaccgacgtggacatggagggtctgcggagacggcggggccgggagccggcccacctcagcccatggtgcccctggctgtggagaaccaggctgggggtgagggtgcaggcggggagctgggcatctccctcaacatgtgcctccttggggccctggttctgcttggcctgnggggtcctcctcttctcaggtggcctctcagagtctgagactggggccatggaggaagtggagcggcaggtcctcccagaccccgaggtgctggaagctgtggggggacaggcaggatgggctaanggaacagctgcaggccccagtgcctcctgacagtgt

SEQ ID NO: 433414 - DNA, 1648 bp, Homo Sapiens
  misc_feature (58)..(58): n is a, c, g, or t
ttagggatttgcttcaattctattaagcttttcatggaatgcaaacataggaggctanagcagaaataagtatgctttcagtgatcatgggtccagccagcttagtaaacaaaacaggggttaccttcctaaccttctaagttcccatttacctacaagtctgagggttttaatctgccagggtcccttggcaaaagggtcagaagtcattgtcactctcatccaggggttcagatttccggacccttcgattgggcttggttggtgagagagaaatgctctcgtcttccaaatcgtcatcctcgtcatcatcatcttccatgtcaatttcactctcctccgggtcctcctgcttcttggagctggaagtcttgcatttacctaagggggctggtgctgcttccatattgtcatcggggtctccaccttgcatcgtgcccacaatgcgtttgccaggtcttccttgcttgggcatctccatggctgtctgtggcttgggcagccgcctttcttccaactcactgtcggattcatcgtcctcctggatgtctatgtccgagtcatcgttacttccactcttgagcaggcgcttctcttcctccttgagcttgttctgtatcaggcagagagtgtttttagcttcctcaaacctttcttgctccatcctatgatggtcttcaagctgttgttccagataagtcagattttgaaatttctccagataagtgtcatactgcttttgtaattcttcctcagtcttctcatactcatccataaaacatggcctgacactctgcagagtctctagtcgcttccgatttctttccagttctaattttctcttttcgattttggcttctaaattagcttcatcagaggccacattattgagcaggtctttagtcttctgaacctgtgtcaaaatctcttttattgcaattctcatcactttttcagtctcgtttatttccagaggtctggcaatggcttctgttctcatttccctcaactctacttccatgccgagcaagtcatacagagatgctcctttggaggtgatttcagacgcaagctgcctggctgccttcaaatctgcaatctttgagccaagatcaaacttgaacttgttgacatcttcctctactatttcagagccctccatccccttggtcttcatagcattataaaggacagatgtgatcttcagcagctcttttaccgcatacccatctgcttgataaagcttcttagtgttgagttttatatgtgccttggtggccatgaactgggcaattgccttaatgaagaaaactcggtcctgttcagtatccacgtcaggcgggatgtcagtctggggctcatatcttttcacaagccagagaagcacttcagatacaagtccaaaattgggtgtacggaaattttccatagaaatatgtcgagggtatcccagggctctcatcatctctgtgaaattgcggaggtcgcggaaagacataacgctcaggtccccaggagcccagggtcgcaactgctcgcccctcagcgatcacaggcccagcgctcgacgatctctatggcaaccaatggacccttggacggcgcacggtcagggacaaacaaaaagcgaagcgatcccgggaattcc

SEQ ID NO: 433415 - DNA, 1340 bp, Homo Sapiens
ggtcaggccatgttaatggatgagtatgagaagactgaggaagaattacaaaagcagtatgacacttatctggagaaatttcaaaatctgacttatctggaacaacagcttgaagaccatcataggatggagcaagaaaggtttgaggtaacgatggctcggacatagacatccaggaggacgatgaatccgacagtgagttggaagaaaggcggctgcccaagccacagacagccatggagatgctcatgcaaggaagacctggcaaacgcattgtgggcacgatgcaaggtggagactccgatgacaatgaggactcggaggagagtgaaattgacatggaagatgatgatgacgaggatgacgatttggaagacgagagcatttctctctcaccaaccaagcccaatcgaagggtccggaaatctgaacccctggatgagagtgacaatgacttctgacccttttgccaagggaccctggcagattaaaaccctcagacttgtaggtaaatgggaacttagaaggttaggaaggtaacccctgttttgtttactaagctggctggactcatgatcactgaagcaatacttatttctgctttagcctcctatgtttgcattccatgaagcttaaataagaattgaagcaaatccctaagatttatttttttccaccttatttatcttctaaaacttgaggaatgcatgtgttcttagtgattcacatccccgggacaaaaactccagaaagaaataagagctcgacgccacacaagtcttggggtgctatttgttatctatacattttcttctgagactcctgcgatagattgggcgctagacacttcggttcctgtggcacacttgtctcgcgaattcacaatggttaaaatacatgcttgggaaaacaggtggccaccaccatttataatcaattaaactaaaacctcaccttttcctgcacgccgccatttgttacgatatcttattacccccgtggcttgtaaccaaacttccccccctaaatcacttttttccacaaataacagcctacccttattcgacccgagtggcgtttagataaatctcccgccccattttctctttccggttataccccgagaggtacagcttattatacccatccatatgtttattttagccttcataccacaagtttcgcccaccacatagtcccactctcctaacattagtgagcacttcgacagattgatagcaattataaacgcccgttattagacccgcatatataataaccccgatttacacgaagcgtcatgtatgaggcgacatattattaactattactataaatac

SEQ ID NO: 433416 - DNA, 2447 bp, Homo Sapiens
  misc_feature (350)..(367): n is a, c, g, or t
gagattctgacatcttttaatgaaagataaaacaacaatataaacatacacaaatttacagagaagggatcaactttaatacatttggagtaaaaggtgtttcttctttaaatatggtataaaaataaatgcgagaaacattaacggagaatgtacagacaacagacgaagacatgagtttgtttctgactgtgacacattggtgaaatgaaactttctgtgcggaatttattgtttaataaatgtgaagccacatgtatacttattgatatatacttttttcttttacagttcttccagtttttgactgactgaattttcagtgaactgtgtgtctaactgaagctttnnnnnnnnnnnnnnnnnnaagaaggaaaaaaagaaaaggttttacttcacttgaacttgttaaaaaggaagagacacagatccagcatagtagaaggagaaagaaagcagacaacagtttggaatggaggcattgagacggaagagtccattggagatggaatgtacacacaaaaataacaatttaggtcctttgctcatgcaacatcttgttctaatgtcctctgctccaggtcacaacattgagctacaaagtgtgtgcagtgactccagtctgcattcatgctacaagatgatccgtttagtaagactgagcaaggcttgttaacctcttggacgtgagagatttccccctttttctttgcctgtagaagctcctgataggcactggatcttataaaacgtgggtatgaatcacttttcatcagtttgtaaatgtgctcctgagcatcttcaaatgtgtatcgtccaggttccttcacgttctgtgtggttttgtcataactcttggaatccaagttaatagcactgggggctccgggagccagaaactcttgccatatttcctgaactcttgagggtacttctttaataggcctctttttcaggtcctccactgccagccagaatcttaaattttccgagctgaattctgactctagaaatttaaggaactgttctctcccaactgggtctttcaatgcctcgtccatgccaaaaccccatcgttttaccctctgctggctcggttctttgcttgcctcaagttcccagaaagtggtgtcatcggacagccatgggttagaagggtcaggtggcaaaagaaacgggtcgtattctaaatactgttccgtgtaacttagtagactgtcagcgacttttgacatttttaaccgatgtctatctaactgtatttgccaatattttatctgttgttgtaactcatcttctgttggaggtttagtttctggtgtgggtgtgtgggtaggactgtgacttctaatatcattttgtaaaccatagacagacttccgtgttttgtgggggtttctcattctggatgacttcttaatgtccacttcagttgtatttacacatccaggcacgggcctgtgcacgtcccagaacgctctctcttggctgtcaaggatcttcctttcaatcttgtctctcttcttgtccacttttgcttgtgcttctgcttgcatgaaaatgaactcccacttccgggcaaatgctctctgcagcctggccaggctctcagcctcatagtctgcgagctccagtcgtgccttgttttgcattgttctcttgcagaggtaaacggcataatctgtgttttccggctcccaacaatttgatggccaaaaatagggggtttgaaaccggtaaaaggtgccatcatccttgagtgtgaggacatgatctgagattggaaagaagtagccgtgggcagccattaatgttcccaaatggagcgcctccactggatcttctatagttaagttctttatcaaccattgaacaatgtctgaaccagagaagacgctaggtatcttggaaagaaagcttttgaccgtacgaataggaattccatttttttcatcttgcatccgtgctatgacgtcttccatctttctgtacaccagcatgttgggtgattcatcggccaccccgttgctggtctgcccataattattcccctgggccatgtcacccaaaacttggtccacactcaagatacaagaattatcagtgtgccctcctccgccaaggtcacggccccgcggcgtctcccctcccgggcgggctgggtgcaggcggtgtcagctggcggcaagcggagcagcgaggcagggtagcttcatcacactcgcggcggatgcggattccgcgccgccccggctctagctgctcaggcgaccgccaccctcgcctcgccgccgcccgtgcacaggcggctccggcagccgccactcgcgcccgctcccctgggccgcctcgctggctctctccctcctccgcttcttctcccggggactgggaccagccgagcgcgcgcgggagtcgagacgcccggcccgtgcgcgcgacccgct

SEQ ID NO: 433417 - DNA, 563 bp, Homo Sapiens
  misc_feature (31)..(31): n is a, c, g, or t
  misc_feature (49)..(49): n is a, c, g, or t
  misc_feature (134)..(134): n is a, c, g, or t
  misc_feature (145)..(145): n is a, c, g, or t
  misc_feature (160)..(160): n is a, c, g, or t
ccaaaaaaccctgggaaacccaagtaaaaanaccatgggggccccgggnagcccaagaaaactctggcccaataattcccctggaaactccttgaagggtaacttcctttaaaataggccctccttttttccanggtccctcccnactggcccagcccangaaccttaaaattttcccgaagctgaattcctgaactcctaggaaattttaaggaaactgttcctcctccccaactgggtctttccaatgccctcgtcccatgcccaaaaccccatcgttttaccctctgctggctcggttctttgcttgcctcaagttcccagaaagtggtgtcatcggacagccatgggttagaagggtcaggtggcaaaagaaacgggtcgtattctaaatactgttccgtgtaacttagtagactgtcagcgacttttgacatttttaaccgatgtctatctaactgtatttgccaatattttatctgttgttgtaactcatcttctgttggaggtttagtttctggtgtgggtgtgtgggtaggactgtgacttctaatatcattttg

SEQ ID NO: 433418 - DNA, 1062 bp, Homo Sapiens
  misc_feature (98)..(98): n is a, c, g, or t
aattcccagagcctcttagtccattgcccacggggtttcccttgggaaaaccgggttagggcccaaggttccgctttccctacgggggccccggggcngcccaaaggaaaggttttggaaaagttttcggaggggcccgagggggcccggaccagggttaatatctacatggggggtggttttcgggggaataatagctttattatcataatatttcataatctaaaaacttctttaattctggaacagaatattccaacttctgtacaactgactggccctgcagaatactggaaaacaatgtctaagcaacttgaaccttgcagataagaacctgtaacctagtttgggaaaaagggaaaaagcaagaaaagcggttcaaaggaagatttcttccctacaagacaaataaaattaaatctactctccatttcaaccttgaacatagtttcccagaaactttggtgatttcttcaaaaaagcaaccgccttaactctaaggtcaacggcccatgtggacaaagaaaatatttaaaaataagacacaaacaggacatggtacttagctcaggccatggtatgttaagtggagtatgcttctgagtaagccatctcccatgttttgacactaaatttatgtctctaaggaggcacaacatacataacacatttctttatatggggtcaaaatttagtgggaacgtaaaaaaacattttaatataataaacaaatctcaaaataattcgtcttgtgaaatgtagagtaggatgacattatggtactttctgaagatcacggggtaccactgtcaaagagagttgccatgccctctatgttagatgaaaatccaaaatgtcagttactttaaataaaacagaaacaagttgtcattgcacacacattacaggacaaagagcatgcaatacaactaacaagtcatgtttttagtatgtaaaaggctaaggtgcaatcatggtataagcatcaataataaataactttagagggggaagttaattctccaaataaataataattataacattacaatttataccgct

SEQ ID NO: 433419 - DNA, 1432 bp, Homo Sapiens
tataacctatgacttcccacaatgaaattatatacttgaaagttgtcgcctcaaagtactgaaagaacaaaggaagagatcacctgtacctgttaaaagtcaaaatgacaaaaacgtttctcatttaagacagttcacttaaagaccaaataaccaccaccatttccccaaaaactggaaagaaatgatcttgagctttagaaggggaaacaataaatcttagcatatacaaagatctgatgcttttgccagtgattaacctatcattgctgaatacctacagctaaaaatccagaaaacaaaaacaagtcagaagtcagagtaggcttgctggacacttcccattctggatttatagcgggacatggctgaacaggtaggacacggattccccattgtgtgtcttcggattgcttcggccaagatcatggaaatgtcaatgacctgaatcttggtgcagtgtttcattttgtcctcttgcggaattgtgtttgtgacgacaacagcctcaaaggcggcattatttattctggaaatagctggtccagagaagatcccatgggtaaggatagcatacactttggtggctccagctgacagcagcttgtccgcagcatggcagatggtgccgcaagtgtcagccatgtcatccacgaggatggccacacggtccttcacgtcgcccaccaggaccatccggtccacttcattcgccttcttcctctctttgtggatcaaagcaaattccacattcaacctgtctgcaattgatgtaacccttttggctccccctgcgtcaggtgaaacaatgatacagttcttccactcggcaatgttttcccgaatccactgcaggactgcgggctccgcatacaaattatccacaggaatatcaaagaatccctgtatctgagaagcatgcaggtccatggtgatgatgtgatccgccccagccaccgacagcatattggccacaagttttgcagaaattggggcacgactcttgtcctttttatcttgtcgggcgtatgggaaacacgggatcacggcagttactctggatgatgacgcaatcttgcaggcattgatcatgatgaggagttccatcaggttgtcgttaatttccccgcagccgctctggatgatgtagacatcttcccctctcacgctttcaccaatctccacgctggtctcctggttgctgaacttcttcgtgaccaccttgcccagctccaggcccaggcggtcggccacgcgctgggataggtcctgatgcgagctgccgctgaacagcacgatgttgggcatggtggggcgcggaactccgaggggcgcgcggcggcggaggaggtggcggaggcaacagcgacagcgacgcgggaggctgctgctgcgggagcgggaaagcgcggcggctagatgtagggaaggg

SEQ ID NO: 433420 - DNA, 1727 bp, Homo Sapiens
  misc_feature (185)..(194): n is a, c, g, or t
  misc_feature (319)..(429): n is a, c, g, or t
tccgcgcgcgcgcgccagtcaccgcatgcgacacccgctgcccgccagcaggcccgccgccggacggaccccccagaagagatccgccgggcgcggccgccgccctctggcgctcgtctcttcccgcactcccggtggtgctcgccccccccggggcgtgtttttttgtgccgggcgaccgccannnnnnnnnntccgcgcccccgtgggtcttgtttgggtgcgccggcgtggtcgccggcggcgcctccgcctccgggcggccccgccggccgcccacgaaggcgcggggagaagttttccggcgccgcgcagcggnnnnnnnnnnnnnnnnnnnnnnnnnnnnnnnnnnnnnnnnnnnnnnnnnnnnnnnnnnnnnnnnnnnnnnnnnnnnnnnnnnnnnnnnnnnnnnnnnnnnnnnnnnnnnnngggctcccggacctgagcgctcgcgccgccccccctctctccagttttcatcttgttgctttattcagtttgctccgagggcaaaatcaacagtagtagagatcacaaacattattttgattggcctcacaagcctcatcagtaaaacctgaaaaaacagaaaatgttacacaagttgcaaagaaagcactcctggcgttcactgacatgatagcaaatggaaagaatataaatgcaacaggtgttaacatttagaacagtacttgtaaacctgctcatttctagacaagtccgggactctcgctgcgaacccttcatctatcactgctgatttcctttgacatgaaatatgactttatgaaaatcttcctaaacctcactctggctgcacctgagtggttcctattcctacggcgctggcatatgctgtcaggatttccactatctgtttcgtttctagggtcattcgggcttccttcagccagtcctgtgccactcgtctggattcccccttcagctgattgacaaactttgctgctagctccagatcaccatgctcaatgcaataggaagcatatgacagtaatttaaatgtgttaatatccctcagggcaaagctttgggggcggcttcagttgctgaggtgggaataggagcagggactgtaggtaggagaggaagtactggtacaagctatttctggtttcatcaatcattgctacccttcgggccagtttttgaacagcatagaaacgggctctaagggtctcttcactgtacaccccacgggtcagggactctggagggatagctgcggttaaagcttgggtgaattcattatcagaacagttggctttgatggcctcaaccgcactacccagcgggatagtaggtgtttctgcagatgaggtcttcatgctgtactttaatgcctccactgaaagccagagttggtgggcttttctggcttcctcttcagcaactgcatggctctgaacagcctgttcgattcctctgagtctggcataggcagtatttatatccagagtaaagttgtcaacttgctcttgactgagacgacgaaattgtaattcttgttcagagagtttctcagacaggttctgctcaaattcagacttcaattcctgttcttgtaccctaaggacatctcgcaagtgatcagtgtgggcagctgcctgtcggcgaagctgggttctcatttcattttccatggcatctctgacttcttctatctttctgtcctgttcagcctgtatttcacttctgtgatgttctcc

SEQ ID NO: 433421 - DNA, 1817 bp, Homo Sapiens
tggaggtttcttcactggctgtaccttttaaatgcctcccaactgaaaaacccaggagttggtggggctttttctggcttcctctttcagcaactgcatggctctgaacagcctgttcgattcctctgagtctggcataggcagtatttatatccagagtaaagttgtcaacttgctcttgactgagacgacgaaattgtaattcttgttcagagagtttctcagacaggttctgctcaaattcagacttcaattcctgttcttgtaccctaaggacatctcgcaagtgatcagtgtgggcagctgcctgtcggcgaagctgggttcctcatttcattttcccatggcatctctgacttcttctatctttctgtcctgttcagcctgtatttcacttctgtgatgttctaatgcttttgctactgcagagtcaaatgcccgcttttcttccagcttttgtttctccaaggctaacgtgatgtgctgcttttcggtggccttctgttctgccagctctctgttcagctgatcaatacgacgatgtgcatgagcaatgagggagttcagatcatcagtagagagcttgtcagctaagtctgaaacactcattcctttccacccaggaaggacttctggagtaatactgtccagctctcgtttaaagtcatcccgagcttggaccaccagctcatgatactgagatacaaccttagcctcagactgagctgcttggacctttttgaccacattatccagatcaactatcatgttgtgaagtttaccctctgcagcagttatatgaggcttggccccagcaacctcttttttctttgcattttcaatcacacttttcatcttctctaactcttctttggctttgagaagggcatcggcagcttcatctactgcctttctgcgttccttcaatgcaccctccactgtgcgccactgagcagatttcttctcgcctgcaatctcagaattgtccatggcggctttcaatatgttggagtgtgcattgacagcctggaccgcagcattctgagctgcaatagcctgcagagtgacacttgcagtttgcctcagagcatcttctaagctcttggctagagactcaattttaacttgttcttgtttttcctgttgtgcaaggcgagctgcaacttcttcaggtggtcgctcccttatagaagatgaggatgcttcttctgaaagtgcaggtgtgggttttccttcaccaatttcagggtgatcagtttttaaagattcctcaggctgaactgcaggggctgggaccgacagggtatcacctgctgttgctgaagctggagtatctcccttttgtttttggagttgtgaggcaggctgtttagattctttcattacttctgatacactagagatttttagtggacccgactgaatcgatttctttggcaatggaacattataagctgcaggaccaagaaccatctcgaagagtttgtctgagtaaggtatggttttctctacactttcccggaaatgggaatcccatttggcatataggatagtgccaccaatacctccaccaacaaacaaaaggccagctccagcaattttgccagtagtcaacccagagctgcctgaagtagagtatctgcggcatggtcgcaatggacggaggacaaacttcccacagagacaactctgggcggcggcggtcacacccgataactgacaggcccgcagcatctcggtcaagcggacggcgctgctggtggactcgagctgccgcggcggcgcgagttaagtggaggcgtgcttgcgtgtgtcac

SEQ ID NO: 433422 - DNA, 910 bp, Homo Sapiens
gcctccactgtgcgccactgagcagagttcttctcgcctgcaatctcagaattgtccatggcggctgttccatatgttggagtgtgcattgacagcctggaccgcagcattctgagctgccatagcctgcagagtgacacttgcagtttgcctcagagcatcttctaagctcttggctagagactcaatgttaacttgttcttgtttttccttgttgttcaaggcgagctgcaaagttcttcaggtggtcgctcccttatagaagatgaggatgcttcttctgaaagtgcaggtgtgggttttccttcaccaatttcagggtgatcagtttttaaagattcctcaggctgaactgcaggggctgggaccgacagggtatcacctgctgcagaaataatttgagccgcttctgtaggtgctgttgctgaagctggagtatctcccttttgtttttggagttgtgaggcaggctgtttagattctttcattacttctgatacactagagatttttagtggacccgactgaatcgatttctttggcaatggaacattataagctgcaggaccaagaaccatctcgaagagtttgtctgagtaaggtatggttttctctacactttcccggaaatgggaatcccatttggcatataggatagtgccaccaatacctccaccaacaaacaaaaggccagctccagcaattttgccagtagtcaacccagagctgcctgaagtagagtatctgcggcatggtcgcaatggacggaggacaaacttcccacagagacaactctgggcggcggcggtcacacccgataactgacaggcccgcagcatctcggtcaagcggacggcgctgctggtggactcgagctgccgcggcggcgcgagttaagtggagccccgct

SEQ ID NO: 433423 - DNA, 1103 bp, Homo Sapiens
ccaaaactttttgggtgggcttaaggtctccacaggtttcccccccatttgtctccaaatggccaaattggggaaagccattatggacccaggtaaatttttaaaaatggtggttttataatccttccagggggccagggaggcttctgggggggcggcctttcagtttgcctgagggtggggaaataggaaggcaggggacctgttaggtagggagaggaaagttcctggtacaaagctattttctggttttcatccaatcccttggttacccctttggggcccagttttttgaccagccataggaaccggggctctaaggggtctttttcacctgtccacccccacggggttccagggtctctggagggatagctgcggttaaagcttgggtgaattcattatcagaacagttggctttgatggcctcaaccgcactacccagcgggatagtaggtgtttctgcagatgaggtcttcatgctgtactttaatgcctccactgaaagccagagttggtgggcttttctggcttcctcttcagcaactgcatggctctgaacagcctgttcgattcctctgagtctggcataggcagtatttatatccagagtaaagttgtcaacttgctcttgactgagacgacgaaattgtaattcttgttcagagagtttctcagacaggttctgctcaaattcagacttcaattcctgttcttgtaccctaaggacatctcgcaagtgatcagtgtgggcagctgcctgtcggcgaagctgggttctcatttcattttccatggcatctctgacttcttctatctttctgtcctgttcagcctgtatttcacttctgtgatgttctaatgcttttgctactgcagagtcaaatgcccgcttttcttccagcttttgtttctccaaggctaacgtgatgtgctgcttttcggtggccttctgttctgccagctctctgttcagctgatcaatacgacgatgtgcatgagcaatgagggagttcagatcatcagtagagagcttgtcagctaagtctgaaacactcattcctttccaccccaggaaggcctcgtgccgaattcgccaccca

SEQ ID NO: 433424 - DNA, 807 bp, Homo Sapiens
cgatttggtcctcacctctgtcttaatgaaagcaatcttcattgcatttagatggacttttggcctcagaagattactctgtgactgaattaacattttttattgtgtttttgtcatatttgtttctttgtttagggctaaatgaaaagatcccagaggtcatcagaaaacagcaggtagttcatggaaaaggttcctttgtactaattgaagttacagaaggctgaccaaagcatgtggctgcttctgtccttgagctcttggccatggttagagttggctttggtttgcagctgtagcctttgactgtgtttgcaggtagacaaagctttatcacaaggaggtaaagagtacagttgtaagatctatgcagatatgcaaatgtttctatggtgcttgcacagataatgttagcttaggattgcactttacatcttaacactaacagcacagactggaagcctaaggttttagatggttgcaacagtctaattactgtgttttgtaataactaacttatgtcatttacagttggtggcaccaacataaaaaactaatgttctgttgtttaaaattcagctagatacaagcagtgacactaatttctgatactactcctgtgcaaattaaaaacatagcaacaagttgaacttgaccagcaattgtttctaacattacaactactgaatgctggaaaattcacattaatgaaactaacactatttttggcagtatatgaggcgcatttgctttctacaggacatgtatcctcatattcagtcatttcatgaacccttaagagccaca

SEQ ID NO: 433425 - DNA, 653 bp, Homo Sapiens
  misc_feature (300)..(308): n is a, c, g, or t
aattctagatgtgttatctctctgggaagtatagtttatagaaacacaaaatatttgatttcctgtgtcggctcagctacaagaaacacaactgttatcttgacagaggaagagaggaatccaagaaaaatgcatgtggagaattaaacccaagtgtttcgaattcagcacaccccctctctgtcctcagactgcagtccacacgtgcaacttttctgtttgcacgtgttttattaatcagcatactccttttctgtttggatttatatccctctaatgttctcctttaatttcacatgnnnnnnnnntctgtatttttttcagttagtgggagagcagcagaaatagatagatgtgatgttgccactggactgatgaaggtggctgtcttggaactgggagacaggtcctcagaggtgcactcaggcaacaggacagccatctctctgcttcagccctctgcctacaggaattagggaaatggagctctggctttgaagttatttgtgagtttagcaaccttccagttacctgcagagttctgggtgcacagccacccctcataagagccctgttctctgaagaccattcatatgagaacaaaggtctaggatactgcattagttaccagaaaactaggggaatttagaggg

SEQ ID NO: 433426 - DNA, 1306 bp, Homo Sapiens
agcctgagagtttttctgttttgcccactcagaatgtgtctttattgaagaatttgtaagaaaaaaggatgtaccctctgtaaaaagaggagatgttgcctccaacagcagggaggaatgagacctgggtggcttcccagaagtcagtgtttccggcatgactggctcctttcctggcaaacactacaatgtgtcacactacagctagcaattcctccccactccctcccagcccttcctccctccaccccacaaccctatagccatttgaggcaaatggctttctaaaggcccagggatagatgtgccaggcttgcctcttaatggggtcaaagtgagttttgctttggaaaaattcaaacaggaatgtaaaatggtttgagctctttctagtccaaccaaaggtgattacatccagcccctctcaagggaatgggggcagagactgtcgctcctgaatgtgcacacatggggtaaatggactatatcgcagtctgctctttatttgaatggagaatggaaacaggttataagaatatataacatccatgttcaagagtcactgagttctggagggcagagggagcacagaggcctgctgattccaacagtgctcctgatggctatcctcgagttgtagggatggttattcctctccagctggaagattgtcctcaatccgcctgatgaatctcatccggatttctgtcacaccgtctcctttcagggtgtcctggacaaacttggcctccacagccatctggaccatctccaaagctccccgcaacaccccacacaagagattggaataaataagggatgagtggttatcaggaagttccacaaagtccaccaaggggttattttccaaaatgagggagaattcatcaccagctgggctccaattagtaatgcttggagtgatgcccaagtacatcttgaacgccaccttggcaatgacatccgcagtttcccgaaagtcatggcacctcccaacatttgaccgagccaagaaatcttcaatcagccggactccaatgttaaagcccattttgtccagctgtttattcacatcttcatcattttcatagtccttacatagctgggtgaccagggcaccataggtcagggtgaagagctcagagctcattttcttgctctcggtgccacggttcgcctgcctcgacatggtgccggccgccccgccccactcgcctagccacgggttagctcggcgacccctgcagacgccggagcctaagccgctgcccctcagcccacaagaccgaccggcactgactcactg

SEQ ID NO: 433427 - DNA, 2042 bp, Homo Sapiens
  misc_feature (321)..(341): n is a, c, g, or t
  misc_feature (1447)..(1496): n is a, c, g, or t
cactaatgattctgtttattgagttatatatgtatatattccgtgttcgcttgtacaggaggatttacatggctgtataaagatggctaggggcgccgcgctcttctggggcgctcacggtgacaggctggggttaaaactggctgccccaggagaagcggaggcctggaattaaatacgtttcggcgcactggatttaaataagtttcctgaatatacaaaggtgggggccacgagtttgctgccagtcatcgaggaaacatttagctttccaaaaatatgctggtttcgataaatagattttagcctctctgctatagnnnnnnnnnnnnnnnnnnnnnagaaataagtttatatgtgtgatctgttttcaggtggtacagggagggaaggaagggcaaggcagtagctctcagctctgcactgtcctagtcaggtcctttgcggagggggcagcagggcccacgctgtcgtggagtttgcgcacatgtttctttaagtcaaaggtttctgcaaaaccctttgccgcaagtggcgcacgtgaaaggcttcttgtcgttgtgggtgtgcatatggaaggttaggttgtagacctggtggaaggccttgttgcagatggtacatttgtactgcttctcgccgctgtgggtcagcttgtggttcttgtagttccctttttggtgaaagcctttgccgcaaaattcgcagacgaagggcttgtagcccgcgtggatgcggatatgcgtgttgagcgtggagctgcggttgaacgctttgcccgcactggttgcatttatgtggcttttcctgggtgtgggataattttgtgcctgcagagcgtgctggcctggcgaaagcctttgccgcagactttgcacacgaacggtctggctccggtgtggaccggcatgtggcgggtgagattatagtgagcgttaaacaccttgccgcacacctcgcaggtgaagtttttgggcttgccatctgcggagcctcctggcagcttgctgtggcccttgacgcctccgcgctcggcagtcagggccgagttttccttcagtacctgctccagcggcgccggcaagcgctccttatggggatagggagccgggtgggggaacttgtccgcagccaggccggccagcttggcgttctccagcagaaagagcttggggtgagcagccagggcggcgggggcctgcgcattgaggaggccagacgggaagaggtggccgctgaggagctcagacggcgggtacgcggtcgagtccaggtagttgaagtagtagagcgagccgctggccggcagccccacagcctggttgatgactgcggcttgatgaccctgcccgcgggcagcgcggacggcgccaggcccagctcggccttgcagcacacgccacagttggttttgcacaagccgtggcgccgcacactggggcccccnnnnnnnnnnnnnnnnnnnnnnnnnnnnnnnnnnnnnnnnnnnnnnnnnngaggctgcttttccagagctccgagtaactgagcagtgtctttgacggcacctcgtagcctaggggctggagggggatcatacagggcagcggcgagcagaggttgagcagtttcttgccctggctgccgtccgcctctagcgctccaggccggggctcaaagggcgcacggggctccgacgtcttggccatgatgcgctcgatggaaaaggccagtgtcttggaagtggccggcgacgctccggcgcgcgggcaggccgggggcaccatggtctccagggaagccgagcttgccatggcgcgcggagctgagccgagccaggctgggccagggcgcagcctctctcctctaagtctctttcccccaccaccaaggagatgcgttccgagccatgcagcgtgtctcttctgtcacattttgatcggctaacatcttcccctccgcgtgagatcactgtcttttacattcagctgacatcacatgaagtcacttgaagtggaatgacatgggcggcggcgcggctcccgtagcggcccctgtatccc

SEQ ID NO: 433428 - DNA, 1401 bp, Homo Sapiens
  misc_feature (903)..(980): n is a, c, g, or t
cggagtttagcaggagatggccatgaacccggagccggacttgcaactgcccgagtcacccacgtgtactccatcctgggtgacagagtgggactccttctgataaaacagaaagctgtaatataattggatacaatgttgccaatagattcttccttcaacagcctggtggtctccacggaaagggatcagatggtcaggcagttccggttgctgagggatacatcagcaaagcagagacaaaataccctgttcttaggatgtttcaaattctagtgggtgggtgcacctgggtgtggataattttgtgcctgcagagcgtgctggccctggcgaaagcctttgccgcagactttgcacacgaacggtctggctccggtgtggaccggcatgtggcgggtgagattacagtgagcgttaaacaccttgccgcacacctcgcaggtgaagtttttgggcttgccatctgcggagcctcctggcagcttgctgtggcccttgacgcctccgcgctcggcagtcagggccgagttttccttcagtacctgctccagcggcgccggcaagcgctccttatggggatagggagccgggtgggggaacttgtccgcagccaggccggccagcttggcgttctccagcagaaagagcttggggtgagcagccagggcggcgggggcctgcgcattgaggaggccagacgggaagaggtggccgctgaggagctcagacggcgggtacgcggtcgagtccaggtagttgaagtagtagagcgagccgctggccggcagccccacagcctggttgatgacctgcggcttgatgaccctgcccgcgggcagcgcggacggcgccaggcccagctcggccttgcagcacacgccacagttggttttgcacaannnnnnnnnnnnnnnnnnnnnnnnnnnnnnnnnnnnnnnnnnnnnnnnnnnnnnnnnnnnnnnnnnnnnnnnnnnnnngaggctgcttttccagagctccgagtaactgagcagtgtctttgacggcacctcgtagcctaggggctggagggggatcatacagggcagcggcgagcagaggttgagcagtttcttgccctggctgccgtccgcctctagcgctccaggccggggctcaaagggcgcacggggctccgacgtcttggccatgatgcgctcgatggaaaaggccagtgtcttggaagtggccggcgacgctccggcgcgcgggcaggccgggggcaccatggtctccagggaagccgagcttgccatggcgcgcggagctgagccgagccaggctgggccagggcgcagcctctctcctctaagtctctttcccccaccaccaaggagatgctaccgagccatgcagcgttctcattgcagaatccggacc

SEQ ID NO: 433429 - DNA, 1252 bp, Homo Sapiens
  misc_feature (887)..(1184): n is a, c, g, or t
tgatgcactggctgtacctttattatttttacctcgttcactaacagctccgtgacgcaaggttaccacacacagttagatagtgtctgcattgcacatctaaggctatacagcaaaagaatcagaattagtacaaatacaagaactatatttacagtctgtatactcaagctccaaacatcagataatatttacaaaataaaacatgaaaatgaaaatccaaaattaatgtacattgttgctaatgtgctcaactccttcacgggggagagatcagtttgcaaagtcttggttcaaaaaggccacttatgcattatgggttttgttgtcatgtgtgaggatggtgacaagagacttgaaatctcaacagacaggtactttagagccacaaagtctaagacgatgccttaaatacaagaaggctgagggactcctcaagtgagctgatgccagaataggcagaatgaaaaaaaatgaactcgaagacatgaagaacaacacacaacagccacggtttggcaagagaccaacctcagctcagactttccatctgagcacagccgtttggctatgagctttttactgaattttatagcaactctgatttcttcctttaaatgattggaggctttttaaagatcttatggggctcaaatactaacttcataaatggccttttgaataacagcagcaaataatctctcagctgatatttcaatttactaaggaagcacaaattaaaacattcctgctacacagtcatggtctggccacacactggggtgaatcactggccctggtgaacaactgtagtgcacacaagttagagtcctatgtaaacacatccagcaaaccttctgggagcagcagcatcatgaatcttatcnnnnnnnnnnnnnnnnnnnnnnnnnnnnnnnnnnnnnnnnnnnnnnnnnnnnnnnnnnnnnnnnnnnnnnnnnnnnnnnnnnnnnnnnnnnnnnnnnnnnnnnnnnnnnnnnnnnnnnnnnnnnnnnnnnnnnnnnnnnnnnnnnnnnnnnnnnnnnnnnnnnnnnnnnnnnnnnnnnnnnnnnnnnnnnnnnnnnnnnnnnnnnnnnnnnnnnnnnnnnnnnnnnnnnnnnnnnnnnnnnnnnnnnnnnnnnnnnnnnnnnnnnnnnnnnnnnnnnnnnnnnnnnnnnnnnnnnnnncaagaggcaggttaacaatcacattttaaaagggaccgaaaggaaaactgaaagacccaagtcaaaca

SEQ ID NO: 433430 - DNA, 1939 bp, Homo Sapiens
  misc_feature (18)..(18): n is a, c, g, or t
  misc_feature (394)..(394): n is a, c, g, or t
  misc_feature (396)..(397): n is a, c, g, or t
accccactgttggtgggntggcgctcccaggcataccaagggggccaaaaaaaagtttggagtcttttaaagacagcccatgtggagcatctgtgaaaaccagtgtttcccccgttttaagcctcccccaggagacctctgaacagctatagccctatccacatgttggtatgacctgaaattcttctagctaaggtttcaagaaccaacatgtgcaagcagcattttttctagaaatctcaaaaaaggagaaaataaacctggcccttacgtagagaaatacatctatttctgaaagtaatctgtggggattgttttacagggacaccgattacaagggcagaatagcaaaatacactattactagtgatgcagggtgcttttaaatgtcacntnnccagctaaatgatatggcaaaataacccaatcttcttttcccaactatcagtaagggtggttgttattttccctgaaaagagcaaaggtatatttattgatgatacacactctaaacccagatcctatagaaatttcttctattgcttttacttcactttcatgttatttgcacaaaaatagtggttatcctccgtattttttcctcgcttgtactactcaattatgaaacgaattattaacgatagcttctgaatttggtacatggcatcataggtgaacaaaaaaagccacagttcagagctgatggtcagtccgtctctagtccagcttctataaaaggaaggcgggtttaggtttcaactctctatagttgaatctccatgagtaagaaggagatgccttccttattttcccagactgcccaagattattctctcatcaacacaaggtagaggtttgccacctctacatgaattcacaactccactctgtgactgggtggcacatcagttcgctaagaagttaaactttacaaaatgacgtcctcttcctcttgccggtatgggcctctggcagtgtcactgatcaataggacatggcacaaagtaactacctggagaactaaaactaagcataatcttggcctgaactactacggtaaagatagtatcttttatttctgtttatgtaaacttatcaacaaattattaaagcagaaactctatcacttcttggaactaaagatttacatctagctataacaatagaaacctacctatcctggagttaactttctcagattactgctcctgacttttgctgttcttttccttttgcaagggggtggccaccaatggatggaagaggcaaggagatcttactttataggaatttctccaagttacagcgagcaactggccaaatcatattcaactacaggtgttgaggagagagagtacctgacttcagaccacctgggaagcacaatgcttagttaacaagaatatctggattaagcagtgccgaagtggccgcacaccgagtcaggccaaggaagctcttctgtcattgccgcccaactctgttccactttgcatgcagacatatcaaagactgtgatgaagatcatggtggacaaggaagaatgaaaaactttgtgatgggatctgggcctctacattagagaaagaacctaacaaaccccagttctttggattcgtaaggtgaggctgaggagggcttactggagttggagacagggagagctgtgtttctgggctcaaagccaagaaacggttaagaagaggggcttgcatcagtcatatagattaaaaagagcaaggcatgataattactaaatttatagtttcatgttttaacacagaagagtcagagggaaaactgacaatttaaaacggggcatgggatgagaaaaagtctaggagttactgagatgcctggtacttatctacaaaacttccatcactagacccttttgacctacgagaatagcagtttctatggttcaacctaatacacc

SEQ ID NO: 433431 - DNA, 542 bp, Homo Sapiens
  misc_feature (229)..(229): n is a, c, g, or t
  misc_feature (444)..(444): n is a, c, g, or t
  misc_feature (489)..(489): n is a, c, g, or t
  misc_feature (507)..(507): n is a, c, g, or t
  misc_feature (527)..(527): n is a, c, g, or t
ggtcaaaagggtctagtgatggaagttttgtagataagtaccaggcatctcagtaactcctagactttttctcatcccatgccccgttttaaattgtcagttttccctctgactcttctgtgttaaaacatgaaactataaatttagtaattatcatgccttgctctttttaatctatatgactgatgcaagcccctcttcttaaccgtttcttggctttgagcccagnaaacacagctctccctgtctccaactccagtaaggccctcctcagcctcaccttacggaatccaaaggaactgggggtttgttagggttctttctctaaatgtaggagggcccagatcccatcacaaagttttttcattcttccttgtccaccatggatctttccatcacagtctttggatatggtctggccatggcaaagtggggacagggttnggggcgggcaatggaccaggaggaggtttccttgggcctgactcnggtgtgcgggccactttnggcactggtttaattccagntattcttgtttaatt

SEQ ID NO: 433432 - DNA, 2958 bp, Homo Sapiens
  misc_feature (1182)..(1182): n is a, c, g, or t
ttttataggaaaaacttttttggttaaaaaaaagaataaaggtatgaaagggtttgaggcctgagagcagtgtggtaagcccagcatggaagaagccccctatacttctctaaagcctgggtgcctgcttgaggagggaaggcaggaacccaggggcaggggaggggatctcttcagcaattatgatgaccactgtaacctcctggcccagggttcccaggatactgagtaaggggcccaaagactataaacccagctgtgagaatgcctgtttgctgggcctcatcaaggcctccaggacctcagtgcaagggaagaaggaaaaaagagaaaaaaggtgacagaaagagaaagatagaactggtggttggggttctgggcagcccatgcttcagcccctgcaagctgatggtaccgagcatgagactgtgaggtacgggccccatcacatggtgctaacataatctgcgaaggcctgggatgagtcccatgagtcgctaaccacatggcaggtagcccggagccgccggatggcttccctggctgtgactgcatcctggtccagccagttttggaagaggcgcaggtgaccaaaggctccacggccccagcgctccagccgcttggcgaactccagaagcccatctggcttgatgcagttggaactgatgtccagctgacagagagaggaggatgaatcctctgagaaaacatctgccaaggccagcaggccagcattccccaggcggttccctggcagccggaggcccttcagtgtggagttgcccttcatagcagcaaccatctcaggcagaaattgggctgggcgcttctcaaacagacggcagaaggagaaggtaatctcttgcagagtcagattctgtagcaaaaagagcacctcgctctgacagtcagcgagattcatgtcatggaagctcagtcttttcagggctaggttgtactctttgagtgtttgcaaaacaagccccaaatcctggggagaggcaaaggtggcactatccagggacagctgctgcagagaacccgaggccttcagaacggagcacagcagtggggctggctgggctccccgtggaaatcccatctccaactgctccaggcagttttctggtatctcctcatcgcctattatgtggctagggggccctgcaattccctggncacaccagggttgtccccgctggcttgggtggtcaacacgaatagagaggacccgtaaccaggggcagtgctcgcacgatagcacgtgtcagctccaggatgggcagtggtgagaacaggtcactgagatgcagggcacggaggcgacatccagcctggcctgacagggcccgcaggctgtctagcaggcggaagatgttagagcccaggccattgtaggagagtgtgaggctctccagtgacacccaggagctcagcaggtggcatagtgtcagggctgcctctgtggagagtggaactgtgaatagctccaaggtggagatgctgcggaatctttgtgaagcttccagtgctggaagccccaggcagctgggatctgatccatccaaagctccacaagccacttccccaatctccatctcttcgccatcctccttctcgccagccacaataaaaacgaagtcatacagggtcttcagactctgcaccaggcccctgacgggtgggagcacctttcttcccctgcagctcgcttgaaacgctttaggggcttaggctgtggggctgagctagctggtgcccgtttgtatgaggatgtagaagaagaggcagaggaggtggctgctggagcagaaggtgaccgcttggtgccaggagcctcatgggaggtggctggggggtgcagctccctcttaaggtctgttccgcctgctgtcaggctctcctgtgtgctccggcgtgttacccgagtggcaggtgcagctctgggcatctgcttggcttcactcttacgccggctggccatcagggctgcagcacatcgctcagcagcatcccggcgggccgacgtgagcccaataagagggacccttcatctcgggatgggcccggcctcgggaggcctctccacagaggcggcagggtggccaccaggccctggttgccagaagccagcactcatggtgagaataaggatgaaaagggctgactcaggcacaggccaggagtatagcgacacttgactgacagccccatggtgaatgagctgatgcaacagctgccgaagtgactgctgagcagccacatcagagaacagcaggtggcggaacttgagagtgtgcagggagctggccagggtctccagaaccctgcggttgggctcagccaccagctcggttgcaccctgcagcatgttacagatggtgagctgtcggacatggcgggagctgtgcagaagaggtgagaaccgctgatcacaaagacgcctgtcagaagacacatcaatggtcccacgtagaacatgggaaaaaaaggcctccataaacttggctcgccaacatgtcacactttccaaactggaaggccttgtcttcatcagttcatcccagagtcggcgccagatggcctgagttgagaggcctttcttgagggcagtttcctcaatcctctccaagtaatatatattgagcagaggtaggatgctttgaagtattgggcctgggagggcccacaccccgctctccagaacccccatatgggcgctcaccgcccgcccgcacagctcgaacagggcggggggagcgttggggcccgaggccgagctcttcgctggcgccgcctcccgggacgtggcctccatggtcgttgccgccgctacctcacagaaccagcaactccgggcgcgccaggcctcgggcgccgccatctcctcgtgccgattcccacccagcctcgctaccttagaaccgttagatactgccctctttataaccgggg

SEQ ID NO: 433433 - DNA, 438 bp, Homo Sapiens
  misc_feature (187)..(203): n is a, c, g, or t
cagaaattacctatgagtcacttttgtgagccaatgacacggcctcactgcagccattccaagaagtatctttgctcacggtaaatgcaaagtaaacaaaataccacactgcatatttgaaacaaacaaatgtgacgttgcctatactggcctcatgtgcagaaggaattttggtcagacaatgacnnnnnnnnnnnnnnnnncagattgtgaaatggaattaaaagcacaattctttgtatctgggaacgtttcactggcaacactaactgtatgatacagacgttacctggaacagtagttatgtttctcttcctatctgtgttacttttactaatgtttctccttctctcaagtttctatccttccttgcctagctaccattgcttctcccctcattcttagatctctggaaaggttcctgctgcttcctgattt

SEQ ID NO: 433434 - DNA, 1560 bp, Homo Sapiens
  misc_feature (931)..(931): n is a, c, g, or t
  misc_feature (1023)..(1033): n is a, c, g, or t
aaccggacgcgtcgcgacgtgtatctgtcattattcttcctccatctatctgattccattccttccacacccagctaaagttagaggagatacatatagaatctattttagattattgttcactatttgcatcaaattaagatacacaaatggccatggatgttgccttagccttaaacattactaatagtttcacatcacctcactgcacgcatcgaaggatctgatttgaatttgtaaaggcaattcttttgagagcaggattctccaggctaaatcaaaggcagctaatcctgtccctgaaggagcagctaggggaacctgaggcttgttcttgaagtgggcaagctggccaaaatattggaacacacagaaccaaaccaggtgtgttctacacctgcatgagtgaaggatttccacgtagacacctaggaagagcccgcatgccctagactcactccagaggaaggattgatttgcaaccagaaagggagctgaaaaccacggagctccatggctcttcattcaaaagggaaaataatgattccacgttgctttttagagttcaaatcaacatctttctggataaatctattttttaacaatctttttattatttgtaaaagatataaaaacaactcccatcagtagcaatacaaggttatacattttaaccagattttctcaggccttttttggatacctttagtagttaactctcttttgtcaaaccctcttgtatataaccatcgcacaacatacagaaccctggggaatacagccaagggcactgctcactgtggcccgtgtattcattcccacaggctgcactgaaataacctggtaaacaacaccctcctccattttgcgtctatttcttctaattgtgcttctttggggataggaagagagaacataactactgttccanggtaacgtctgtatcatacagttagtgttgccagtgaaacgttcccagatacaaagaattgtgcttttaattccatttcacaatctgtttgnnnnnnnnnnnggtcattgtctgaccaaaattccttctgcacatgaggccagtataggcaacgtcacatttgtttgtttcaaatatgcagtgtggtattttgtttactttgcatttaccgtgagcaaagatacttcttggaatggctgcagtgaggccgtgtcattggctcacaaaagtgactcataggtaatttctgtgtttgcattccactgctctgctccctaaggtccttgactttctccccaggaattcacttaaaaagggactgagcattgtgtcaacctgttgcagtgtttttcatatatgtgttcactctaaaaatgcaaataaagactgcttccttagagggtgctcatacaaaattccagtctttgagtctttttccttttcagttttttctagtcactggatgtacccacacttcctgttacgtatgtcagtagaacattagaatgcctcacttcgctcagttcatcactgcaaaggtggcatgctcctcccagccttcctgcccaggttaacagccccatgctgct

SEQ ID NO: 433435 - DNA, 512 bp, Homo Sapiens
gtcagggtgcttttatatataagagcagcagccgcctttgtaaagtgtgatctatgagaattggagacacttctttactgttcaccaaagagatgggtaatctgtgctgatctccttatttttacctttttacagggtttctaggacattgtcattattcttcctccatctatctgattccattccttccacacccagctaaagttagaggagatacatatagaatctattttagattattgttaactatttgcatcaaattaagatacacaaatggccatggatgttgccttagccttaaacattactaatagtttcacatcacctcactgcacgcatcgaaggatctgatttgaatttgtaaaggcaattcttttgagagcaggattctccaggctagatcaaaggcagctaatcctgtccctgaaggagcagctaggggaacctgaggcttgttcttgaagtggcaagctggccaaaatattggacacgcagacgcgcctaatggtccg

SEQ ID NO: 433436 - DNA, 919 bp, Homo Sapiens
  misc_feature (704)..(704): n is a, c, g, or t
  misc_feature (728)..(728): n is a, c, g, or t
  misc_feature (772)..(772): n is a, c, g, or t
  misc_feature (905)..(905): n is a, c, g, or t
tgtggctcgaagaagaaagaaatttttgtcttggggcccaaatacagtcctcttgagtttttacgaagggtaccattaggcttctcagctccaccagatggcctcccccaagtcccccacatggcatactgtgctctggaaaacctgtatcttctgatgggaagggaactggaatatctagaggaggtacctccaggaaatgtgctaggaataggaggccttcaagattttgtgctgaaatctgcaacactgtgtatcctgccctcctgcccaccatttataccactcaacttcgaagccactcctattgtgagagttgctgttgaaccaaaacatccaagtgaaatgcctcagctcgtaaaaggaatgaaactgttaaaccaggctgatccctgtgtccagattttaattcaggaaacgggagagcacgttttagtcacagcaggagaagtccaccttcagcgatgcctggatgacttaaaagaaaggtttgcaaagattcatatcagtgtatctgaacctattattccattcagagaaacaatcacaaaacccccaaaagttgacatggtcaatgaagaaataggcaaacagcaaaaagttgcagtcatacaccaaatgaaagaagatcaaagcaaaatccctgaaggaatccaagttgactctgacgggctaatcaccataacaactcccaataaacttgnccacgctcagtgttcgagccatgnccccttccagaagaagtcacccagattctggaagaaaatagtgnatttgattcgtttctatggagcagttgacatcctcttttgaatgagggtgaaaatactcacatgattcatcagaagacccaagagaaaattttgggattcaaagggaaaactggagcaacaccttaccagggnaagaagatgggaag

SEQ ID NO: 433437 - DNA, 899 bp, Homo Sapiens
  misc_feature (405)..(415): n is a, c, g, or t
gtaaacaatattcgttgaccctaattttagaatcgtcccttgacacatgggtctactaaagatctatgccctttcagagtaatctttcgtgaaaaggccactaaaattctgtggtttggtcacctttgtttaaagtgggcaacgaaatgaacctgtacttacgccatatcttaaaactatagccctggggcccaggcattggtggttcacgccctatatcccagcccttaatgtttaggacaacgcagaaaactggctccagatacacttgggtgacttggccaacatatgaatgttaaccactgatgtgacagatcagacttcaatttctcttagactgaactagaatggctccgaagacgaaagtcaggtcaggaccagggagaaaaactgggcaaatacgannnnnnnnnnngccatttccaacagaggtttgaagattagaaccaggatttgggaagcctcagttcaggagtccaccgaggtgtgtgtgtgttgacaggtggtggtgatgccgagggcgtgttgacaagttttccccgcccttgacctttagcctagatattaattctaccaactggggcaaccccagagggaggaagccagggtcccccaacaggctgacagcgcgtgacctttgccctagatagcctgagaaagctgatgagagaaggggcgagaggtgcctacagcccccaggaccggccttgtcccttttgccctaactcctccacttatccccaccgcccgtttcctctcacccaggcaggacagcttggctagcggcaccagcatgttcaaagtcaccaggactctcggtcggacacaacaggaggactgtccgctgctcgcggcgggcgctggacctctaggccgcggtgggcgccatcacctccgct

SEQ ID NO: 433438 - DNA, 966 bp, Homo Sapiens
  misc_feature (22)..(22): n is a, c, g, or t
  misc_feature (35)..(35): n is a, c, g, or t
  misc_feature (67)..(67): n is a, c, g, or t
  misc_feature (118)..(118): n is a, c, g, or t
aaacatactcccaaaccgaaanaaagaccttaaanccccagaataaaccaaaggcccttttaatgcntaaaggccttcccaattccaaagatgttgaaagtccccaactctccctcantaatccaaattaattgaagaagaatacaagggggaaacatccattgaatggttaattggcattgccaaggtgactgtgactctggtgcacattcttagtaaacacatactcgtttcctgacagtcttctcaagccgtcagtcatcaggcctccaacaagatcactggtgtggggatcttcatctttggtacccagctgaggggagtacagttctgtggtccgtaaaatctctagaactctgtccaagcttccgctactgtgactgggctgttttcttgggctgcattgattatatttataacctttgtgatgggagcctcgatggtcatggagtggatcctcgccatggacggatagcgacgattctgcaggcttggtgcatcactgcctcgagatgatatcgatttcacgtcaatggactctttcctcctgttcttatatctgaatgaatgaggctctgtctgagaattgtctcctgaatcacgatgaatcttgtgaatctgcttattattgtcagtggtacaacacagtttcttgagcgagacaaaatgcctaattttccctccttggccaatcactggggtgatcttcacgtgctgttggatgctgtccccggatttccgtctggcatagtaaaccccctgccactcctgaatcacgtggtcatcgcttgttatttctatggcttcatgacagtgatctaatgctgtaaacactgaattacaggcccgtaatttgaactgggagcgaacttccccatgttctatttgaatcagttcattatagcaagcaattatgctgctattctccataaatctcctgttgaagcctgcgtggagaagaggaag

SEQ ID NO: 433439 - DNA, 926 bp, Homo Sapiens
ctggttttcaagggaagtctttccaagcaggttgcattcacagtcgctgccgtcaatctcagctgccaatggccttgttgatggctgttcacaactgtagttcacatggttcaaagtgttttgtcatctctgttgccaaaaccatgtcaataatagcctggcgcagcgttcgataatggcttcctggtctatattcttgaaaatgttgcattttggtgtccttgaccgtgagctggaaggccagggcggtgtggtgactctccagaacagcagtgtcattgtagagcacagcaagctcactgcctgcattgcagaggaaagagttggtccttcccgggtgatccacgtcatggactgtggcagcaatgagggctgccacctcatccaactgatcgaggcttccctttactctttcctttccaagaaagaaagcggtggcgtgcaggacgtcggcagcatgggtggagttgtggtaggcattggaagagtggtagttggcttcgatcacttggaaccaggcccgaagagtggtttcagaacagtttaaaaactcacatactccaaaccgagagaagacctttaagcccagataaaccaatggccttttatgcgtaatggcttccaattcaaagatgttgaagtcccaactctcctcattatcaagtaattgagagatacaagggggaacatcattgatggttattggcattgcaaggtgactgtgactctggtgcacattcttagtaaacacatactcgtttcctgacagtcttctcaagccgtcagtcatcaggcctccaacaagatcactggtgtggggatcttcatctttggcgacagcgtgggtcgacgatatcccgaaactgccgaccgtaccacctgcaaataacgcggtttctatagtgttcacccgttaatattgtcta

SEQ ID NO: 433440 - DNA, 965 bp, Homo Sapiens
  misc_feature (157)..(512): n is a, c, g, or t
caaggcagacggataccttcattctgacacgtcgcggctttcccggcaagtctaaaccgggctccttaaggttcgatttaggctttaggcactgaacccaaaaaacttattaggtgaatgttcacgtaggggccatccccctatagacggcgccctnnnnnnnnnnnnnnnnnnnnnnnnnnnnnnnnnnnnnnnnnnnnnnnnnnnnnnnnnnnnnnnnnnnnnnnnnnnnnnnnnnnnnnnnnnnnnnnnnnnnnnnnnnnnnnnnnnnnnnnnnnnnnnnnnnnnnnnnnnnnnnnnnnnnnnnnnnnnnnnnnnnnnnnnnnnnnnnnnnnnnnnnnnnnnnnnnnnnnnnnnnnnnnnnnnnnnnnnnnnnnnnnnnnnnnnnnnnnnnnnnnnnnnnnnnnnnnnnnnnnnnnnnnnnnnnnnnnnnnnnnnnnnnnnnnnnnnnnnnnnnnnnnnnnnnnnnnnnnnnnnnnnnnnnnnnnnnnnnnnnnnnnnnnnnnnnnnnnggtatggaatgtatgatctttattaatttttaatccatcaatctaaaatcacacatactagatcaaacagaagtaccacagtatgctttattttgcaggtattaattggttctctaaatcgatacatccaaaactttagttagcagcaagcatcagttcttccaaagcagcttaggtgaaaaacaattgtttacattcaccagttcaaagtcgtactgtctgatccactgttgtattgacataaaattgaactcagtaggcaaagctaattgaacactcagctcatagattttgagcttcctttatcttattggagttgaagcagtttttaaccctctgttaatattctctattttaattctcaaagaattaaacacacatattttctaattaattaagatagagccatgataactattgaggaattagtgatattagtctcatacccaaaag

SEQ ID NO: 433441 - DNA, 449 bp, Homo Sapiens
  misc_feature (300)..(300): n is a, c, g, or t
  misc_feature (363)..(363): n is a, c, g, or t
  misc_feature (384)..(384): n is a, c, g, or t
  misc_feature (402)..(402): n is a, c, g, or t
  misc_feature (409)..(409): n is a, c, g, or t
  misc_feature (422)..(422): n is a, c, g, or t
  misc_feature (428)..(428): n is a, c, g, or t
ttttttttatggaatgtatgatctttattaatttttaatccatcaatctaaaatcacacatactagatcaaacagaagtaccacagtatgctttattttgcaggtattaattggttctctaaatcgatacatccaaaactttagttagcagcaagcatcagttcttccaaagcagcttaggtgaaaaacaattgtttacattcaccagttcaaagtcgtactgtctgatccactgttgtattgacataaaattggaactcagtagggcaaagctaattggaacactcaggcttcataggnttttgaggctttcctttatcttattggggttgaaggcagtttttaaccctctgttaatattcnctattttaatttctcaaaggnttaaacacacatatttgnccaattnattaaggtagggncctggnaaaccttggaggggttagggg

SEQ ID NO: 433442 - DNA, 998 bp, Homo Sapiens
  misc_feature (631)..(631): n is a, c, g, or t
  misc_feature (647)..(647): n is a, c, g, or t
  misc_feature (677)..(677): n is a, c, g, or t
  misc_feature (723)..(723): n is a, c, g, or t
  misc_feature (732)..(732): n is a, c, g, or t
  misc_feature (751)..(751): n is a, c, g, or t
  misc_feature (754)..(754): n is a, c, g, or t
  misc_feature (758)..(758): n is a, c, g, or t
  misc_feature (796)..(796): n is a, c, g, or t
  misc_feature (801)..(801): n is a, c, g, or t
  misc_feature (860)..(860): n is a, c, g, or t
  misc_feature (877)..(877): n is a, c, g, or t
  misc_feature (882)..(882): n is a, c, g, or t
  misc_feature (898)..(898): n is a, c, g, or t
  misc_feature (901)..(901): n is a, c, g, or t
  misc_feature (905)..(905): n is a, c, g, or t
  misc_feature (909)..(909): n is a, c, g, or t
  misc_feature (921)..(921): n is a, c, g, or t
  misc_feature (930)..(930): n is a, c, g, or t
  misc_feature (954)..(954): n is a, c, g, or t
  misc_feature (970)..(970): n is a, c, g, or t
  misc_feature (992)..(992): n is a, c, g, or t
  misc_feature (994)..(994): n is a, c, g, or t
tttttgccattttcagtcactttattatcaggaactttatttttaaactaattacaggtacccaaagttcaaaaaattaaaacaaaccaaaatgagaacctcaacagccatagttgtttatttgctgcttattcttgtggccaaagaggaattctactaaatgtcaaatgaaggatgtctctaaactagaagacaagttaaagggccttgttgtcatttctgtcattgtggtggtggttgttggctttcttggagaaatatatctgtgactttctcaactaatgggcctctggccttaattatcaaagtatcccttttcctagaggaaaagactagtaataaatacatacggtatattatctaatatcccttactgttatcccagaaaatcttattaaatattaaagtgaactactgattagaatagtgcctgtcaatggtgactcaataatgatttcttgaatgataaatacctttaacttcatctctacttgttgctctcccatctcagaaacttatggaccttcattaagccccactagttactagtttggtgaccgactagggggctagcaagaaagctaactcataaggctatgacataagcactgaggcatcctaaagccttaantgggcaaaaataagtnacctaagttacacatataaaaatatcatantacaaaagcacatagctcatggaaaatacgggggaaaaaagagagnagagttcancacccaataacacactccntantgcnacattctttttgcactttcttcattagccaacaagttngaganaagactatttttttagctttgtttcacattttcccttgatcattctacatttcttaatnggctgcattggatcgcntcttnggtcacacaaggaacngantgangccnaacagcacgcangctttcaancaattccagaagaatggggactcnagtaggaagagtaatnttgatgactgtcttcatctgananacct

SEQ ID NO: 433443 - DNA, 749 bp, Homo Sapiens
  misc_feature (417)..(463): n is a, c, g, or t
  misc_feature (690)..(690): n is a, c, g, or t
  misc_feature (701)..(701): n is a, c, g, or t
tttccattttcagtcactttattatcaggaactttatttttaaactaattacaggtacccaaagttcaaaaaattaaaacaaaccaaaatgagaacctcaacagccatagttgtttatttgctgcttattcttgtggccaaagaggaattctactaaatgtcaaatgaaggatgtctctaaactagaagacaagttaaagggccttgttgtcatttctgtcattgtggtggtggttgttggctttcttggagaaatatatctgtgactttctcaactaatgggcctctggccttaattatcaaagtatcccttttcctagaggaaaagactagtaataaatacatacggtatattatctaatatcccttactgttatcccagaaaatcttattaaatattaaagtgaactactgatnnnnnnnnnnnnnnnnnnnnnnnnnnnnnnnnnnnnnnnnnnnnnnntaaatacctttaacttcatctctacttgttgctctcccatctcagaaacttatgaccttcattaagccccactagttactagtttggtgaccgactagggggctaggcagaaagctaactcataaggctatgacataagcactgaggcatcctaaagccttatctggggcaccataagttacctagttacctatacaaactctactccccagccttgctcttggaanatccgggaaanaagagagagagtcagccccataacacacttctttgccacttcttttgc
